United States Patent Application Publication US 2005/0118625 A1 - sequence listing, part 4

SEQ ID NO: 4984 - DNA, 1749 bp, Homo sapiens
agggtgtgagatggcagacaggtttgcaggaaaccctcagaaagggggctggaggatttagccactctgtcctccccttccggcagtccagggcctcctcccgagcacagcggcgctatggactctccaggatacaactgcttcgtggacaaagacaagatggacgctgccatccaggacctggggcccaaggagctgagctgcactgaactgcaggaactgaagcagctggcgcgccagggctactgggcccaaagccacgccctgcggggaaaggtgtaccagcgcctgatccgggacattccctgccgcacggtcacgcctgacgccagcgtgtacagcgacatcgtgggcaagatcgtgggcaagcacagcagcagctgcctgccgctgcccgagttcgtggacaacacgcaggtgcccagctactgcctgaatgcacgcggcgagggggccgtgcgcaagatcctcctgtgcctggccaaccagttccccgacatctccttctgccccgccctgccggccgtggtggccctgctgctgcactacagcatcgacgaggccgagtgcttcgagaaggcctgccgcatcctggcctgcaatgaccccggcaggaggctgatcgaccagagcttcctggcctttgagtcgtcctgcatgacgtttggggacctggtgaacaagtactgccaggcggcccacaagctgatggtggccgtgtcggaggatgtcctgcaggtctatgcggactggcagcgctggctgtttggggagctgcccctctgctacttcgcccgggtctttgacgtcttcctggtggagggctacaaggtgctgtaccgcgtggcgctggccatcctcaagttcttccacaaggtgagggccgggcagccgctggagtcggacagcgtgaagcaggacatccgcacgttcgtcagagacatcgcgaagacggtgtcccctgagaagctgctggagaaagcgttcgccatccgcctcttctcccgcaaggagatccagctcctgcagatggccaatgagaaagccctgaagcagaagggcatcaccgtgaagcagaagagccctgggcgctgcctatggcacagccaagagcggtaccggcattgcggccatgtctgtcatgcggccggagcagatcatgaagtccatcatcccagtggtcatggctggcatcatcgccatctacggcctggtggtggcagtcctcatcgccaactccctgaatgacgacatcagcctctacaagagcttcctccagctgggcgccggcctgagcgtgggcctgagcggcctggcagccggctttgccatcggcatcgtgggggacgctggcgtgcggggcaccgcccagcagccccgactattcgtgggcatgatcctgattctcatcttcgccgaggtgctcggcctctacggtctcatcgtcgccctcatcctctccacaaagtagaccctctccgagcccaccagccacagaatattatgtaaagaccacccctcctcattccagaacgaacagcctgacacatacgcacggggccgccgcccccagtagttggtcttgtacatgcgcagtgtcctagtgcccatcgtctgtttccccggccttgcccccgcccgccccgtgccgtggacatctgggcccactcatcgcccctccaggcccccggcgccccaccccctagagtgctctgtgtatgcggatgatttagaattgtcatttctctt

SEQ ID NO: 4985 - DNA, 3388 bp, Homo sapiens
cgccgaggtatcacctggcaccacccgcaccctcaccccgtgtctccatgccctgcctctgctccccacacccctcacctcaagctgtcccctcacctcacgcttggctgtctcctgatcctcagcctctcccaggtacccctggtcctgctgccctcaccccatccccagactctgtaggagagtgcccgagggcggagggccagccatgctgaccttccttccctccccccaggagctgttcacccgctcactggctgagagcgagctccgtagtgccccgtatgagttccccgaggagagccccattgaacagctggaggagcggcggcagcggctggagcggcagatcagccaggatgtcaagctggagccagacatcctgcttcgggccaagcaagatttcctgaagacggacagtgactcggacctacagctctacaaggaacagggtgaggggcagggtgaccggagcctgcgggagcgtgatgtgctggaacgggagtttcagcgggtcaccatctctggggaggagaagtgtggggtgccgttcacagacctgctggatgcagccaagagtgtggtgcgggcgctcttcatccgggagaagtacatggccctgtccctgcagagcttctgccccaccacccgccgctacctgcagcagctggctgaaaagcctctggagacccggacctatgaacagggccccgacacccctgtgtctgctgatgccccggtgcacccccctgcgctggagcagcacccgtatgagcactgtgagccaagcaccatgcctggggacctgggcttgggtctgcgcatggtgcggggtgtggtgcacgtctacacccgcagggaacccgacgagcattgctcagaggtggagctgccataccctgacctgcaggaatttgtggctgacgtcaatgtgctgatggccctgattatcaatggccccataaagtcattctgctaccgccggctgcagtacctgagctccaagttccagatgcatgtgctactcaatgagatgaaggagctggccgcccagaagaaagtgccacaccgagatttctacaacatccgcaaggtggacacccacatccatgcctcgtcctgcatgaaccagaagcatctgctgcgcttcatcaagcgggcaatgaagcggcacctggaggagatcgtgcacgtggagcagggccgtgaacagacgctgcgggaggtctttgagagcatgaatctcacggcctacgacctgagtgtggacacgctggatgtgcatgcggacaggaacactttccatcgctttgacaagtttaatgccaaatacaaccctattggggagtccgtcctccgagagatcttcatcaagacggacaacagggtatctgggaagtactttgctcacatcatcaaggaggtgatgtcagacctggaggagagcaaataccagaatgcagagctgcggctctccatttacgggcgctcgagggatgagtgggacaagctggcgcgctgggccgtcatgcaccgcgtgcactcccccaacgtgcgctggctggtgcaggtgccccgcctctttgatgtgtaccgtaccaagggccagctggccaacttccaggagatgctggagaacatcttcctgccactgttcgaggccactgtgcaccctgccagccacccggaactgcatctcttcttagagcacgtggatggttttgacagcgtggatgatgagtccaagcctgaaaaccatgtcttcaacctggagagccccctgcctgaggcgtgggtggaggaggacaacccaccctatgcctactacctgtactacacctttgccaacatggccatgttgaaccacctgcgcaggcagaggggcttccacacgtttgtgctgaggccacactgtggggaggctgggcccatccaccacctggtgtcagccttcatgctggctgagaacatttcccacgggctccttctgcgcaaggcccccgtcctgcagtacctgtactacctggcccagatcggcatcgccatgtctccgctcagcaacaacagcctcttcctcagctatcaccggaatccgctaccggagtacctgtcccgcggcctcatggtctccctgtccactgatgatcccttgcagttccacttcaccaaggagccgctgatggaggagtacagcatcgccacccaggtgtggaagctcagctcctgcgatatgtgtgagctggcccgcaacagcgtgctcatgagcggcttctcgcacaaggtaaagagccactggctgggacccaactataccaaggaaggccctgaggggaatgacatccgccggaccaatgtgccagacatccgcgtgggctaccgctacgagaccctgtgccaggagctggcgctcatcacgcaggcagtccagagtgagatgctggagaccattccagaggaggcgggtatcaccatgagcccagggcctcaatgagcctggtccatgaagtgcccaccacatcgcagcacttttaccacgttttgtcctcagaccccgcccatgctgtgtggtctctgcatgtctccattcttctctgtctctgtcttgcatgtctcctaccatgtcactgtccctgggccacccagtgaaagcaaagcctgggaatctgctcattgttgtttgggctcaggtattgagcctgatggcccaggtattgagggcctcccctgctggtggccctgtcctgggatcctcagaagcctgactgtcctatgggcttctccagtgtccacaggggcttgggatggttgtggggggctggcccctctagcctttccggtccttcctgggcaaatctaagccttggccagggccgaagtttaggcccctgtcttgttcatgtagccgaggggcaggcgggggacctctacacctctgctgtgggcacggggctgctgagggtctgtggaactccagcagctctgcactgggtagagctgggcctagagctcagtcacaggcctgggcttcctggcctgagtgggtagacgcaggcggcagaggtgctggaccacatctccgccaagtcactgcccagcagccttctccgtcctgtccccagcccacgtgctccttgggtgtcagcttcctgtgcctctgtgggagagggcagctgccttgtgttatgtctggggccacagttgctgcaaagtcctggatctgccactcaaccccgggagtggtgttcccagtgtggctcccagagctttgaccagattgtgatcccagctggcccctatgttgtgttctggactgaggcctttgctgtgaactgcagtgtttcatacgaaccatctttcctagtgcatgagaaataaagattatttaagt

SEQ ID NO: 4986 - DNA, 2803 bp, Homo sapiens
gactccggagcccgagcccggggcgggtggacgcggactcgaacgcagttgcttcgggacccaggaccccctcgggcccgacccgccaggaaagactgaggccgcggcctgccccgcccggctccctgcgccgccgccgcctcccgggacagaagatgtgctccagggtccctctgctgctgccgctgctcctgctactggccctggggcctggggtgcagggctgcccatccggctgccagtgcagccagccacagacagtcttctgcactgcccgccaggggaccacggtgccccgagacgtgccacccgacacggtggggctgtacgtctttgagaacggcatcaccatgctcgacgcaggcagctttgccggcctgccgggcctgcagctcctggacctgtcacagaaccagatcgccagcctgcccagcggggtcttccagccactcgccaacctcagcaacctggacctgacagccaacaggctgcatgaaatcaccaatgagaccttccgtggcctgcggcgcctcgagcgcctctacctgggcaagaaccgcatccgccacatccagcctggtgccttcgacacgctcgaccgcctcctggagctcaagctgcaggacaacgagctgcgggcactgcccccgctgcgcctgccccgcctgctgctgctggacctcagccacaacagcctcctggccctggagcccggcatcctggacactgccaacgtggaggcgctgcggctggctggtctggggctgcagcagctggacgaggggctcttcagccgcttgcgcaacctccacgacctggatgtgtccgacaaccagctggagcgagtgccacctgtgatccgaggcctccggggcctgacgcgcctgcggctggccggcaacacccgcattgcccagctgcggcccgaggacctggccggcctggctgccctgcaggagctggatgtgagcaacctaagcctgcaggccctgcctggcgacctctcgggcctcttcccccgcctgcggctgctggcagctgcccgcaaccccttcaactgcgtgtgccccctgagctggtttggcccctgggtgcgcgagagccacgtcacactggccagccctgaggagacgcgctgccacttcccgcccaagaacgctggccggctgctcctggagcttgactacgccgactttggctgcccagccaccaccaccacagccacagtgcccaccacgaggcccgtggtgcgggagcccacagccttgtcttctagcttggctcctacctggcttagccccacagagccggccactgaggcccccagcccgccctccactgccccaccgactgtagggcctgtcccccagccccaggactgcccaccgtccacctgcctcaatgggggcacatgccacctggggacacggcaccacctggcgtgcttgtgccccgaaggcttcacgggcctgtactgtgagagccagatggggcaggggacacggcccagccctacaccagtcacgccgaggccaccacggtccctgaccctgggcatcgagccggtgagccccacctccctgcgcgtggggctgcagcgctacctccaggggagctccgtgcagctcaggagcctccgtctcacctatcgcaacctatcgggccctgataagcggctggtgacgctgcgactgcctgcctcgctcgctgagtacacggtcacccagctgcggcccaacgccacttactccgtctgtgtcatgcctttggggcccgggcgggtgccggagggcgaggaggcctgcggggaggcccatacacccccagccgtccactccaaccacgccccagtcacccaggcccgcgagggcaacctgccgctcctcattgcgcccgccctggccgcggtgctcctggccgcgctggctgcggtgggggcagcctactgtgtgcggcgggggcgggccatggcagcagcggctcaggacaaagggcaggtggggccaggggctgggcccctggaactggagggagtgaaggtccccttggagccaggcccgaaggcaacagagggcggtggagaggccctgcccagcgggtctgagtgtgaggtgccactcatgggcttcccagggcctggcctccagtcacccctccacgcaaagccctacatctaagccagagagagacagggcagctggggccgggctctcagccagtgagatggccagccccctcctgctgccacaccacgtaagttctcagtcccaacctcggggatgtgtgcagacagggctgtgtgaccacagctgggccctgttccctctggacctcggtctcctcatctgtgagatgctgtggcccagctgacgagccctaacgtccccagaaccgagtgcctatgaggacagtgtccgccctgccctccgcaacgtgcagtccctgggcacggcgggccctgccatgtgctggtaacgcatgcctgggccctgctgggctctcccactccaggcggaccctgggggccagtgaaggaagctcccggaaagagcagagggagagcgggtaggcggctgtgtgactctagtcttggccccaggaagcgaaggaacaaaagaaactggaaaggaagatgctttaggaacatgttttgcttttttaaaatatatatatatttataagagatcctttcccatttattctgggaagatgtttttcaaactcagagacaaggactttggtttttgtaagacaaacgatgatatgaaggccttttgtaagaaaaaataaaagatgaagtgtg

SEQ ID NO: 4987 - DNA, 4770 bp, Homo sapiens
aacttttattaaaataaaaacaaaagtgccaaatgcacaatggtgtagtggtagcactatgagataccagaagtaacctgaatgcccagcaacatgggtcatgaagcactctgtgatcattcagaatgaagaggtagacctatgcttatgatcattcagagaagcccacaatatattgctaatttttttaaaggtaaattttaaaatattgatatgctactctgcaaatgctgagtctctggttttctagatgtgctgaggaagtgaagagccctggagaagaggccagtaaagctaaagtccactacaatgttgagttcacctttgacacagatgctcgggtagccatcaccatctattaccaggccacggaagagttccagaatggtattgccagctacattcccaaagacaacagcctccagtcggagactgtgcagtacaagcgaggagtgtgtcagcagttctgcctgccctcccacaccgtggatccctccgagtgggccgaagaggagcttggctttgatttagaccgagaagtttaccctctagtggtacatgccgtggtggatgaaggagacgagtattttggccattgccatgtactgctgggtacttttgagaagcacacagatggaactttctgtgtcaagcccctcaaacagaaacaagtagtagacggggtcagctacctccttcaggagatctatggaattgaaaacaagtacaacacacaagattctaaggtggctgaagacgaagtgagtgataacagtgccgagtgtgtggtgtgtctctcggatgtccgggacaccttgattctgccctgtcgccacctctgcctctgtaacacctgtgcagacacgctgcgctaccaggccaacaactgccccatctgccgactgcccttccgggcactgcttcagatccgagccatgaggaaaaaattgggccccttgtccccaaccagctttaaccccatcatctcatcccagacatctgactctgaagagcatccatcctcagagaatattccaccaggctatgaagtagtatctcttctggaggccctcaacgggcccctcaccccgtccccagcagttcctccacttcacgtgcttggagatggccacctctcaggaatgctcccttcatatggcagtgatggccacctgccccccgtcaggacgatctcgcctcttgaccgcctgtctgacagcagcagtcagggactcaaactcaaaaagagtctctccaaatccacttcccaaaactcttccgtgctgcatgaagaggaagatgagcattcctgcagcgagtcggagacacagctctctcagagaccgtcggttcagcatctcggagaggaatgtggtgtgactccagaaagtgagaatctcaccctgtcgtcatctggagctattgaccagtcgtcttgcacagggacgcctctgtcatccactatttcctccccagaaggccctgccagcagcagcttggcccagtctgtcatgtccatggcatcctcccagatcagcactgacaccgtctcctccatgtctggctcctacatcgcccctggcactgaagaggagggagaggctctctcttccccccagcctgccagcagggccccctcagaagaaggagaggggctgccagcggagtctccagacagcaactttgctggcctcccagctggagagcaggatgcagagggaaatgatgttatagaggaagaggatggatcacccacgcaggaaggccagaggacgtgcgcatttctaggtatggagtgtgacaataacaatgactttgacatcgcaagcgtgaaagcactggacaataagctgtgctctgaggtctgcttacctggtgcctggcaggctgatgacaatgccgtcagtcggaatgcccagcgccggcgcttgtcatccagcagcctggaggactctgagacgaggccctgtgtgtggggccctttggctgtctgagccccagcctctgcacttgggctcccctcctgccctgcattccatccatcctcactcagctgctgcctactgggcatcctcagcaagatgctggagactttttaccctcctgtgacagctgttacaacctgtaaccacaatccctcacctctcagagggaactgggaaccctcctttctccgtgtgacctaaagccactcaatgaactgcagctcacgagaccttttgcagggactctggaatgtcctcacggtatattgatgttcaggtggagctggggtccatgggctaatttcttacacatcttttttctccttagggggtagaacaagaaggcttagagtttggcagctttgttacaaacatccctctggcatttcctggtctctggcacatcataaccaattggaaacctgcagtttggggtagggctggaggatcgctcctgtggaaagggagagccatactgcacggacgtagcgtttccctctacaagcactaggagcacctttctcaaggacaagaaatggtagcaaccaaaaggttggttgaaggaaacaatccttccttctggtggcagagccagtcttctgggcctcacatgcctgtgcggttaagaaggagctcttggccgggcgcggtggctcacgcctgtaatcccagcactttgggaggccgaggcgggtggatcatgagatcaggagatcgagaccatcctggctaacacggcgaaaccccgtctctactaaaaatacaaaaaattagctgggcatggttgcaggcgcctgtagtcccagctacttgggaggctgaggcaggagaatggcctgaacccgggaggcggagcttgcagtgagccgagatcgcgccaatgcactccagcctgggcgacagagaaaaaaaaaaaaaaagaaggagcccttgaatctgagaatcccccagttaagatgatttcccttaaggagcatttctcctgatcaggtgcattcagggaggcctgcaactccatcctaaggtgacatttcaagaaacacatgtgttgaccacctctgtgtgccaagcactgggtgaggagtggtcgtatattaccataattcatcctcactcaattgggaggtggcattcttgtccctgttgcccccatctctacccccttttgttaatggttgagagaaatgtggaccagtgattctcagtttggtgcccaggtccccaaaggaagtgatggagagccttgagctaagttcaggcagcagcatgtggccagcagcagtgtgctgggagcagaggttggaatcagggctcagggccttcacttcaagggccctccccagctactcgggaggctgaggcaggagaatcgcttgaactcaggaggtggaggttgcggtgagccaagatcgtgccactgcactccagcctgggctacaagattgaaaagatcgaaactctgtctcaaacaaaaaaaaaaaaattcaaggctgtttccaaggcagcctcaaaaagagcctggtgcccagggggtccttcgtttctgtgtggctgcagaggccaggagtgcagtgactgtctcactgcctagtggttgtggctcacatcctgccctgatggagaggggggcccgtcgtccaaccctctctgaaaaactgcagtagactttaccatttcaggccccacctaatgttctttccttccttccccctacattcttcccgcccctttcatagttaagatgcataagctgagcaataaccccacttcctgatttccctgaaatatgagcccagaagcagcaggtgacagggagcttcccttaccctggggtggtggcacacagaccacctcctgtcctgtcccctgcaggtagtattcacagtgtggtgttacctgggaggagggaggaaggagctgagatgaaggagattcaggtaaacagtagccacagtggccaggacccccttcctgaggatccctgtccttcctcgcagcaggtgcttagtcctctcctagggagaagcacggaaagattcctcaaggcctcagtcccatgtctaaggcatacctaggttagaaatgtcctttacttgtttctcagttactatttctcctcttcctccctccccctgccttctcttggctgtcatttagctctctggcccacagaaatactccatccaaggagctggtcctcagtcagcctgatgaggacaggtcagtggccaacccttttgccccagtccttcatctggagacagtcacatagtcacgtcaacagttcacccaaagagaagaggtggggcctggcttctcccacagggcacagcctaactatggagacccagggctccttcctgctgcactaggcctgtgctctccctattgccttcaggtggtgtgatcccggcttcctcacagagcccttttttccttctgcccagctccatcccaccagagtttctacccccgctgaggcatctcctgggcacagaccaccacactctaagccggctggcctgggagttagggtcctgcccacctcacctgggagttggggtcctgcccacctggagtttagcacgctggtcgctcactttgctttggtctgcacacctggtgtgtgcatgtgtatactgcttgtgccatctgtgtacccctctccctggagtacacttgtggtcacactacagtggggacatcaagaatgcaatatttatggattgctgcatgattcttaaaaatgaataaaactgtttacaagggaaggagagctaactgc

SEQ ID NO: 4988 - DNA, 1055 bp, Homo sapiens
agctagttccgtcgcagccgggatttgggtcgcggttcttgtttgtggatcgctgtgatcgtcacttggggatgcagatcttcgtgaagaccctgactggtaagaccatcactctcgaggtggagccgagtgacaccattgagaatgtcaaggcaaagatccaagacaaggaaggcatccctcctgatcagcagaggttgatctttgctgggaaacagctggaagatggacgcaccctgtctgactacaacatccagaaagagtccaccctgcacctggtgctccgtcttagaggtgggatgcagatcttcgtgaagaccctgactggtaagaccatcactctcgaagtggagccgagtgacaccattgagaatgtcaaggcaaagatccaagacaaggaaggcatccctcctgaccagcagaggttgatctttgctgggaaacagctggaagatggacgcaccctgtctgactacaacatccagaaagagtccaccctgcacctggtgctccgtcttagaggtgggatgcagatcttcgtgaagaccctgactggtaagaccatcactctcgaagtggagccgagtgacaccattgagaatgtcaaggcaaagatccaagacaaggaaggcatccctcctgaccagcagaggttgatctttgctgggaaacagctggaagatggacgcaccctgtctgactacaacatccagaaagagtccaccctgcacctggtgctccgtctcagaggtgggatgcagatcttcgtgaagaccctgactggtaagaccatcaccctcgaggtggagcccagtgacaccatcgagaatgtcaaggcaaagatccaagataaggaaggcatccctcctgatcagcagaggttgatctttgctgggaaacagctggaagatggacgcaccctgtctgactacaacatccagaaagagtccactctgcacttggtcctgcgcttgagggggggtgtctaagtttccccttttaaggtttcaacaaatttcattgcactttcctttcaataaagttgttgcattccc

SEQ ID NO: 4989 - DNA, 3055 bp, Homo sapiens
agttccgtcgcagccgggatttgggtcgcggttcttgtttgtggatcgctgtgatcgtcacttggtgagtagcgggctgctgggctggccggggctttcgtggccgccgggccgctcggtgggacggaagcgtgtggagagaccgccaagggctgtagtctgggtccgcgagcaaggttgccctgaactgggggttggggggagcgcagcaaaatggcggctgttcccgagtcttgaatggaagacgcttgtgaggcgggctgtgaggtcgttgaaacaaggtggggggcatggtgggcggcaagaacccaaggtcttgaggccttcgctaatgcgggaaagctcttattcgggtgagatgggctggggcaccatctggggaccctgacgtgaagtttgtcactgactggagaactcggtttgtcgtctgttgcgggggcggcagttatggcggtgccgttgggcagtgcacccgtacctttgggagcgcgcgccctcgtcgtgtcgtgacgtcacccgttctgttggcttataatgcagggtggggccacctgccggtaggtgtgcggtaggcttttctccgtcgcaggacgcagggttcgggcctagggtaggctctcctgaatcgacaggcgccggacctctggtgaggggagggataagtgaggcgtcagtttctttggtcggttttatgtacctatcttcttaagtagctgaagctccggttttgaactatgcgctcggggttggcgagtgtgttttgtgaagttttttaggcaccttttgaaatgtaatcatttgggtcaatatgtaattttcagtgttagactagtaaattgtccgctaaattctggccgtttttggcttttttgttagacaatgcagatcttcgtgaagactctgactggtaagaccatcaccctcgaggttgagcccagtgacaccatcgagaatgtcaaggcaaagatccaagataaggaaggcatccctcctgaccagcagaggctgatctttgctggaaaacagctggaagatgggcgcaccctgtctgactacaacatccagaaagagtccaccctgcacctggtgctccgtctcagaggtgggatgcaaatcttcgtgaagacactcactggcaagaccatcacccttgaggtggagcccagtgacaccatcgagaacgtcaaagcaaagatccaggacaaggaaggcattcctcctgaccagcagaggttgatctttgccggaaagcagctggaagatgggcgcaccctgtctgactacaacatccagaaagagtctaccctgcacctggtgctccgtctcagaggtgggatgcagatcttcgtgaagaccctgactggtaagaccatcaccctcgaggtggagcccagtgacaccatcgagaatgtcaaggcaaagatccaagataaggaaggcattcctcctgatcagcagaggttgatctttgccggaaaacagctggaagatggtcgtaccctgtctgactacaacatccagaaagagtccaccttgcacctggtactccgtctcagaggtgggatgcaaatcttcgtgaagacactcactggcaagaccatcacccttgaggtcgagcccagtgacactatcgagaacgtcaaagcaaagatccaagacaaggaaggcattcctcctgaccagcagaggttgatctttgccggaaagcagctggaagatgggcgcaccctgtctgactacaacatccagaaagagtctaccctgcacctggtgctccgtctcagaggtgggatgcagatcttcgtgaagaccctgactggtaagaccatcaccctcgaagtggagccgagtgacaccattgagaatgtcaaggcaaagatccaagacaaggaaggcatccctcctgaccagcagaggttgatctttgccggaaaacagctggaagatggtcgtaccctgtctgactacaacatccagaaagagtccaccttgcacctggtgctccgtctcagaggtgggatgcagatcttcgtgaagaccctgactggtaagaccatcactctcgaggtggagccgagtgacaccattgagaatgtcaaggcaaagatccaagacaaggaaggcatccctcctgatcagcagaggttgatctttgctgggaaacagctggaagatggacgcaccctgtctgactacaacatccagaaagagtccaccctgcacctggtgctccgtcttagaggtgggatgcagatcttcgtgaagaccctgactggtaagaccatcactctcgaagtggagccgagtgacaccattgagaatgtcaaggcaaagatccaagacaaggaaggcatccctcctgaccagcagaggttgatctttgctgggaaacagctggaagatggacgcaccctgtctgactacaacatccagaaagagtccaccctgcacctggtgctccgtcttagaggtgggatgcagatcttcgtgaagaccctgactggtaagaccatcactctcgaagtggagccgagtgacaccattgagaatgtcaaggcaaagatccaagacaaggaaggcatccctcctgaccagcagaggttgatctttgctgggaaacagctggaagatggacgcaccctgtctgactacaacatccagaaagagtccaccctgcacctggtgctccgtctcagaggtgggatgcagatcttcgtgaagaccctgactggtaagaccatcaccctcgaggtggagcccagtgacaccatcgagaatgtcaaggcaaagatccaagataaggaaggcatccctcctgatcagcagaggttgatctttgctgggaaacagctggaagatggacgcaccctgtctgactacaacatccagaaagagtccactctgcacttggtcctgcgcttgagggggggtgtctaagtttccccttttaaggtttcaacaaatttcattgcactttcctttcaataaagttgttgcattcccaattggtgttttttttttttttttttttttttttttaagtttattttgcatt

SEQ ID NO: 4990 - DNA, 4591 bp, Homo sapiens
ggttcgcttcggcgtccgccgtctccgcagctgcctcctcttcctccttcgccaccgccgccaccgccgccgccgcccgcagcaccgcagcccctcccgccatggccgccgccggcgcccggctcagccccggccccggctcggggctccgggggcggccgaggctctgcttccacccggggccgccgccactgctgccgctgctgctgctgttcctgctcctgctgccgccgccgccgctgctggccggcgccaccgccgctgcctcgcgggagcccgacagcccgtgccggctgaagaccgtcacggtgtccacactgcccgccctgcgggagagcgacatcggctggagcggcgcccgcgccggggccggggctgggaccggggccggagccgccgccgccgccgcgtccccgggctctcctggctctgccggcaccgccgccgagtcgcgcctcctgctctttgtgcgtaacgagctgccggggcgcatcgcggtgcaggacgacctggacaacaccgagctgcccttcttcaccctggagatgtctggcacagcagcggacatctcgctggtgcactggagacagcagtggctggagaatggcaccttgtacttccacgtctccatgagcagctccgggcagctggcccaagccaccgcccccactctccaggagccctcggagattgttgaggagcagatgcacatcctccacatttctgtgatgggtggcctcatcgcgctgctgctgctgctgctggtgttcaccgtggcgctgtacgcccagcgacgttggcagaagcgtcgccgcatcccccagaagagcgcaagcacagaagccactcatgagatccactacatcccatctgtgctgctgggtccccaggcgcgggagagcttccgttcatcccggctgcaaacccacaattccgtcattggcgtgcccatccgggagactcccatcctggatgactatgactgtgaggaggatgaggagccacctaggcgggccaaccatgtctcccgcgaggacgagtttggcagccaggtgacccacactctggacagtctgggacatccaggggaagagaaggtggactttgagaagaaaggaggaatcagctttgggagagccaaggggacgtcgggctcagaggcagacgatgaaactcagctgacattctacacggagcagtaccgcagtcgccgccgcagcaaaggtttgctgaaaagcccagtgaacaagacagccctgacactgattgctgtgagttcctgcatcctggccatggtgtgtggcagccagatgtcttgtccactcactgtgaaggtgactctgcatgtgcccgagcacttcatagcagatggaagcagcttcgtggtgagtgaagggagctacctggacatctccgactggttaaacccggccaagctttccctgtattaccagatcaatgccacctccccatgggtgagggacctctgtggacaaaggacgacagatgcctgtgagcagctctgcgacccagaaaccggagagtgcagctgtcatgaaggctatgcccctgaccctgttcacagacacctgtgtgtgcgcagtgactggggacagagtgaaggaccttggccctacacgacacttgagaggggctatgatctggtgacaggggagcaagcccctgaaaagattctcaggtctactttcagcttgggccaaggcctctggcttcctgtcagcaaaagctttgtggttccgcctgtggagctgtccatcaaccccctggccagctgcaagaccgatgtgctcgtcacggaagaccctgcagatgtcagggaagaagcgatgctgtccacatactttgaaaccatcaatgacctgctgtcttccttcgggccagttcgtgactgctctcggaacaatgggggctgcactcgcaacttcaagtgtgtgtctgaccggcaggtggattcctcgggatgtgtgtgccctgaggagctgaaacccatgaaggatggctctggctgctacgaccactccaaaggcattgactgctctgatggctttaatggcggctgtgagcagctgtgcctgcagcagacgctgcccctgccctacgatgccacttcgagcaccatcttcatgttctgcggttgcgtggaggagtacaaactggctcctgatggaaaatcctgcttaatgctctcagatgtctgcgagggccccaagtgcctcaaacctgactccaaattcaatgataccctctttggagagatgctacatggttacaacaaccggacccagcatgtgaaccaaggccaagtcttccagatgacctttagggagaacaacttcatcaaggactttccccagctggccgatgggctgttggtgatcccgctgccggtggaggagcagtgccggggggtcctctccgagccccttccagacctccaactgctcactggagatatcaggtatgatgaggccatgggttaccccatggtgcagcagtggcgggtccggagcaacctctaccgtgtgaagctcagcaccatcaccctcgcagcaggcttcactaatgttctcaagatcctgaccaaggagagcagtcgggaggagctgctgtccttcatccagcactatggctcccactacatcgcagaggccctctatggctcagagctcacctgcatcatccactttcccagcaagaaggtccagcagcagctgtggctccagtatcagaaagagaccacagagctgggcagcaagaaggagctcaagtccatgcccttcatcacctacctctcaggtttgctgacagcccagatgctgtcagatgaccagctcatttcaggtgtggagattcgctgtgaggagaaggggcgctgtccatctacctgtcacctttgccgccggccaggcaaggagcagctgagccccacaccagtgctgctggaaatcaaccgtgtggtgccactttataccctcatccaagacaatggcacaaaggaggccttcaagagtgcactgatgagttcctactggtgctcagggaaaggggatgtgatcgatgactggtgcaggtgtgacctcagcgcctttgatgccaatgggctccccaactgcagcccccttctgcagccggtgctgcggctgtccccaacagtggagccctccagtactgtggtctccttggagtgggtggatgttcagccagctattgggaccaaggtctccgactatattctgcagcataagaaagtggatgaatacacagacactgacctgtacacaggagaattcctgagttttgctgatgacttactctctggcctgggcacatcttgtgtagcagctggtcgaagccatggagaggtccctgaagtcagtatctactcagtcatcttcaagtgtctggagcccgacggtctctacaagttcactctgtatgctgtggatacacgagggaggcactcagagctaagcacggtgaccctgaggacggcctgtccactggtagatgacaacaaggcagaagaaatagctgacaagatctacaatctgtacaatgggtacacaagtggaaaggagcagcagatggcctacaacacactgatggaggtctcagcctcgatgctgttccgagtccagcaccactacaactctcactatgaaaagtttggcgacttcgtctggagaagtgaggatgagctggggcccaggaaggcccacctgattctacggcgactggagagggtgagtagccactgctccagcctcctgcggagtgcctacatccagagccgcgtggaaacagtgccctatcttttctgccgcagcgaggaggtccggcctgcaggcatggtgtggtatagcatcctcaaggacaccaaaatcacgtgtgaggagaagatggtgtcaatggcccgaaacacgtacggggagtccaagggccggtgagggagggtattgccctccgtgagcacagagactctccatgggagggggagcagtattctcctggatcctggggcctgggtgggctgggggacagctgaggatgggcctagcagatgaagcttgccagcaaggccaaagcaaacggtttctcctgtggatagtggacagagacctttgtaaccaatggaattattcatttttctctatcttttattttttcaaagatattatttgactctatcaaaagtctctcctttttaaaccttttcttatggatggctgtcaatcccgaggcagaagttttcaggtggagaccaagcggcctttgctcttcttccttcttcctgccacactctgctttcttcctgccatggacccctggaggagacctatggagggacagttttgacctgacccctagaggagacagttttgacctcttcagcaccaggaaggaagctctgaggatggttgcagtgaggaagcatgggtctttaaggacttctctctcttttttgctggacattattgagtttgtgggaccctgcctcttcctgctacctgtgggtctgcccagagtccctgcaggcctgtccatgcattaaaaattcctattgtctctc

SEQ ID NO: 4991 - DNA, 2303 bp, Homo sapiens
ggcggcgaagcgggggcacgccctcgcacacgcagagataaattgtgctcccatgacctttatttggaaagtgcctgcgggcctaaaattggcctttgtcccaccgagtacactcagcactgtactttaaaccggataaactgggctgtctggcaggcgataaactacattcagttgagtctgcaagactgggaggaactggggtgataagaaatctattcactgtcaaggtttattgaagtcaaaatgtccaaaaaaatcagtggcggttctgtggtagagatgcaaggagatgaaatgacacgaatcatttgggaattgattaaagagaaactcatttttccctacgtggaattggatctacatagctatgatttaggcatagagaatcgtgatgccaccaacgaccaagtcaccaaggatgctgcagaagctataaagaagcataatgttggcgtcaaatgtgccactatcactcctgatgagaagagggttgaggagttcaagttgaaacaaatgtggaaatcaccaaatggcaccatacgaaatattctgggtggcacggtcttcagagaagccattatctgcaaaaatatcccccggcttgtgagtggatgggtaaaacctatcatcataggtcgtcatgcttatggggatcaatacagagcaactgattttgttgttcctgggcctggaaaagtagagataacctacacaccaagtgacggaacccaaaaggtgacatacctggtacataactttgaagaaggtggtggtgttgccatggggatgtataatcaagataagtcaattgaagattttgcacacagttccttccaaatggctctgtctaagggttggcctttgtatctgagcaccaaaaacactattctgaagaaatatgatgggcgttttaaagacatctttcaggagatatatgacaagcagtacaagtcccagtttgaagctcaaaagatctggtatgagcataggctcatcgacgacatggtggcccaagctatgaaatcagagggaggcttcatctgggcctgtaaaaactatgatggtgacgtgcagtcggactctgtggcccaagggtatggctctctcggcatgatgaccagcgtgctggtttgtccagatggcaagacagtagaagcagaggctgcccacgggactgtaacccgtcactaccgcatgtaccagaaaggacaggagacgtccaccaatcccattgcttccatttttgcctggaccagagggttagcccacagagcaaagcttgataacaataaagagcttgccttctttgcaaatgctttggaagaagtctctattgagacaattgaggctggcttcatgaccaaggacttggctgcttgcattaaaggtttacccaatgtgcaacgttctgactacttgaatacatttgagttcatggataaacttggagaaaacttgaagatcaaactagctcaggccaaactttaagttcatacctgagctaagaaggataattgtcttttggtaactaggtctacaggtttacatttttctgtgttacactcaaggataaaggcaaaatcaattttgtaatttgtttagaagccagagtttatcttttctataagtttacagcctttttcttatatatacagttattgccacctttgtgaacatggcaagggacttttttacaatttttattttattttctagtaccagcctaggaattcggttagtactcatttgtattcactgtcactttttctcatgttctaattataaatgaccaaaatcaagattgctcaaaagggtaaatgatagccacagtattgctccctaaaatatgcataaagtagaaattcactgccttcccctcctgtccatgaccttgggcacagggaagttctggtgtcatagatatcccgttttgtgaggtagagctgtgcattaaacttgcacatgactggaacgaagtaggagtgcaactcaaatgtgttgaagatactgcagtcatttttgtaaagaccttgctgaatgtttccaatagactaaatactgtttaggccgcaggagagtttggaatccggaataaatactacctggaggtttgtcctctccatttttctctttctcctcctggcctggcctgaatattatactactctaaatagcatatttcatccaagtgcaataatgtaagctgaatcttttttggacttctgctggcctgttttatttcttttatataaatgtgatttctcagaaattgatattaaacactatcttatcttctcctg

SEQ ID NO: 4992 - DNA, 1289 bp, Homo sapiens
gatccagagacaatggccccgatgggatggagcccgaaggcgtcatcgagagtaactggaatgagattgttgacagctttgatgacatgaacctctcggagtcccttctccgtggcatctacgcgtatggttttgagaagccctctgccatccagcagcgagccattctaccttgtatcaagggttatgatgtgattgctcaagcccaatctgggactgggaaaacggccacatttgccatatcgattctgcagcagattgaattagatctaaaagccacccaggccttggtcctagcacccactcgagaattggctcagcagatacagaaggtggtcatggcactaggagactacatgggcgcctcctgtcacgcctgtatcgggggcaccaacgtgcgtgctgaggtgcagaaactgcagatggaagctccccacatcatcgtgggtacccctggccgtgtgtttgatatgcttaaccggagatacctgtcccccaaatacatcaagatgtttgtactggatgaagctgacgaaatgttaagccgtggattcaaggaccagatctatgacatattccaaaagctcaacagcaacacccaggtagttttgctgtcagccacaatgccttctgatgtgcttgaggtgaccaagaagttcatgagggaccccattcggattcttgtcaagaaggaagagttgaccctggagggtatccgccagttctacatcaacgtggaacgagaggagtggaagctggacacactatgtgacttgtatgaaaccctgaccatcacccaggcagtcatcttcatcaacacccggaggaaggtggactggctcaccgagaagatgcatgctcgagatttcactgtatccgccatgcatggagatatggaccaaaaggaacgagacgtgattatgagggagtttcgttctggctctagcagagttttgattaccactgacctgctgggaaaactatatccacagaatcggtcgaggtggacggtttggccgtaaaggtgtggctattaacatggtgacagaagaagacaagaggactcttcgagacattgagaccttctacaacacctccattgaggaaatgcccctcaatgttgctgacctcatctgaggggctgtcctgccacccagccccagccagggctcaatctctgggggctgaggagcagcaggaggggggagggaagggagccaagggatggacatcttgtcattttttttctttgaataaatgtcactttttgaggcaaaagaaggaaccgt

SEQ ID NO: 4993 - DNA, 3845 bp, Homo sapiens
agaggagcttcttaataactttgcccagcaaataggagcctggagattctgcctgtactttctctccagcactaggaatgactatgtaatgatgtacagtttaacagtttttgagaatctgatcaataaaatgtggcttggggtcccatctcaggataagatggaaatccgtagctgtctgcccaaactccttttggctcaccataaaaccttaccttactttatccggaacaagctctgcaaagttattgttgatattggacgtcaggattggcccatgttctaccacgacttttttactaacattttacagttgatccagtcccctgtgacaaccccccttgggctgatcatgttgaagacaacttcagaagagctggcttgtccccgtgaggacctcagtgtggctcggaaggaggagttgcggaagctgctactggaccaggtgcagacagtgcttgggctactgacaggtatcttggagactgtctgggacaaacacagtgttactgctgccactccaccaccatccccgacctcaggagaaagtggtgacttactgagtaacctgttgcagagtcccagttcagccaaactgttgaatcagccaattcccatccttgatgtggagagtgagtatatctgttccctggctttggagtgcctggcccatctcttcagttggattcctctgtctgccagcatcaccccatccctccttaccaccatcttccactttgcacgatttggctgtgacatccgggccagaaagatggcgtcagttaacggcagcagccagaactgtgtctcgggtcaggagcgcggccggctgggggtcctggccatgtcctgcatcaatgaactcatgtccaagaactgtgtgcctatggaatttgaggagtatttactgcgtatgttccagcagactttctacctcctgcagaaaatcaccaaggataacaatgcccacacagtgaagagcaggctagaagagctcgatgagagctatatcgagaagtttactgactttcttcggctctttgtgagtgttcacctaagaagaatcgagtcttactcccagttccctgtggtggagtttttgacacttttgttcaagtacacatttcatcagcctactcatgaaggttacttctcttgtttggatatctggacgctgtttttggactatctgacaagtaaaattaaaagtcgtcttggagacaaggaagcagttctcaacaggtacgaagatgccctggtgctcctgctcacagaggtgttgaatcgaatccagttcagatacaaccaagcccagctggaggagttggatgatgagactctggatgacgatcagcagacggagtggcagcggtacttacggcagagcttggaggtggtggccaaagtgatggagctcctgcccacgcacgccttctccacactgttccctgttcttcaggacaatttagaagtttatttgggattacaacagtttatagtcacttcagggtcaggacacaggttgaacatcacggcggagaacgactgccggcggctgcactgctccctgagagacttgagctccctgctgcaggccgtgggccgcctggccgagtactttatcggggatgtgtttgctgcacggttcaatgatgccctcacagtcgtggaaaggttggtcaaagtcactctgtacggatctcagataaaattgtacaacattgaaactgctgtgccatcagtattgaaacctgacctcattgatgtgcatgctcagtccctggctgcgctgcaggcttactctcactggttagcacagtattgcagtgaagttcaccggcagaacacgcagcagttcgtgacactcatctctactaccatggatgcaatcacacctctaatcagcaccaaggtccaagacaagctgctgctatctgcgtgccacttactggtctcactggccaccaccgtgcggcccgtctttctgatcagcatccctgcagtgcagaaagtattcaacagaatcactgatgcctctgccctgcgacttgtcgataaggcccaggtgttggtgtgccgagccctctctaacatcttgctgcttccgtggccaaaccttccagagaatgagcagcagtggcccgtgcgctccatcaaccacgccagcctcatctctgcactctcccgggactatcgcaacctgaagcccagtgctgttgccccacagagaaagatgccactggatgacaccaaactgattatccaccagacactcagcgtcttagaagatattgtggagaatatctcgggggagtccaccaagtctcgacagatttgctaccagtcgctgcaggaatctgttcaggtctccctggccctctttccagcttttatccatcagtcagatgtgactgatgagatgctgagcttcttcctcactctgtttcgaggccttagagtacagatgggtgtgcctttcactgagcaaatcatacagactttcctcaacatgtttaccagagagcagttagccgagagcatcctccacgagggcagcacaggctgccgggtggtggagaagtttctgaagatcctgcaggtggtggtccaggagccaggccaggtgttcaagcccttcctccccagcatcatcgccctgtgcatggagcaagtgtatcccatcattgccgagcgtccctcccctgatgtgaaggccgagctgtttgagctccttttccggacgctccatcacaactggaggtacttcttcaagtccaccgtgctggccagtgtccagagggggatcgctgaggagcagatggagaatgagccccagttcagtgccatcatgcaggctttcggacagtcctttctccagcccgacatccacctttttaaacaaaatctcttctacttggagactctcaacaccaagcagaagctgtaccacaagaagatcttccggactgccatgctgttccagtttgtgaacgtgctgctccaggtcctggtccacaagtcccatgatcttctgcaggaggagattggcatcgccatctacaacatggcctcagtcgactttgatggcttctttgccgccttcctcccagagttcctgaccagctgtgatggtgtggatgccaaccagaaaagtgtgctggggcggaatttcaagatggatcgggacctgccctcattcacccagaatgtgcacaggctggtcaacgacctgcgctactacagactctgcaacgacagcctgccccctggcactgtgaagctctaggcctgctactgcctggggacacggacttctgctgctgccacctgcgccagccctaccttccaccacagatgtctcccagatgggccttggtcacactccttggcttctcccaccgcaagcaacgctgcctgcctctgccgctcctccacatcttgccgctgcccagcagagctggcttctgggtccacctgagcactggacggtgctcccagggcgttggagcaggcggaggggtgtgtggccaggtactaggaggcaccaggaaatcccgcggggtggcccatgcagaccaggcgcacgtggctcatggggcagaattgccaaggacagctcacgacagtgccaccttctcaccattccagccaaggagagatgtgacgttggaactgctctggcacttctgtcaagcctcccccgccccaattgccttgagatctctgctctttgtcagagatttgcaaagactcacgtttttgttgttttctcatcattccattgtgatactaagaaactaagaagcttaatgaaaagaaataaaatgcctatgttgttgttctag

SEQ ID NO: 4994 - DNA, 588 bp, Homo sapiens
ggctttaaactgttgtgccagtgcttaggctttggaagtggtcatttcagatgtgattcatctagatggtgccatgacaatggtgtgaactacaagattggagagaagtgggaccgtcagggagaaaatggccagatgatgagctgcacatgtcttgggaacggaaaaggagaattcaagtgtgaccctcatgaggcaacgtgttatgatgatgggaagacataccacgtaggagaacagtggcagaaggaatatctcggtgccatttgctcctgcacatgctttggaggccagcggggctggcgctgtgacaactgccgcagacctgggggtgaacccagtcccgaaggcactactggccagtcctacaaccagtattctcagagataccatcagagaacaaacactaatgttaattgcccaattgagtgcttcatgcctttagatgtacaggctgacagagaagattcccgagagtaaatcatctttccaatccagaggaacaagcatgtctctctgccaagatccatctaaactggagtgatgttagcagacccagcttagagttcttctttctttcttaagccc

SEQ ID NO: 4995 - DNA, 7677 bp, Homo sapiens
gaagagcaagaggcaggctcagcaaatggttcagccccagtccccggtggctgtcagtcaaagcaagcccggttgttatgacaatggaaaacactatcagataaatcaacagtgggagcggacctacctaggcaatgcgttggtttgtacttgttatggaggaagccgaggttttaactgcgagagtaaacctgaagctgaagagacttgctttgacaagtacactgggaacacttaccgagtgggtgacacttatgagcgtcctaaagactccatgatctgggactgtacctgcatcggggctgggcgagggagaataagctgtaccatcgcaaaccgctgccatgaagggggtcagtcctacaagattggtgacacctggaggagaccacatgagactggtggttacatgttagagtgtgtgtgtcttggtaatggaaaaggagaatggacctgcaagcccatagctgagaagtgttttgatcatgctgctgggacttcctatgtggtcggagaaacgtgggagaagccctaccaaggctggatgatggtagattgtacttgcctgggagaaggcagcggacgcatcacttgcacttctagaaatagatgcaacgatcaggacacaaggacatcctatagaattggagacacctggagcaagaaggataatcgaggaaacctgctccagtgcatctgcacaggcaacggccgaggagagtggaagtgtgagaggcacacctctgtgcagaccacatcgagcggatctggccccttcaccgatgttcgtgcagctgtttaccaaccgcagcctcacccccagcctcctccctatggccactgtgtcacagacagtggtgtggtctactctgtggggatgcagtggctgaagacacaaggaaataagcaaatgctttgcacgtgcctgggcaacggagtcagctgccaagagacagctgtaacccagacttacggtggcaactcaaatggagagccatgtgtcttaccattcacctacaatggcaggacgttctactcctgcaccacagaagggcgacaggacggacatctttggtgcagcacaacttcgaattatgagcaggaccagaaatactctttctgcacagaccacactgttttggttcagactcgaggaggaaattccaatggtgccttgtgccacttccccttcctatacaacaaccacaattacactgattgcacttctgagggcagaagagacaacatgaagtggtgtgggaccacacagaactatgatgccgaccagaagtttgggttctgccccatggctgcccacgaggaaatctgcacaaccaatgaaggggtcatgtaccgcattggagatcagtgggataagcagcatgacatgggtcacatgatgaggtgcacgtgtgttgggaatggtcgtggggaatggacatgcattgcctactcgcagcttcgagatcagtgcattgttgatgacatcacttacaatgtgaacgacacattccacaagcgtcatgaagaggggcacatgctgaactgtacatgcttcggtcagggtcggggcaggtggaagtgtgatcccgtcgaccaatgccaggattcagagactgggacgttttatcaaattggagattcatgggagaagtatgtgcatggtgtcagataccagtgctactgctatggccgtggcattggggagtggcattgccaacctttacagacctatccaagctcaagtggtcctgtcgaagtatttatcactgagactccgagtcagcccaactcccaccccatccagtggaatgcaccacagccatctcacatttccaagtacattctcaggtggagacctaaaaattctgtaggccgttggaaggaagctaccataccaggccacttaaactcctacaccatcaaaggcctgaagcctggtgtggtatacgagggccagctcatcagcatccagcagtacggccaccaagaagtgactcgctttgacttcaccaccaccagcaccagcacacctgtgaccagcaacaccgtgacaggagagacgactcccttttctcctcttgtggccacttctgaatctgtgaccgaaatcacagccagtagctttgtggtctcctgggtctcagcttccgacaccgtgtcgggattccgggtggaatatgagctgagtgaggagggagatgagccacagtacctggatcttccaagcacagccacttctgtgaacatccctgacctgcttcctggccgaaaatacattgtaaatgtctatcagatatctgaggatggggagcagagtttgatcctgtctacttcacaaacaacagcgcctgatgcccctcctgacacgactgtggaccaagttgatgacacctcaattgttgttcgctggagcagaccccaggctcccatcacagggtacagaatagtctattcgccatcagtagaaggtagcagcacagaactcaaccttcctgaaactgcaaactccgtcaccctcagtgacttgcaacctggtgttcagtataacatcactatctatgctgtggaagaaaatcaagaaagtacacctgttgtcattcaacaagaaaccactggcaccccacgctcagatacagtgccctctcccagggacctgcagtttgtggaagtgacagacgtgaaggtcaccatcatgtggacaccgcctgagagtgcagtgaccggctaccgtgtggatgtgatccccgtcaacctgcctggcgagcacgggcagaggctgcccatcagcaggaacacctttgcagaagtcaccgggctgtcccctggggtcacctattacttcaaagtctttgcagtgagccatgggagggagagcaagcctctgactgctcaacagacaaccaaactggatgctcccactaacctccagtttgtcaatgaaactgattctactgtcctggtgagatggactccacctcgggcccagataacaggataccgactgaccgtgggccttacccgaagaggacagcccaggcagtacaatgtgggtccctctgtctccaagtacccactgaggaatctgcagcctgcatctgagtacaccgtatccctcgtggccataaagggcaaccaagagagccccaaagccactggagtctttaccacactgcagcctgggagctctattccaccttacaacaccgaggtgactgagaccaccattgtgatcacatggacgcctgctccaagaattggttttaagctgggtgtacgaccaagccagggaggagaggcaccacgagaagtgacttcagactcaggaagcatcgttgtgtccggcttgactccaggagtagaatacgtctacaccatccaagtcctgagagatggacaggaaagagatgcgccaattgtaaacaaagtggtgacaccattgtctccaccaacaaacttgcatctggaggcaaaccctgacactggagtgctcacagtctcctgggagaggagcaccaccccagacattactggttatagaattaccacaacccctacaaacggccagcagggaaattctttggaagaagtggtccatgctgatcagagctcctgcacttttgataacctgagtcccggcctggagtacaatgtcagtgtttacactgtcaaggatgacaaggaaagtgtccctatctctgataccatcatcccagctgttcctcctcccactgacctgcgattcaccaacattggtccagacaccatgcgtgtcacctgggctccacccccatccattgatttaaccaacttcctggtgcgttactcacctgtgaaaaatgaggaagatgttgcagagttgtcaatttctccttcagacaatgcagtggtcttaacaaatctcctgcctggtacagaatatgtagtgagtgtctccagtgtctacgaacaacatgagagcacacctcttagaggaagacagaaaacaggtcttgattccccaactggcattgacttttctgatattactgccaactcttttactgtgcactggattgctcctcgagccaccatcactggctacaggatccgccatcatcccgagcacttcagtgggagacctcgagaagatcgggtgccccactctcggaattccatcaccctcaccaacctcactccaggcacagagtatgtggtcagcatcgttgctcttaatggcagagaggaaagtcccttattgattggccaacaatcaacagtttctgatgttccgagggacctggaagttgttgctgcgacccccaccagcctactgatcagctgggatgctcctgctgtcacagtgagatattacaggatcacttacggagagacaggaggaaatagccctgtccaggagttcactgtgcctgggagcaagtctacagctaccatcagcggccttaaacctggagttgattataccatcactgtgtatgctgtcactggccgtggagacagccccgcaagcagcaagccaatttccattaattaccgaacagaaattgacaaaccatcccagatgcaagtgaccgatgttcaggacaacagcattagtgtcaagtggctgccttcaagttcccctgttactggttacagagtaaccaccactcccaaaaatggaccaggaccaacaaaaactaaaactgcaggtccagatcaaacagaaatgactattgaaggcttgcagcccacagtggagtatgtggttagtgtctatgctcagaatccaagcggagagagtcagcctctggttcagactgcagtaaccaacattgatcgccctaaaggactggcattcactgatgtggatgtcgattccatcaaaattgcttgggaaagcccacaggggcaagtttccaggtacagggtgacctactcgagccctgaggatggaatccatgagctattccctgcacctgatggtgaagaagacactgcagagctgcaaggcctcagaccgggttctgagtacacagtcagtgtggttgccttgcacgatgatatggagagccagcccctgattggaacccagtccacagctattcctgcaccaactgacctgaagttcactcaggtcacacccacaagcctgagcgcccagtggacaccacccaatgttcagctcactggatatcgagtgcgggtgacccccaaggagaagaccggaccaatgaaagaaatcaaccttgctcctgacagctcatccgtggttgtatcaggacttatggtggccaccaaatatgaagtgagtgtctatgctcttaaggacactttgacaagcagaccagctcagggagttgtcaccactctggagaatgtcagcccaccaagaagggctcgtgtgacagatgctactgagaccaccatcaccattagctggagaaccaagactgagacgatcactggcttccaagttgatgccgttccagccaatggccagactccaatccagagaaccatcaagccagatgtcagaagctacaccatcacaggtttacaaccaggcactgactacaagatctacctgtacaccttgaatgacaatgctcggagctcccctgtggtcatcgacgcctccactgccattgatgcaccatccaacctgcgtttcctggccaccacacccaattccttgctggtatcatggcagccgccacgtgccaggattaccggctacatcatcaagtatgagaagcctgggtctcctcccagagaagtggtccctcggccccgccctggtgtcacagaggctactattactggcctggaaccgggaaccgaatatacaatttatgtcattgccctgaagaataatcagaagagcgagcccctgattggaaggaaaaagacagacgagcttccccaactggtaacccttccacaccccaatcttcatggaccagagatcttggatgttccttccacagttcaaaagacccctttcgtcacccaccctgggtatgacactggaaatggtattcagcttcctggcacttctggtcagcaacccagtgttgggcaacaaatgatctttgaggaacatggttttaggcggaccacaccgcccacaacggccacccccataaggcataggccaagaccatacccgccgaatgtaggacaagaagctctctctcagacaaccatctcatgggccccattccaggacacttctgagtacatcatttcatgtcatcctgttggcactgatgaagaacccttacagttcagggttcctggaacttctaccagtgccactctgacaggcctcaccagaggtgccacctacaacgtcatagtggaggcactgaaagaccagcagaggcataaggttcgggaagaggttgttaccgtgggcaactctgtcaacgaaggcttgaaccaacctacggatgactcgtgctttgacccctacacagtttcccattatgccgttggagatgagtgggaacgaatgtctgaatcaggctttaaactgttgtgccagtgcttaggctttggaagtggtcatttcagatgtgattcatctagatggtgccatgacaatggtgtgaactacaagattggagagaagtgggaccgtcagggagaaaatggccagatgatgagctgcacatgtcttgggaacggaaaaggagaattcaagtgtgaccctcatgaggcaacgtgttatgatgatgggaagacataccacgtaggagaacagtggcagaaggaatatctcggtgccatttgctcctgcacatgctttggaggccagcggggctggcgctgtgacaactgccgcagacctgggggtgaacccagtcccgaaggcactactggccagtcctacaaccagtattctcagagataccatcagagaacaaacactaatgttaattgcccaattgagtgcttcatgcctttagatgtacaggctgacagagaagattcccgagagtaaatcatctttccaatccagaggaacaagcatgtctctctgccaagatccatctaaactggagtgatgttagcagacccagcttagagttcttctttctttcttaagccctttgctctggaggaagttctccagcttcagctcaactcacagcttctccaagcatcaccctgggagtttcctgagggttttctcataaatgagggctgcacattgcctgttctgcttcgaagtattcaataccgctcagtattttaaatgaagtgattctaagatttggtttgggatcaataggaaagcatatgcagccaaccaagatgcaaatgttttgaaatgatatgaccaaaattttaagtaggaaagtcacccaaacacttctgctttcacttaagtgtctggcccgcaatactgtaggaacaagcatgatcttgttactgtgatattttaaatatccacagtactcactttttccaaatgatcctagtaattgcctagaaatatctttctcttacctgttatttatcaatttttcccagtatttttatacggaaaaaattgtattgaaaacacttagtatgcagttgataagaggaatttggtataattatggtgggtgattattttttatactgtatgtgccaaagctttactactgtggaaagacaactgttttaataaaagatttacattcc

SEQ ID NO: 4996 - DNA, 1854 bp, Homo sapiens
  misc_feature (129)..(242): n is a, c, g, or t
cgagactttcagctcagtcatttccctgttgaatgaggatcccctgtcccaggacttgcctgtgaagatggcttcaatcttcaagaactttgtcattacctataaccggacatatgagtcaaaggaagnnnnnnnnnnnnnnnnnnnnnnnnnnnnnnnnnnnnnnnnnnnnnnnnnnnnnnnnnnnnnnnnnnnnnnnnnnnnnnnnnnnnnnnnnnnnnnnnnnnnnnnnnnnnnnnnnnaggaggagttccgcactatctacctgaatactctcctgagaaaagagcctggcaacaagatgaagcaagccaagtctgtgggtgacctcgccccacctgaatgggactggaggagtaagggggctgtcacaaaagtcaaagaccagggcatgtgtggctcctgctgggccttctcagtcacaggcaatgtggagggccagtggtttctcaaccaggggaccctgctctccctctctgaacaggagctcttggactgtgacaagatggacaaggcctgcatgggcggcttgccctccaatgcctactcggccataaagaatttgggagggctggagacagaggatgactacagctaccagggtcacatgcagtcctgcaacttctcagcagagaaggccaaggtctacatcaatgactccgtggagctgagccagaacgagcagaagctggcagcctggctggccaagagaggcccaatctccgtggccatcaatgcctttggcatgcagttttaccgccacgggatctcccgccctctccggcccctctgcagcccttgcgtcattgaccatgcggtgttgcttgtgggctacggaaccgtgagttccgctgcctgtcctgcatccagccaggccacagcgaggggtgggatcacagcatctcaggtcctctagaggggaaatagggggaatgcctaggaaccctgtccttacccactgcctgggccatgaccagctgggcatcatctgtcctctctatggcagggaagctgagctgtgggagggtaaatattgatggcctaataacctgcaataggcgggtgggtgcgtgcttcctccctgccccagggcttctccctgaggctggtaggtgggcccctcgctttctgctcttttcctagtccctgtcacacagtaggcccagtgcaagtatttgaagggtgcaaagtgattaaggctctgcctggagaattaaggaccctgatccttgcgctctgcactgcaccccaggctctgacgttcccttttgggccatcaagaacagctggggcactgactggggtgagaagggttactactacttgcatcgcgggtccggggcatgtggcgtgaacaccatggccagctcggcggtggtggactgaagaggggcccccagctcgggacctggtgctgatcagagtggctgctgccccagcctgacatgtgtccaggcccctccccgggaggtacagctggcagagggaaaggcactgggtacctcagggtgagcagagggcactgggctggggcacagcccctgcttccctgcaccccattcccaccctgaagttctgcacctgcacctttgttgaattgtggtagcttaggaggatgtcggggtgaagggtggtatcttggcagttgaagctggggcaagaactctgggcttgggtaatgagcaggaagaaaattttctgatcttaagcccagctctgttctgcccccgctttcctctgtttgatactataaattttctggttcccttggatttagggatagtgtccctctccatgtccaggaaacttgtaaccacccttttctaacagcaataaagaggtgtccttgtcccg

SEQ ID NO: 4997 - DNA, 3570 bp, Homo sapiens
  misc_feature (303)..(422): n is a, c, g, or t
  misc_feature (922)..(922): n is a, c, g, or t
gcggcgcccagggcggtagcgtgaaacttggtggaagacgctgaccagtcgtgttggaatcaaaacagcggggaccctgcgccatgtcgcgactgatcgtgaagaatctcccgaatgggatgaaggaggagcgtttcaggcagctgtttgccgccttcggcacgctgacagactgcagcctgaagttcaccaaagatggcaagttccgcaagtttggttttattggcttcaagtccgaggaagaggcccagaaggcacagaagcatttcaacaagagcttcatcgacacatcccggatcacannnnnnnnnnnnnnnnnnnnnnnnnnnnnnnnnnnnnnnnnnnnnnnnnnnnnnnnnnnnnnnnnnnnnnnnnnnnnnnnnnnnnnnnnnnnnnnnnnnnnnnnnnnnnnnnnnnnnnnngatgagaagaagaaaaaggtggcaggtcaactggagaagctgaaggaggatacagagttccaggagtttctgtcagttcatcagaggcgggcgcaggcagccacttgggcgaatgatggcctggatgctgagccctcgaaagggaagagcaagccggccagtgactacctgaacttcgactccgattctgggcaggagagtgaggaggagggagccggggaggacctggaagaagaggcaagcctcgaaccaaaggcagctgtgcagaaggagctgtcggacatggattacctgaaatccaagatggtgaaggctgggtcgtcctcttcctcggaggaagaggaaagtgaagatgaagccgtgcactgtgatgaagggagtgaggccgaggaagaggattcctccgccaccccagtcctgcaggaaagagacagcaagggtgcaggccaagagcaagggatgccagctgggaaaaagagaccaccggaggccagagcgangacagagaaaccagcaaaccagaaggaacccaccacctgccacaccgtgaagctgcggggagccccgttcaatgtcacagagaaaaatgttatggaattcctggcacccctgaaaccagtggccattcgaattgtgagaaacgctcatgggaataaaacaggatacatctttgtggatttcagcaatgaagaggaagtgaagcaagctctgaaatgcaaccgggagtacatgggtgggcgctacatcgaggtgttcagggaaaagaacgtccccaccaccaagggtgcaccaaagaataccaccaaatcctggcaaggccggatactcggggagaacgaagaggaggaggacctggccgaatccggaaggctctttgtacggaacctgccctacaccagcaccgaggaggatctggagaagctcttctccaaatatggtcccctgtctgagctccactaccccatcgacagcctgaccaagaaacccaagggttttgcattcatcaccttcatgttccctgagcacgctgtgaaggcctactcggaggtggacgggcaggtattccagggcaggatgctccacgtgttaccatctaccatcaagaaggaagccagcgaggatgccagtgccctgggatcgtcgtcctacaagaagaagaaggaggcccaggacaaagccaacagtgccagctctcacaactggaacacactattcatggggccgaatgccgtggccgatgccatcgcacagaagtacaacgccaccaagagtcaagtgtttgaccacgagaccaagggcagcgtggccgtgcgcgtggctctgggggaaacccagctcgtccaggaagtgcggcgttttctcatagacaacggggtcagcctggattccttcagccaggctgcagcagagcgaagcaagactgtgattctggtcaagaacctcccggcaggcaccctggcggcccagctgcaggagaccttcggccattttggcagcctgggccgcgtgctgctgccagagggcggaatcactgccatcgtggagttcctggagcccctggaggcccgcaaggccttcaggcatctggcctattccaagttccatcatgtccccctctatctggagtgggctccagttggcgtcttctccagcacagccccacagaagaaaaagctccaagacacaccttcagaacccatggaaaaggacccagcagagccagaaacagtgcctgatggcgaaaccccagaagatgaaaatccaacagaggaaggagcagacaactcttcagcaaagatggaagaggaggaggaggaagaggaagaagaagaagagagcctcccaggatgtactctgtttattaagaatctcaattttgacacaacagaagagaagctgaaggaagtgttttcaaaagtggggacagtgaagagctgctccatctccaagaagaagaacaaagcaggagtgctcctttccatggggtttggatttgtggaatacaggaagccggagcaagcccagaaagctctcaagcagctccagggtcacgtcgtggacggccacaagctggaagtgaggatctcggaacgagccactaagccagccgtgacattggctcggaagaaacaagttcccagaaagcagaccacctccaagatcctggtgcggaacatccccttccaggcccacagccgggagatccgagagctcttcagcacctttggggagttgaagacggtccgcctgccaaagaagatgactgggacaggcacacacagaggcttcggctttgtggacttcctcaccaagcaggatgcgaagagagccttcaacgccctgtgtcacagcacccacttgtacgggcggaggctggtgctggagtgggccgactccgaggtgaccctgcaggccctgcggcggaagacggccgctcactttcacgagcccccgaagaaaaagcggtctgtggtgttggacgagatcctggagcagctggaaggcagtgacagcgacagcgaggagcagacccttcagctgtgagctggcaccgagaggggctgctgagctagaattcccacctatgtctttccaagggactgttcacggcttgggacttggtctctgtcctgccccatcctcgtcacttgggaccacgagccctggttcagtcacccagggaagcctcccagcggctcatgaagcatcgagctccaagcccagatgccaagctccctggctgagctgaatgatgtcactcatggtggacgcgttctgctcacgggcccagagccctgtgaaatgcatcaaggtcctctccgctggccagcagcatccccaggcttctctcaggcgcccgtgttcacattttctccagcctgagacgcagcctcccgcctggaagggcctgtgccagcaccaggcagagggcaagacggagagggcagagcaagaactgcactgcatctcactgcagtctgaatctagacatcgccattccccgaggtgcgacctcagactaatgacatcctggctgagcctctgtttttctctctaggaaatgggggtgataattgtgcctacctcagatagacagtgccagaattaagtgagtcaagccaagtaaagcccagagaagattctcatc

SEQ ID NO: 4998 - DNA, 1454 bp, Homo sapiens
gaggagaactggacgttgtgaacagagttagctggtaaatgtcctcttaaaagatccaaaaaatgagacttctagcaaagattatttgccttatgttatgggctatttgtgtagcagaagattgcaatgaacttcctccaagaagaaatacagaaattctgacaggttcctggtctgaccaaacatatccagaaggcacccaggctatctataaatgccgccctggatatagatctcttggaaatgtaataatggtatgcaggaagggagaatgggttgctcttaatccattaaggaaatgtcagaaaaggccctgtggacatcctggagatactccttttggtacttttacccttacaggaggaaatgtgtttgaatatggtgtaaaagctgtgtatacatgtaatgaggggtatcaattgctaggtgagattaattaccgtgaatgtgacacagatggatggaccaatgatattcctatatgtgaagaaatttcatgcaaatccccagatgttataaatggatctcctatatctcagaagattatttataaggagaatgaacgatttcaatataaatgtaacatgggttatgaatacagtgaaagaggagatgctgtatgcactgaatctggatggcgtccgttgccttcatgtgaagaaaaatcatgtgataatccttatattccaaatggtgactactcacctttaaggattaaacacagaactggagatgaaatcacgtaccagtgtagaaatggtttttatcctgcaacccggggaaatacagcaaaatgcacaagtactggctggatacctgctccgagatgtaccttgaaaccttgtgattatccagacattaaacatggaggtctatatcatgagaatatgcgtagaccatactttccagtagctgtaggaaaatattactcctattactgtgatgaacattttgagactccgtcaggaagttactgggatcacattcattgcacacaagatggatggtcgccagcagtaccatgcctcagaaaatgttattttccttatttggaaaatggatataatcaaaatcatggaagaaagtttgtacagggtaaatctatagacgttgcctgccatcctggctacgctcttccaaaagcgcagaccacagttacatgtatggagaatggctggtctcctactcccagatgcatccgtgtcagctttaccctctgaacttctgatcgaaggtcatccctctccagcttgagtggatcaaagatgacaagggccaatggaaccaagtttgagtcttgccaggtcaatacttgggtcctgagtatggtgactagtatctgttttgttatgtgtgtattattccagccagaatgggaaatgctaattcagctcctccaggcagcccaatggggctggtggctttgagattattaaactctttctctgctgcaa

SEQ ID NO: 4999 - DNA, 2721 bp, Homo sapiens
tttgagacttctccatcgggatcgcctggtgtcaccaagtgtccactggtactgaggtttgctgcctgccttcttgccatgtctaacgaagtagaaacaagtgcaaccaatggtcagcccgaccaacaggccgcaccaaaagcaccctcaaagaaggaaaaaaagaaaggccctgaaaagacagatgaatatctcttagcaaggttcaaaggcgatggtgtaaaatataaggccaagctgattggcattgatgatgtgccagatgcaagaggggataaaatgagccaagactctatgatgaaactaaagggaatggcggcagctggtcggtctcagggacaacacaaacaaaggatctgggtcaacatttccctttctgggataaaaataattgatgagaaaactggggtaatagagcatgaacatccagtaaataagatttctttcattgcccgtgatgtgacagacaaccgggcatttggttacgtgtgtggaggagaaggccagcatcagttttttgccataaaaaccgggcaacaggctgaaccattagttgttgatcttaaagacctttttcaagttatctataatgtaaagaaaaaggaagaagaaaagaaaaagatagaggaagccagcaaagcagttgagaatgggagtgaggccctaatgattctagatgaccaaactaacaaactgaaatcggaaagcaaagatatcctgttagtggatctaaactctgaaatcgacaccaatcagaattctttaagagaaaatccattcttaacaaacggcatcacctcctgttctcttcctcgaccaacgcctcaggcatccttcttgcctgaaaatgccttttctgccaatctcaacttctttcccacccctaatcctgatcctttccgtgacgatcctttcacacagccagaccaatcgacaccttcttcgtttgattctctcaaatctccagatcagaagaaagagaattcgagtagctcgtctactccgctgagtaatgggcccctgaatggtgatgttgactactttggtcagcaatttgaccagatctctaaccggactggcaaacaggaagctcaggcaggcccatggcccttttcaagttcgcaaacccagccagcagtgagaactcaaaatggggtatctgaaagagaacagaacggcttctctgtcaaatcctccccgaacccttttgtgggaagccctcccaaaggactgtccatacagaatggcgtaaagcaggacttggaaagctctgtccagtcctcaccacatgactccatagccattatcccacctccacaaagtaccaaaccaggaagaggcagaaggactgctaagtcttcagccaatgacttgcttgcatcagacatctttgctcctcccgtctcagaaccttcaggccaggcgtcacccacaggacaacctacagccctgcagcccaaccctctggatctcttcaaaacaagtgctcctgccccagtggggcccctggtgggtctaggtaggtgtaactgtcacactccctcaggcaggaccatggaacacagcatctttggtcttcaatcagtccccttcaatggctccgggagccatgatgggtggtcaaccttcaggttttagtcagcccgtcatttttggtacaagtccagctgtttcaggttggaaccagccttcaccctttgcagcctcaactccccctccagtgcctgttgtctggggcccttctgcatctgtggcacccaatgcttggtcaacaacaagccctttggggaatccttttcagagcaatatttttccagctcctgctgtgtccactcagcccccatccatgcactcctctctcctggtcactcctcctcagccacctcccagagctggccctcccaaggacatctccagtgatgccttcactgccttagacccacttggggataaagagatcaaggatgtgaaagaaatgtttaaggatttccaactgcggcagccacctgctgtgcccgcgcggaagggagagcagacttcttctgggactttgagtgcctttgccagttatttcaacagcaaggttggcattcctcaggagaatgcagaccatgatgactttgatgctaatcaactattgaacaagatcaatgaaccaccaaagccagctcccagacaagtttccctgccagttaccaaatctactgacaatgcatttgagaaccctttctttaaagattcttttggttcatcacaagcctctgtggcttcttctcaacctgtatcttctgagatgtatagggatccatttggaaatccttttgcctaaattctgaacttggtctgcagaccatccagaggaataaaaaggttggccttagtagtcaaaaacaaagctgatagccagacacgttctgatttctgcccttgttccagctttgacgtattatctgttgccttatttctcattgcctcttctacttgtaaaatgcttttcactttctgtctaggttaaagctaaactgaatctatggctttaaataaattaagatcctaaactctctagcttaagtgtaaatgaagtacagtagtttccctactgaaccctgcctcttgtgtccctggaaccttctagaacacctgccttctaccctctggttgggagatgcagccaccacatcccttcatatcatactgttttgaataaattttcaaatcctt

SEQ ID NO: 5000 - DNA, 2230 bp, Homo sapiens
gggaggagccccgcagcctccacctacaggggcgtcccctaaggggacggaggccgcatgggccgccgagccgggaaatctccgcccccagctggagcggctgtgcgggctgcgtagcggtgctgggtcgggccgacgtgccacccacccggagccgggatgccagaagggccgttggtgaggaaatttcaccatttggtctccccctttgtgggtcagcaggtggtcaagacagggggcagcagtaagaagctacagcccgccagcctgcagtctctgtggctccaggacacccaggtccatggaaagaaattattccttagatttgatctagatgaagaaatggggccccctggcagcagcccaacaccagagcctccacaaaaagaagtgcagaaggaaggggctgcggacccaaagcaggtcggggagcccagcgggcagaagacccttgatggatcctcacggtctgcagagctcgtcccccagggcgaggatgattctgagtatttggagagagacgcccctgcaggagatgctgggaggtggctgcgtgtcagctttggtttgtttggcagcgtttgggtgaacgatttctccagagccaagaaagccaacaagaggggggactggagggacccttccccgaggttggtcctgcactttggtggtggtggcttcctggcattttataattgtcagttgtcttggagctcttccccagtggtcacacccacctgtgacatcctgtctgagaagttccatcgaggacaagccttagaagctctaggccaggctcagcctgtctgctatacactgctggaccagagatacttctcagggctagggaacatcattaagaatgaagccttgtacagagctgggatccatcccctttctctcggttcagtcctgagtgcctcgcgtcgggaggtcctggtggatcacgtggtggagttcagtacagcctggctgcagggcaagttccaaggcagaccgcagcacacacaggtctaccagaaagaacagtgccctgctggccaccaggtcatgaaggaggcgtttgggcccgaagatgggttacagaggctcacctggtggtgcccgcagtgccagccccagttgtcagaggagccagagcagtgccagttctcctaaggagctggtggtgctcctcacggaaccttgccgcttggggaacctgacgtctaagtgtccagaaaggaggatgtgggcagggacggggtacagaggatagtgtgggtcagaggtgccagtagtataatattcgtctccctggagttatgttgaaggcagagttttcatagggttagattttttttatccttttctagttcagttaattcatcctgttgaattgcaccatcgtgaaagatgggaaaaatcgtgatgatgggtaaggggaaaacttcccggaaggcaatggggcaaggaaaaagaaagcctatgggaaatggctgtgctcccaacatagctttgcagatgatgtgggttttttttttttttttggttgtttgttttgagagagagtcttgctctgtctccctggctagggtgtggtggtgtgatcttggctcacggcagccttgccctccctggctcaagcagtcttcatctcagcctccagagtagctgggactacaggcatgtgatatgatgctcggctgatttttgtttactttttagagagatggggtcttgccatatttgccaggctggtttgaactcctacaactcaagcattcctcccaccttggtctcccaaaatgttgggaccacgggtgtgagccaccgcgcccagctagctcctgtgttttgtttttgttttgtaactttggttgatgttaaggccctccattttggaaagcaggaaaacaggatttttttttttttatcttgttccctggaggatccagggatgaggatagagtggcctgagagcagtgcttggattcagcctcctgctgggtccttctgctggatacaggcaccaagaggcggtcgtggagcagggagctgcgccttcctggggtgcccggtggtgtgtagagaaaagctgcttgtttactccttaagtcaatgtattggtgactgttgatttgttgaacaattcaggaatcaagggctgtggagaaactccctcatgttgttggcaacaggtgaatgaacctagagcggtgacatgaaaataaagctcactgttactcgc

SEQ ID NO: 5001 - DNA, 2428 bp, Homo sapiens
gctcctcctcctcccgctgctcctgctcccggggcgagcgcgcagccccgagcccgccccgcgcctcccggagccctcccccccgctgctcccatgcgcgcgggtgggtcatgagcacagcgccctcgctttctgccctaagaagcagtaagcacagcggcggcggcggcggcggaggcggaggcggcggtgcagaccctgcctggaccagcgcgctctctggaaatagctccggccccggcccaggctcgtccccggccggcagcaccaagccttttgtgcacgccgtgcccccctctgaccccctgcgccaggccaaccgcctgccaatcaaggtgctgaagatgctgacggcacgaactggccacattttgcaccccgagtacctgcagcccctgccttccacgccggtcagccccatcgagctcgatgccaagaagagcccgctggcgctgttggcgcaaacatgttcgcagatcgggaagcccgacccctcgccctcctccaaactctcctcggttgcctccaacgggggcggcgcgggcggtgccggcggcggtgctgcgggcgacaaggacaccaaatcgggccccctgaagctgagcgacatcggcgtggaggacaagtcgagtttcaagccgtactccaaacccggctcggataagaaggagccgggaggcggcggtggaggcggtggcggtggcgggggcggcggcgggggtgtttcgtcggagaagtcgggattccgggtaccgagcgccacctgccagccattcacgcccaggacaggcagcccgagctccagcgcctcggccgaagggggacccacggggctggcacacggccggattagctgcggcggcgggattaatgtggatgtgaaccagcatccggatgggggcccgggaggcaaggctctgggctcggactgcggcggttcatcgggctccagctccggctccggccccagcgcgcccacctcctcctcagtgttgggctctgggctggtggctcccgtgtcaccctacaagccgggccagacagtgttccctctgcctcccgcgggtatgacctacccaggcagcctggccggggcctacgccggctacccgccccagttcctgccacacggcgtggcacttgaccccaccaagccgggcagcctggtgggggcgcagctggcggcggccgcggccgggtctctgggctgcagtaagccggccggctccagccctttggccggagcgtctccgccgtccgtgatgacagccagtttgtgccgggacccttactgcctcagctaccactgcgctagccacctggcaggggcggcggccgccagcgcttcttgcgcacatgatccggctgctgcggctgcggcgctgaagtccggatacccgctggtgtaccccacgcacccgctgcacggtgtgcactcctcgctaacggccgccgcggctgctggcgccacaccgccctccctggccggccaccccctctacccctacggctttatgctccctaacgacccactcccccacatctgcaactgggtgtcggccaacgggccgtgcgacaagcgcttcgccacgtccgaagagctgctgagccacttgcggacccatacggcatttcccgggacagacaaactgctgtcgggctaccccagctcgtcgtctctggccagcgctgccgcggccgccatggcttgccacatgcacatccccacctcgggcgcaccgggcagccctgggacgctggcgctgcgcagcccccaccacgcgctgggactcagcagccgctaccacccctactccaagagcccgcttcccacgcctggcgcccccgtgccggtgcccgccgccaccggaccgtactactccccctacgccctctacggacagagactgaccaccgcctcggcgctggggtatcagtgagggcggccgggagggcgagcgagggagaggagggagagggggaggggaggagtccagggagaggcgggatcacggcccaggctgctgacacccgcgcgtggggaggactcgggccacgaaaggaaagaaatgtataccgtatctatctacccgacagcagcgaccgagacccggtgggacactccccttctccccactttcacctccccacccaaactttataaaagttgaaaaaatatcatttgactttttatagaaaaaaaaaggaaaaaataattgagaaagtgttcatctgaggactgcatcggtggacactggtatttatttatgttagctccaagcggaccggtggttcaaaagtgcattatttagtttgagctctgtaggtaaaaaggaggtgggaaaaattttaaaacttgagggtaaaaatgtggaaaacaaaccctcccatcccttgtagattataaataaaagcaaaaccgccacag

SEQ ID NO: 5002 - DNA, 2188 bp, Homo sapiens
catcgcccgaggcgtccgccctgcaaatctgccagcccccgagaggggtttggaaccttagcacccaagtctaagtcaacttcatagtgtgaacatggctacgcctcttcattcccgtccatgccgagcccccgactgcagcattcaaagcccccacggaggttgagccgggcacagaaacacagcagcgggagcagcaacaccagcactgccaacagacgagctcatctgcgcctttgtttagaacgcttaaaagttctgattccactaggaccagactgcacccggcacacaacacttggtttgctcaacaaagccaaagcacacatcaagaaacttgaagaagctgaaagaaaaagccagcaccagctcgagaatttggaacgagaacagagatttttaaagtggcgactggaacagctgcagggtcctcaggagatggaacgaatacgaatggacagcattggatcaactatttcttcagatcgttctgattcagagcgagaggagattgaagtggatgttgaaagcacagagttctcccatggagaagtggacaatataagtaccaccagcatcagtgacattgatgaccacagcagcctgccgagtattgggagtgacgagggttactccagtgccagtgtcaaactttcattcacttcatagaacccagcatgacataacagtgcagggcaaaatattcactgggccaattcaatacaaacaatctcttaaattgggttcatgatgcagtctcctctttaaaacaaaacaaaacaaaacaaaactatacttgaacaaaagggtcagaggacctgtatttaagcaaatacttagcaaaaagtggggcagagcctcccaaggagaacaaatattcagaatattcatattggaaaaatcacaatttttaatggcagcagaaaacttgtgtgaaattttcttgatttgagttgattgagaagaggacattggagatgccatcctctttctcttttctagtttgctcatactacattgagtagacacatttaaggatggggttatgaacccttcctgagctttatggtcctaaaagcaaaataaaaactattcgaatgaaaagacaagaaaatcaggtattaatcttggatagctaataatgagctattaaaactcagcctgggacagtttatcatgaagcctgtggatgatcaatcctttattattattttttttttttgaaaaaagctcatttcatgctctgcaaaaggagagactcccatgaagccttttgaaagggatcatcatgcagctcaactttctgttggattccatgctaagcaagctaaccttatcctgcattgttagcactaggcacccagctgccacctctccatcctgctgcccttaggccacatgggagcagtccatgcatgacagcctctatcctacaaggcctatgagtatggattgggggggccaaaaggaaaaagctccatgtgcctctttgtctgcgtgggtcagaagagttgtgcacgcagattagcaggccaaggtctgagccacagcagcatttttatttcagattttgataactgtttatatgtgttgaaaaccaaaatgacatctttttaaagcttatccataaaaaaaaatagatgtcttttatagtggaaaaacacatggggaaaaaaatcatctattttgatgcagcatttgataatgataaaacacctcacacctcactctttatagtgcacaaaatgaatgaggtctgggctaggtagaaaaagggtcaatgctatttttgtttttagaatcattaccttttaccagcttttaaccatctgatatctatagtagacacactatcatagttaacatagtaagttcagcacttgtctcattttaatgtaaagatttgcttccattttcctacaggcagtctctctcttcctcacagtcccactgtgcaggtgctattgttactcttacgaatattttcagtaatgttattttcttctaagtgaaatttctagcctgcactttgatgtcatgtgttccctttgtctttcaaactccaaggttcccttgtggccctctcccttaccctgggaaggcctcttggagaccttacccctggctgtttggactttgtatactttaaataatttaactacccttaattacttaaaaaaaaaaaaaa

SEQ ID NO: 5003 - DNA, 712 bp, Homo sapiens
acgaaaagcgcgcgcggggattccaggagtcgtggtttcttgccttgatgtactggagcaatcagatcacacggcggcttggagaaacccagggaccatgggcgcctccaggctctataccctggtgctggtcctgcagcctcagcgagttctcctgggcatgaaaaagcgaggcttcggggccggccggtggaatggctttgggggcaaagtgcaagaaggagagaccatcgaggatggggctaggagggagctgcaggaggagagcggtctgacagtggacgccctgcacaaggtgggccagatcgtgtttgagttcgtgggcgagcctgagctcatggacgtgcatgtcttctgcacagacagcatccaggggacccccgtggagagcgacgaaatgcgcccatgctggttccagctggatcagatccccttcaaggacatgtggcccgacgacagctactggtttccactcctgcttcagaagaagaaattccacgggtacttcaagttccagggtcaggacaccatcctggactacacactccgcgaggtggacacggtctagcgggagcccagggcagcccctgggcaggagacgtggctgctgaacagccgcaaaccatcttcacctgggggcattgagtggcgcagagccgggtttcatctggaattaactggatggaagggaaaataaagctatctagcggtg

SEQ ID NO: 5004 - DNA, 1266 bp, Homo sapiens
gtgtcatcgcccaggccgagcacgatgccccctaaaaagggaggtgatggaattaaaccacccccaatcattggaagatttggaacctcactgaaaattggtattgttggattgccaaatgttgggaaatctactttcttcaatgtgttaaccaatagtcaggcttcagcagaaaacttcccgttctgcactattgatcctaatgagagcagagtacctgtgccagatgaaaggtttgactttctttgtcaataccacaaaccagcaagcaaaattcctgcctttctaaatgtggtggatattgctggccttgtgaaaggagctcacaatgggcagggcctggggaatgcttttttatctcatattagtgcctgtgatggcatctttcatctaacacgtgcttttgaagatgatgatatcacgcacgttgaaggaagtgtagatcctattcgagatatagaaataatacatgaagagcttcagcttaaagatgaggaaatgattgggcccattatagataaactagaaaaggtggctgtgagaggaggagataaaaaactaaaacctgaatatgatataatgtgcaaagtaaaatcctgggttatagatcaaaagaaacctgttcgcttctatcatgattggaatgacaaagagattgaagtgttgaataaacacttatttttgacttcaaaaccaatggtctacttggttaatctttctgaaaaagactacattagaaagaaaaacaaatggctgctggaaagtacagacaacaaggcagaaattatattgttgaagatggagatattatcttcttcaaatttaacacacctcaacaaccgaagaagaaataaaatttagttattgctcagataaacatacaacttccaaaaggcatctgatttttaaaaaattaaaatttctgaaaaccaatgcgacaaataaagttggggagatgggaatctttgacaaacaaattatttttatttgttttaaaattaaaatactgtgtacccccccccccccatgaaatgcaggttcactaaatgtgaacagctttgcttttcacgtgattaagaccctactccaaattgtagaagcttttcaggaaccatattactctcatgatacttcattaatctccatcatgtatgccaagcctgacacatttgacagtgaggacaatgtggcttgctcctttttgaatctacagataatgcatgttttacagtactccagatgtctacactcaataaaacatttgac

SEQ ID NO: 5005 - DNA, 1667 bp, Homo sapiens
gggtggcgcgggtccgggcatgaagctgggccgggccgtgctgggcctgctgctgctggcgccgtccgtggtgcaggcggtggagcccatcagcctgggactggccctggccggcgtcctcaccggctacatctacccgcgtctctactgcctcttcgccgagtgctgcgggcagaagcggagccttagccgggaggcactgcagaaggatctggacgacaacctctttggacagcatcttgcaaagaaaatcatcttaaatgccgtgtttggtttcataaacaacccaaagcccaagaaacctctcacgctctccctgcacgggtggacaggcaccggcaaaaatttcgtcagcaagatcatcgcagagaatatttacgagggtggtctgaacagtgactatgtccacctgtttgtggccacattgcactttccacatgcttcaaacatcaccttgtacaaggcaaggatggaagtttggaatcccttcctggatgtcatcgggtttggggtctctttgttgtgggatgagatttgggagttctatgttgaaatgagtgagcccggaaaacggttcatgtctcagttccccttggaaaggtgtagaagttaagagtttgagatgcgtggagcagttaataccatcaaagctttgtggtgggttctgaaaatcggtccagtgagtatgtagggtcatgggattttagaggtggacatgatcaaatccatcttagagatcaacacatctcactcatttttttatttttttctttattttgagacggagtttcactcttcttacccgggctggagtgcaatggcatgatctcagctcactgcaacctctgcctcccggttgaagcaattatcctgcctcagcctcccgggtagctgggattacagggtcctgccaccatgcccagctaatttttgtatttttagtagagatggggttttgccaacttggccaggctggtctcgaactcctgatctcaggtgatgtgcctgcctcagcttcccgaagtgctgggattacaggcgtgagccaccatgcctggccacatctcactcattttgtgaaagaggaaacatgtagagtcctaagtttgttgaacctactgttgtaaactgcctttttttttttttctttgagtcagggtctcactctgttgtccaggctggagtgcagtgacgccatctcagctcactacagcctccaccttcccggttcaagcgattctcctgcctcagcctcccaagtagctgtgactacaggcatgtgccaccacagccggctaatttttgtatttctagtagagatggggtttcctcacattggccaggctggtctcgaactcctgacctcaagtgatctgcctacctcagcctcccagagtgctaggattacaggcgtgagccaccttgcccagccgcaaacagcttttatggttgaactcactgatgagcagcttgggctttggcagcagacacatctggatttgagtcctaacactctcccagctccgtagtcttaggaaagttgcctgacctgagactcagattctgacttacaaagtgttgcttgtaacaatccagggagctctgtctgtcaagtgcataacatgtacctggtgcatgttacaaataaatgttaactgttgcctttt

SEQ ID NO: 5006 - DNA, 6454 bp, Homo sapiens
cctcttcaatttttgggaatagtttgagaagaattggtgtttgtttttctttataaattgggtagaaatcagcataaaagcctagtctagggcttttctcctttgggagacattttgttactgattcaaacctgctattcattttgggtcagttcacgttttctgtttcttcctagttcaaccttggtaggctgtgtatgtctgggaatttatccctttcctctaggttttccaatttgttagcatatgattgttcataatagcctctaattatcctttttatttctttggtaacacttgtaatgtctcctttttcatttctgattgtatttattttggtctcttttttttttttttggttagcctcactagtggtttatcaattttgtttaacttttcaaaaaaccaacttttatcttgttgattctttgcatttttttttgtctctgttgcatttggttctgctatgttatttatattttttctttctactaattgtgtgtttgatttgttcttgctttttgagttccttgaggtgcatcattaggttgtttatttgaaatctttctacttttttagtgtaggcatttattgctataaactttcctcctagtactgcttttgctgtatcccataggttttgcatgatgtgtttccattttctgtttaaaaaatttttttgatgtccatcttaatttcttcattgacccaatgattattcaatagcatgtttaatgtccatatatttgtacagtttccaaatttcttcttcttattgatttcaagttttattcctttgtggtctgagaagatacttgatatgattttaatttttaaaattttattgagccttgttctgtgtcctaacatatggtctatcctggagaatattccatgtgttgatgagatgattgtatattctgctgctgctggatgaactattctgaaaatatctgttaggtccatttggtccaaagtgcagcttaaatctaatgtttctttgttgattttatgtctagatgaactgtccaatgctgagagtaggatattgaagttctcaactatcattttattggactctatctctccatgtagatttaataatatttgctatatgtctctggatgcgcttgtgttggttgcatgcatatttggaattgttatactttgttgctgaattgatccctttattaccatataatgatcttgtttgtcctttttacagtttttgacttaaagtctgttttatctgatgtaagtttagctactcctgattatttttgatttctgtttgtgtggtatatctttttccatcccttcactttcagtctgtgtgtgtctttacaagggaagtgatgttgggtcactttttatccattaagcctgactgtatcttttaggtaggtaatttaacccatattcgaagttattattgataggcgaggatttattcctgtcattttgttcattgttttctggttattttgtatatccttttgatatggtttggctgtgtccccactcagatctcatcttgaattcccatgtgttgtgggagggacccaatgggaagtagttgaatcatggaggcaggtatttcccatgctattcttttaatagtgaataagtctcatgagatctgatggttttaaaaggaggagtttccctgctcaagctctctctttgcctgctgccatccctgtaagatgtgacttgcctctccttgacttccgcaatgattttgaagcctccccagcaatgtagaactgtaagtccattaagcctctttcttttgtaaatttcccagtcttgaatgtgtctttatcagctgtgtgaaaatggactaatacagtaaattagtaccagaagtggggtgttgctaaaagatacctgaatatgtggaagtgactttggaactgggaaacaggcagaggttggaacagtttggagggctcagaaggagacaggaaaatgtgggaaaatttggaagagatttcctagagacttgcccaaaatgctgattgttatatggacaataaagtctaggcttaggttgtctcagatggaaatgaggaacttgttaggaactggcacaatggtgactcctgttatgttttagcaaagagactggtggctttttgcccctgctgtagagatttgtggaattttgaacttgagagatttagggtaactgatagggtatttgaacttgagatttagggtatctgatagaagaaatttctaagcagcaaagcattcaagagatgacttgggtgctgttaaaggccttcagttttatgagggaagcagagcatgaaagtttggaaaatctgcagcctgacaatgcaatagaaaagaaaatcccattttctcaagaaaaattcgatctggctgcagaagtttgtttaagtaacgaggagtcaaatgtgaatccccaagacaatggggaaaatgtctccagggcatgtcacaggtcttcatggcagcccctcccatcaaaggtccagaggcctaggaagaaaagatggttttgtgggctagacccagggacccctgttgtgagcagcctagggtgcctgagtcctagccactccagctgcagctaaaaggagccaaggtacaacttgggctgtggcttcagagggtgcaagccccaagccttagcagcttccacatagtgttgagcctgtgggtgcacagaagtcaaaaattgaggtttgggaactgctgcctagatttcagaaggtgtatggaaattcctagatacccaggcaggagtttgctgcaggggcagggcactcatggagaaactctactagggcagtgcagaagggaaatgtggggtcggagcccccacatagagtccctactgcagcgccacctagtggagctttgagaagagggccaccatcctccagaccccagaatggtggattcactgacagcttgcactgtgtgcctggaaaagctgcagacactcaatgccaacccgtgaaaggagccaggaggggggttaaaccatacaaagccacaggagtggagctgtggccttttttctcccaaggccatggtcatacatcagtatgacctgcatgtcagacatggagtcaaaggagatcattttggagctttgagatttcactgccccactggattttgggcttgcatgggtcctgtagcccctttgtttggcaattttctgccatttggaatgactgtatttacccaatgcctatacccacattgtatctaggaagtaactaactagtttttgattttacatgctcataggcagaagggatttgccttgtctcaaatgagactttggactgtggacttttgagttaatgctgaacttagttaagactttgggggactgttgggaaggcatgattggtttcaaaatgtgaggatatgagatttgggaagggccaggggcagaatgatatggtttggttgtgtccccacccaagtctcatcttgaattcccacatgttgtgggagggacctggtgggaagtaattgagtcatgggggcaggtctttcccatgctgttctcatgatagtgaataagtctcacaaggtctgatggttttgaaaagggtagtttctctgcagaagctctatctttgattgctgccatccatgtgagacatgacttgcttcttcttgccttccaacgtgattcttaggcttcctcagctatgtggaagtgtaagtccattaaacctctttcttttgtaaattgctcagtctcagtcaggtatgtctttatcagcagtgtgaaaacagactaatacacctttgttccttttttctctcattatttatggttgcagtttggtggttttctttagtggtgatgtttgaatcctttcttctttgtgtgtctgaactaccagtgagttttatactttcatgtattttcatgatggtagatattgttctttcacttcccaatgtaggactcccttaaacatttcttataggaccacaacaaacaagacacaaacaaacagtcttttgcttatctgggaaatacttttttcccttttattattactatttttttttttagcaatggagtctcactctgtcacccaggctggagtacagtggcatgatcatagctcactgcagccttgaactcctgggatcaaatggtcctcctgcctcagccttgagtctctggaattgcagatgtgagccactgtgccaggctccttcatttgtgaaggatagctttgctgggtagagtatttttggcttacatttttttattattttttttttttgtacttgtaatatacatccccttttctcctagccagtaaggtttctgctgagaaattccccgttagcctgatggagattctcttataagtgacttgatgcctttctcttgctgtttttagcattttctctttgtcttttgacaattttaccatattgtgccttggagaagaccattttgagttgtatttacttggtaatctttgagcttcctgcatttggaagcattcaggaagttttcagttattagttcattaaataggttttctatgcctttacccatctcatctccatccagaactcccagaatttcagtttttggtcacatatgtgtcccatatgtcatgtagccttgcttcattcttttttctttctttttgtctgactggattattttaaaagactagtcttcaggttcagaaattctttgttttgcttgatctagtctattgttaaagctgtcaattatcttttgtatttatttcaatgatttattctcttccaggatttgtgtttggttctttgttatgctgtctatctctgttgaatttgtcattcagatcatgaatagttttcctgtttttgttttttttttttgtattcattatctgtgttctcttgtatctccctgagtttctttaataacatcattctgaatttttttcaggtatttcatagattttcttttcattggatctgttgctggagaattattgtgcttctttgagatgttatgtttcctttttcatatttcttgcatccttatgtgactatctgtgcctctgacataacagtcatttcttccaattttatggattggcttttatatgggaaagaccttttcttacagctgtatctacagtgttcattggatatcacactttggctttgattctgggtgggtacagtagtatagtttgcatatgattccttcagctgtaattggcatgggtggtgcctgtgagtcattcagtggcttagactgcagtggttttttttggtggttgttgagatggagtctagctctgtcaccaggctggagtgcagtggcacaatctcagctcactgtatcctctgcctcccgtgttcaaccaattctcctgcctcagcctcctgagtagctgggactataggcacgtgcaaccatgcccagctaaattttgtatttttagtagagacggggtttcaccatgttggccaggctgctctcgaactcctgacctcgtgatctacacgcctcggcatctcaaagtgctgggattacaggcgtgagccaccacacttggccagactgcagttgttattggaggctttggtgaggctttgctgaggatggggatgccaggaagtcttgtccttcagcatcagtggtagtggcggtggaccaggtgtgtcaatactagggaccatgggcagcgtttgtgggcactgatgatagcctgtctgtgtgggccaatccctgggactccaggtggcttctttggttgctggcagtgggccagatgggcaggtgcaccactgggctcctgggtggtgtgtgtggcaggctgatctctagttctccaggtgacctatacaggttctggtggtgggtaggcaggcgtttcctcaggcctctcagtagtaagtgtgagcaccagctctggaggcaggtgagtcaatctccaggtccccggatggtacattcaggcaccagcatattcctatgcatttctagataaaagtatttttcagaaaacctgagcatatgtcctattaatacaacttaccctcatcagctctgcatgagaagaaggcggaattccctcagtagaacagtcagaatggaatcacagacttgttttgagccagtcactggtgagggggggtaggataacatgataagctcagaatctaaaccttagactagggaatggcaaactttttccataaagaggcaaacggtaatattttaggctttttgtctagataacctcttttgtagtgacacagtggtgccatcgtagcctaaaagcgtatgtagacaatggataaatcaatggacctggttttattccagtaaaacttaatttatacagtcagagggccagatttggcccttggtctatggttgtttagagcagtcaaaatttattccctggggctgggccaactttttctt

SEQ ID NO: 5007 - DNA, 1619 bp, Homo sapiens
cgggcacgcaccgtggcaggttacgggcgctacagcggcaagatgtacttccagaccatgacagaagccgagtaccagacaagcatccaggagaagttgccactcatcatcggctcctcggccgctggcctggtcttcctcattgctgtggttgtcatcgccatcgtgtgtaacagacgggggtttgagcgtgctgactcggagtacacggacaagctgcaacactacaccagtggccacatgaccccaggcatgaagatctacatcgatcctttcacctacgaggaccccaacgaggcagtgcgggagtttgccaaggaaattgacatctcctgtgtcaaaattgagcaggtgatcggagcaggggagtttggcgaggtctgcagtggccacctgaagctgccaggcaagagagagatctttgtggccatcaagacgctcaagtcgggctacacggagaagcagcgccgggacttcctgagcgaagcctccatcatgggccagttcgaccatcccaacgtcatccacctggagggtgtcgtgaccaagagcacacctgtgatgatcatcaccgagttcatggagaatggctccctggactcctttctccggcaaaacgatgggcagttcacagtcatccagctggtgggcatgcttcggggcatcgcagctggcatgaagtacctggcagacatgaactatgttcaccgtgacctggctgcccgcaacatcctcgtcaacagcaacctggtctgcaaggtgtcggactttgggctctcacgctttctagaggacgatacctcagaccccacctacaccagtgccctgggcggaaagatccccatccgctggacagccccggaagccatccagtaccggaagttcacctcggccagtgatgtgtggagctacggcattgtcatgtgggaggtgatgtcctatggggagcggccctactgggacatgaccaaccaggatgtaatcaatgccattgagcaggactatcggctgccaccgcccatggactgcccgagcgccctgcaccaactcatgctggactgttggcagaaggaccgcaaccaccggcccaagttcggccaaattgtcaacacgctagacaagatgatccgcaatcccaacagcctcaaagccatggcgcccctctcctctggcatcaacctgccgctgctggaccgcacgatccccgactacaccagctttaacacggtggacgagtggctggaggccatcaagatggggcagtacaaggagagcttcgccaatgccggcttcacctcctttgacgtcgtgtctcagatgatgatggaggacattctccgggttggggtcactttggctggccaccagaaaaaaatcctgaacagtatccaggtgatgcgggcgcagatgaaccagattcagtctgtggaggtttgacattcacctgcctcggctcacctcttcctccaagccccgccccctctgccccacgtgccggccctcctggtgctctatccactgcagggccagccactcgccaggaggccacgggccacgggaagaaccaagcggtgccagccacgagacgtcaccaagaaaacatgcaactcaaacgacgg

SEQ ID NO: 5008 - DNA, 549 bp, Homo sapiens
  misc_feature (344)..(526): n is a, c, g, or t
gccggaaccgccatcttccagtaattcgccaaaatgacaaacacaaagggaaagaggagaggcacccgatatatgttctctaggccttttagaaaacatggagttgttcctttggccacatatatgcgaatctataagaaaggtgatattgtagacatcaagggaacgggtactgttcaaaaaggaatgccccacaagtgttaccatggcaaaactggaagagtctacaatgttacccagcatgctgttggcattgttgtaaacaaacaagttaagggcaagattcttgccaagagaattaatgtgcgtattgagcacattaagcattctaagagccgagatannnnnnnnnnnnnnnnnnnnnnnnnnnnnnnnnnnnnnnnnnnnnnnnnnnnnnnnnnnnnnnnnnnnnnnnnnnnnnnnnnnnnnnnnnnnnnnnnnnnnnnnnnnnnnnnnnnnnnnnnnnnnnnnnnnnnnnnnnnnnnnnnnnnnnnnnnnnnnnnnnnnnnnnnnnnnnnnnnnnnnnaaaaaaaaaaaaggacctctggg

SEQ ID NO: 5009 - DNA, 792 bp, Homo sapiens
cttcccccgtaaggaaatggccggggagctccaggggacccaggcgccgtcgcttcggcggagcctgggctgaccagccaggacagcggggtaaacccgaacaattctgcgcgaggtagggaggccatggcgtccggcagtaactggctctccggggtgaatgtcgtgctggtgatggcctacgggagcctggtgtttgtactgctatttatttttgtgaagaggcaaatcatgcgctttgcaatgaaatctcgaaggggacctcatgtccctgtgggacacaatgcccccaaggacttgaaagaggagattgatattcgactctccagggttcaggatatcaagtatgagccccagctccttgcagatgatgatgctagactactacaactggaaacccagggaaatcaaagttgctacaactatctgtataggatgaaagctctggatgccattcgtacctctgagatcccatttcattctgaaggccggcatccccgttccttaatgggcaagaatttccgctcctacctgctggatctgcgaaacactagtacgcctttcaagggtgtacgcaaagcactcattgatacccttttggatggctatgaaacagcccgctatgggacaggggtctttggccagaatgagtacctacgctatcaggaggccctgagtgagctggccactgcgtgagtttggaggggaacgtgtcagagggagctggtacagtagtgttggactgttgccacagtgcagtgaccttcataaagcatataaacaaaatccatg

SEQ ID NO: 5010 - DNA, 1551 bp, Homo sapiens
gtgtcagggggaagctggaaggcgtcgttctcctttcccagctctcctgcctgtccgccatgttttcaggccgggtctggcttggtcttcccccgtaaggaaatggccggggagctccaggggacccaggcgccgtcgcttcggcggagcctgggctgaccagccaggacagcggggtaaacccgaacaattctgcgcgaggtagggaggccatggcgtccggcagtaactggctctccggggtgaatgtcgtgctggtgatggcctacgggagcctggacttgaaagaggagattgatattcgactctccagggttcaggatatcaagtatgagccccagctccttgcagatgatgatgctagactactacaactggaaacccagggaaatcaaaagatcccatttcattctgaaggccggcatccccgttccttaatgggcaagaatttccgctcctacctgctggatctgcgaaacactagtacgcctttcaagggtgtacgcaaagcactcattgatacccttttggatggctatgaaacagcccgctatgggacaggggtctttggccagaatgagtacctacgctatcaggaggccctgagtgagctggccactgcggttaaagcacgaattgggagctctcagcgacatcaccagtcagcagccaaagacctaactcagtcccctgaggtctccccaacaaccatccaggtgacatacctcccctccagtcagaagagtaaacgtgccaagcacttccttgaattgaagagctttaaggataactataacacattggagagtactctgtgacggagctgaaggactcttgccgtagattaagccagtcagttgcaatgtgcaagacaggctgcttgccgggccgccctcggaacatctggcccagcaggcccagactgtatccatccaagttcccgttgtatccagagttcttagagcttgtgtctaaagggtaattccccaacccttccttatgagcatttttagaacattggctaagactattttcccccagtagcgcttttttctggatttgcattcaggtgttattcttaatgtttctgtcaaagcttcttaaaaatcttcacttggtttcagccatagttcaccttccctgttccaggtttatttaattccaaaggtgagagttggagtgagatgtcttccatatctatacctttgtgcacagttgaatgggaactgtttgggtttagggcatcttagagttgattgatggaaaaagcagacaggaactggtgggaggtcaagtggggaagttggtgaatgtggaataacttacctttgtgctccacttaaaccagatgtgttgcagctttcctgacatgcaaggatctactttaattccacactctcattaataaattgaataaaagggaatgttttggcacctgatataatctgccaggctatgtgacagtaggaaggaatggtttcccctaacaagcccaatgcactggtctgactttataaattatttaataaaatgaactattatcaaataaaa

SEQ ID NO: 5011 - DNA, 1694 bp, Homo sapiens
gctggaaggcgtcgttctcctttcccagctctcctgcctgtccgccatgttttcaggccgggtctggcttggtcttcccccgtaaggaaatggccggggagctccaggggacccaggcgccgtcgcttcggcggagcctgggctgaccagccaggacagcggggtaaacccgaacaattctgcgcgaggtagggaggccatggcgtccggcagtaactggctctccggggtgaatgtcgtgctggtgatggcctacgggagcctggtgtttgtactgctatttatttttgtgaagaggcaaatcatgcgctttgcaatgaaatctcgaaggggacctcatgtccctgtgggacacaatgcccccaaggacttgaaagaggagattgatattcgactctccagggttcaggatatcaagtatgagccccagctccttgcagatgatgatgctagactactacaactggaaacccagggaaatcaaagttgctacaactatctgtataggatgaaagctctggatgccattcgtacctctgagatcccatttcattctgaaggccggcatccccgttccttaatgggcaagaatttccgctcctacctgctggatctgcgaaacactagtacgcctttcaagggtgtacgcaaagcactcattgatacccttttggatggctatgaaacagcccgctatgggacaggggtctttggccagaatgagtacctacgctatcaggaggccctgagtgagctggccactgcggttaaagcacgaattgggagctctcagcgacatcaccagtcagcagccaaagacctaactcagtcccctgaggtctccccaacaaccatccaggtgacatacctcccctccagtcagaagagtaaacgtgccaagcacttccttgaattgaagagctttaaggataactataacacattggagagtactctgtgacggagctgaaggactcttgccgtagattaagccagtcagttgcaatgtgcaagacaggctgcttgccgggccgccctcggaacatctggcccagcaggcccagactgtatccatccaagttcccgttgtatccagagttcttagagcttgtgtctaaagggtaattccccaacccttccttatgagcatttttagaacattggctaagactattttcccccagtagcgcttttttctggatttgcattcaggtgttattcttaatgtttctgtcaaagcttcttaaaaatcttcacttggtttcagccatagttcaccttccctgttccaggtttatttaattccaaaggtgagagttggagtgagatgtcttccatatctatacctttgtgcacagttgaatgggaactgtttgggtttagggcatcttagagttgattgatggaaaaagcagacaggaactggtgggaggtcaagtggggaagttggtgaatgtggaataacttacctttgtgctccacttaaaccagatgtgttgcagctttcctgacatgcaaggatctactttaattccacactctcattaataaattgaataaaagggaatgttttggcacctgatataatctgccaggctatgtgacagtaggaaggaatggtttcccctaacaagcccaatgcactggtctgactttataaattatttaataaaatgaactattatcaaataaaa

SEQ ID NO: 5012 - DNA, 1169 bp, Homo sapiens
catttgggcaacggacgaattaagcggcgtggagatgcggcagccactgagctggggccgctggcgcgcgatgcttgcccgaacctacggccccgggccttcggcgggttaccgctgggcctcgggcgcacagggttacgtgcggaatccgccagttggagcgtgcgatctgcagggcgagctggacagattcgggggcatctcggtgcgcctggcgcggctcgatgcgctggaccgcctggacgctgccgccttccagaagggcttgcaggctgcagtacagcaatggcgatcagaaggtagaacagctgtatggctgcacattcccatcctccaaagccgatttattgcccctgctgcttccctgggcttctgctttcaccacgcagaatcggattcatcaacgttgactctgtggctgagagaagggcccagcagattaccaggatatgcttcacatcaagtaggagttgcaggagctgtatttgatgaaagtactagaaaaatactggttgtacaagatcgaaataaattgaaaaatatgtggaagtttccaggaggcctgtcagagcctgaagaagatattggagacacagcggttcgagaagtttttgaagagactggtataaaatcagaattcaggtccgtcctgagtattcggcaacagcacacaaatcctggagcttttgggaagtcagatatgtatatcatctgccgcctaaagccatattcattcaccataaatttttgccaggaagaatgcttaagatgtgagtggatggatctcaatgacctggcgaagactgaaaatacaactcccatcaccagcagagttgctaggctgctgctgtatgggtacagagaagggtttgacaaaattgacctgactgtggaagaacttccagcagtttacacaggactgttttataaactctatcataaggaactgccagagaattataaaactatgaaaggaattgattaaattcacatttatatgtttagaaacatgtagactaacgaatgacataagaaatagtggacattttggattgattaaacatctgactgtgattttctaatgtatatgatttccatgaagaaattttgtttctaaacatgcacattttaaaagcctcttttcgaataaagcaaatgcgtgaaaaaga

SEQ ID NO: 5013 - DNA, 5755 bp, Homo sapiens
  misc_feature (3194)..(3289): n is a, c, g, or t
acagcatccaccttgccgaacagcctgaggactgtactatgcagctggctgaccacattaagttcacgcagagtgctctggactgcatgagtgtggaggtaggacggctgcgtgccttcttgcagggtgggcaggaggctacagatattgccctcctgctccgggatctggaaacttcatgcagtgacatccgccagttctgcaagaagatccgaaggcgaatgccagggacagatgctcctgggatcccagctgcactggcctttggaccacaggtatctgacacgctcctagactgcaggaaacacttgacgtgggtcgtggctgtgctgcaggaggtggcagctgctgctgcccagctcattgccccactggcagagaatgaggggctacttgtggctgctctggaggaactggctttcaaagcaagcgagcagatctatgggaccccctccagcagcccctatgagtgtctgcgccagtcatgcaacatcctcatcagtaccatgaacaagctggccacagccatgcaggagggggagtatgatgcagagcggccccccagcaagcctccaccggttgaactgcgggctgctgcccttcgtgcagagatcacagatgctgaaggcctgggtttgaagctcgaagatcgagagacagttattaaggagttgaagaagtcactcaagattaagggagaggagctaagtgaggccaatgtgcggctgagcctcctggagaagaagttggacagtgctgccaaggatgcagatgagcgcatcgagaaagtccagactcggctggaggagacccaggcactgctgcgaaagaaggagaaagagtttgaggagacaatggatgcactccaggctgacatcgaccagctggaggcagagaaggcagaactaaagcagcgtctgaacagccagtccaaacgcacgattgagggactccggggccctcctccttcaggcattgctactctggtctctggcattgctggtgaaggactcaccactgctgcttcagcagatctctgccatgaggctgcacatctcccagctccagcatgagaacagcatcctcaagggagcccagatgaaggcatccttggcatccctgccccctctgcatgttgcaaagctatcccatgagggccctggcagtgagttaccagctggagcgctgtatcgtaagaccagccagctgctggagacattgaatcaattgagcacacacacgcacgtagtagacatcactcgcaccagccctgctgccaagagcccgtcggcccaacttatggagcaagtggctcagcttaagtccctgagtgacaccgtcgagaagctcaaggatgaggtcctcaaggagacagtatctcagcgccctggagccacagtacccactgactttgccaccttcccttcatcagccttcctcagggccaaggaggagcagcaggatgacacagtctacatgggcaaagtgaccttctcatgtgcggctggttttggacagcgacaccggctggtgctgacccaggagcagctgcaccagcttcacagtcgcctcatctcctaagcactcctttcccctgctgtccccttcgaccctcagccctctggtgccgctctgcccgatgcacagccacctcagccagcccccagtgcttcctgtgtggtgttgagagtgggacttgggccattaagctcacagcaggagtggaggagaagcgatgctgaggaagctttggctgtatcaaatttgaggtctcctcttcgtagtgaccagaagaatgctgtttctaaaattcatgtgcacaggcatcccaggatttggaattcagctgtgagctcatgagctgatggatgtttccaggagtaccctgaagaccacccaggtgggagtgtaagataaccttccagataaagagttgctgctaccaaaagagtgctgacaccatcacagtatgttcccttctcaaccctggacatggttcagaaacagctaaagcagacaagaatctggggcagccaatattgtaccacctgccaaagcttggcacaaacaatctggaagccaaaaattgcacatactgtggaacagagcaagtggttctggcctccctgggatttggatcctggtttccagagctaagaacacaaagtcatgaaggtgaaggaggagaaggctggggtaggaaagctggaccacactaaccacaggaggagatttccggatcagaaagaatgccctcctatccacattgggcttccagtacccacttaccctcaaagaaaaactgaccagaagggacatctttcaggcctgcaaaaagtccactggggcctgcggccagaccagccacagcaggaactgactggcccagggagtggggcaagcagccaggacagcagcatggatcttatcagcaggactcggtccccagctgctgagcagctccaggacatcctgggggaggaagatgaggctcccaaccccaccctctttacagagatggatactctgcagcatgacggagaccagatggagtggaaggagtcagccaggtggataaagtttgaagaaaaggtagaggaaggcggcgaacgctggagcaagccccacgtgtccacactatccctgcacagcctcttcgagctccgtacctgcctgcagacggggacggtgctgctggatttggacagtggctccttaccacagatcatagatgatgtcattgagaagcagattgaggatggtctcctgcggccagagctccgggagagggtcagttacgtcctcctgaggaggcaccgccaccaaaccaagaagcccatccaccgctccttagctgacattgggaagtcagtctccaccacaatcgcagtcctgcccggagccctggtgctggcccgagtctacaccactccacggaagacctgcggatgcggcagagtgcaaattacggacgtctgtgtcatgcccagagcagaagcatgaatgacatttctctcaccccaaacacagaccagcggaaaaacaaattcatgaagaagatccccaaggactcagaagcgtccaacgtgctcgtgggcgaggtggacttcctagaccagccattcatcgcgttcgtgcgcctcatccagtcggccatgctgggaggagtgaccgaggtgcctgtccccaccagnnnnnnnnnnnnnnnnnnnnnnnnnnnnnnnnnnnnnnnnnnnnnnnnnnnnnnnnnnnnnnnnnnnnnnnnnnnnnnnnnnnnnnnnnnnnnnnntgacgtggcctacaaagcccgcaatcgggaagatctgatcgcaggaattgatgaatttctggatgaggtcatcgtccttcctcctggagaatgggacccaaatatccggattgagccccccaagaaggtgccctctgctgacaagaggaaatctgtgttctccctagcagagctgggccagatgaatggctctgtgggaggaggcggcggagctcctggaggaggcaatggaggtggtggtggtggtggcagtggcggcggggctggcagtggcggggccggcggaacaagcagcggggatgatggagagatgccagccatgcatgaaatcggggaggaacttatctggacaggaaggttcttcggtggcctgtgtctggatatcaagaggaagttgccctggttcccaagtgacttctatgatggcttccacattcagtccatctctgccatcctattcatctacctcggctgtatcaccaacgcgatcacctttggtgggcttctgggggatgccaccgacaattatcagggagtgatggagagcttcctgggcactgccatggctggctccttgttctgcctcttctcgggacagcctctcatcattctcagcagcacggggcccatcctcatctttgagaagctcctcttcgacttcagcaaaggcaatggcctggactacatggagttccgcctctggattggcctacactcagctgtccagtgccttatcctagtggccacagatgccagctttatcatcaaatatatcacccgcttcaccgaggagggcttctccacccttatcagcttcatcttcatctacgatgccatcaagaagatgatcggtgccttcaagtactaccctatcaatatggacttcaagccaaacttcatcactacctacaagtgcgagtgtgtcgcccctgacacagtgaatacaaccgtgttcaatgcttcagccccattggcaccagacaccaacgcttctctgtacaacctccttaacctcacagcgttggactggtccctgctgagcaagaaggagtgtctgagctacggcgggcgcctgcttgggaattcctgcaagtttatcccagacctggcgctcatgtccttcatccttttctttgggacatactccatgaccctgaccctgaagaagttcaaattcagccgctattttcctaccaaggtccgggccctggtggctgacttttccattgttttctccatcctgatgttctgtggaatcgatgcctgttttggcctagaaactcccaagctgcatgtgcccagtgtcatcaagccaacgcggcctgaccgaggctggttcgtggccccctttgggaagaacccgtggtgggtatacccagcaagcatcctgcccgccctgctggtgaccatcctgatcttcatggaccagcagatcactgccgtcattgtcaaccggaaggagaacaaactgaagaaggctgccggctaccatctggacctgttctgggtgggcatcctcatggctttgtgctcctttatggggctcccctggtacgtggctgccacggtcatctccatcgcccacatcgacagcctcaagatggagacagagaccagtgcccctggggagcagccccagtttctgggagtcagggaacagagagtaaccggcatcatcgtcttcatcctgacgggaatctctgtcttcctggctcccatcctaaagatcctgggcctcatcatcgttcgaaggcttctggatttcatcttttcccagcacgacctggcctggattgacaacatcctcccagagaaggaaaaaaaggagacagacaagaagaggaagagaaaaaaaggggcccacgaggactgtgatgaggagccccagttccctcctccctcggttataaagattcccatggaaagtgtccaatcagatccccaaaacggtatccactgcattgccaggaaaaagatcttccagttggagttactcactctgattcttccttcagtgacacagaacttgaccgaaggtaagcaggcatggattagagacataagctatacgtcacttacaaaaacatctccagcaaactatctaaacttctttaaactccagagaactatcaaaagaataacgccagctggcagaagaacgaggacggaggttaatggctgctcctggctagatcacaggaccctgcatgatactggaatgctccctggtgaggtactgcagagttacaggatcgtgaactctatttattcccacatcaatgactgctgctccttccttgatcatatctgctgtgatcagatttggaatacctggaaatggagaaaggaaagatcaacttagtactgaaaacagtctacctgtcagattcttgtctaacttcaatttcaagagaccctgaagaactaatcaacatgttttattaaaacctgttaaaaatattaact

SEQ ID NO: 5014 - DNA, 2489 bp, Homo sapiens
  misc_feature (112)..(327): n is a, c, g, or t
  misc_feature (580)..(748): n is a, c, g, or t
aaattgagaccgagaaatgagcagcgagagaatgaattgattatttcttttctgagatgtttatatgaagagaaacagaaagaacacatccatattggggagatgaagcagnnnnnnnnnnnnnnnnnnnnnnnnnnnnnnnnnnnnnnnnnnnnnnnnnnnnnnnnnnnnnnnnnnnnnnnnnnnnnnnnnnnnnnnnnnnnnnnnnnnnnnnnnnnnnnnnnnnnnnnnnnnnnnnnnnnnnnnnnnnnnnnnnnnnnnnnnnnnnnnnnnnnnnnnnnnnnnnnnnnnnnnnnnnnnnnnnnnnnnnnnnnnnnnnnnnnnnnngagccatctgtgtgtgaaaaggaggccttgcccatctctgagagctcctttaagctcctcggctcctcggaggacctgtccagtgactcggagagtcatctcccagaagagccagctccgctgtcgccccagcaggccttcaggaggcgagcaaacaccctgagtcacttccccatcgaatgccaggaacctccacaacctgcccgggggtccccgggggtttcgcaaaggaaacttatgaggtatcactcannnnnnnnnnnnnnnnnnnnnnnnnnnnnnnnnnnnnnnnnnnnnnnnnnnnnnnnnnnnnnnnnnnnnnnnnnnnnnnnnnnnnnnnnnnnnnnnnnnnnnnnnnnnnnnnnnnnnnnnnnnnnnnnnnnnnnnnnnnnnnnnnnnnnnnnnnnnnnnnnnnnnnnnnattattcagagctgggagagcttcccccacgatctcctttagaaccagtttgtgaagatgggccctttggccccccaccagaggaaaagaaaaggacatctcgtgagctccgagagctgtggcaaaaggctattcttcaacagatactgctgcttagaatggagaaggaaaatcagaagctccaagcctctgaaaatgatttgctgaacaagcgcctgaagctcgattatgaagaaattactccctgtcttaaagaagtaactacagtgtgggaaaagatgcttagcactccaggaagatcaaaaattaagtttgacatggaaaaaatgcactcggctgttgggcaaggtgtgccacgtcatcaccgaggtgaaatctggaaatttctagctgagcaattccaccttaaacaccagtttcccagcaaacagcagccaaaggatgtgccatacaaagaactcttaaagcagctgacttcccagcagcatgcgattcttattgaccttgggcgaacctttcctacacacccatacttctctgcccagcttggagcaggacagctatcgctttacaacattttgaaggcctactcacttctagaccaggaagtgggatattgccaaggtctcagctttgtagcaggcattttgcttcttcatatgagtgaggaagaggcgtttaaaatgctcaagtttctgatgtttgacatggggctgcggaaacagtatcggccagacatgattattttacagatccagatgtaccagctctcgaggttgcttcatgattaccacagagacctctacaatcacctggaggagcacgagatcggccccagcctctacgctgccccctggttcctcaccatgtttgcctcacagttcccgctgggattcgtagccagagtctttgatatgatttttcttcagggaacagaggtcatatttaaagtggctttaagtctgttgggaagccataagcccttgattctgcagcatgaaaacctagaaaccatagttgactttataaaaagcacgctacccaaccttggcttggtacagatggaaaagaccatcaatcaggtatttgaaatggacatcgctaaacagttacaagcttatgaagttgagtaccacgtccttcaagaagaacttatcgattcctctcctctcagtgacaaccaaagaatggataaattagagaaaaccaacagcagcttacgcaaacagaaccttgacctccttgaacagttgcaggtggcaaatggtaggatccaaagccttgaggccaccattgagaagctcctgagcagtgagagcaagctgaagcaggccatgcttaccttagaactggagcggtcggccctgctgcagacggtggaggagctgcggcggcggagcgcagagcccagcgaccgggagcctgagtgcacgcagcccgagcccacgggcgactgacagctctgcaggagagattgcaacaccatcccacactgtccaggccttaactgagagggacagaagacgctggaaggagagaaggaagcgggaagtgtgcttctcagggaggaaaccggcttgccagcaagtagattcttacgaactccaacttgcaattcagggggcatgtcccagtgttttttttgttgtttttagatactaaatcgtcccttctccagtcctgattactgtacacagtagctttagatggcgtggacgtgaataaatgcaacttatgtttt

SEQ ID NO: 5015 - DNA, 2562 bp, Homo sapiens
atccctgcagtggaagtgaggaggaagaaaggtgaactccttttctcaagcacttctgctctcctctaccagaatcactcagaatgcttcccgggtgtatattcttgatgattttactcattcctcaggttaaagaaaagttcatccttggagtagagggtcaacaactggttcgtcctaaaaagcttcctctgatacagaagcgagatactggacacacccatgatgatgacatactgaaaacgtatgaagaagaattgttgtatgaaataaaactaaatagaaaaaccttagtccttcatcttctaagatccagggagttcctaggctcaaattacagtgaaacattctactccatgaaaggagaagcgttcaccaggcatcctcagatcatggatcattgtttttaccaaggatccatagtacacgaatatgattcagctgccagtatcagtacgtgtaatggtctaaggggattcttcagaataaacgaccaaagatacctcattgaaccagtgaaatactcagatgagggagaacatttggtgttcaaatataacctgagggtgccgtatggtgccaattattcctgtacagagcttaattttaccagaaaaactgttccaggggataatgaatctgaagaagactccaaaataaaaggcatccatgatgaaaagtatgttgaattgttcattgttgctgatgatactgtgtatcgcagaaatggtcatcctcacaataaactaaggaaccgaatttggggaatggtcaattttgtcaacatgatttataaaaccttaaacatccatgtgacgttggttggcattgaaatatggacacatgaagataaaatagaactatattcaaatatagaaactaccttattgcgtttttcattttggcaagaaaagatccttaaaacacggaaggattttgatcatgttgtattactcagtgggaagtggctctactcacatgtgcaaggaatttcttatccagggggtatgtgcctgccctattattccaccagtatcattaaggatcttttacctgacacaaacataattgcaaacagaatggcacatcaactggggcataaccttgggatgcagcatgacgagttcccatgcacctgtccttcaggaaaatgcgtgatggacagtgatggaagcattcctgcactgaaattcagtaaatgcagccaaaaccaataccaccagtacttgaaggattataagccaacatgcatgctcaacattccatttccttacaattttcatgatttccaattttgtggaaacaagaagttggatgagggtgaagagtgtgactgtggccctgctcaggagtgtactaatccttgctgtgatgcacacacatgtgtactgaagccaggatttacttgtgcagaaggagaatgctgtgaatcttgtcagataaaaaaagcagggtccatatgcagaccggcgaaagatgaatgtgattttcctgagatgtgcactggccactcgcctgcctgtcctaaggaccagttcagggtcaatggatttccttgcaagaactcagaaggctactgtttcatggggaaatgtccaactcgtgaggatcagtgctctgaactatttgatgatgaggcaatagagagtcatgatatctgctacaagatgaatacaaaaggaaataaatttggatactgcaaaaacaaggaaaacagatttcttccctgtgaggagaaagatgtcagatgtggaaagatctactgcactggaggggagctttcctctctccttggagaagacaagacttatcaccttaaggatccccagaagaatgctactgtcaaatgcaaaactatttttttataccatgattctacagacattggcctggtggcgtcaggaacaaaatgtggagagggaatggtgtgcaacaatggtgaatgtctaaacatggaaaaggtctatatctcaaccaattgcccctctcagtgcaatgaaaatcctgtggatggccacggactccagtgccactgtgaggaaggacaggcacctgtagcctgtgaagaaaccttacatgttaccaatatcaccatcttggttgttgtgcttgtcctggttattgtcggtatcggagttcttatactattagttcgttaccgaaaatgtatcaagttgaagcaagttcagagcccacctacagaaaccctgggagtggagaacaaaggatactttggtgatgagcagcagataaggactgagccaatcctgccagaaattcatttcctaaataaacctgcaagtaaagattcaagaggaatcgcagatcccaatcaaagtgccaagtgagcttgaagttggatatccaaaatggccgtgcaagcttaggctggggattctggatgcaacgtctttacaaccttacctagatatctgctactcacatttttggtagtgtttcaaacgttctttatccagacagacaatgtttaagagaaacaacttatttctgttaatatttaccggtagaattcacaccctctatcataaacatatgctgcag

SEQ ID NO: 5016 - DNA, 1225 bp, Homo sapiens
gcggaaagttttgggtgccgggaggaagtctaacctttgggagactccaagacagcagctccgaggtcggcgggggtctgggtggccatggaggagccccctgtgcgagaagaggaagaggaggagggagaggaggacgaggagagggacgaggttgggcccgagggggcgctgggcaagagccccttccagctgaccgccgaggacgtgtatgacatctcctacctgttgggccgcgagcttatggccctgggcagcgacccccgggtgacgcagctgcagttcaaagtcgtccgcgtcctggagatgctggaggcgctggtgaatgagggcagcctggcgctggaggagctgaagatggagagggaccacctcaggaaggaggtggaggggctgcggagacagagccctccggccagcggggaggtgaacctgggcccaaacaaaatggtggttgacctgacagatcccaaccgaccccgcttcactctgcaggagctaagggatgtgctgcaggaacgcaacaaactcaagtcgcagctcctggtggtgcaggaagagctgcagtgctacaagagtggcctgattccaccaagagaaggcccaggaggaagaagagaaaaagatgctgtggttactagtgccaaaaatgctggcaggaacaaggaggagaagacaatcataaaaaagctgttcttttttcgatcggggaaacagacctagatccaaggccacaagtaaggctatggctctgattctagaagacaaccttccaagatgcctggcaaaaccacctccctgtgccacacagacacactaggcctgtgtatttatttccccttcaaagcagactgaggagggaggagacgaggttctcttggcatcactttctccctggctgcagaactagacacccttgaagatttggcctgggccagtgagactgaaatcaagaaaaacagaagggatgtgcagggtgggggggtccacttcctgctcccatgtcaacccccagggcctccagcgtgcagacgcgtgtcctactcatctgctcccacggatgaccctggtcttcaatggttagcagaagggagaaaagaaagcaggaaaatgtgctattgagattccagtggtgacttcactgatatttagtgaatatttgatttagccaacatgcctttctttatgtgattttgtattaaagtaaaatgatttttatactttc

SEQ ID NO: 5017 - DNA, 3650 bp, Homo sapiens
ggctggggggccgcgggcgggaggcggataaaaaggccccagggcgcccggggagggagcccgttagcgctgctccgccgcggcgcccgcccagccccggactgtccgcgctccatctggtatcttggcctcagctgtccttgaagtcaccatggcgtggtccccaccagccaccctctttctgttcctgctgctgctaggccagccccctcccagcaggccacagtcactgggcaccactaagctccggctggtgggcccagagagcaagccagaggagggccgcctggaggtgctgcaccagggccagtggggcaccgtgtgtgatgacaactttgctatccaggaggccacagtggcttgccgccagctgggcttcgaagctgccttgacctgggcccacagtgccaagtacggccaaggggagggacccatctggctggacaatgtgcgctgtgtgggcacagagagctccttggaccagtgcgggtctaatggctggggagtcagtgactgcagtcactcagaagacgtaggggtgatatgccacccccggcgccatcgtggctacctttctgaaactgtctccaatgcccttgggccccagggccggcggctggaggaggtgcggctcaagcccatccttgccagtgccaagcagcatagcccagtgaccgagggagccgtggaggtgaagtatgagggccactggcggcaggtgtgtgaccagggctggaccatgaacaacagcagggtggtgtgcgggatgctgggcttccccagcgaggtgcctgtcgacagccactactacaggaaagtctgggatctgaagatgagggaccctaagtctaggctgaagagcctgacgaataagaactccttctggatccaccaggtcacctgcctggggacagagccccacatggccaactgccaggtgcaggtggctccagcccggggcaagctgcggccagcctgcccaggtggcatgcacgctgtggtcagctgtgtggcagggcctcacttccgcccaccgaagacaaagccacaacgcaaagggtcctgggcagaggagccgagggtgcgcctgcgctccggggcccaggtgggcgagggccgggtggaagtgctcatgaaccgccagtggggcacggtctgtgaccacaggtggaacctcatctctgccagtgtcgtgtgtcgtcagctgggctttggctctgctcgggaggccctctttggggcccggctgggccaagggctagggcccatccacctgagtgaggtgcgctgcaggggatatgagcggaccctcagcgactgccctgccctggaagggtcccagaatggttgccaacatgagaatgatgctgctgtcaggtgcaatgtccctaacatgggctttcagaatcaggtgcgcttggctggtgggcgtatccctgaggaggggctattggaggtgcaggtggaggtgaacggggtcccacgctgggggagcgtgtgcagtgaaaactgggggctcaccgaagccatggtggcctgccgacagctcggcctgggttttgccatccatgcctacaaggaaacctggttctggtcggggacgccaagggcccaggaggtggtgatgagtggggtgcgctgctcaggcacagagctggccctgcagcagtgccagaggcacgggccggtgcactgctcccacggtggcgggcgcttcctggctggagtctcctgcatggacagtgcaccagacctggtgatgaacgcccagctagtgcaggagacggcctacttggaggaccgcccgctcagccagctgtattgtgcccacgaggagaactgcctctccaagtctgcggatcacatggactggccctacggataccgccgcctattgcgcttctccacacagatctacaatctgggccggactgactttcgtccaaagactggacgcgatagctgggtttggcaccagtgccacaggcattaccacagcattgaggtcttcacccactacgacctcctcactctcaatggctccaaggtggctgaggggcacaaggccagcttctgtctggaggacacaaactgccccacaggactgcagcggcgctacgcatgtgccaactttggagaacagggagtgactgtaggctgctgggacacctaccggcatgacattgattgccagtgggtggatatcacagatgtgggccccgggaattatatcttccaggtgattgtgaacccccactatgaagtggcagagtcagatttctccaacaatatgctgcagtgccgctgcaagtatgatgggcaccgggtctggctgcacaactgccacacagggaattcatacccagccaatgcagaactctccctggagcaggaacagcgtctcaggaacaacctcatctgaagctgtcactgcacactcctagctgctgccgatacaccagatacctcagcttattggagccatgcccttcacagagtcccaactcagaggaaaagggccagtgccaaggggcaccaagaacctgctcaggaagccttttgatggcaagatcaccaatccagatggtattgctccctcaggatggctctgggcctgcccctaagggcctgtggcctatggaatatgtcctccaggctttgctcagctgagctcctcttctgtaaggaaacccagtcatccctgaatcttgccacagagatccgggattcaggagctctcagtttcttagggatggactatggcccagtcccccatctaagtggtgctttgcaaatgtcttggaggagtataggacagaggaccaaaatacacagcaggtagtgttagctctctgctaggagctcaaagcaacacaacttgtatcaaaatcacaactggcagagaagctggtggatccaatcctttcttcatctgttgttatttagaactcacctctcacactctgttctttagtgtccttacctttatcttaccacacacatgggtgtttctattatccttggaagcacagacctcgggcatccccttattgcctgatgggccaacaccaacagttacggagtgcttgagaaggggcaagtttcacagaaatggccagatagggccttcctacagagcagcaagagtaggccaagcagaaagactgctgaggtaacacggaccccagcccctgtcagggcctctgccaaggaaataatatggaccatttacctggcaggcagtctgctctctctcaggatcaccacgcatctcaggattggtctaaacttcaagtctcaaccaagtgtctgaagtgaactttgcattgaataaatttttgccatggaaagaacatcaaacaagccactcatctctacagagataagaaaacaagtttggcagagcaagagacagaagaccgtggagaaatcagaagggggaacagtcagtttagttaaggatggaacctgggaaaggccaccattcctgcttgatggggctctgatttgctcttgctcaagtggaataaaaccccatggtcttcttgacatgattcttgatcttttctccactgagacacacttaagtgatgatccttacaggactgacaccctaatgccaataaaagttgctcattatggactgctac

SEQ ID NO: 5018 - DNA, 1373 bp, Homo sapiens
ctttccggcaggagactgggcactcgctgtcacccgcgagctgcctccctcagcgagatctgagcatctttccggaggctaacagacctgggcttcggggtgaccactgtgcttgcctcagtttccttttctggagcaggggaaggcccggctccctgcccaaaggcggctgtgcgctaagtggcagacgctcggggagagccggcgcggggcggaccccagcgccagtagtgacaggggcgaacgccgccgggagactccagccggcgggcgagcaggcctgtcgttgctggtggcggcatggtcttctgtctgtcgagcgaggagccgcgccgcccgctgcgaagcgacatggtccacttccaggcctcggaagtccagcagctgctacacaacaagttcgtggtcatcttgggggactccattcagagggctgtgtacaaggacctggtgctcttgctccagaaagactcactgctcacagctgcccagctgaaagccaagtaccttgaggatgttctggaagagctgacatatggacctgccccggacctggtgatcatcaactcctgcctctgggatctctccagatatggtcgctgctcaatggagagctaccgggagaacctggagcgggtgtttgtgcgcatggaccaagtattgccagactcctgcctgctggtgtggaacatggcgatgcccctcggggaacgtatcactgggggtttcctcctgccagagctccagcccctggcaggctccctgcggcgggatgtggttgaagggaacttctacagtgctacgctggccggggaccactgctttgatgtcctagacctccactttcacttccggcatgcagtacagcaccgtcatcgggatggtgtccactgggaccagcatgcacaccgccacctctcacacctgcttctgacccatgaattcttcaactataatccagtggaggacttctcgatgccaccccacttaggatgtggccctggagtgaactttgtgcctggccctctgccacctccaatccctggccctaatccccatggtcagcactggggcccagtggtccaccgggggatgccacgctatgttcctaacagcccctaccatgtgcggagaatgggggggccctgcaggcagcggctcagacactcagagagactgatccacacatacaaactggacagacggcctcctgcccattcggggacatggcctgggtagactggatcttgggctgggactggatgtgccaatggcccttcagggcctgcctggcacctcaggtactgggctagggtgtctgctatgcctggtattgttcttgtccattgctgtcaccaataaaggcatggaag

SEQ ID NO: 5019 - DNA, 2119 bp, Homo sapiens
gaggtacgcggtgcggtctcccggtacccggagcggctctgattcatgtagagacggggtttcaccgtgttagccagaatggtctcgatctcctgacctcgtgatctgcccgcctcgggcctcccaaagtgctggaattacaggtgtgagccacggcgccgggccccctagggattttcaggtttaacttgtggccctaaagaactggaaacccaaaggaacgaatattcctgccccacagagtcccatctttggtgaggctgtttctggagtttacatgatgaccaaggtactaggcatggccccagttctgggccctaggcctccacaggagcaggtggggcctctgatggtaaaagtcgaggagaaagaagagaaaggcaagtaccttcctagcctggagatgttccgccagcgcttcaggcagtttgggtaccatgatacccctggaccccgagaggccctgagccaactccgggtgctctgctgtgagtggctgaggcccgagatccacaccaaggagcagatcctggagctactggtgctggagcagttcctgaccatcctgccccaggagctccaggcctgggtgcaggagcattgcccggagagcgctgaagaggctgtcactctcctcgaagatctggagcgggaactggatgagccaggacaccaggtctcaactcctccaaacgaacagaaaccggtgtgggagaagatatcctcctcaggaactgcaaaggaatccccgagcagcatgcagccacagcccttggagaccagtcacaaatacgagtcttgggggcccctgtacatccaagagtctggtgaggagcaggagttcgctcaagatccaagaaaggtccgagattgcagattgagtacccagcacgaggaatcagcagatgagcagaaaggttctgaagcagaggggctcaaaggggatataatttctgtgattatcgccaataaacctgaggccagcttagagaggcagtgcgtaaaccttgaaaatgaaaaaggaacaaaaccccctcttcaagaggcaggctccaagaaaggtagagaatcagttcctactaaacctaccccaggagagagacgttatatatgtgctgaatgtggcaaagcctttagtaatagctcaaatctcaccaaacacaggagaacacacactggggagaaaccttacgtgtgcaccaagtgtgggaaagctttcagccacagctcaaacctcaccctccactacagaacacacttggtggaccggccctatgactgtaagtgtggaaaagcttttgggcagagctcagaccttcttaaacatcagagaatgcacacagaagaggcgccatatcagtgcaaagattgtggcaaggctttcagcgggaaaggcagcctcattcgtcactatcggatccacactggggagaagccttatcagtgtaacgaatgtgggaagagcttcagtcagcatgcgggcctcagctcccaccagagactccacaccggagagaagccatataagtgtaaggagtgtgggaaagccttcaaccacagctccaacttcaataaacaccacagaatccacaccggggaaaagccctactggtgtcatcactgtggaaagaccttctgtagcaagtccaatctttccaaacatcagcgagtccacactggagagggagaagcaccgtaactttcaagcgctcctgttgttgtcgttgttttaaactttagaatctgaaaaccagaaagaagtcttgtcattgcagcagcatcgattccggtgatagagtttgtatcactcaacatcaggggatgcctgaggagtgcgagctccacagcaacatggcaggcaggaggtcctcagaaggtgtcaggaggttccacactcgccagttcactggagcagagtcccttcgccacacttagggtcccagtaagccatgccagcattaccttttgcgtagttaaacagacgtgtatccagtctagttaaggaagaaacattaagattgtttaatttttaacatatattcaagaattttaatttgtaaagaattgagccacattgaacacaattgaatgagattcagaataaacttataacatcttg

SEQ ID NO: 5020 - DNA, 1665 bp, Homo sapiens
ctttgaaggggaggtcaccaaggagaacctgctggactttatcaaacacaaccagctgccccttgtcatcgagttcaccgagcagagtgtgtctgactatgacggcaaactgagcaacttcaaaacagcagccgagagcttcaagggcaagatcctgttcatcttcatcgacagcgaccacaccgacaaccagcgcatcctcgagttctttggcctgaagaaggaagagtgcccggccgtgcgcctcatcaccctggaggaggagatgaccaagtacaagcccgaatcggaggagctgacggcagagaggatcacagagttctgccaccgcttcctggagggcaaaatcaagccccacctgatgagccaggagctgccggaggactgggacaagcagcctgtcaaggtgcttgttgggaagaactttgaagacgtggcttttgatgagaaaaaaaacgtctttgtggagttctatgccccatggtgtggtcactgcaaacagttggctcccatttgggataaactgggagagacgtacaaggaccatgagaacatcgtcatcgccaagatggactcgactgccaacgaggtggaggccgtcaaagtgcacagcttccccacactcaagttctttcctgccagtgccgacaggacggtcattgattacaacggggaacgcacgctggatggttttaagaaattcctggagagcggtggccaggatggggcaggggatgatgacgatctcgaggacctggaagaagcagaggagccagacatggaggaagacgatgatcagaaagctgtgaaagatgaactgtaatacgcaaagccagacctcggcgctgccgagacactcgggggctgcacacccagcagcagcgcacgcctccgaacgtgcggcctcgcttgaaggaggcgtcgccggaaacccagggaacctctctgaagtgacacctcacccctacacaccgtccgttcacccccgtctcttccttctgcttttcggtttttggaaagggatccatctccaggcagcccaccctggtggggcttgtttcctgaaaccatgatgtactttttcatacatgagtctgtccagagtgcttgctaccgtgttcggagtctcgctgcctccctcccgcgggaggtttctcctctttttgaaaattccgtctgtgggatttttagacatttttcgacatcagggtatttgttccaccttggccaggcctcctcggagaagcttgtcccccgtgtgggagggacggagccggactggacatggtcactcagtaccgcctgcagtgtcgccatgactgatcatggctcttgcatttttgggtaaatggagacttccggatcctgtcagggtgtcccccatgcctggaagaggagctggtggctgccagccctggggcccggcacaggcctgggccttccccttccctcaagccagggctcctcctcctgtcgtgggctcattgtgaccactggcctctctacagcacggcctgtggcctgttcaaggcagaaccacgacccttgactcccgggtggggaggtggccaaggatgctggagctgaatcagacgctgacagttcttcaggcatttctatttcacaatcgaattgaacacattggccaaataaagttgaaatttt

SEQ ID NO: 5021 - DNA, 2643 bp, Homo sapiens
  misc_feature (610)..(729): n is a, c, g, or t
cttttggtacgctccaagatggctgcctccatagtgcggcgcgggatgctcctggcgcggcaagtggttcttcctcagctctctcctgcaggtaaaagatacctgctttcttcagcctatgtagacagccacaaatgggaagcaagagaaaaagaacattactgtcttgctgatcttgcatctttaatggataaaacatttgagagaaagttgcctgttagttctttaacaatatcacggcttatagacaacatttcctctcgggaagagatagatcatgcagagtattacctttacaagtttcgacacagccccaactgctggtacctgagaaactggactatccacacctggattaggcagtgtctaaaatatgatgcacaagacaaagccctatatacccttgtaaataaggttcaatatggaatttttccagataactttacattcaatttactgatggattctttcataaagaaagaaaattacaaagatgctttatctgtggtttttgaggtcatgatgcaagaagcctttgaagtgccttccacccaacttctctccctctatgttttatttcattgcctggcaaagaagacagacttcagtnnnnnnnnnnnnnnnnnnnnnnnnnnnnnnnnnnnnnnnnnnnnnnnnnnnnnnnnnnnnnnnnnnnnnnnnnnnnnnnnnnnnnnnnnnnnnnnnnnnnnnnnnnnnnnnnnnnnnnnncaagggctacgggctgtgtaccacaacatgcctctgatatggaaaccaggctaccttgacagagcccttcaagtgatggagaaagtggctgcctccccagaagacataaagctgtgtagagaagcgctcgatgtgctgggtgcagtgctgaaggctctgacttcagctgatggggcttcagaggagcagtcccaaaatgatgaagacaaccaggggtcagaaaaactggtggagcagttagacatcgaggaaacagagcagtccaagcttcctcaatacctggaacgatttaaggccttacattctaagcttcaagctctgggcaaaattgagtcagaaggtcttttaagtctgaccacccagcttgtcaaggaaaaactctccacctgtgaagcagaggacatcgccacctatgagcagaatctgcagcagtggcatctagaccttgtacagttgatccagagagaacagcaacagagggagcaagcgaagcaggagtaccaggctcagaaagcagcaaaggcatctgcctaatagggtcccccagggccccacctgtctcacaagaacttcactcaaccccgtgccaggactcagcagtggcctggacacagcctcagcttcctctacccatcttcttttcttaaagcaggctatgtgccctacatgtgcaaggcaccatgactgcccatcgagatgccaagaagggctatggaactatgcaggtggctagtggtcagactgaagtcaccagctgaataccttaaggaggactcttgaggctcataatggagttcctggggcacagggattagttatgagcattaaagttcctaagacccagtgacagtactgggagaaaccaaggctgaagagtcaggttgaagcacaggcttttgttttttgttgtttttgttttttgagacagagtctcattctgtcacccaggctggagtgcagtggcgcaatcttggctcactgcaacctccgactcccaggttcaagcaattctcctgcctcggcctcctttagtaggtgggattacaggtgcataccaccacacctttctaatttttgcatttttagtagagatggggtttcaccatgttggtcaggctggtctcaacctcctgacctcaagtgatctgcccgcctcagcctcccaaagtgctgggatgataggcgtgagccaccacacccggccaagcacaggcttttgaatggtctccctctccccagcccaggtacatgaggccaaggtgaactgtgcatcctgagaccttgtgtccctgagtctcctttctgagtgcaagctgcactgtgagctggctgtgggatactcacacattcccacattctcctttctgccacatctcgcccttctggacctgcactgggagaaattcaggacaggagtgaactcaaggccatgaactcactggatttccatttttaggcacccatagggatgtttttaggatgtaagtttctgaggagaaagctagctctagcatgaagcttttttggattggcttctccatcgtgttggggtaacattttttttccaattttttttttcccaaaacatcgtctcagctcatttatcaagtaggtaaaatgagccttttgtgtacacacagaggcacatgtgcatgcacacacaacttgtgaacacacatttctgttaaagaagttagaaaatgagagatgggttggggcttgaagtgcatcagaggtatgaatgttgtaaaactgtcaggagatgtaaaattcctttctgaagtgtctcttctgtgaaagggttcagagcagattttgcttactatgtagtgttgcccttaagtacagtggtgtaattttattcaagattgtgctcttctatcaaaagcctctggaaataaatgttccgggatc

SEQ ID NO: 5022 - DNA, 2247 bp, Homo sapiens
ccctgcagcggcccgagctgtgcccggctgcttccgcggcggcgctgcccgcacatgggctaggctgccaggatgttcagcttcgaaggcgacttcaagacgcggcccaaggtgtcccttggcggcgcgagcaggaaggaggaaaaggcttctcttttacatcgtactcaggaagaaagaagaaagagagaggaagaaaggcgaaggttgaaaaatgcaataattatccagtcatttattcgaggctatagagacagaaaacagcaatattccatccaaagaagtgcatttgatcgctgtgctaccttgtcacagtccgggggcgcttttcccattgctaatggccccaaccttacccttttggtaaggcagcttctgtttttttacaaacaaaatgaagactcaaaacgtttgatatggctgtatcagaacttaattaaacacagctctctgtttgtcaagcagttggatggatctgagagacttacatgcttatttcagataaaaagattgatgagcctctgttgcaggttgctgcaaaactgtaatgatgacagtttgaatgttgcacttccaatgagaatgcttgaagtattttcgtctgagaatacttacttgcctgttttacaagatgctagctatgtggtgtcagtgattgaacaaattttgcactacatgattcacaatgggtattataggtctctatatttgttgattaacagcaagcttccatcaagtattgaatattctgatttatctcgagttcctatagcaaaaattttgctagagaatgttctaaaaccattgcactttacttacaactcctgtccggaaggtgcgaggcaacaagtttttacagccttcacagaggagtttctggcagcaccttttacagatcagatttttcatttcatcattccggcgcttgcagatgcgcagaccgttttcccttacgagccctttctgaatgcactgttgttaatagagagtagatgttcaagaaagagtggtggagcaccctggcttttctatttcgttttaactgttggcgaaaattatttgggggccctctctgaggaagggctgctggtgtatttgcgggtgctgcagaccttcctctctcagttaccagtctctcctgccagcgcgagctgtcacgactcagccagtgactctgaggaggagagtgaagaagccgacaagccctcaagcccggaggatggcagactgtcagtatcatacataacagaggaatgcctgaagaagctggacacaaagcagcagaccaacaccctgctcaacctggtgtggagggactctgcgagcgaggaggtcttcaccaccatggcctccgtctgccacacgctgatggtgcagcaccgcatgatggtacccaaagtcaggcttctctacagtttagcctttaatgccaggtttctgagacatctttggtttctaatatcttccatgtcaacacggatgatcacagggtctatggtaccgttgcttcaggtgatatccaggggttctcctatgtcttttgaagattctagtcgaatcatcccactcttttatctttttagctccttgtttagtcattcactaatttccatacatgataacgaattcttcggtgatcccatagaagttgtaggtcaaagacaatcatcaatgatgccttttactttagaagagctgataatgttgtctcgatgccttcgagatgcatgcctggggatcatcaagttggcttatccagaaaccaagccagaagttcgagaagaatatattacagcatttcagagtattggagttactactagctctgaaatgcaacaatgcatacagatggaacagaaaagatggattcagttatttaaggttatcaccaatctagtgaaaatgttgaagtccagagacacgaggagaaatttttgtcctccaaaccactggctgtcagaacaagaagatattaaagcagataaggtgttattgaaagatctttttaatatttatcattaaaaaatacattcagcttgtgtctttctggagagaagaattaagcactttaaaattatttattttatgactcatatgactaaatagtaatgataaaccttattactaactcttacgccaacttcttaatggaacatatagcagtatcattgacttaaaatgatattctgagttattaatcctcaattttcctttttaacctgagattatattaaagccttaatgatt

SEQ ID NO: 5023 - DNA, 2818 bp, Homo sapiens
gaggcgttggcagcgggctcggacccacgcggcgccgcggcccgcctggcctgcagcgctcccacccccggcggcggcacgatgccctttgacttcaggaggtttgacatctacaggaaggtgcccaaggaccttacgcagccaacgtacaccggggccattatctccatctgctgctgcctcttcatcctcttcctcttcctctcggagctcaccggatttataacgacagaagttgtgaacgagctctatgtcgatgacccagacaaggacagcggtggcaagatcgacgtcagtctgaacatcagtttacccaatctgcactgcgagttggttgggcttgacattcaggatgagatgggcaggcacgaagtgggccacatcgacaactccatgaagatcccgctgaacaatggggcaggctgccgcttcgaggggcagttcagcatcaacaaggtccccggcaacttccacgtgtccacacacagtgccacagcccagccacagaacccagacatgacgcatgtcatccacaagctctcctttggggacacgctacaggtccagaacatccacggagctttcaatgctctcgggggagcagacagactcacctccaaccccctggcctcccacgactacatcctgaagattgtgcccacggtttatgaggacaagagtggcaagcagcggtactcctaccagtacacggtggccaacaaggaatacgtcgcctacagccacacgggccgcatcatccctgcaatctggttccgctacgacctcagccccatcacggtcaagtacacagagagacggcagccgctgtacagattcatcaccacgatctgtgccatcattggcgggaccttcaccgtcgccggcatcctggactcatgcatcttcacagcctctgaggcctggaagaagatccagctgggcaagatgcattgacgccacacccagcctaatggccgaggaccctgggcatcgccagccttgcctccagtgccctgtctcctttggccctcaatctggtcccaaatctggctgtgtcccaaagggtgtgtgggaagtggggggaaagtagaggatggctcgatgttttgcagctacctcttttccccgtgtttctttttagacaaattacactgcctgaagttgcagttcccctttccctggggagccccaagaacagagtcaggcaaggggtggggagtccagggatcttggggacccctcctaggagagctgcagtctcttccctcaggggaacatcccagaatgcatatcgatcagctctcagccaggcttcgacaatctcgcagcccccactaggtggacacattaatgatttggtttctcccctgggcagccaacctgccccagaggcaccagacctgggctttcagctttgggaccaggctgcccaaaggtactcctttatacacccggcaccttccacgaaagatggtacttcccaagcaagcccctatgatttgtcactatagatggaaccctgacttctgccccatcccttcctgcccaacctagaacccaggcctcaagtctttaccccacccctttcttgttcttccaagaagcagatgcccagttgctcagcagcagcggtagagacttgaatctgcccaccagtcacaaggcgggtcacagattcctcttcctctcttctcctcgttcctctgaaccctccaccaatgtgcctcagcctgtgtgctgtgtggcaacagcattctggttcccactgccaagatctcccaccactctgctgggatctgcagtggcagggagtgggggttgtgtaaaggggaagtcatcttttgagatccagatagacatggtttgtgcacttacgtccagatgggaagcatccttcctgcaaccctaaaataatcatgcagcctctcagacggacgccatcggtcccaaggccttaggtggaggaagcaaagcaggccaggcctgtcctgtccgtggacctctaccttctggactccctacgggtgcagagcacttgggtttctctacagccatcgtggcccacttgacactgtgctcctccatcagctggtcacatgccaacacgttcccagcccctgaggcagctccagggtgccccacctgctcctgaggtgggtccctaccctgctgctcctcttcatcctttcccttttgtcctgaaagggaggagcaatggtccaggcattaattccacccagggaattttagctatgccctcatgtcccagggagagagccacacgcctgttttccatttatagcaagattgtttgcatacttttgtaatgaaggggagtgtccagtggaaggatttttaaaattatcttatggatagctcaagtctctgccatttgtaatttttggctctaagctccgattggagacgcttctccttgtgcatgtgagttgactgatgttgtgagtgtaaatgcatttggttatttctggtatcggtggccacttggatggatttttttacattctgttccccagttacaggaaggagtccctttggtgtgtgaatatgtgtgcctgtagagggtggggcagggtggggtggggatggaaatgtgtggcatgcacatgagttgaaattcttttatgcatttttttgaagaaaaaaaaaaaaacaactctgaggacataggggatgtcagtttcctatggaagagacacctctgacccgttattcttataatcaaaatctgaagggaaaaaaatgttttagttctttccccactcgttgggttcaactagattaaaaggctgattttcag

SEQ ID NO: 5024 - DNA, 3875 bp, Homo sapiens
ggccccatgtgagcggattgcaacacatgcagctgcctggagagagggagccggtgtcctacgtcagagccgccgccgccgcggagccgccgccggggaggagcagccgctgccgcccaggactgggcccttagggaggaggaggcgagaagatggcggacgaccccagtgctgccgacaggaacgtggagatctggaagatcaagaagctcattaagagcttggaggcggcccgcgggtgagcgccgcgtccggcaccctccgtgccctcttggttcccggacccctcaggatggacgcccccgcgccgcatggccggatgaggagaaccaggcactagccaactcccgccttctggatctctgggtagtagcccctgacccaggggcgagggtcggcgcggttggcccgagaaggggtcctttccccgcatggggcaatggcaccagcatgatatcattgatcattcctcccaaagaccagatttcacgagtggcaaaaatgttagcggatgagtttggaactgcatctaacattaagtcacgagtaaaccgcctttcagtcctgggagccattacatctgtacaacaaagactcaaactttataacaaagtacctccaaatggtctggttgtatactgtggaacaattgtaacagaagaaggaaaggaaaagaaagtcaacattgactttgaacctttcaaaccaattaatacgtcattgtatttgtgtgacaacaaattccatacagaggctcttacagcactactttcagatgatagcaagtttggattcattgtaatagatggtagtggtgcactttttggcacactccaaggaaacacaagagaagtcctgcacaaattcactgtggatctcccaaagaaacacggtagaggaggtcagtcagccttgcgttttgcccgtttaagaatggaaaagcgacataactatgttcggaaagtagcagagactgctgtgcagctgtttatttctggggacaaagtgaatgtggctggtctagttttagctggatccgctgactttaaaactgaactaagtcaatctgatatgtttgatcagaggttacaatcaaaagttttaaaattagttgatatatcctatggtggtgaaaatggattcaaccaagctattgagttatctactgaagtcctctccaacgtgaaattcattcaagagaagaaattaataggacgatactttgatgaaatcagccaggacacgggcaagtactgttttggcgttgaagatacactaaaggctttggaaatgggagctgtagaaattctaatagtctatgaaaatctggatataatgagatatgttcttcattgccaaggcacagaagaggagaaaattctctatctaactccagagcaagaaaaggataaatctcatttcacagacaaagagaccggacaggaacatgagcttatcgagagcatgcccctgttggaatggtttgctaacaactataaaaaatttggagctacgttggaaattgtcacagataaatcacaagaagggtctcagtttgtgaaaggatttggtggaattggaggtatcttgcggtaccgagtagatttccagggaatggaataccaaggaggagacgatgaattttttgaccttgatgactactaggtagtcgacatgggtccggcaaaacgtgcctcaccctccagcatccaacccaaggagcatacccatggtggaatccaaacagatccctgccttacaattggaacatttccagaacttaatccatgagcattggatattgaaaagaaaaccgaaacaaaaccagacccagccctacactttggtttgtcatggtgtcagcgcagcagcctacaactaagttcctaaacgccactttggactaatttaaaaaagaatcccagtttttacttttactggatggtgaaattggttgctcttgtattttatgaaaaaaaatgatttttttaaccttcatacatagaagcaaaaatactttaactgctgtaaaccttcaaaagttaatagaagtgagatcatactggtttgtttcttattttgattggagaaaaattaaattgctgcatttcgcagtgacccatttacatggcattctcagcttagactgcgtaagaagaaatatatgtggtgaaatgttggaaccatttctctcttggtctctgtttaatgttgaaagggtgagctaataggaggcactttcaacttcactccctcacgctaccccgtccccctccagactggcagtttcaaggatgcaaattgcattgcaaaatcaaactgactcatgaagcatttgggccagtgcactgtttacttccatctgtttgcagacacatttgtgcccggcgtttgggagccctttgtatcaatgttctgacaagggtccctataaccttaacctactcgaaaccggtttgggatggatatgatggggcttctgtgctattgctgggattgggagaaataaaacatgcaatttaagtggaagcgaagaaatttaaagaggattttattttgcttgggtcaatccttgttaaaagggaggtggatgtgttttccttgtgttggatggcatgagattatgtgaatgttttgatttattaaaatgaactgcaaggtttttcacaggaacgacagacatgtatgactgcatgtaattataaactcctgacctcctggtggggttggagcatctgtttcaaatgtgggacttacaagcacttctcacatgagaaattaggggcgggtgggaagggatgggacacagcttctggcaccatggatttaagaccatgttggatccaaaagttggcctgaaaccctgaagcttatgcttcacagctgggctgtaagtcagacttgaacccagctgatatgcaaggtcatggcgtgcccagggtggtgacagttgaacaaagtgtatagtacgtgcccagtggtagcgatggaaaaaagtataccaaatggactttgaaggaccaaaggttttaaaagtcaattggtatcacctccacactgactagggtagtggggtgcatttggttttcaaattgggtacttttaacactttagtgcctgactgctgttctttactgacttgattcagtcactcgtagctttattggtctgaaccagctccttgttcccaggttacagacctgcctatcgttccaataatcctgtttcacttgaatgaagggagtatgtcttaaatgtaaagtttctggttctcacactgtactctgaggtccaaatactgtctgtcaatgtgtaacctgatgtctcaaccccctgtgagaagagtccattatttggtgttcaccaacgtgggagacttcaccggaacaggcttttttgctttgggctctgctatttgtttgcagaacacccaagagcgagcaaacatgctctcttcacagcagtaccttagggttttgccattgtaaatgggtctgatgtgatatgacaagaccagagaaattggatgtaaatttacatttttgaatatgcttgttgtttcacatgatacatttagggtatgcagctccttttgtagtttttatttttactatttaagtttggaaatgatgccaaatttttgtatttctttaatcaatgtgttctcttcggtgatatatattgcattatatattgatgtgtgtatcaatatatattgatatgtattacacttacacatacaaacacatataagagggggtgaaaaccgtagcctttgcattctctatagcctctgcagagagatactaagcagcaaaatcttggtgttgtgatgtacagaaatggagaagagtattaaaccatatttaagaata

SEQ ID NO: 5025 - DNA, 1149 bp, Homo sapiens
atggctgttagtgtcacaccaattcgggacacaaaatggctaacactggaagtatgtagagagttccagagggggacttgctcacggccagacacggaatgtaaatttgcacatccttcgaaaagctgccaagttgaaaatggacgagtaatcgcctgctttgattcattgaaaggccgttgctccagggagaactgcaaatatcttcatccacccccacatttaaaaacgcagttggagataaatggacgcaataacttgattcagcagaagaacatggccatgttggcccagcaaatgcaactagccaatgccatgatgcctggtgccccattacaacccgtgccaatgttttcagttgcaccaagcttagccaccaatgcatcagcagccgcctttaatccctatctgggacctgtttctccaagcctggtcccggcagagatcttgccgactgcaccaatgttggttacagggaatccgggtgtccctgtacctgcagctgctgcagctgctgcacagaaattaatgcgaacagacagacttgaggtatgtcgagagtaccaacgtggcaattgcaaccgaggagaaaatgattgtcggtttgctcatcctgctgacagcacaatgattgacaccaatgacaacacagtcactgtgtgtatggattacatcaaagggagatgctctcgggaaaagtgcaaatactttcatccccctgcacatttgcaagccaagatcaaggctgcccaataccaggtcaaccaggctgcagctgcacaggctgcagccaccgcagctgccatgggaattcctcaagctgtacttcccccattaccaaagaggcctgctcttgaaaaaaccaacggtgccaccgcagtctttaacactggtattttccaataccaacaggctctagccaacatgcagttacaacagcatacagcatttctcccaccaggctcaatattgtgcatgacacccgctacaagtgttgttcccatggtgcacggtgctacgccagccactgtgtccgcagcaacaacatctgccacaagtgttcccttcgctgcaacagccacagccaaccagatacccataatatctgccgaacatctgactagccacaagtatgttacccagatgtag

SEQ ID NO: 5026 - DNA, 4093 bp, Homo sapiens
  misc_feature (450)..(549): n is a, c, g, or t
  misc_feature (1305)..(1305): n is a, c, g, or t
  misc_feature (1308)..(1309): n is a, c, g, or t
acacaccacacacactcacactcacacacactcacacacactcatcccacttgaatcttggggcaggaactcagaaaacttccagcccgggcagcgcgcgcttggtgcaagactcaggagctagcagcccgtccccctccgactctccggtgccgccgctgcctgctcccgccaccctaggaggcgcggtgccacccactactctgtcctctgcctgtgctccgtgcccgaccctatcccggcggagtctccccatcctcctttgctttccgactgcccaaggcactttcaatctcaatctcttctctctctctctctctctctctctctctctctctctctctctctctctctctctcgcagggtggggggaagaggaggaggaattctttccccgcctacctttcaaggggcactttcactccaagtctcttcccttccaagccgctnnnnnnnnnnnnnnnnnnnnnnnnnnnnnnnnnnnnnnnnnnnnnnnnnnnnnnnnnnnnnnnnnnnnnnnnnnnnnnnnnnnnnnnnnnnnnnnnnnnnttgtttgaaatgctagtataatgcagagtggtgttcgtttaaaatgcctattattcgtatgagttgccaaatgcatagccctgtaaactttacaccttaaaagtatatgactttctttctagaacatgcctcttcagtctttgttaccattttaggtttgaagtagaatctagttttcatatacaaaatagagtttcctctttgaacccttgcattaaaagtatagttatttcccctttctgtaaactctgtaccatcatcatccatttatgcttgaactgaacgtgttccaacagctcttttgagcagcacatgcagaaaatatagctaaagagtcagggtcaatttctttcagacattcttgccacaacagcatttttttttccctcacaattaggaaccaaccggtgagccctctcttaagagacccaggggaagacccaaaggcagcaaaaacaagagtccctctaaagcagctcaaaagaaagcagaagccactggagaaaaacggccaagaggcagacctaggaaatggccacaacaagttgttcagaagaagcctgctcaggaggaaactgaagagacatcctcacaagagtctgccgaagaggactagggggcgccaacgttcgatttctacctcagcagcagttggatcttttgaagggagaagacactgcagtgaccacttattctgtattgccatggtctttccactttcatctggggtggggtggggtggggtggggggagggnggnntggggtggggagaaatcacataaccttaaaaaggactatattaatcaccttctttgtaatcccttcacagtcccaggtttagtgaaaaactgctgtaaacacaggggacacagcttaacaatgcaacttttaattactgttttcttttttcttaacctactaatagtttgttgatctgataagcaagagtgggcgggtgagaaaaaccgaattgggtttagtcaatcactgcactgcatgcaaacaagaaacgtgtcacacttgtgacgtcgggcattcatataggaagaacgcggtgtgtaacactgtgtacacctcaaataccaccccaacccactccctgtagtgaatcctctgtttagaacaccaaagataaggactagatactactttctctttttcgtataatcttgtagacacttacttgatgatttttaactttttatttctaaatgagacgaaatgctgatgtatcctttcattcagctaacaaactagaaaaggttatgttcatttttcaaaaagggaagtaagcaaacaaatattgccaactcttctatttatggatatcacacatatcagcaggagtaataaatttactcacagcacttgttttcaggacaacacttcattttcaggaaatctacttcctacagagccaaaatgccatttagcaataaataacacttgtcagcctcagagcatttaaggaaactagacaagtaaaattatcctctttgtaatttaatgaaaaggtacaacagaataatgcatgatgaactcacctaattatgaggtgggaggagcgaaatctaaatttcttttgctatagttatacatcaatttaaaaagcaaaaaaaaaaaaggggggggcaatctctctctgtgtctttctctctctctcttcctctccctctctcttttcattgtgtatcagtttccatgaaagacctgaataccacttacctcaaattaagcatatgtgttacttcaagtaatacgttttgacataagatggttgaccaaggtgcttttcttcggcttgagttcaccatctcttcattcaaactgcacttttagccagagatgcaatatatccccactactcaatactacctctgaatgttacaacgaatttacagtctagtacttattacatgctgctatacacaagcaatgcaagaaaaaaacttactgggtaggtgattctaatcatctgcagttctttttgtacacttaattacagttaaagaagcaatctccttactgtgtttcagcatgactatgtatttttctatgtttttttaattaaaaatttttaaaatacttgtttcagcttctctgctagatttctacattaacttgaaaattttttaaccaagtcgctcctaggttcttaaggataattttcctcaatcacactacacatcacacaagatttgactgtaatatttaaatattaccctccaagtctgtacctcaaatgaattctttaaggagatggactaattgacttgcaaagacctacctccagacttcaaaaggaatgaacttgttacttgcagcattcatttgttttttcaatgtttgaaatagttcaaactgcagctaaccctagtcaaaactatttttgtaaaagacatttgatagaaaggaacacgtttttacatacttttgcaaaataagtaaataataaataaaataaaagccaaccttcaaagaaacttgaagctttgtaggtgagatgcaacaagccctgcttttgcataatgcaatcaaaaatatgtgtttttaagattagttgaatataagaaaatgcttgacaaatattttcatgtattttacacaaatgtgatttttgtaatatgtctcaaccagatttattttaaacgcttcttatgtagagtttttatgcctttctctcctagtgagtgtgctgactttttaacatggtattatcaactgggccaggaggtagtttctcatgacggcttttgtcagtatggcttttagtactgaagccaaatgaaactcaaaaccatctctcttccagctgcttcagggaggtagtttcaaaggccacatacctctctgagactggcagatcgctcactgttgtgaatcaccaaaggagctatggagagaattaaaactcaacattactgttaactgtgcgttaaataagcaaataaacagtggctcataaaaataaaagtcgcattccatatctttggatgggccttttagaaacctcattggccagctcataaaatggaagcaattgctcatgttggccaaacatggtgcaccgagtgatttccatctctggtaaagttacacttttatttcctgtatgttgtacaatcaaaacacactactacctcttaagtcccagtatacctcatttttcatactgaaaaaaaaagcttgtggccaatggaacagtaagaacatcataaaatttttatatatatagtttatttttgtgggagataaattttataggactgttctttgctgttgttggtcgcagctacataagactggacatttaacttttctaccatttctgcaagttaggtatgtttgcaggagaaaagtatcaagacgtttaactgcagttgactttctccctgttcctttgagtgtcttctaactttattctttgttctttatgtagaattgctgtctatgattgtactttgaatcgcttgcttgttgaaaatatttctctagtgtattatcactgtctgttctgcacaataaacataacagcctctgtga

SEQ ID NO: 5027 - DNA, 2296 bp, Homo sapiens
ggctgccccctccgccaccgccgccgcccgccggcaggttccctggtcagcgtcccatcccggtcgggagttctctccaggcggcacgatgccgaggaaacagtgaccctgagcgaagccaagccgggcggcaggaacttctgcaatgtcccatcaacctctcagctgcctcactgaaaaggaggacagccccagtgaaagcacaggaaatggacccccccacctggcccacccaaacctggacacgtttaccccggaggagctgctgcagcagatgaaagagctcctgaccgagaaccaccagctgaaagaagccatgaagctaaataatcaagccatgaaagggagatttgaggagctttcggcctggacagagaaacagaaggaagaacgccagttttttgagatacagagcaaagaagcaaaagagcgtctaatggccttgagtcatgagaatgagaaattgaaggaagagcttggaaaactaaaagggaaatcagaaaggtcatctgaggaccccactgatgactccaggcttcccagggccgaagcggagcaggaaaaggaccagctcaggacccaggtggtgaggctacaagcagagaaggcagacctgttgggcatcgtgtctgaactgcagctcaagctgaactccagcggctcctcagaagattcctttgttgaaattaggatggctgaaggagaagcagaagggtcagtaaaagaaatcaagcatagtcctgggcccacgagaacagtctccactggcacggcattgtctaaatataggagcagatctgcagatggggccaagaattacttcgaacatgaggagttaactgtgagccagctcctgctgtgcctaagggaagggaatcagaaggtggagagacttgaagttgcactcaaggaggccaaagaaagagtttcagattttgaaaagaaaacaagtaatcgttctgagattgaaacccagacagaggggagcacagagaaagagaatgatgaagagaaaggcccggagactgttggaagcgaagtggaagcactgaacctccaggtgacatctctgtttaaggagcttcaagaggctcatacaaaactcagcaaagctgagctaatgaagaagagacttcaagaaaagtgtcaggcccttgaaaggaaaaattctgcaattccatcagagttgaatgaaaagcaagagcttgtttatactaacaaaaagttagagctacaagtggaaagcatgctatcagaaatcaaaatggaacaggctaaaacagaggatgaaaagtccaaattaactgtgctacagatgacacacaacaagcttcttcaagaacataataatgcattgaaaacaattgaggaactaacaagaaaagagtcagaaaaagtggacagggcagtgctgaaggaactgagtgaaaaactggaactggcagagaaggctctggcttccaaacagctgcaaatggatgaaatgaagcaaaccattgccaagcaggaagaggacctggaaaccatgaccatcctcagggctcagatggaagtttactgttctgattttcatgctgaaagagcagcgagagagaaaattcatgaggaaaaggagcaactggcattgcagctggcagttctgctgaaagagaatgatgctttcgaagacggaggcaggcagtccttgatggagatgcagagtcgtcatggggcgagaacaagtgactctgaccagcaggcttaccttgttcaaagaggagctgaggacagggactggcggcaacagcggaatattccgattcattcctgccccaagtgtggagaggttctgcctgacatagacacgttacagattcacgtgatggattgcatcatttaagtgttgatgtatcacctccccaaaactgttggtaaatgtcagattttttcctccaagagttgtgcttttgtgttatttgttttcactcaaatattttgcctcattattcttgttttaaaagaaagaaaacaggccgggcacagtggctcatgcctgtaatcccagcactttgggaggtcgaggtgggtggatcacttggggtcagggtttgagaccagcctggccaacatggcggaaccctgtctctaccaaaattacaaaaattagccgagcatggtggcgcatgcctgtagtcgcagctactcgcgaggttgaggcaggagaattgcttgaacccaggaagtggcagttgcagtgagccgagacgacaccactgcactccagcctgggtgacagagggagactctgtctcgaaag

SEQ ID NO: 5028 - DNA, 1320 bp, Homo sapiens
ggctgcaggggaggccgcggcggggaaaatggcggacgggaaggcgggagacgagaagcctgaaaagtcgcagcgagctggagccgccggaggacctgaagaagaagcagaaaaacctgtgaaaactaagactgtttcttccagtaatggaggggaaagttccagtcgcagcgctgagaagcgatcagctgaagaagaagctgccgacctcccaacaaagcctacaaagatctccaagtttggatttgccataggtagtcagacgacaaagaaagcatcagccatatccatcaaacttggatcaagtaagcctaaagaaactgttccaactcttgctccaaaaactctttcagtagcagcagcttttaatgaagatgaagatggatacaccaacatcagctggaccaaactccttcaataaaggaaagcatgggttttctgataaccagaagctgtgggagcgaaatataaaatctcatcttggaaatgtccatgaccaagacaattaaatgatgttttgaaattggggtgtggggtgggtgtaaagttaaaaggaacagtttccttttttaaagaatggtataagactatctttggagccgctttttttttctttttcatttttttaaaagattgagtggtacactaataaatgagagtttgaaattagaggtaatttatgttttatatacagatttcaagacatttgctaattttgtagtttcatgtgattagtttccaaaggttacagataataaagaaatcagaaatggtacctttttaagaattgcatatttttttagacacaactattagtacattaagagggaagcaaagttactgtctatttaaaactgcaagcagttaactctcttaactcccttattacctaaacttgtctggctcccaggaacagccttatagagagagggagtattgtattgggaagaaaatgttactgaactattgactgaaagtaaatttagataaaatacagcttttttccttatgggcatttgttttgtttcaagtcatcataaactaggtattgcattgctatccgtggatacagacgcttagctcttaaaagattttttttttatgtaaactgttgaatatttgaaatagtccacttcaccttaatgggtcttgtctatcttcattagtcttcaaagaaaaaccatttgctaccaaagtaaatcagtattttgaatgtgcttctcttgttttttgtttattagctagttcctgtaagcatttccaccagaacttgaggcaaatcgtaaggaagctgtttcttttaaaacacaaaccaccacc

SEQ ID NO: 5029 - DNA, 2761 bp, Homo sapiens
acggaaggggcgtgccggaccgaagtgcgcagactcggaggcatactccctttggtgaccattcttcagtgcatgaagacagacagcatccagaaccgaacggcccgtgccctggggaacttagccatggaacctgagagctgtggggacatccactgtgctggtgctgttcccctgcttgtggagagcctgacagcctgccaggactcgcagtgcctacagagcgtggtgcgtgccctccgtaacctggcagactcaccccagcaccgcctggccttggcacagcagggagcagtgcgtccgctggccgagctcctggccactgccccagatgctgcactgaccttagccctcgtccgtgccctcctggaactcagccgaggctgctcccgggcctgtgctgagcagctaagtctgggtgggggattgggcccactcgtcagcctggcttcccaccccaagcgggcagtacgcgagggaaccattctgatcctcgccaacctgtgtgcccagggcctgattcggcctgcactgggcaatgctggtggcgtggaggtgctggtagatgagctccggcagcgccgggatcctaatggagctagcccaacctcccagcagcccctggtgcgggctgtgtgcctcctatgtcgtgaggccatcaaccgggcccgactgcgggatgctggtggcttggatctactgatgggcctgctgcgggaccctcgtgcaagcgcatggcaccctcgtattgtggctgcccttgtggggtttctgtatgacactggggccctgggccggctgcaggctctgggacttgtgcctctcctggctgggcagctgtgtggtgaggctggtgaggaggaagaagagggaagagaagctgcttcctgggactttcctgaggagaggacccctgagcgggcacagggtggaagcttccggagcctcaggtcgtggctgatctccgagggctatgccacaggccctgatgacatctcccccgactggtctcctgagcagtgtccgccggagcccatggagccggccagccccgccccgaccccgacctcgctgcgggcaccacgcacccaacgcactccgggccgcagccccgccgccgccatcgaggagccttggggacgcgaagggccagccctgctgctgctgtcgcgcttttcccaggcccctgacccaagtggggcacttgtgaccggcccggcgctgtacggcctgctgacctatgtgaccggcgcaccgggcccgcccagcccacgtgcactgcgcattctgtcacgcctcacctgcaaccctgcctgcctcgaggccttcgtgcgcagctatggcgcggcgctgctgcgggcctggctggtgctgggggtggcgcctgacgattggccggcaccacgtgcccggcccactctccacagccggcaccgagagctgggggagaggctactgcagaacctgacggttcaggctgagtcgccctttggggttggggccctgacgcacctgctgctctctgggagccctgaggaccgagtggcctgcgcgctgaccctgcccttcatctgccggtgagtgggaagtgggtgccttgcggggttgggggaggagtgctgtgtttcccaggcccgttgcccaccttttgaaaggccctctcttccctgtaggaagccctctctgtggcgccggctgcttctggagcagggtggtctccggctcctccttgcggcgctgacccggccggccccacacccgctcttcctcttctttgccgcggactccctttcctgcctccaagacctggtgtctcccactgtgagcccagctgtcccacaggcagtccccatggacctagactcaccttccccttgcctctatgaacctctgctgggcccagcccctgtcccagctcccgacctgcacttcctgctggactcaggcctccagctccctgcccagcgagcggcctcagccaccgcctcccctttcttccgggccctgctgtcaggcagctttgcagaagcccagatggacctggtgcccctgcgaggtctgtcgcctggtgcagcctggcctgtcctgcatcatttgcatggttgtcgggggtgtggggctgccctggggcccgtgcccccaccaggccagcccctgctgggttcagaggccgaggaggcactggaggctgctggccgtttcctactgcctgggctggaggaggagctggaagaggccgtgggccgcatccacctgggaccccagggtggcccggagtcagtgggtgaggtgttccgcctgggccggccccggctggctgcccactgtgcccgctggacactggggtcagagcagtgcccgaggaagcggggtctggccctggtggggcttgtggaggcagcaggtgaagaggcagggcccctgacggaggctttgctggctgtggtgatggggattgagttgggggcaagggtccctgcctagactgttgacgtcccctgggaaggggacccaaggatgaattggctgtgaaggatcctccctgagactggcaagggaggaggctgagcagaaggagtcatcatggaggagcggtgagaacatggaaccggactccaagatgacgatctaaagacccgggagcgagaagccaaggccaggttctgggtgtagggcccagagaagcagaacagcccagagccccaggtgcctggcctggcctagacctctggaattgagattaaacaatttggagttggat

SEQ ID NO: 5030 - DNA, 1348 bp, Homo sapiens
ctgagattggcgggtaacctagcaacgcagggaccgcggcggtaactgtggctagggaaacctggagcggtcagagcaggatggccagagacaataaaagcacgagacccaagtagtctaccgaagtctccatctctgtggacctacagaggcacagagggctgctcacaagatggctttagacattctcgccatggcccctttgtatcaggcccctgccatcaacagaatagggccaaagacagacccatctaaaaggccagctgatccactaaaacccttggttctctctaggaccaaactcaccaccattgaggccaaaaggatcatgtccatcctggatgaggcgatctacaaggtggagctggtgaccttgctgtcgtatgtggcatccaacagagaggatatggaggggatgctgggggaggacgtcatgagggcagtgagagagcatgaggatctctgccaggtcctccttgaaaacgtcaggtgcctgaaagagaaagaaaggcaattgcaggagcagaaagaggctgaggaggaagggtggctcagagaccgcctcctttccatagagctgcagaaatccagcctctcaccacttatgcagcagatcaaagactccaccaagaacgtccttagactcttgctcagcaacccccaggctgctaggctcctgcagatgcagacacagggtagaagtgcagaagcccagaattttattgacagcctgatagagctccgtggtttcctgtttgaaaaactactcactagtcccatggaagcgagggataaggcccagttcttacaggatatcagtagacagaatagtaataaccaacaaatcattgatactcttgaaaaggaattggcggagagaatgaagaacaggaatgcagaggaggagttggaggatctggacgctgttcacagggaggagaagatctcgctggaggagctcaggcggaggcacaaagtgctggtgggagagtttgcgcagatccgggaagagcgggagatcaactccaagaaaaggatggaggcagagcaggagatggtgcgcatggtacgggcggccacgctcatccaggccctatggaagggctatctggtgcgctccctgctcagatccaagaagaagcggggcaagggcaaagcaaaggacaaggagaagggcaagcagaaaggcaaggagaagggcaagggcaagaaatgagctctccacccagcccgctcctgacccttatcttcccagagaccaggccaggaaggcccgagatggagagcactaaattcacggctttcatgtttttatttaataaattaaaaagtatttgaagccacattg

SEQ ID NO: 5031 - DNA, 3051 bp, Homo sapiens
tgcagcccctctctagagcttcccccatccccggcacgcccgaccggctgccgtgccaacagctgctccagcaggcccaggctgccattcctcgaagcacctccttcgaccggaagctgcccgatggcacgagaagctcacccagcaaccagtcatcctccagcgaccctggacccggcgggagcggaccctggagaccacaagtgggctacgacgggtgccagtcccctctactgctcgaacaccagggctcaggccctttggaatgtgacggagccagggagagggaagacaccatggaagcaagcaggcacccggaaaccaaatggcatggcccaccttccaaagtcctgggttcctataaagaaagagctctgcagaaagatggaagttgcaaagattcccccaataagctttctcacattggggataaaagttgctccagtcactccagcagcaacacgctctccagcaacacctccagcaacagtgacgacaagcactttgggtctggcgacctgatggaccccgaattactggggctgacctacatcaaaggggcctccaccgacagtggcatcgacacggccccctgcatgcctgccaccatcctcggccctgtgcacctggcaggcagcaggtccctgatccacagccgggccgagcagtgggctgatgctgccgacgtctctgggcctgacgacgagccagccaagttatattctgtgcatggctacgcgtccaccatctccgccggcagtgctgcggaaggcagcatgggcgatctcagtgagatatcctctcattccagtggttctcaccattcaggaagcccttcagctcactgttcaaaaagtagtgggtctctggattcatccaaagtctacatcgtgtctcacagcagcggacaacaggttcccgggtccatgtccaagccctaccacagacaaggggcagtgaacaaatatgtcatcggctggaagaaatcggagggcagcccaccgcccgaggagcctgaagtgactgaatgtcccgggatgtatagtgagatggatgtcatgtccacagcaactcagcatcagacagtggtgggagatgctgttgcagagactcaacatgttctgtctaaagaagattttctgaaattgatgcttcctgacagccccttagtggaggaggggcgaagaaagttttcgttctatgggaacctgtctccaaggaggtcgctttaccgcacgctgtctgacgagagcatctgcagcaacaggagggggtcctcctttggcagttcccggagttccgtgcttgaccaggccctgcccaacgacattctgttcagcaccaccccaccctaccacagcacgctgcctccgcgggcccaccccgcacccagcatggggagcctgagaaatgagttctggttctccgatgggtccttatcagataagtccaagtgcgcagatcctggcctgatgcccctcccggacacagccacagggttagattggacccacctcgtggatgctgcacgggcatttgaagaccagagggtggcatccttctgcaccctgacagatatgcagcatgggcaggacctggaaggggcccaagagctgcccttatgtgtagatccaggcagtggcaaagagttcatggacacaactggggagcgttctccatcaccactgaccgggaaagtcaatcagctggaattaattcttcgacaactccagaccgaccttcggaaggaaaaacaagacaaggccgttctccaagcagaagtgcagcacctgagacaggacaacatgagactgcaggaggagtcccagaccgcgacagctcagctgcggaaattcacagaatggtttttcaccaccatcgacaaaaaatcttagccaatccgcacctcatcaagggaccactgggaaatgccccttgtccctttgaagtcacaaacatgtggtttttctgtgtgctttcaaccaatcgtaaatgtttttgctgttccattctgtgtagcaccattcaccacagcaggatagggagcctcgactctttctcggtaaccacggcagagagcagcgccgatgtgaagatgaatgaatgtaactcctggtgtgaagatgaatgtaaaccctggcgacagttgagacctttttcttttagactctgctaaaacagtgctctggcttgggcttacctcaagagggaagatagttgagttttatttcctgtatatcaggtgacctggtagagatgtaaagcaatttaccatagtttgggctttagtattgtaaaataaacatgagaacaaataatcagacatatactttaatgttaaaggtgctctatttttttggatgtacagtagttttatttccacagccacattaccatagcaataagaaaggaggcatagtacatagttggaaaagctttgtggggggattaaaaaaaaaaaaaagcactgttgtgtttaacactagttcagatgcagttaccttagagacttatttatttgcaggaacaaatggtgcctgaatattaacagtgttctgattaaaaacaaaaaaaagatacatatgccttgtaaatggctcaccgagtggtcagtagtcacttcaactcttagttcacttttgtatagttgctctgctggaaagaaatgagagtgaatctgcttactcactagaacttccctgtgtgctgtgagccagcggaaccacttgtacaatgccagatttgtttatctttgtacagaagctttgatgaagtgtcttgtatttaacacccttatttaagcttatttaaccttaaattgttaattttataaaatttggtttggcctgcactacgatgagggatggaggtagctgcaggctcagaagagactgagcttgcacagatcagaccgagaagcagggtgagagattctaacgactggatgctgctagtaacacattgtttgtattgctttaccatttttaactgttagatttgagatgaacatacattttgcttttttaataaatgtttaaaagaagtccacat

SEQ ID NO: 5032 - DNA, 1732 bp, Homo sapiens
  misc_feature (563)..(695): n is a, c, g, or t
aagccctgaagggtcaaaagaaatacaaaagcaaaggctattttctttttttttttctttctttcattcattccttcctctgtttctttctttcttcctttcatttttttttcttttttaagagcgagcggctctgcggtggcggtttggggtgggcgccgccgaggtgaggtcgtctcgcctcccgcgcgccggtagattggttgtttcattatggatggaggggatgatggtaaccttattatcaaaaagaggtttgtgtctgaggcagaactagatgaacggcgcaaaaggaggcaagaagaatgggagaaagttcgaaaacctgaagatccagaagaatgtccagaggaggtttatgaccctcgatctctatatgaaaggctacaggaacagaaggacaggaagcagcaggagtacgaggaacagttcaaattcaaaaacatggtaagaggcttagatgaagatgagaccaacttccttgatgaggtttctcgacagcaggaactaatagaaaagcaacgaagagaagaagaactgaaagaactgaaggaatacagaannnnnnnnnnnnnnnnnnnnnnnnnnnnnnnnnnnnnnnnnnnnnnnnnnnnnnnnnnnnnnnnnnnnnnnnnnnnnnnnnnnnnnnnnnnnnnnnnnnnnnnnnnnnnnnnnnnnnnnnnnnnnnnnnnnnnctcagagagtggcaacagtgtgaaaagactgaaaccggaccctgagccagatgacaagaatcaagagccctcatcctgcaagtctctcggaaacacctccctgagtggcccctccatccactgcccctctgctgcagtatgtatcggcatcctcccaggcctgggtgcctactctgggagcagcgactccgagtccagctcagacagcgaaggcaccatcaatgccaccggaaagattgtctcctccatcttccgaaccaacaccttcctcgaggccccctagtttctccgtccctacacagggagctcctccccaagggtagatcggaccgttcatgctgcctataggcattatgtccctcaaaaaaaaactcctttgcctgcatcctgtgtacaacatgacatttttaaccaatccaatctaaaaatgtgccagaatccacctgtggcccgaatcgtgtttggttcctctttctactccactgcagatgaccaaacctgtcccgctgccactttcctcactgatattgggaggagggcaaggcccagccgaagttccactaaaaatgccccaggagaataggcaccggctggcttgccaaagggtttgggttttattgctttctgttttttcttttcccgacagcacaaagaagtaagggcagttattggacaggtgttatttaaacattctattgtaaatgaatgtgttgtttggttctactgcattgtggagcatgcgggggaagagaactgacccaggtagtgaaatggagcccttccctggaactaaccagtccttgatgttgtgtgactaagtaaagatgataaaccccatctgctgggggtgtcacttcacactcggcatgcattgtgaaagctttccatacccttggccattccctctctcctctctctccaaccccatttatgcaggaagggactgctaacaagaacgcttccatctcaaaccttttctctgcctgggaaattattttatgtttgtttttgaaataaaggatttagtttaagattct

SEQ ID NO: 5033 - DNA, 1417 bp, Homo sapiens
ggaatggcggcggctgcggactcgttctcaggcggccccgcgggggtgcggcttccgaggtcgccgccactcaaggtgctggcggagcagctgcggcgcgacgcggagggcggcccgggcgcgtggcggctgtcacgggcggcggcgggccgcgggccgctggacctggcggccgtgtggatgcagggcagggtagtgatggcggaccgcggcgaggctcggctgagggacccgagcggggacttctcggtccgcggcctggagcgggtgccgcgcgggcggccctgtctagtcccaggaaagtatgtgatggtgatgggagtggttcaggcctgcagccctgagccctgcctgcaggctgtgaagatgacagacctttctgataatcccatccatgaaagtatgtgggaactggaggtagaagatttacacaggaatattccttagagtatgttggaactgtcgttaaaaacaaccaaaatcccgaaactatttagaagcttataatgatgtggatttcatggacacttttcaatgcgtatttttcaaatgcttctcagagagccttgctttggttgaccaaggagtccggatgtaggaatgtttaaatcctcggatacttcagtgacacagcctctgctgccccttgctttgcctgtgtttgctgatgaaaagcagatgcttgtgtttcattttccttcctggtttgtgtgtgttaattctctctctctctctcagacacagaagtctcatgttgcattttccaaattttatgagtgatgatactttttccattactgctgcgtccctgttttacaatgcaaaatttaagtacggtcgttgcccatggtgattaaagtgtggttatgggcaggaagacagactgtgtaaaaaaggaatgacatcctggctcctcatcttcttcatcagcaactaccataaccagtttgcgagtcaaatggcatttcctaacggcaggcatggcggcccctgaaagacaacagctccctttctgcttcggacaccactcaaacatttagacgcagctctatcccttttcctagctagagaaggtgatgccttcttccattactcagagatgttgagacgttttcagaatttcttgttgaaatgaaaaacatcaagataaaggacgcctttcaggcattagctaaacttccacttcataactttcggcgagacatggtgagcctcctggtgtagagttcttttgtctttgtatggaatgactttttgctgtgatggttttgaatgttgggtttctgctgtctgcttagtacccatgcctgaattttttgagattgtaaatatcaaaggagttagattgtgttctgacatggttgtagactttcacctggattattgatattctacctctaataaatttttaataggc

SEQ ID NO: 5034 - DNA, 1732 bp, Homo sapiens
cgggcggggacggagctcggcgtgcttgctgctggagggtgatggccctgcaaggctgtgggctccgacctcaccgggagtcgacagcgagaggttcgccgaagagcgaggttctgggcgagcgctgaacgccggccccaagcaccccgggtctttacacagtccgcgtccacagactctgacgaagacgtggatctgctctcgctttagctgctcgcggtcctccagatcatgtccgcgactcctgcgactccgcgcggaaaaaaaagtttgccaggcgtggactcaatgacctttccaagctgtgcgcctcgctgcctggaccgggtctgagcgcggctgcccaggttgacctttctgcgggagggctttctctacgtgctgttgtctcactgggtttttgtcggagccccacgccctccggcctctgattcctggaagaaagggttggtcccctcagcacccccagcatcccggaaaatggggagcaaggctctgccagcgcccatcccgctccacccgtcgctgcagctcaccaattactccttcctgcaggccgtgaacaccttcccggccacggtggaccacctgcagggcctgtacggtctcagcgcggtacagaccatgcacatgaaccactggacgctggggtatcccaatgtgcacgagatcacccgctccaccatcacggagatggcggcggcgcagggcctcgtggacgcgcgcttccccttcccggccctgccttttaccacccacctattccaccccaagcagggggccattgcccacgtcctcccagccctgcacaaggaccggccccgttttgactttgccaatttggcggtggctgccacgcaagaggatccgcctaagatgggagacctgagcaagctgagcccaggactgggtagccccatctcgggcctcagtaaattgactccggacagaaagccctctcgaggaaggttgccctccaaaacgaaaaaagagtttatctgcaagttttgcggcagacactttaccaaatcctacaatttgctcatccatgagaggacccacacggacgagaggccgtacacgtgtgacatctgccacaaggccttccggaggcaagatcacctgcgggatcacagatacatccattccaaagaaaaacccttcaaatgtcaggagtgtgggaaaggattttgtcagtctagaactctagcagttcacaaaactttacacatgcagacatcaagccctacagctgcgagcagtgcggcaaagtgttcaggcgaaactgtgatctgcggcggcacagcctgactcacaccccgcggcaggacttctagagaagcccaggatctgtcccgtgccgccgctgctcccctccccagacacctctccacgtctcctacccagggggtcgcatccctagcccttcactgaccccagctcttcccttgctgcagccgcacctgcagctccagggagttaactcttcttctgggggactgagaactgtagaaagccacacactactacatcccttcacaaagagtatatgctagtttcttgtagatattcacagctcattttagagctctgtacataatgttgtgggtctttgttttgttgttttgtttgctttgggatcttgttggatgcacttagatatggaaaatggaagccaaattttatctttaaagactgtattttcaaaataaaactttttcttgtttgtttc

SEQ ID NO: 5035 - DNA, 1450 bp, Homo sapiens
agggctttctctacgtgctgttgtctcactgggtttttgtcggagccccacgccctccggcctctgattcctggaagaaagggttggtcccctcagcacccccagcatcccggaaaatggggagcaaggctctgccagcgcccatcccgctccacccgtcgctgcagctcaccaattactccttcctgcaggccgtgaacaccttcccggccacggtggaccacctgcagggcctgtacggtctcagcgcggtacagaccatgcacatgaaccactggacgctggggtatcccaatgtgcacgagatcacccgctccaccatcacggagatggcggcggcgcagggcctcgtggacgcgcgcttccccttcccggccctgccttttaccacccacctattccaccccaagcagggggccattgcccacgtcctcccagccctgcacaaggaccggccccgttttgactttgccaatttggcggtggctgccacgcaagaggatccgcctaagatgggagacctgagcaagctgagcccaggactgggtagccccatctcgggcctcagtaaattgactccggacagaaagccctctcgaggaaggttgccctccaaaacgaaaaaagagtttatctgcaagttttgcggcagacactttaccaaatcctacaatttgctcatccatgagaggacccacacggacgagaggccgtacacgtgtgacatctgccacaaggccttccggaggcaagatcacctgcgggatcacagatacatccattccaaagaaaaacccttcaaatgtcaggagtgtgggaaaggattttgtcagtctagaactctagcagttcacaaaactttacacatgcaggaatctccacacaaatgtcccacatgtggaagaacctttaatcagagaagtaatctgaaaactcaccttctcacccatacagacatcaagccctacagctgcgagcagtgcggcaaagtgttcaggcgaaactgtgatctgcggcggcacagcctgactcacaccccgcggcaggacttctagagaagcccaggatctgtcccgtgccgccgctgctcccctccccagacacctctccacgtctcctacccagggggtcgcatccctagcccttcactgaccccagctcttcccttgctgcagccgcacctgcagctccagggagttaactcttcttctgggggactgagaactgtagaaagccacacactactacatcccttcacaaagagtatatgctagtttcttgtagatattcacagctcattttagagctctgtacataatgttgtgggtctttgttttgttgttttgtttgctttgggatcttgttggatgcacttagatatggaaaatggaagccaaattttatctttaaagactgtattttcaaaataaaactttttcttgtttgtttc

SEQ ID NO: 5036 - DNA, 3681 bp, Homo sapiens
gatcggcggagctcccacctgcgcttacagctcgctgccgccgtcctgccccgcgcccccaggagacctggaccagaccacgatgtggaaacgctggctcgcgctcgcgctcgcgctggtggcggtcgcctgggtccgcgccgaggaagagctaaggagcaaatccaagatctgtgccaatgtgttttgtggagccggccgggaatgtgcagtcacagagaaaggggaacccacctgtctctgcattgagcaatgcaaacctcacaagaggcctgtgtgtggcagtaatggcaagacctacctcaaccactgtgaactgcatcgagatgcctgcctcactggatccaaaatccaggttgattacgatggacactgcaaagagaagaaatccgtaagtccatctgccagcccagttgtttgctatcagtccaaccgtgatgagctccgacgtcgcatcatccagtggctggaagctgagatcattccagatggctggttctctaaaggcagcaactacagtgaaatcctagacaagtattttaagaactttgataatggtgattctcgcctggactccagtgaattcctgaagtttgtggaacagaatgaaactgccatcaatattacaacgtatccagaccaggagaacaacaagttgcttaggggactctgtgttgatgctctcattgaactgtctgatgaaaatgctgattggaaactcagcttccaagagtttctcaagtgcctcaacccatctttcaaccctcctgagaagaagtgtgccctggaggatgaaacgtatgcagatggagctgagaccgaggtggactgtaaccgctgtgtctgtgcctgtggaaattgggtctgtacagccatgacctgtgacggaaagaatcagaagggggcccagacccagacagaggaggagatgaccagatatgtccaggagctccaaaagcatcaggaaacagctgaaaagaccaagagagtgagcaccaaagagatctaatgaggaggcacagaccagtgtctggatcccagcatcttctccacttcagcgctgagttcagtatacacaagtgtctgctacagtcgccaaatcaccagtatttgcttatatagcaatgagttttattttgtttatttgttttgcaataaaggatatgaaggtggctggctaggaagggaagggccacagccttcatttctaggagtgctttaagagaaactgtaaatggtgctctggggctggaggctagtaaggaaactgcatcacgattgaaagaggaacagacccaaatctgaacctcttttgagtttactgcatctgtcagcaggctgcagggagtgcacacgatgccagagagaacttagcagggtgtccccggaggagaggtttgggaagctccacggagaggaacgctctctgcttccagcctctttccattgccgtcagcatgacagacctccagcatccacgcatctcttggtcccaataactgcctctagatacatagccatcctgctagttaacccagtgtccctcagacttggatggagtttctgggagggtacacccaaatgatgcagatacttgtatactttgagccccttagcgacctaaccaaattttaaaaatactttttaccaaaggtgctatttctctgtaaaacacttttttttggcaagttgactttattcttcaattattatcattatattattgttttttaatattttattttcttgactaggtattaagcttttgtaattatttttcagtagtcccaccacttcataggtggaaggagtttggggttcttcctggtgcaggggctgaaataacccagatgcccccaccctgccacatactagatgcagcccatagttggctcccctagcttccagcagtccactatctgccagaggagcaagggtgccttagaccgaagccaggggaagaagcatcttcataaaaaactttcaagatccaaacattaatttgtttttatttattctgagaagttgaggcaaatcagtattcccaaggatggcgacaagggcagccaagcagggcttaggatatcccagcctaccaatatgctcattcgactaactaggagggtgagttggccctgtctcttcttttttctggacctcagtttcctcaatgagctggtaagaatgcactaaccttttgatttgataagttataaattctgtggttctgatcattggtccagaggggagataggttcctgtgatttttccttcttctctatagaataaatgaaatcttgttactagaacaagaaatgtcagatggccaaaaacaagatgaccagatttgatctcagcctgatgaccctacaggtcgtgctatgatatggagtcctcatgggtaaagcaggaagagagtgggaaagagaaccaccccactctgtcttcatatttgcatttcatgtttaacctccggctggaaatagaaagcattcccttagagatgaggataaaagaaagtttcagattcaacagggggaagaaaatggagatttaatcctaaaactgtgacttggggaggtcagtcatttacagttagtcctgtgtctttcgacttctgtgattattaaccccactcactaccctgtttcagatgcatttggaataccaaagattaaagccttgacataagatctcatttgcagaaagcagattaaagaccatcagaaggaaattatttaggttgtaatgcacaggcaactgtgagaaactgttgtgccaaaaatagaattccttctagtttttcttgttctcatttgaaaggagaaaattccactttgtttagcatttcaagcttttatgtatccatcccatctaaaaactcttcaaactccacttgttcagtctgaaatgcagctccctgtccaagtgccttggagaactcacagcagcacgccttaatcaaaggttttaccagcccttggacactatgggaggagggcaagagtacaccaatttgttaaaagcaagaaaccacagtgtctcttcactagtcatttagaacatggttatcatccaagactactctaccctgcaacattgaactcccaagagcaaatccacattcctcttgagttctgcagcttctgtgtaaatagggcagctgtcgtctatgccgtagaatcacatgatctgaggaccattcatggaagctgctaaatagcctagtctggggagtcttccataaagttttgcatggagcaaacaaacaggattaaactaggtttggttccttcagccctctaaaagcatagggcttagcctgcaggcttccttgggctttctctgtgtgtgtagttttgtaaacactatagcatctgttaagatccagtgtccatggaaaccttcccacatgccgtgactctggactatatcagtttttggaaagcagggttcctctgcctgctaacaagcccacgtggaccagtctgaatgtctttcctttacacctatgtttttaaatagtcaaacttcaagaaacaatctaaacaagtttctgttgcatatgtgtttgtgaacttgtatttgtatttagtaggcttctatattgcatttaacttgtttttgtaactcctgattcttccttttcggatactattgatgaataaagaaattaaagtg

SEQ ID NO: 5037 - DNA, 3498 bp, Homo sapiens
ggacgcgcgtgagctcaggcgtccccgccccagcttttctcggaaccatgaaccccaactgcgcccggtgcggcaagatcgtgtatcccacggagaaggtgaactgtctggataagttctggcataaagcatgcttccattgcgagacctgcaagatgacactgaacatgaagaactacaagggctacgagaagaagccctactgcaacgcacactaccccaagcagtccttcaccatggtggcggacaccccggaaaaccttcgcctcaagcaacagagtgagctccagagtcaggtgcgctacaaggaggagtttgagaagaacaagggcaaaggtttcagcgtagtggcagacacgcccgagctccagagaatcaagaagacccaggaccagatcagtaacgtgaagataaaataccatgaggagtttgagaagagccgcatgggccctagcgggggcgagggcatggagccagagcgtcgggattcacaggacggcagcagctaccggcggcccctggagcagcagcagcctcaccacatcccgaccagtgccccggtttaccagcagccccagcagcagccggtggcccagtcctatggtggctacaaggagcctgcagccccagtctccatacagcgcagcgccccaggtggtggcgggaagcggtaccgcgcggtgtatgactacagcgccgccgacgaggacgaggtctccttccaggacggggacaccatcgtcaacgtgcagcagatcgacgacggctggatgtacgggacggtggagcgcaccggcgacacggggatgctgccggccaactacgtggaggccatctgaacccgcagcgcccccatctgtcttcagcacattccacggcatcgcatccgtcctgggcgtgacccgtccattcttcagtgtctctgttttttaaaacctgcgacagcttgtgattcctacccctcttccagcttcttttgccaactgaagccttcttctgccacttctgcgggctccctcctctggcaggcttcccccttgatcgacttcttggttttctctctggatggaacgggcatgggcctctctgggggaggcagggctggaatgggagacctgttggcctgtgggcctcacctgcccctctgttctctcccctcacatcctcctgcccagctcctcacatacccacacattccagggctggggtgagcctgactgccaggaccccaggtcaggggctccctacattccccagagtgggatccacttcttggttcctgggatggcgatggggactctgccgctgtgtagggaccagtgggatgggctctacctctctttctcaaagagggggctctgcccacctggggtctctctccctacctccctcctcaggggcaacaacaggagaatggggttcctgctgtggggcgaattcatcccctccccgcgcgttccttcgcacactgtgattttgccctcctgcccacgcagacctgcagcgggcaaagagctcccgaggaagcacagcttgggtcaggttcttgcctttcttaattttagggacagctaccggaaggaggggaacaaggagttctcttccgcagcccctttccccacgcccacccccagtctccagggacccttgcctgcctcctaggctggaagccatggtcccgaagtgtagggcaagggtgcctcaggaccttttggtcttcagcctccctcagcccccaggatctgggttaggtggccgctcctccctgctcctcatgggaagatgtctcagagccttccatgacctcccctccccagcccaatgccaagtggacttggagctgcacaaagtcagcagggaccactaaatctccaagacctggtgtgcggaggcaggagcatgtatgtctgcaggtgtctgacacgcaagtgtgtgagtgtgagtgtgagagatggggcgggggtgtgtctgtaggtgtctctgggcctgtgtgtgggtggggttatgtgagggtatgaagagctgtcttcccctgagagtttcctcacttacataaagctcccttgaagcaagaaagagggtcccagggctgcaaaactggaagcacagcctcggggatggggagggaaagacggtgctatatccagttcctgctctctgctcatgggtggctgtgacaaccctggcctcacttgattcatctctggttttcttgccaccctctgggagtccccatcccattttcatcctgagcccaaccaggccctgccattggcctcttgtcccttggcacacttgtacccacaggtgaggggcaggacctgaaggtattggcctgttcaacaatcagtcatcatgggtgtttttgtcaactgcttgttaattgatttggggatgtttgccccgaatgagaggttgaggaaaagactgtgggtggggaggccctgcctgacccatcccttttcctttctggccccagcctaggtggaggcaagtggaatatcttatattgggcgatttgggggctcggggaggcagagaatctcttgggagtcttgggtggcgctggtgcattctgtttcctcttgatctcaaagcacaatgtggatttggggaccaaaggtcagggacacatccccttagaggacctgagtttgggagagtggtgagtggaagggaggagcagcaagaagcagcctgttttcactcagcttaattctccttcccagataaggcaagccagtcatggaatcttgctgcaggccctccctctactcttcctgtcctaaaaataggggccgttttcttacacacccccagagagaggagggactgtcacactggtgctgagtgaccgggggctgctgggcgtctgttctttaccaaaaccatccatccctagaagagcacagagccctgaggggctgggctgggctgggctgagcccctggtcttctctacagttcacagaggtctttcagctcatttaatcccaggaaagaggcatcaaagctagaatgtgaatataacttttgtggaccaatactaagaataacaagaagcccagtggtgaggaaagtgcgttctcccagcactgcctcctgttttctccctctcatgtccctccagggaaaatgactttattgcttaatttctgcctttcccccctcacacatgcacttttgggcctttttttatagctggaaaaaacaaaataccaccctacaaacctgtatttaaaaagaaacagaaatgaccacgtgaaatttgcctctgtccaaacatttcatccgtgtgtatgtgtatgtgtgtgagtgtgtgaagccgccagttcatctttttatatggggttgttgtctcattttggtctgttttggtcccctccctcgtgggcttgtgctcgggatcaaacctttctggcctgttatgattctgaacatttgacttgaaccacaagtgaatctttctcctggtgactcaaataaaagtataattttt

SEQ ID NO: 5038 - DNA, 1014 bp, Homo sapiens
ggaagttggacgcatgcgccgtttctctgcatggtgtgcgttctcgttctagctgcggccgcaggagctgtggcggttttcctaatcctgcgaatatgggtagtgcttcgttccatggacgttacgccccgggagtctctcagtatcttggtagtggctgggtccggtgggcataccactgagatcctgaggctgcttgggagcttgtccaatgcctactcacctagacattatgtcattgctgacactgatgaaatgagtgccaataaaataaattcttttgaactagatcgagctgatagagaccctagtaacatgtataccaaatactacattcaccgaattccaagaagccgggaggttcagcagtcctggccctccaccgttttcaccaccttgcactccatgtggctctcctttcccctaattcacagggtgaagccagatttggtgttgtgtaacggaccaggaacatgtgttcctatctgtgtatctgcccttctccttgggatactaggaataaagaaagtgatcattgtctacgttgaaagcatctgccgtgtagaaacgttatccatgtccggaaagattctgtttcatctctcagattacttcattgttcagtggccggctctgaaagaaaagtatcccaaatcggtgtaccttgggcgaattgtttgacaaatggcaactgacttctttagaattttgcagttaacagtagtatgtactcaaattggggggaaaaaaaccctacatgtttcttgtaaaggcgtctgacagtcctgagaattattgatggtaaggaataaaaaatgtacagatgactcagtgaagaaactgaggcttctcttatgaaacaaacattgataaacgtaactactaaatgtttatgcctctgtaaaccaaatttcttttctagataaaaatatgtattactacctgcaaattttcttctggctgttttagtagtattttttttacagaactaaatatagagtttgtatgattagt

SEQ ID NO: 5039 - DNA, 2929 bp, Homo sapiens
gcgcctggaaacacgaacttccggtctcttaggctccgggccacagagacggtgtcagtggtagcctagagaggccgctaacagacaggagccgaacgggggcttccgctcagcagagaggcaagatggctacggcagggggtggctctggggctgacccgggaagtcggggtctccttcgccttctgtctttctgcgtcctactagcaggtttgtgcaggggaaactcagtggagaggaagatatatatccccttaaataaaacagctccctgtgttcgcctgctcaacgccactcatcagattggctggcagcttcaattagtggagacacaggggttatccacgtagtagagaaagaggaggacctacagtgggtattgactgatggccccaaccccccttacatggttctgctggagagcaagcattttaccagggatttaatggagaagctgaaagggagaaccagccgaattgctggtcttgcagtgtccttgaccaagcccagtcctgcctcaggcttctctcctagtgtacagtgcccaaatgatgggtttggtgtttactccaattcctatgggccagagtttgctcactgcagagaaatacagtggaattcgctgggcaatggtttggcttatgaagactttagtttccccatctttcttcttgaagatgaaaatgaaaccaaagtcatcaagcagtgctatcaagatcacaacctgagtcagaatggctcagcaccaaccttcccactatgtgccatgcagctcttttcacacatgcatgctgtcatcagcactgccacctgcatgcggcgcagctccatccaaagcaccttcagcatcaacccagaaatcgtctgtgaccccctgtctgattacaatgtgtggagcatgctaaagcctataaatacaactgggacattaaagcctgacgacagggttgtggttgctgccacccggctggatagtcgttcctttttctggaatgtggccccaggggctgaaagcgcagtggcttcctttgtcacccagctggctgctgctgaagctttgcaaaaggcacctgatgtgaccaccctgccccgcaatgtcatgtttgtcttctttcaaggggaaacttttgactacattggcagctcgaggatggtctacgatatggagaagggcaagtttcccgtgcagttagagaatgttgactcatttgtggagctgggacaggtggccttaagaacttcattagagctttggatgcacacagatcctgtttctcagaaaaatgagtctgtacggaaccaggtggaggatctcctggccacattggagaagagtggtgctggtgtccctgctgtcatcctcaggaggccaaatcagtcccagcctctcccaccatcttccctgcagcgatttcttcgagctcgaaacatctctggcgttgttctggctgaccactctggtgccttccataacaaatattaccagagtatttacgacactgctgagaacattaatgtgagctatcccgaatggctgagccctgaagaggacctgaactttgtaacagacactgccaaggccctggcagatgtggccacggtgctgggacgtgctctgtatgagcttgcaggaggaaccaacttcagcgacacagttcaggctgatccccaaacggttacccgcctgctctatgggttcctgattaaagccaacaactcatggttccagtctatcctcaggcaggacctaaggtcctacttgggtgacgggcctcttcaacattacatcgctgtctccagccccaccaacaccacttatgttgtacagtatgccttggcaaatttgactggcacagtggtcaacctcacccgagagcagtgccaggatccaagtaaagtcccaagtgaaaacaaggatctgtatgagtactcatgggtccagggccctttgcattctaatgagacggaccgactcccccggtgtgtgcgttctactgcacgattagccagggccttgtctcctgcctttgaactgagtcagtggagctctactgaatactctacatggactgagagccgctggaaagatatccgtgcccggatatttctcatcgccagcaaagagcttgagttgatcaccctgacagtgggcttcggcatcctcatcttctccctcatcgtcacctactgcatcaatgccaaagctgatgtccttttcattgctccccgggagccaggagctgtgtcatactgaggaggaccccagcttttcttgccagctcagcagttcacttcctagagcatctgtcccactgggacacaaccactaatttgtcactggaacctccctgggcctgtctcagattgggattaacataaaagagtggaactatccaaaagagacagggagaaataaataaattgcctcccttcctccgctcccctttcccatcaccccttccccatttcctcttccttctctactcatgccagattttgggattacaaatagaagcttcttgctcctgtttaactccctagttacccaccctaatttgcccttcaggacccttctactttttccttcctgccctgtacctctctctgctcctcacccccacccctgtacccagccaccttcctgactgggaaggacataaaaggtttaatgtcagggtcaaactacattgagcccctgaggacaggggcatctctgggctgagcctactgtctccttcccactgtcctttctccaggccctcagatggcacattagggtgggcgtgctgcgggtgggtatcccacctccagcccacagtgctcagttgtactttttattaagctgtaatatctatttttgtttttgtctttttcctttattctttttgtaaatatatatataatgagtttcattaaaatagattatccc

SEQ ID NO: 5040 - DNA, 1425 bp, Homo sapiens
cggcgttggtggtggcagtggacggggcggctgggcctggaacagtcggagcagccgctagcagaaggatgacccaagacgggaagcgggctgctgagcctcgccgattcccgtgcttgtaactgccccagccggacaccccccctcccttgacctacccggagctcagcctggccttacttcagtgataaaaggaggaaaggctggctacagcaaacatcattcaagatgtccagcaaagggagcagcacagatggcagaacagacttagctaatggaagcctgtctagcagtccagaggagatgtctggagctgaagaggggagggagacatcctcaggcattgaagtggaggcctcagacctgagtttgagcttgactggggatgatggtggccccaaccgcaccagcacagaaagtcgaggcacagacacagagagctcaggtgaagataaggactctgacagcatggaggacactggtcattactccattaatgatgaaaatcgagtccatgaccgctcagaggaagaggaagaggaggaagaagaggaggaagaagagcagcctcggcgccgtgtacagcgcaagcgggctaaccgtgaccaggactcatcagatgatgagcgggccctagaggactgggtgtcctcagaaacatcagctctaccccgacctcgctggcaagccctccctgcccttcgggagcgggagctgggttcaagtgcccgctttgtctatgaggcctgtggggcaagagtctttgtgcagcgtttccgcctgcagcatgggcttgagggccatactggttgtgtcaataccctgcactttaaccagcgcggcacctggctggccagtggcagcgatgacctgaaggtggtggtgtgggattgggtacggcggcagccagtactggactttgagagtggccacaaaagtaatgtgttccaggtgaggcaagggagcataatagcaactgagagaatcaggcatgagttagagaaatctgaactgcagcatggattgggagctgatagtgagttattgtaggaattacatatcgggacatggccctactttggctcccctaatgacctaaatacactgaaagactcttggcaaccctagattccttgagcatgtggactgttggaagcctcataggtagggtgcatgcagcttattaaatgtgtgctggtaggaggcagtgtagtataagcacaggctcttgaaccaaactgcctgagttcaaatcctagcccttctgcttactagctcagtgatcttggccaagttattttacctttgtcttcagtttatctgtaaaatgggactaataacacatagggttatgaggattaagtaacaatagaagctaagcagttagaactgtgactggtacttaataaacatttgataaatgtt

SEQ ID NO: 5041 - DNA, 5153 bp, Homo sapiens
gtgagccgcaggcttcgggaggcgagggggcggggggagcagcgccgaggccgccgcctccgcctccgccgcctaggactagggggtgggggacggacaagccccgatgccgggggagacggaagagccgagacccccggagcagcaggaccaggaagggggagaggcggccaaggcggctccggaggagccccaacaacggccccctgaggcggtcgcggcggcgcctgcagggaccactagcagccgcgtgctgaggggaggtcgggaccgaggccgggccgctgcggccgccgccgccgcagctgtgtcccgccggaggaaggccgagtatccccgccggcggaggagcagccccagcgccaggcctcccgacgtccccgggcagcagccccaggccgcgaagtccccgtctccagttcagggcaagaagagtccgcgactcctatgcatagaaaaagtaacaactgataaagatcccaaggaagaaaaagaggaagaagacgattctgccctccctcaggaagtttccattgctgcatctagacctagccggggctggcgtagtagtaggacatctgtttctcgccatcgtgatacagagaacacccgaagctctcggtccaagaccggttcattgcagctcatttgcaagtcagaaccaaatacagaccaacttgattatgatgttggagaagagcatcagtctccaggtggcattagtagtgaagaggaagaggaggaggaagaagagatgttaatcagtgaagaggagataccattcaaagatgatccaagagatgagacctacaaaccccacttagaaagggaaaccccaaagccacggagaaaatcagggaaggtaaaagaagagaaggagaagaaggaaattaaagtggaagtagaggtggaggtgaaagaagaggagaatgaaattagagaggatgaggaacctccaaggaagagaggaagaagacgaaaagatgacaaaagtccacgtttacccaaaaggagaaaaaagcctccaatccagtatgtccgttgtgagatggaaggatgtggaactgtccttgcccatcctcgctatttgcagcaccacattaaataccagcatttgctgaagaagaaatatgtatgtccccatccctcctgtggacgactcttcaggcttcagaagcaacttctgcgacatgccaaacatcatacagatcaaagggattatatctgtgaatattgtgctcgggccttcaagagttcccacaatctggcagtgcaccggatgattcacactggcgagaagccattacaatgtgagatctgtggatttacttgtcgacaaaaggcatctcttaattggcacatgaagaaacatgatgcagactccttctaccagttttcttgcaatatctgtggcaaaaaatttgagaagaaggacagcgtagtggcacacaaggcaaaaagccaccctgaggtgctgattgcagaagctctggctgccaatgcaggcgccctcatcaccagcacagatatcttgggcactaacccagagtccctgacgcagccttcagatggtcagggtcttcctcttcttcctgagcccttgggaaactcaacctctggagagtgcctactgttagaagctgaagggatgtcaaagtcatactgcagtgggacggaacgggtgagcctgatggctgatgggaagatctttgtgggaagcggcagcagtggaggcactgaagggctggttatgaactcagatatactcggtgctaccacagaggttctgattgaagattcagactctgccggaccttagtggacaggaagacttggggcatgggacagctcagactttgtatttaaaagttaaaaaggacaaaaaaaaaatctaaagcatttaaaatctagtgaaataactgaagggcctgctctttccattgtggatcacagcacacacatacatacaccctccacctccccatcccctgttctccctctgttgctccccttataaaattgatgttgtctttaccagaaaggtagacaaaaaagaagcagcagcagctcttaaagtgagggttattctcatactcggttccagccatcagcagacttcctgctcatcggcagatccccctttccaacctgtaactctgatgtgctctggatcagcttttaacttttaatcatatattactgtcttctaaatcccttctcctcctctactgctgccctatggttctggctcctaccccctgcggcacacttatcttcaaataccatagaattctaatctctggaggctggcagcttgacttggcactttagggccccttagcagggtgagctgttaaaacagcacacatctctcatcccctcttcctttattcccccctgggtttcagaaaggaaggatatatggggaccacctcccccttctttgatcccagcatctcagtccccctcccaaccctccatatggctctcaatggtgctcacttgcttggaagcaggctcccaatagggagggggctgccctctacagtctctttgactgtaagacagggctctgtatcagtgagacgatgagaaaagtcccaggctaatggcagaaatttgcactttgaacatgtgtgtttttgtgttgtggaacctgagattccttatttattaacaggaagtctgattttttttttttggagtctttgttgctatattttgtggggctgggagagagagattagattattttgacatgggatcccttccataacaggtactttgaaggcaagacatagggttgaagaagcacagccagcctctgaaatcatagctctccagtggcttttaaagaaagctggtcctcagcactaacaaaatcactacaatagcctagtgcttttttggaagcctttttagggaagaatgttaggttcatggtaactagtatgctctttgagatttttacagtgttgaaacttaagaattttgagagggtgaggagggttgttcagaatctaaattacagatagatgattgtttcttgtgaatttgtttcttttcctttttttttgtccctaccatttccttacatttcccttggggcccatctctggctccttgctttttgtttcttgctttgctttatcagttcattccagctccctgttagtgaaggacactgctgttagtgaaggaacaaagtctatgagtcctaaaattttaagtcaaagaaaactgctctgtttcccctttagtaacacttctgaagaggaaaaacttcaatagccaaagttaataatcctatataataattgctttggctttcacctaaaattctgggcatcacaatttccttgggatagaggttgtgttggggaatagattgcttattgctgttcactggagagaaaaggtagtgtttttgtacaaggtcataccgccagaagccccaaatcctattttggctcatcttcaggtaaagagtaattcctatcctgtgtgcctcagaagctagaatcgaaggcttaccctattcattgtttattgtcagaaatgcatgatggctcttggaaagaatgacgttttgctggaaaaaaaaaaaagaacagtttgtgtttcacaaacatggcttatcaattttttcaaagaattcttttttcccaaaaagaggagtaacaaaatgtcatttctgaaagaggcttactttataccaactagtgtcagcatttgggatgccagggaacagagagtgagacacctacaatcaccagtctcaaatgcgctattgtttcttttcagagtgttgcagatttgccatttctccataatatggggatagaaaatggaataaagatagaagggatgtagaatatgctttcctgccaacatggtttggagtcgactttggtatattgactagatttgaaaatacaagattgattagatgaatctacaaaaaagttgtcctcctctcaggtcccttttacactttttgactaactagcatctatattccacacttagcttttttgtcacacttatcctttgtctccgtaaatttcatttgcagtggttagtcatcagatattttagccacctacacaaaagcaaactgcatttttaaaaatctttctgagatgggagaaaatgtattctcctttcctataccgctctcccaacaaaaaaacaactagttagttctactaattagaaacttgctgtactttttcttttcttttaggggtcaaggaccctctttatagctaccatttgcctacaataaattattgcagcagtttgcaatactaaaatattttttatagactttatatttttccttttgataaagggatgctgcatagtagagttggtgtaattaaactatctcagccgtttccctgctttcccttctgctccatatgcctcattgtccttccagggagctcttttaatcttaaagttctacatttcatgctcttagtcaaattctgttacctttttaataactcttcccactgcatatttccatcttgaattggtggttctaaattctgaaactgtagttgagatacagctatttaatatttctgggagatgtgcatccctcttctttgtggttgcccaaggttgttttgcgtaactgagactccttgatatgcttcagagaatttaggcaaacactggccatggccgtgggagtactgggagtaaaataaaaatatcgaggtatagactagcatccacatagagcacttgaacctcctttgtacctgtttggggaaaaagtataatgagtgtactaccaatctaactaagattattatagtctggttgtttgaaataccatttttttctccttttgtgtttttcccactttccaatgtactcaagaaaattgaacaaatgtaatggatcaatttaaaatattttatttcttaaaagccttttttgcctgttgtaatgtgcaggacccttctcctttcatgggagagacaggtagttacctgaatataggttgaaaaggttatgtaaaaagaaattataataaaagggatactttgcttttcaaatctttgttttctcttattctaggtaaggcatattaaaaataaatatgtaaagaagaaaaataaaagttgtcttcatgg

SEQ ID NO: 5042 - DNA, 2988 bp, Homo sapiens
ggtcagcggcgcgggtgctgcgcctagctgcgcaccatggccgggttgctggcgttgctgggtccggcaggcagggtgggcgcccgggtccggcctcgcgccacctggctcctgggcgccaccgccccctgcgccccgccgcccctggccctggccctgctcccgcccaggctagacgcccggctgctccgcacggcgcgcggggactgccgcggccaccaggaccccagccaggccacggggacaacaggcagcagcgtcagctgcacagaggagaaaaagcaaagcaagtcacagcaactgaaaaagatttttcaagagtatggcactgttggcgtgtcattgcacattggaatctcattaatttccttgggcatattttacatggttgtgtcaagtggtgtggacatgcctgcaatcctgctgaaactcggatttaaagagtccctggtacagtcaaaaatggcagcaggcacaagtaccttcgtggtggcctatgcaatccacaagctgtttgcgccagtgagaatcagcattacgctagtctctgtgcccttgattgtcagatattttcgaaaagtgggattttttaaacctccagctgcaaaaccttaatgaactcttcagtcgtacacactgaaaacctatttcttctaaattacatgatttggattggttttagggttttagggttgtagggtttcttttggagaggtagggggctaattgctatgttctcatggataaactttgccagcaaaaatcaggcttttgaacaattttaattttttgcctcataaattttgtgaatgctattcattatagggcttgtatatataatctaaaatgtcagcaaggcatcggagatgggttaacatctcaaaacaaaatagcctacaaatgttccttgtgggagactttggcgagggtctgtgggtaaaagcaccagggggttaatcttggctcagtttcctaaaaagcattgattaatttaactggcttttaaatatccccttccgctgatatttgttgtcagctgcctacagtttaatatgcagcgttcacaaaacagctgccagtgctacaattaatgaagcaaaacttaatatgtaatcacaatctaaattagcatcaatactttgacattcattacattggtttgggggaagaaaagtagttctggtatgtttcattgatccccagataccttccaatctggacatgatggggctgattccagatggtttttctgaaatttcattaaggtaggtcagcgtcatttgtctctgtttaggtaaaatataaaaaccctgcccagtagcagtggcatcgcttggttcctgatgcccatgttccagaggaattcggataccacaaacagctaagacaatctcagcttttcttagacaatcttctatctcaaacttcagacattccagaattgtcatgatgtttacactgtctgagttaaaaatcctgttcaagaaaaaaaaagattttgtatcacttcttaaaaaggaatattcatagcacttgtcacaaatagaaggcaaccatgagataatacaagccagggagaggcttgtattacatgacaggtgtaattagtctgctgagccagctttacccaatgaagggcatatgtgttagagagattagctaagagtagaaattcgagcatagaggccaggtgcggtggctcacgcctgtaatcccagcactttgggaggttgaggcaggcgtgtcacttgaggccaggagttcgagaccagcctggccaacatgatgaaaccccgtctctactacaaatacaaaaattagccgggtgtggtggcacacgcctgtagtcccagctactggggaggctgaggcagcattgcttgaacccaggaggtggaggttgcagtgagccaagatcacaccactgcactccagcctgggcgacagagggagacactgtctccaaaagaaagaaatcccagcgtagatccaaactgagacactgaggcttcgtccttatagtagtcaggagcaggcgattgaagtaattctgtcctgcggggttcagcatcatgcacgttccccctgggccattctctgatgcagggcacttgctccacactctgggaacccagattcaccagtctgccctgtcacgtagttgaaggagttgcatttatctttctggctcctaattcctttaaaattacatttgttgcagaacctccacaaggctaaataaaattacatttgtgaccatcagagaactgaataaaccattaactggccatcctggttttgcagagatcaggttgttgacagttcctggttgacccacagctacccatgtcagttatctccactaacatatccaagaatctttgtaggacaatttctccacctgcaaggtctttcaggtagaactcttcttttaaggcaattagcccattgccaaaaggttttactgtcttaaagctgtctttctgagatctaattccaaggacttctccacagctaagtgagatgcctcacaccattaggtgatgctttggacagaacagagtattttcatcttgtgtttaaagcaattccttggcttcggctcctcaccactttctatgccagtctcccatttatgtccctagtaatgcctatgcaaaaaaaaaaaaagaaaaaaaagaaaaactgatggtgaaacctacaggtttaagggcttaaatctcaaactttgttaggagtaacaggagcgtgctgagcgggcaagcaataaaacaaatcataccaaaaagccacattgctctctcctaagccccaaccccactccactcctgtggccaggggtccaaacagaaaataaccggagaagacaaggaggtcaaaggatcagggaactaagcattatgtgaattcaccagcaagatgtacagaacgcctgtgtttacattgtttttatggaactagcagaataaaacatctattttaaaaatg

SEQ ID NO: 5043 - DNA, 2007 bp, Homo sapiens
ccctcccctgcgcactcccctcgctgcccgggcccggagcgcagcgcggccgcacagattcacaatgttgaaagcccttttcctaactatgctgactctggcgctggtcaagtcacaggacaccgaagaaaccatcacgtacacgcaatgcactgacggatatgagtgggatcctgtgagacagcaatgcaaagatattgatgaatgtgacattgtcccagacgcttgtaaaggtggaatgaagtgtgtcaaccactatggaggatacctctgccttccgaaaacagcccagattattgtcaataatgaacagcctcagcaggaaacacaaccagcagaaggaacctcaggggcaaccaccggggttgtagctgccagcagcatggcaaccagtggagtgttgcccgggggtggttttgtggccagtgctgctgcagtcgcaggccctgaaatgcagactggccgaaataactttgtcatccggcggaacccagctgaccctcagcgcattccctccaacccttcccaccgtatccagtgtgcagcaggctacgagcaaagtgaacacaacgtgtgccaagacatagacgagtgcactgcagggacgcacaactgtagagcagaccaagtgtgcatcaatttacggggatcctttgcatgtcagtgccctcctggatatcagaagcgaggggagcagtgcgtagacatagatgaatgtaccatccctccatattgccaccaaagatgcgtgaatacaccaggctcattttattgccagtgcagtcctgggtttcaattggcagcaaacaactatacctgcgtagatataaatgaatgtgatgccagcaatcaatgtgctcagcagtgctacaacattcttggttcattcatctgtcagtgcaatcaaggatatgagctaagcagtgacaggctcaactgtgaagacattgatgaatgcagaacctcaagctacctgtgtcaatatcaatgtgtcaatgaacctgggaaattctcatgtatgtgcccccagggataccaagtggtgagaagtagaacatgtcaagatataaatgagtgtgagaccacaaatgaatgccgggaggatgaaatgtgttggaattatcatggcggcttccgttgttatccacgaaatccttgtcaagatccctacattctaacaccagagaaccgatgtgtttgcccagtctcaaatgccatgtgccgagaactgccccagtcaatagtctacaaatacatgagcatccgatctgataggtctgtgccatcagacatcttccagatacaggccacaactatttatgccaacaccatcaatacttttcggattaaatctggaaatgaaaatggagagttctacctacgacaaacaagtcctgtaagtgcaatgcttgtgctcgtgaagtcattatcaggaccaagagaacatatcgtggacctggagatgctgacagtcagcagtatagggaccttccgcacaagctctgtgttaagattgacaataatagtggggccattttcattttagtcttttctaagagtcaaccacaggcatttaagtcagccaaagaatattgttaccttaaagcactattttatttatagatatatctagtgcatctacatctctatactgtacactcacccataattcaaacaattacaccatggtataaagtgggcatttaatatgtaaagattcaaagtttgtctttattactatatgtaaattagacattaatccactaaactggtcttcttcaagagagctaagtatacactatctggtgaaacttggattctttcctataaaagtgggaccaagcaatgatgatcttctgtggtgcttaaggaaacttactagagctccactaacagtctcataaggaggcagccatcataaccattgaatagcatgcaagggtaagaatgagtttttaactgctttgtaagaaaatggaaaaggtcaataaagatatatttctttag

SEQ ID NO: 5044 - DNA, 2826 bp, Homo sapiens
ctggctggaccactggctacagcaccgcaagcagatcgggctgctcagcttcttctgcgccgccctgcacgccctctacagcttctgcttgccgctgcgccgcgcccaccgctacgacctggtcaacctggcagtcaagcaggtcttggccaacaagagccacctctgggtggaggaggaggtctggcggatggagatctacctctccctgggagtgctggccctcggcacgttgtccctgctggccgtgacctcactgccgtccattgcaaactcgctcaactggagggagttcagcttcgttcagtcctcactgggctttgtggccctcgtgctgagcacactgcacacgctcacctacggctggacccgcgccttcgaggagagccgctacaagttctacctgcctcccaccttcacgctcacgctgctggtgccctgcgtcgtcatcctggccaaagccctgtttctcctgccctgcatcagccgcagactcgccaggatccggagaggctgggagagggagagcaccatcaagttcacgctgcccacagaccacgccctgagcccgttaggttttcttttcttggtggtgcaaagtggtataactgtgtgcaaataggaggtttgaggtccaaattcctgggactcaaatgtatgcagtactattcagaatgatatacacacatatgtgtatatgtatttacatatattccacatatataacaggatttgcaattatacatagctagctaaaaagttgggtctctgagatttcaacttgtagatttaaaaacaagtgccgtacgttaagagaagagcagatcatgctattgtgacatttgcagagatatacacacactttttgtacagaagaggcttgtgctgtggtgggttcgatttatccctgcccaccccacccccacaacttcccttttgctacttccccaaggctcttgcagagctagggctctgaaggggagggaaggcaacggctctgcccagagccatccctggagcatgtgagcagcggctggtctcttccctccacctggggcagcagcaggaggcctggggaggaggaaaatcaggcagtcggcctggagtctgtgcctggtcctttgcccggtggtgggaggatggagggattgggctgaagctgctccacctcatccttgctgagtgggggagacattttccctgaaagtcagaagtcaccatagagcctgcaaatggatcctcctgtgagagtgacgtcacctcctttccagagccattagtgagcctggcttgggaacaagtgtaatttccttccctcctttaacctggcgatgagcgtcctttaaaccactgtgccttctcaccctttccatcttcagtttgaatgactcccaggaaggcctagagcagaccctttagaaatcagcccaagggggagagcaagagaaaacactctagggagtaaagctccccgggcgtcagagttgagccctgcctgggctgaaggactgtcttcacgaagtcagtcctgaggaaaaatattggggactccaaatgtcctctggcagaggacccagaaaaccacactggctccaacttcctcctcatggggcattacacttcaaaacagtggggagcaacttttccaccaaagctacaaacctaaaatgctgctgccccaaagcacaagagggaagagcaccgccggggccacaggacgtctgtcctccagtcacaggccatccttgctgctccctactgactctagcttacttcccctgtgaagaaacaggtgttctcggctgagcccccaaccctctgcagaaccaggttgatctgccacagaaaaagcatctttgaagacaaagagggtgaggtcttcatgagtctcctgggcccaaagccatcttctgatggaaggaagagagtagggccagtgaaggctgcccagagagaatgtcacagatgaggctgcccctgccccccccccgccagggaggtttcatgagctcatgtctatgcagcacataagggttcttcagtgaaaagcaggagaagagcccactgcaaggatagctcattaggcacatgaccgatgcagggaaggccatgccggggaagctcttcctgcaggtattttccatctgctgtgccaaggctgagcggcagaaacttgtctcataaattggcactgatggagcatcagctgtggcccacagagagccttgctgagaagggggcaggtaaagcagagattttagcattgccttggcataacaagggcccatcgattccctactaatgagaggcagggagagcatgggcaatggagacccaccaatgatccccaaccccggtgggtactggctgcctgccctgggccagggaatggctccttataccaaagatgctggcacatagcagaacccagtgcacgtcctccccttcccacccacctctggctgaaggtgctcaagagggaagcaattataaggtgggtggcaggagggaacaggtgccacctgctggacaatcacacgaaaggcaggcgggctgtgtactgggccctgactgtgcgtccactgctgtcttccctacctcaccaggctactggcagcagcatcccgagagcacatcatctccacagcctggtaaattccatgtgcctctgggtacaaaagtgcctcaacgacatgctctggaaatcccaaatgccacagtctgaggttgatatctaaaatctatgccttcaaaagagtctctgttttttttttttaacctggtagacagtataaaagcagtgcaaataaacacctaaccttctgc

SEQ ID NO: 5045 - DNA, 2685 bp, Homo sapiens
aagagctagagctgacactcggcgatgagctaagacgctgtttcagagcgtttgggtcctctgaggccccttgaccaggagtgtctctgaagatacagtccaaagaaagttctccaaaacaaggagaacagtctgaagctggggatggcaacagcattggtgagtgcccattccctggctcccctgaatctgaagaaggaggggcttcgggtagtgagggaggatcactactctacttgggaacagggattcaagctgcaaggaaacagtaaaggccttggacaggagccattgtgcaaacaattcaggcagttgcgttatgaagagaccacaggacctcgagaagcactaagtcggctccgggagctctgtcaacagtgctacagcccgagacccataccaaggagcagatcctggagctgctggtgctggagcagtttctgatcatcctgcctaaggagctccaggcccgggtgcaggagcatcacccagagagcagggaggacgtggttgttgttctggaggatttgcagctggatcttggagaaacaggacaacaggacccagaccagccaaagaaacaaaaaatacttgtggaggagatggcccctctgaaaggagtacaggaacagcaggttcggcatgagtgtgaagttacaaagcctgagaaagagaagggtgaggagacaaggattgagaatgggaagcttattgtagtaacagactcttgtggaagagtagagtcatctgggaaaatatctgaacccatggaggctcataatgagggctctaacttggaaaggcatcaggccaagcccaaagagaagattgagtataaatgctcagaacgtgagcagagattcatccagcacttggacctgattgaacatgcgagtacacacacgggaaagaaactctgcgagtctgatgtgtgtcagagttccagtcttacaggacataagaaagtcctctctagagagaaaggtcatcagtgtcatgagtgtgggaaagcctttcagaggagttcacacctcgtcagacatcagaaaatccatcttggtgagaagccttatcagtgcaatgagtgtggcaaagtctttagccagaatgcaggccttttggaacatctcagaattcatactggagagaaaccttatctatgtatccattgtggaaaaaattttaggcgcagctctcaccttaatcgacatcagagaattcacagtcaggaggagccctgtgagtgcaaggagtgtggaaaaacctttagtcaggccttactcctcacccaccatcagagaatccatagtcactccaaaagccatcaatgtaacgagtgtggaaaagctttcagtttgacctcagaccttattcgacaccacagaattcatactggagaaaaacctttcaagtgtaacatatgccagaaagccttccgactaaactcacaccttgctcagcatgtaagaatccacaatgaagaaaaaccctatcagtgtagtgaatgtggagaagccttcaggcaaaggtcaggtctttttcaacatcagagatatcaccacaaagacaaactggcttgatgaggtgttctctccttgtagaacatcagagaaggcacattgactagcaaacagcactttaggaaaagtcaccgtagcccactgtggcatcagaaaattcttgggggctgagttggaggctccctgcctctattctctctcctttgctttccttgaagtcagctttggaccacaataatttcactgtagatgatatgctaggatcaaagttaaacagcattcttcactgcaggacatctcagagcatgtaacataactgcatgattatatactctaagcaatagagagcttcatgactgagtaagagttttgaagtcagcagtgaatcaagtgcccacagatttgcaggcttaagcagaacaagggaagattgatatttttggatatgctatagcagctttctcctatgaaataaaactgatgatgtttggaagtatactactctcaaaggtgtctttaaagtacaggttaatggtgaacattttcccccagtggcttcacctcattcctcccactggccttaccccttccttccccagtggaagcattttcaaaagcaaagataattttcgctggtgaacttcagaacttgccttcagggttagcttcatgtaattttaccatttcccatccccattccccaccacattatgtcaagattcaagttataaattaacgttttacttagactttgaaagagatttcatgagtaatttgaatgaaccttgctgaattaatctgaatagcaactgtctgacttgataactccagtgccagtatagtggctgctgcatagacactattcagtaaatgtctgatgaaagaaattggactttttccctttaatactgatgatgcaattttgaaatgttgcttgttctggaatacttcggaagttaaacaataaagtcagcttggagaggagatcatgatctttatactgtgaatagcagaatgtcacagatgaagaatattaaaattaggggcgtccactccaaaacatatcaccagagtgacaacttcagccctcagcctctgcaatccatatatatcctggtcttgggagtccatagaatactgtttccttctaataaaggtttcaaac

SEQ ID NO: 5046 - DNA, 8538 bp, Homo sapiens
cacacacacacacacacacacacacacctacacatgaccgattgcctcgcctctagcattgggaatcagtcaccgtgctgtccttgtggagtcttgtggcccaacaagaggaagctcttccctgacattgcccctccaaagtgcgccacttccagtgcgccccactgtcatgcccggcctgtggacagccagaccctgccatccctcccacccccgaccaagcatgggggtgctctgtaggtagctgtgtggcctgacagtctctaccagtcctgctgtccctcagctgagaatcaaacccatttctggatgacagggaatgtgtcttctgctggctgtgttctctgtggagctcaggggagggaaaaggccaagctatttctagggtgctgtcaggaccgatgaaaaggtcacaccctttccaagagacacttttcctggaaagcccctggagcttagctggcttttatcctgtgataagccagaggctctggggggtgagggagcagaaaccctcctcaccccagccaacggggacctgtatacctctgccagtctctcacttggccttgctgctgtcctctgagactgcctgttcctccctctctgtgactctacaccaccatcacctcctccaggaagtcctctggattgactcctagcttattacatctttattgtgcagaccctctccattcaaagcccctcttcaactgccccccccccactacctccaagacagagattctggattcttgcaactgcagcccctcagagagtgtaagaggggcagaaaaaggagatcaggaggtgagggaagcagcgctgtcagagtttccaaagccccggccagcaaggcctcagaggcctctgttggagtgggggcctccctggctatgcgctccagctgcacaaggcagcctctgtgagcctctcccactcagccctacaggaagcagcagggcccagcctcaatggacccattcagaccccagcgctccggaaagtacctctgcttcctgccaccattccactctggccaaacaggctctactctcttctgatgggaggaggccgcaggcaggtggttcagtggttagggccaaccatctacttcagttcctgtctggcccagatctctgacgttgaccatgccctagtgggtgtatgtatacctttagtgcaagggtggtgtgacagttaatactgagtgtcaacttgattggggtgaaggctgcaaagtattgacctactggaagtgtctgtgagggcattgtaaaaggagataaacatttgagtcagtgggctggggaaggcagacccacctttaatactggtgggtaccatctttctaatcagctgctagcgaatataaagcaggcagaaaaacatgaaaaggtaagattggcctagcttcccagcctacatctttctcccatgctggacacttcctgccctctaacatcggactccaggttcttcagttttgagactcggattggctctccttgctcctcaaacttgcagacagcctattgtgggaccttgtgattgtgtaagttaatacttcataaactcccctttatatatctatctatatctatatctatatctattatctatatctatatctattatctatatctatatctgtctatatctcctattagttctgtccctctagggaaccctgattaacacaggtgggtaggcacagggagatgtgcccccttccccgtgggtgctgggtaggtaaatgtttcgcaaagggctttcttggggagagggaaccctgattttcagtatttgcctcttttcctggtataaatattcccactgtgggcagtatcacctgcctctcaaaattcctgaaaattcaacagttggctcctggcagctgctgtgagccgttccagccggtgactgtggtggctccatcctgcagggccatgtgcccccaccccttgtgctatggccaccctcactttagtgtgctgtgttttgctcttaggaatcaatgtctttgcagataaggcaccccagtagctggccaccacctgcagttccctggtctgtctcttgctggcaccaagctgtgctgtgcctgctgagactgctgggccaccccagcgcatatggtctgcggggcttacttgattcccttagcttcccagccaaggtgctggtgttgccagcagtgctggcaggaggaggggataactagaggggatttaactcaacccgaggggctcttacgggatctttcctggatatccctccaggtggggctggctgccctgagggtgtacaaacttccaactcctccaatggctgaagctacttcctcgagcagatggcagctggctcaggctggctagggaccagtgcatgtgaggtcggtgctggatcaccccatcaaggccatcagcctgtgcttgttcttggggtttgagggaaacccaacagggatgaatcacagtttttaacctgtgtttgtctgccccccagccctggacatctgcaggcaaagttaaagttatatttggctcttatcaccacaaaaggcatagaccagaaattatggcatcgggttggaagtcagggaggctaatttggggaaactgcctggaggaagcagcaactcaaaagaggaggagtcccactgtgggacagaacaggccctgcataagaaccactaaccccaggcaagcccagacatggccttctgcctggggaggccctctttggcctgctcagcagaccatcagccccttctaggccctgtcttcagcctcagactgagtggtggcctggggaggttgggagctgagctgttctcatccctggttccttggccacggtggaaacaatggggccggatctgactgctcagcggggactgtgaatagctctctagcaggaagcaacagcaggggtagtggaggaagtgtgggcccactttggtttgacactgcatatggtccccatctggcctgagagcctttactccttggcaaactcaggccaataagctcctgcccccaccctcaatggcagctggaagaatggcctgagggagaagcagggataggtgggctgcagtgacatcacccccagatcccagccgtggccccagccaacccatggaggtggggcatggcacagcaggtgctgcacaggagcccaagcacaagggcacttaggagaaggaatctgagcagggatcgatctggcctgggggtgattctccagaaactccattcctcggggctgtgaccaccaagccaggtgatcaggccagtgatgtttccctttgggccaggtcggggagccagacctgggagggagactcctctggggcccaggggaggtgagtcagagctggcagaggcctctggctccaggaacctccaaggaggagacctgagttgctgggaatttctgggtctgacctcctgccaagtcaaggtctgggctggacacaaggtgaggctgtgccttctggtgccaggaccaaggaaatgctgggatctgggcagtgctcagaggcagcaccgtatggcagaaccatgagggtgcaccagcacggacccctttctgcaacccacccatccctccctgcagcacctcgcctcctccaggcaagaatctgagccttgaccacagctccctctctcacacagcttccttctttggttagaaccacccggaggtgactgtggccatggctctgactgacatagacctgcagctgcagttctccatgtcccaacccgaagccctccttctcctggcagcaggcccagctgaccacctcctgctgcagctctactctggacacctgcaggtcaggcttgtcctgggccaggaggagctgaggctgcagaccccagcagaaattctactgagtgactccgtcccccacaccacagttctgactgtctcagaggactggcccacattgtcagtcaatgggtttctgaatgcctcctctgtagtcctgggagcccccctagaagtcccctatgggctctttgttgggagcactgggagacttggcctgccctacctgaggggaaccagccatcccctgaggggttgcctccatgcagccgctctcaatggccgcagactcctccagcctctgacccccaataagcatgagggctgtgctgaagagttttctgccaatgacgatgtggccctgggcttctctgggtcccactctctggctgccttgcctgcctggggcactcaggatgaaggaaccctggagtttacactcaccacacagagctggcaggcacccttggccttccaggcagcaggctggcatggggacttcatccatgtggacatatttgagggccacctgtggtccatggttgagaagggccagggtactgtattgctcctcaacagtgtgcctgtgactgacgcacagccccacaaggtcagcatccacatcaacattcaccagctagaaatctccatggaccagtaccccacacgaactgaggagtcctcagctacctggagccacgtgacagtctccttcttggggagctggttgcagaggcctctcatcacctccaggaacaccgctcaggcctgacaccaggggctgccaatgcctccctgctgggctggctgcatggaagacctcagtgtcaatggctagaggcaggggctgtgggaagccttgctgacgcacaacatggtggctggctgcagactggaggaggtagacaatgcctatggccattatgaagctttctccaccctggctcccaaggcttggctgtctgtggagctagctgagccatgcgtgcctgagccagggctacctcctgtctttgccaatttcatccagctgctatcagcgcagtggtggtgaccgagggtggcacagcctggcttgagtggtggcatgtgcagcccatgctggcactgatggaggctgaactgcgtaaatcccaggtgctgttcagtgtgacctgaggggcacactacagcgagctcgagctggatgtcctgggtgcccaggcatgaaaaatgttcaccctcctggacgtggtgaactgcaaggcccgcttcatccacgatggccctgaggacacctctgaccagctggtgctggaggtgtcagtgatggcttggttgcccatgccctcatgcctgcggaggggccaaacagacctcctgcccatccaggtcaaccctgtcaatgacccaccccacatcatcttcccacatggcagccttatggtgatcctggaacacacacagaagcctctggggcctgaggttctccaggcctatgacctggactctgcctgtgagggcctcgccttccagctccttggcaccccctctggcctccccgtggatcaccgagaccagcctggggagccggtgactgagttctcctgctgggagttggaggccggcagcctagtctatgtccactgtggtggccctacacaggacttgacattccgggtcagcaatggactgcaggccagccccccggccatgctgaaggtggtggctgtccagctggccatacaaatccaccgcagcacagggctgcatctggcccagggctctgccatgcccatcttgcctaccaacctgttggtggagaccagcgccgtggggcaggatgtgaccgtgctgttccatgtcaccggaggcctgccgttcagggagctgcagaagcagggggctggtggggtggaggatgctgagtggtgggtcacacaggcgttccaccagcaggatgtggagcagggccacgtgaggtaccgcagcactgacccacagcactacaccgaggacaccgtggagaacctggatctgcaggtgcaggtgagctgggaaatcctgagcaatctgtccttcctagtgaccatccagagagccactgtgtggatgctgcagctggagccactgcacactcagaacacccagcaggaggccctcaccacagcccacctggaggccaccctggaggaggcaggcccaagccccccaaccttccactgtgaggtggttcaggctcccaggaaaggcaactttcaactacagggcacgatgctgtcagacggtcagggcttcacccaggatgacgtacaggctgcagaggtgacctatggggccatggcacgtgcctcagtggcagtggaggacaccttctgtttccatgtcacagctccaccatatttctccccactctgtaccttctccatccatattggcggtgacccagacatgcctgtcctcaccaatgtcctcgtggtgcccgagggtggtgggtgtgtcctctctgctgaccagctcttcgtcaagagcctcaacagtgccaggtacctctatgaggtcatgtagcagccctgccatgggaggttcttagcgtgggacacaggacaagatcactatggtgacatccttcaccaatggagacctgttgcgtggccagctggtctagcagcatgatgactccgagatcacggaagatgatatgccatttgctgctgccgccaggaccagagcagtggtgacgtggcctgggaggaggtacggggccatccagcctgtgaatgaccacgcccctgtgcagagcatcagctgcgtcttccatgtggcctggggtaggtggcagctgctgactacagacaacatggccttcagcaatgctgattcgggctttgtggatgcccagctggtgctgacccacaaggacctcctctctggcagtatcatggccacggatgagcccatgcagcccatctgctgcttcatccaggaggggcctcaggaagaggcgagtcctgttcacgcactcaggctgactacagctggatcctgctgcaggtgtccgacaggcagcaccaggccatcatggtgctggaggtgcaggccttggagccttacctctgtgtggccattctctttggccacaatggcagcctcagctcccgcaacaccctggccttctcaatggatgtggggccttctcaatggatgtggggccagtgcacacagatgccaccctacaagtgaccattgccctagagggcccactagccccactgaagctggcctggcacaagaagatctacatcttccagggagaggcagctgagatcagaagagaccagctggagaccacggagttcatcatctcggagccactggccaatatgtactcgcgtgggaaccagaacacactgatggaggagtgggcagagtaggcacagtggcacgacgagatgctgcgcatgcaccacgtgctgaaggaggcgctcagcatcatcagtgacaccaccaggaccaccgtcagcatgcccatgcccctgcccgcggacgacacctgggtgcaggtgcagagcatctctgaggaacaaaggtgccagggcctgccccccacagccccaaagtaccccccgcccgggccgcacagagggatgcccctgcatcggggtggctcccacctggagtgaggggtggagcttgccaaggagcactggctgcggggcggggtggagctgggatgttctcaccactggggtctgggcttaagcttgggcgactgcctcggggcacggcagggaggagcttccgtgcatgggtgtggccggggcggggcctcaggggggcagagccacccatctctcccctccctatgccttgcaggtcgcccaagtccagccccaggatgcccagaccccaccatgtccctagcccggcctgggtggcggggcccagctcttgggcttcctcttgccaggtccgcccttggggaagcgtgccccgtaccctccaggctagaggcttcccctgatcccttcagcccctaccccgccaagtgcgctcatgccccacgcggggtctccaagtgagtaggggctgaatgcagccaaagaggctgctggacgggcgtggccgggaaggaaatgggactggagtccagagcatcagacctggccgcctccatccaaggcattgggaccatgggtgccggagccacgtgtggctgagggctggcggagcctgctccccagggagcactgattcctggaggtggtcgtttttgagggggctgtggggcttgtcttacctgcccccttctgtccagcacttgcatggcacttccctctattttcactcttggcggctgcccacacgttgcatttctcttcctttcttcttctcgctgtcctccatcctccattctgtccaactcctatcccagcccctggggagcctacctcaggtctgagagtctgggtgtgtggatttccttcagctacccggatgtccccacaggcaatctgattttttctccacatctggacccctccccctctatccctaaccctgtctaaactaatggcgcagtggtagctgcaagggcagggatgggagtggctgaagcctacttcactcccaaagatttctaaggaaaatggttctactgcatcctttggctgggccttgttgacccgtgaccctcttccaagaacattcactctg

SEQ ID NO: 5047 - DNA, 3360 bp, Homo sapiens
  misc_feature (2476)..(2476): n is a, c, g, or t
  misc_feature (2478)..(2478): n is a, c, g, or t
  misc_feature (3316)..(3316): n is a, c, g, or t
  misc_feature (3319)..(3320): n is a, c, g, or t
  misc_feature (3322)..(3322): n is a, c, g, or t
agctcgccgagtagacggccccgccgcccgctgcccgccggggctctccagcttcgccatgccgccgtggggcgccgccctcgcgctcatcttggccgtgctcgcccttctcggcctgctcggcccgcggctccggggaccctgggggcgcgccgtcggagagaggaccctgccgggggcccaagaccgagacgacggggaggaggcggacggcggaggcccggcggaccagttcagcgacgggcgcgagccactgccgggagggtgcagccttgtttgcaagccgtcggccctggcccagtgcctgctgcgcgccctgcggcgctcagaggcgctggaggccggcccgcgctcctggttctccgggccccacctgcagaccctctgccacttcgtcctgcccgtagcgcctgggcctgagctggcccgggagtacctgcagttggcggacgatgggctagtggccctggactgggtggtaggaccttgtgttcggggccgccggatcaccagcgccgggggccttcctgcggtgcttctggtgatccccaatgcgtggggtcgcctcacccgcaacgtgctcggcctttgcttgctcgccctggagcgcggctactacccggtcatcttccatcgccgcggccaccacggttgcccactggtcagcccccggctgcagcctttcggggacccgtccgacctcaaggaggcggtcacatacatccgcttccgacacccggcggcgccgctgttcgcggtgagcgaaggctcgggctcggcgctgctcctgtcctacctgggcgagtgcggctcctccagctacgtgacaggcgccgcctgcatctcgcccgtgctgcgctgccgagagtggttcgaggccggcctgccctggccctacgagcggggctttctgctccaccagaagatcgccctcagcaggtatgccacagccctggaggacactgtggacaccagcagactgttcaggagccgttcccttcgagagtttgaggaggctctcttctgccacaccaaaagcttccccatcagctgggatacctactgggaccgcaacgacccgctccgggatgtcgatgaggcagccgtgcctgtgctgtgtatctgcagtgctgacgaccccgtgtgtggacccccagaccacactctgacaactgaactcttccacagcaacccctacttcttcctcctgctcagtcgccacggaggccactgtggcttcctgcgccaggagcccttgccagcctggagccatgaggtcatcttggagtccttccgggccttgactgagttcttccgaacggaggagaggattaaagggctgagcaggcacagagcttccttccttgggggccgtcgtcgtgggggagccttgcagaggcgggaagtctcttcctcttccaacctggaggagatctttaactggaagcgatcatacacaaggtgaaagacctggcctgagaacccccaagtcctgcaaagaaaaacagagctgggcaagggggagtcctggaaagatggggcggactgaacagagggagctccagctctgtgctcctcattcagtccctctctcttaaattggtgccttgaaagagaaggaacgtcctgcgagcctgcactcacttcatcctcagcagaactcctgcctggcctctgctcaacatatccctactcatccggtcagcagcggcgcgttccagtcactgtcacctgtcactgacatcacaagccaaaggatagcactttttcaatccatggactcaggagaaaatgccctcttactggcagtggctagagggatgagacgtttgtgtatgtcactgggcagtgaccccgattctcaagctggagccatttgatgtcatgaggacaggatgtttgtgtctcggccccacttccctcatttgctctgtggttgtggcgccctgctttgaccgaatgctctggcaactgcggcagcaggcttgtgtgtgtgagaagggcggcagaggcagtggggctggctcgctgagggctgagcaggtagagaatgtgaatgtccatctcaaggaatgcgaagttccaatctctcagaggagctctgcaagtctcagctaggaatggggctgatctggcccccaagcctcactggagagatcccaagggtattttacaaataggaagcgctctcatgcaggatctgagggctttgctagaccatggttcaaggagtcagaatcttggctaccctacatgctccctctggcaccatttcaggggattactccagagagctgcagccagaactgtttatctcctgagatatggactttctctaagtcaggaaaagcacaaacctcataacttaggtgttttctggttggttgctcccttttctgatcctactactggcctctccctttccagagccaggagacacatctgggaccagaggaaacaaaagcaccaagaggtntngactagagctgaccagtgatttacaaatatttcatattccaatgcttcgtctgctcaattattcaaaaggccatccctgtaaaggcagaaaagcttcctcttagatctggccactcagcaaataagtgggtatttggttttatgaagaataatgctgaggactagagatatagtatatcagagataatatatagtatacaggttgatctaaatattctggtttggattaggcaattaaaatttttttggcaacaggacatatgtttccatgtgttgctaagattcaaaaactttgccctgaagttttattttaatcgtcattgagaaagagggctcctgttctgacctcaaaaacagcaaagctgttgtaaagaagagagctgcttatacgaaaacccacattccaagacttggtataaggtattcctgaggccttgatttcaggtttggataatcttgccccagattctagatcttgttcttctagatcaaatcagaagaaactttgaaataactccaagaatctgcactgaaatgtagacagcactcgataatctaagggacattatcttgttgtgaaaaattatctccctcctggctgggagcggtggcacacacctataatctcagcactttgggaggccgaggtgggtggatcacgaggtcaggagatcgagaccatcctggctaacacagtgaaacctcatctctactaaaaatacaaaaaattagccgggcgtggtagcgggtgcctgtaatcccagttactcaggaggctgaggcaggagaatggcgtgaacccgggaggcggagcttgcagtgagctgagatcgcaccnacnntngcactccagcctgggcgacagagtaagactgtgtttca

SEQ ID NO: 5048 - DNA, 982 bp, Homo sapiens
gcagtctccgattccccatcaccaattcggctggggcgccctgcaaggccgcaggcaggatgaacattctggcacccgtgcggagggatcgcgtcctggcggagctgccccagtgcctgaggaaggaggccgctttgcacgggcacaaagacttccacccccgcgtcacctgcgcctgccaggagcaccggacaggcaccgtgggcagatttaagatctccaaggtcattgtggtgggggacctgtcggtggggaagacttgcctcattaataggttctgcaaagacacctttgataagaattacaaggccaccattggagtggacttcgagatggaacgatttgaggtgctgggcattcccttcagtttgcagctttgggataccgctgggcaggagaggttcaaatgcattgcatcaacctactatagaggagctcaagccatcatcattgtcttcaacctgaatgatgtggcatctctggaacataccaagcagtggctggccgatgccctgaaggagaatgacccttccagtgtgcttctcttccttgtaggttccaagaaggatctgagtacccctgctcagtatgcgctgatggagaaagacgccctccaggtggcccaggagatgaagactgttcagagactgcccagccctagggcactgtgccaccctcattcctccagagcttgacccctggacatttgcactgactttatccagaccaaagagctgcctcttggtggcagtattcccacagaggggtagctgggatcatgctagtcacttcctgcccccaggcaccgtgccaaagactggatgccccctactcctcaggggactgtccagggcgcccagtggtagtgagggagagtgtctctgttcttttgctcagcctgctgggccctttgtgtttgaggatgcttaatgattccagcctctcactgtgccttatgcattaaaatttctttgttacgagc

SEQ ID NO: 5049 - DNA, 4070 bp, Homo sapiens
gccagctgctgcgcatgcgccggccggggccccgcccccatgcgccgcgcggctccagggccacgttccagggtcgggtttggtggattcctcagtccctgccgccgcggggcgccctgggatagcggcggggcctcctggtgagcgcgcgccggggcggcctccgggaagtgggagacgctgcgggtcctgggcccaggccttgggatgggcgggaaggcctggccgcgccgggctgtgggcactgcaggaggcccctgtgcaggtggagatcgccgcggccctggcgggactctttgctggctcttgggcgcgctgatgcccatcatctccctgagtttctgagccctatctctcatgtgtcagtggtcaccgccgaatccagacactccggccctgttccggaagagccctgatatccgtggctccatggcgctgtctgtcgataccatgcactctagctctcaaggaggaaaggttttgtggaagggaatagagacttggaataacagacctgtgctaattagagacgggaaagatggaacaaggggagtgacccttctccacccccatatcctaatgtgctctctctctatccagaacagatctcggcccctttccaaacactcctgatgcctcatttgcctctcgcttcttttcgaccaccattttgggggctgaggcactcacggggcctccccaggtttcactccgtttctacacagtcggagccccatggatctcccatctcccggaggaaccgtgaagccaaacagaagcgcctgcgagagaagcaggctactctggaggctgagatagcaggggagagcaagtcacctgcagaatccattaaggcctggaggcctaaggagttagtattgtatgaaatccctacgaaacccggtgaaaagaaagatgtctctgggcccctgcctcctgcatacagcccccgatatgttgaggctgcctggtacccgtggtgggtacgagagggcttcttcaaaccagaatatcaggcccggctgccccaagctacaggggagaccttttccatgtgtatcccacctcccaatgtcactggctccctgcacattggccacgcactcacggtggccatacaggatgccctcgtgcgctggcaccggatgcgtggggatcaagtgctgtgggtccctggttcagatcatgcaggaattgctacacaagctgtggtggagaaacaactgtggaaggaacggggagtgaggagacatgagctgagccgggaggccttccttagggaggtgtggcagtggaaggaggcgaaaggtggagagatctgtgagcagctgcgagctctgggtgcctccctggactgggatcgagagtgttttaccatggatgttggctcctcagtggctgtgactgaagcttttgtgcggctctacaaggcggggttgctgtaccggaaccatcagcttgtcaactggtcatgtgctttaagatcagccatctcggacattgaggtggagaaccggcccctgcctggccacacacagcttcgactgcctggctgccccacccccgtgtcttttggcctcctattttctgttgccttccccgtggatggagagcctgatgcagaggttgtggtaggaaccacaaggccagagacgctgcctggagatgtggctgtggccgttcatccagacgactcgcgatacacacatctacacgggcgacagcttcgtcaccccttgatggggcagcctcttcccctcatcacagactatgctgttcagccacatgtgggcacgggggcagtgaaggtgactccagctcacagtcctgccgatgctgagatgggggcccgacatggcttgagccccttgaatgtcattgcggaggatgggaccatgacctccctctgcggggactggctgcagggtcttcaccggtttgtggcccgggaaaagataatgtctgtgctgagtgaatggggcctgttccggggcctccagaaccaccccatggtactgcccatctgcagccgttctggggatgtgatagaatacctgctgaagaaccagtggtttgtccgctgccaggaaatgggggcccgagctgccaaggctgtggagtcgggggccctggagctcagtccctccttccaccagaagaactggcagcactggttttcccatattggggactggtgtgtctcccggcagctgtggtggggccatcagattccagcctacctggttgtagaggaccatgcgcagggagaagaggactgttgggtggttgggcggtcagaggctgaggccagagaggtagcagcggaactgacagggaggccaggggcagagctgaccctggagagggatcctgatgtcctagacacatggttttcttctgccctgttccccttttctgccctgggctggccccaagagaccccagaccttgctcgtttctaccccctgtcacttttggaaacgggcagcgaccttctgctgttctgggtgggccgcatggtcatgttggggacccagctcacagggcagctgcccttcagcaaggtgcttcttcatcccatggttcgggacaggcagggccggaagatgagcaagtccctggggaatgtgctggacccaagagacatcatcagtggggtggagatgcaggtgctgcaggaaaagctgagaagcggaaatttggaccctgcagagctggccattgtggctgcagcacagaaaaaggactttcctcacgggatccctgagtgtgggacagatgccctgagattcacactctgctcccatggagttcaggcgggcgacttgcacctgtcagtctctgaggtccagagctgccgacatttctgcaacaagatctggaatgctcttcgctttatcctcaatgctttaggggagaaatttgtgccacagcctgctgaggagctgtctccctcctccccgatggatgcctggatcctgagccgccttgccctggctgcccaggagtgtgagcggggcttcctcacccgagagctctcgctcgtcactcatgccctgcaccacttctggcttcacaacctctgtgacgtctacctggaggctgtgaagcccgtgctgtggcactcgccccgccccctggggccccctcaggtcctgttctcctgcgctgacctcggcctccgcctcctggccccactgatgcccttcctggctgaagagctctggcagaggctgccccccaggcctggttgcccccctgcccccagcatctcggttgccccctaccccagcgcctgcagcttggagcactggcgccagccagagctggagcggcgcttctcccgggtccaagaggtcgtgcaggtgctaagggctctccgagccacgtaccagctcaccaaagcccggccccgagtgctgctgcagagctcagagcctggggaccagggcctcttcgaggccttcttggagcccctgggcaccctgggctactgtggggctgtgggcctgttacccccaggcgcagcagctccctccggctgggcccaggctccactcagtgacacggctcaagtctacatggagctgcagggcctggtggacccgcagatccagctacctctgttagccgcccgaaggtacaagttgcagaagcagcttgacagcctcacagccaggaccccatcagaaggggaggcagggactcagaggcaacaaaagctttcttccctccagctggaattgtcaaaactggacaaggcagcctctcacctccggcagctgatggatgagcctccagccccagggagcccggagctctaactcatcatccccatcagttttcctccctctcagacctgtctttgaggacaaacagatttgtcagctgtcagggtgcagtgggacgtcagagactatgtggtccatcgccttcattgtgtaaatgaggacacagactggcttggtcgcagtgactgtggtgtccttgagatgctcacattactgcccggcctgcctcccacctggaagtctgggaatgaggagattgagataaacttttgaaatccc

SEQ ID NO: 5050 - DNA, 1304 bp, Homo sapiens
gtctacattagtaattcccaacttgggtccgaaagtgaacttttgctgaagcgaagtagctaaccgcttccatgtgcaaggcaggttccagacttcgggtgtgctcactgatccgcctccagggccaccgccatgtcgagccgcggtgggaagaagaagtccaccaagacgtccaggtctgccaaagcaggagtcatctttcccgtggggcggatgctgcggtacatcaagaaaggccaccccaagtacaggattggagtgggggcacccgtgtacatggccgccgtcctggaatacctgacagcggagattctggagctggctggcaatgcagcgagagacaacaagaagggacgggtcacaccccggcacatcctgctggctgtggccaatgatgaagagctgaatcagctgctaaaaggagtcaccatagccagtgggggtgtgttacccaacatccaccccgagttgctagcgaagaagcggggatccaaaggaaagttggaagccatcatcacaccacccccagccaaaaaggccaagtctccatcccagaagaagcctgtatctaaaaaagcaggaggcaagaaaggggcccggaaatccaagaagaagcagggtgaagtcagtaaggcagccagcgccgacagcacaaccgagggcacacctgccgacggcttcacagtcctctccaccaagagcctcttccttggccagaagctgaaccttattcacagtgaaatcagtaatttagccggctttgaggtggaggccataatcaatcctaccaatgctgacattgaccttaaagatgacctaggaaacacgctggagaagaaaggtggcaaggagtttgtggaagctgtcctggaactccggaaaaagaacgggcccttggaagtagctggagctgctgtcagcgcaggccatggcctgcctgccaagtttgtgatccactgtaatagtccagtttggggtgcagacaagtgtgaagaacttctggaaaagacagtgaaaaactgcttggccctggctgatgataagaagctgaaatccattgcatttccatccatcggcagcggcaggaacggttttccaaagcagacagcagctcagctgattctgaaggccatctccagttacttcgtgtctacaatgtcctcttccatcaaaacggtgtacttcgtgctttttgacagcgagagtataggcatctatgtgcaggaaatggccaagctggacgccaactaggctgagcaatgacagaaccagctgcaccatgtaccccaccttcagtttaaaag

SEQ ID NO: 5051 - DNA, 1193 bp, Homo sapiens
agaacgtgctgtgtggatgcggcgaaacgctgaggcgcggccttcgctgtgtggtggggactcacaagaccgacgtcaagatgatgctttcaagggccaaacctgctgtaggcagaggcgtacagcacactgacaaaagaaagaagaaaggtaggaagattccaaaactagaggagctactttcaaaaagagatttcactggagctattaccctgttggagttcaaacgtcatgttggggaagaagaagaggatactaatttgtggattggatattgtgcctttcacctgggtgactacaagagagctctggaggaatacgaaaatgctacaaaagaggaaaattgtaattctgaagtctgggtgaacctagcttgcacctacttctttcttgggatgtataaacaagctgaagcagctggatttaaagcttcaaaaagccgactccaaaaccgcctcctcttccacttggctcacaagtttaatgatgagaaaaaattgatgagctttcatcaaaatcttcaggatgtcacagaagatcaactcagtttggcctcaatccactatatgcgatctcactaccaagaagctatagatatatataagcgaatactgctagataacagggaataccttgcccttaatgtttatgtggccctctgctactacaagttggattactatgatgtgtctcaagaagttttggctgtttaccttcagcaaattcctgatagtaccatcgcactcaatcttaaagcctgtaaccattttcgcctttacaatggcagagcagctgaggcagaactcaaaagcttgatggacaatgcttcttcatcctttgaatttgctaaagaactcatcaggcacaatctggtgaataacgatttcccgtcttgactgagttcagtcctactctgctttggtacatcacagcaattagaaagattaataaaaggagatgcgccagcaagtaatgctttactccaagggaacccctcctcactgtggaggagataagttttaaagtactaatctgtttccttaaggaaatccttgttgggagaacaggaatatatttaatatttggaaagaagcacaaggcagtgtagatccaggtgtctgtttttttgagaaagacaaaggaacgtatccctctgtggtttaaaataaatgggaaatatttttgcatctttg

SEQ ID NO: 5052 - DNA, 5419 bp, Homo sapiens
  misc_feature (3012)..(3012): n is a, c, g, or t
  misc_feature (3783)..(4255): n is a, c, g, or t
  misc_feature (4665)..(4764): n is a, c, g, or t
cagtcaagtagcttcccagtcccgaacgccgcccgtccccaccccgccgtggccactagcaacgacctctgtgaagttggagaggcggtaacggaggcactccccctgctgcaccccgccgtttctacggggctcagaaaccagtttgtttgtttcgtcggggtagtgtcgacctgtcttacgggcgtcgcgagacaggacggagtcaaacccgtggtatcaactgaagacgagtgtcaggtgtggagagtctcagtgccccctttcagtctggactgtgagctgctgctggttagacagtcttggtttctctttcaggatgtcattttcaaaatgcgggatggtacctctgctttattaagccccgtaggaagactgccacacctagactgatgcttattagtcatcaccgttattcctactaacgtcctgtgtcactgagttttttaaatgtctagcatatctgtaaagatgccttagaaaaagaatcatggagaagtatgttagactacagaagattggagaaggttcatttggaaaagccattcttgttaaatctacagaagatggcagacagtatgttatcaaggaaattaacatctcaagaatgtccagtaaagaaagagaagaatcaaggagagaagttgcagtattggcaaacatgaagcatccaaatattgtccagtatagagaatcatttgaagaaaatggctctctctacatagtaatggattactgtgagggaggggatctgtttaagcgaataaatgctcagaaaggcgttttgtttcaagaggatcagattttggactggtttgtacagatatgtttggccctgaaacatgtacatgatagaaaaattcttcatcgagacattaaatctcagaacatatttttaactaaagatggaacagtacaacttggagattttggaattgctagagttcttaatagtactgtagagctggctcgaacttgcatagggaccccatactacttgtcacctgaaatctgtgaaaacaaaccttacaataataaaagtgacatttgggctctggggtgtgtcctttatgagctgtgtacacttaaacatgcttttgaagctggcagtatgaaaaacctggtactgaagataatatctggatcttttccacctgtgtctttgcattattcctatgatctccgcagtttggtgtctcagttatttaaaagaaatcctagggatagaccatcagtcaactccatattggagaaaggttttatagccaaacgattgaaaagtttctctctcctcagcttattgcagaagaattttgtctaaaaacattttcgaagtttggatcacagcctataccagctaaaagaccagcttcaggacaaaactcgatttctgttatgcctgctcagaaaattacaaagcctgccgctaaatatggaatacctttagcatataagaaatatggagataaaaaattacacgaaaagaaaccactgcaaaaacataaacaggcccatcaaactccagagaagagagtgaatactggagaagaaaggaggaaaatatctgaggaagcagcaagaaagagaaggctggaatttattgaaaaagaaaagaaacaaaaggatcagattattagtttaatgaaggctgaacaaatgaaaaggcaagaaaaggaaaggttggaaagaataaatagggccagggaacaaggatggagaaatgtgctaagtgctggtggaagtggtgaagtaaaggctccttttctgggcagtggagggactatagctccatcatctttttcttctcgaggacagtatgaacattaccatgccatttttgaccaaatgcagcaacaaagagcagaagataatgaagctaaatggaaaagagaaatatatggtcgaggtcttccagaaagaggaattctgcctggagttcgtccaggatttccttatggggctgcaggtcatcaccattttcctgatgctgatgatattagaaaaactttgaaaagattgaaggcggtgtctaaacaagccaatgcaaacaggcaaaaagggcagctagctgtagaaagagctaaacaagtagaagagttcctgcagcgaaaacgggaagctatgcagaataaagctcgagccgaaggacatatggtttatctggcaagactgaggcaaataagactacagaatttcaatgagcgccaacagattaaagccaaacttcgtggtgaaaagaaagaagctaatcattctgaaggacaagaaggaagtgaagaggctgacatgaggcgcaaaaaaatcgaatcactgaaggcccatgcaaatgcacgtgctgctgtactaaaagaacaactagaacgaaagagaaaggaggcttatgagagagaaaaaaaagtgtgggaagagcatttggtggctaaaggagttaagagttctgatgtttctccacctttgggacagcatgaaacaggtggctctccatcaaagcaacagatgagatctgttatttctgtaacttcagctttgaaagaagttggcgtggacagtagtttaactgatacccgggaaacttcagaagagatgcaaaagaccaacaatgctatttcagagtaagcgagaaatacttcgtagattaaatgaaaatcttaaagctcaagaagatgaaaaaggaaagcagaatctctctgatacttttgagataaatgttcatgaagatgccaaagagcatgaaaaagaaaaatcagtttcatctgatcgcaagaagtgggaggcaggaggtcaacttgtgattcctctggatgagttaacactagatacatccttctctacaactgatagacatacagtgggagaagttattaaattaggtcctaatggatctccaagaagagcctgggggaaaagtccgacagattctgttctaaagatacttggagaagctgaactacaacttcagacagaactattagaaaatacaactattagaagtgagatttctcccgagagaantaatgtacaaacccttaattacctggagaaaaaaaagtacaatgtatttcacatgaaataaacccatcagctattgttgattctcctgttgagacaaaaagtcccgagttcagtgaggcatctccacagatgtcattgaaactggaaggaaatttagaagaacctgatgatttggaaacagaaattctacaagagccaagtggaacaaacaaagatgagagcttgccatgcactattactgatgtgtggattagtgaggaaaaagaaacaaaggaaactcagtcggcagataggatcaccattcaggaaaatgaagtttctgaagatggagtctcgagtactgtggaccaacttagtgacattcatatagagcctggaaccaatgattctcagcactctaaatgtgatgtagataagtctgtgcaaccggaaccatttttccataaggtggttcattctgaacacttgaacttagtccctcaagttcaatcagttcagtgttcaccagaagaatcctttgcatttcgatctcactcgcatttaccaccaaaaaataaaaacaagaattccttgctgattggactttcaactggtctgtttgatgcaaacaacccaaagatgttaaggacatgttcacttccagatctctcaaagctgttcagaacccttatggatgttcccaccgtaggagatgttcgtcaagacaatcttgaaatagatgaaattgaagatgaaaacattaaagaaggaccttctgattctgaagacatnnnnnnnnnnnnnnnnnnnnnnnnnnnnnnnnnnnnnnnnnnnnnnnnnnnnnnnnnnnnnnnnnnnnnnnnnnnnnnnnnnnnnnnnnnnnnnnnnnnnnnnnnnnnnnnnnnnnnnnnnnnnnnnnnnnnnnnnnnnnnnnnnnnnnnnnnnnnnnnnnnnnnnnnnnnnnnnnnnnnnnnnnnnnnnnnnnnnnnnnnnnnnnnnnnnnnnnnnnnnnnnnnnnnnnnnnnnnnnnnnnnnnnnnnnnnnnnnnnnnnnnnnnnnnnnnnnnnnnnnnnnnnnnnnnnnnnnnnnnnnnnnnnnnnnnnnnnnnnnnnnnnnnnnnnnnnnnnnnnnnnnnnnnnnnnnnnnnnnnnnnnnnnnnnnnnnnnnnnnnnnnnnnnnnnnnnnnnnnnnnnnnnnnnnnnnnnnnnnnnnnnnnnnnnnnnnnnnnnnnnnnnnnnnnnnnnnnnnnnnnnnnnnnnnnnnnataatgatgaataatcctcaaaatgttttttaatcctcaactatatgaaagcatttgaatttggcttatcagaataacaagcttcagtgggaaatacagcaattatttatttaaaaaatcagatttaagatggactttcttattgcatgaaaaagatggagaaacatgccatttttcaatgaagattctaatattttatctattttgttcattgaattccatggttaaatctcataaaatatatactttattaaatcatccaaccaaagcataggaaacattgacccagaacctgacttaatggttttgaagatttactatgcaatagggtaactttgagtttcagcaaatgtctttaggttgaaggaattacctatgtcatgaaggacctgtctgtggtttttcaatgnnnnnnnnnnnnnnnnnnnnnnnnnnnnnnnnnnnnnnnnnnnnnnnnnnnnnnnnnnnnnnnnnnnnnnnnnnnnnnnnnnnnnnnnnnnnnnnnnnnngtgttacgtcgctctaaggtccttagaatcttgaaagatttgattatgaaagaatagcaaaattatatttcttgacatataaaaagttggtttaatgcctttatttctctttaaggaccagaaccaggaatactatatcgaaaaattagtctgtggatttaacactgacttagcatatagcttaaagttgctcttttggtttttaacttcctccatacataagcttcaaggacaataagatgttaaaaaggaggaaataattatttttattttgacactgtgacagttttggtaactaggatcctagggagggaaatgtttgcctgttgaacttctttctgttatgagaggatttagttaggtcattaagatgttgatcacacagcttcaatcacaatatgccaagtataacctggtttcgttagaggtgtctacagtccagatgttcttcgtaataaaagcaaagtttttgaacctctgagtccaaagcaggctggttggcataatatgtaatttgaaaaataaaatcttatcttgcagcactatcagtatgttgaatttattatgtatattatttctaatatccgaaactaaatacttgattttttaatgtgtgtgtttattttatgatattgctattaaatttttattatct

SEQ ID NO: 5053 - DNA, 666 bp, Homo sapiens
cgtccccctgaccccagggtctgagtcgccgctgccgccgctgccaccatccgcgaggcaggagagaggaggaggagtgcggcgcggcggccccgggaccaaggagggacccagacatggagctgcgggaagaagcctggtctccggggccgctggattctgaggaccagcagatggccagtcacgagaacccagtggacatcctcatcatggatgatgacgacgtccccagctggcctcccaccaagctgtccccgccccagtctgcgcccccagccggcccgcggcagccatggcgggcgcgggggcaaaggccgcggggccccggtcgcggcgcgccccggcccccaagccgtacgtgtgtctggagtgcgggaagggcttcgggcacggggccgggctcctggcgcaccagcgggcccagcacggggacgggctcggggcggcggggggcgaggagccggcccacatctgcgtggagtgcggggagggcttcgtgcagggcgccgcgctccggagacacaagaagatccacgcggtgggcgcgccctcggtctgcagcagctgcggacagagctactaccgcgcgggcggggaggaggaggacgacgacgacgacgaggccgcgggcgggcggtgccccgagtgccgcggtggggagggccg

SEQ ID NO: 5054 - DNA, 2020 bp, Homo sapiens
  misc_feature (812)..(812): n is a, c, g, or t
  misc_feature (983)..(1150): n is a, c, g, or t
  misc_feature (1363)..(1371): n is a, c, g, or t
gacacagatagtcttctcattgctgtatcatcccaacatacagtgaataccgaattggaaaaacagatttctaatgaggctgatagtgaagaaatgaaaatgtcttctgaagtgaagcatatttgtggcgaagatcaaattgaagataaaatggaagtgacagaaaacattgaagtcgttacacaccagatcactgtgcagcaagagcaactgcagttgttagaggaacctaaaacagtggtatccaaagaagaatcaaggcctccaaaatttgtcattgaatctgtcactcttccactagaaaccttagtgtccccacaggaggaaagctcttcattatgtcctgaggaacagttggttatagaaaggctacaaggagaaaaggaacagaaagaagattctgaactttctactggattgatggactctgaaatgactcctacaattgagggttgtgtgaaagatgtttcataccaaggaggcaaatctataaagttatcatttgagacagagtcgtcattttcattatcagcagacataagcaaggcagatgtgtcttcctccccaacaccttcttcagacttgccttcgcatgacatgctgcataattacccttcagctcttagttcctctgctggaaacatcatgccaacaacttaacatctcagtcactccaaaaattggcatgggtaaaccagctattactaagagaaaattttctcctggtagacctcggtccaaacaggaggcttggagtacccataatacagtgagcccaccctcgtggtccccagacatttcaggaggtcggnaaatttttaaacccaggcagcttcctggcagtgccatttggagcatcaaagtgggctgtgggtctggatttccaggaaagcggagacctcgaggtgcaggactgtcggggtgaggtggccgaggcaggtcaaagctgaaaagtggaatcggagctgttgtattgcctgggnnnnnnnnnnnnnnnnnnnnnnnnnnnnnnnnnnnnnnnnnnnnnnnnnnnnnnnnnnnnnnnnnnnnnnnnnnnnnnnnnnnnnnnnnnnnnnnnnnnnnnnnnnnnnnnnnnnnnnnnnnnnnnnnnnnnnnnnnnnnnnnnnnnnnnnnnnnnnnnnnnnnnnnntgtggtcagtgttaccatccatactgtgtcagtattaagatcactaaagtggttcttagcaaaggttggaggtgtcttgagtgcactgtttgtgaggcctgtgggaaggcaactgacccaggaagactcctgctgtgtgatgattgtgacataagttatcacacctactgcctagaccctccattgcagacagttcccaaaggaggctggaannnnnnnnngtgtgtttggtgcagacactgtggagcaacatctgcaggtctaagatgtgaatggcagaacaattacacacagtgcgctccttgtgcaagcttatcttcctgtccagtctgctattgaaactatagagaagaagatcttattctgcaatgtagacaatgtgatagatggatgcatgcagttcgtcagaacttaaatactgaggaagaagtggaaaatgtagcagacattggttttgattgtaacatgtgcagaccctatatgcctgcatctaatgtgccttcctcagactgctgtggatcttcacttgtagcacaaattgtcacaaaagtaaaaaagctagacccacccaagacttatacccaggatgatgtgtgtttgattgaatcagggatgactcagttacagagcctcacagttacagttccaagaagaaaactgtcaaaaccaaaactgaaattgaagattataaatcagaatagcgtggccgtccttcagacccctccagacatccaatcagaacattcaagggatggtgatatggatgatagtcgaggagaacttatggattgtgatggaaaatcagaatctagtcctgagcgggaagctgtgaatgatgaaactaagggagtggaaggaacagatggtgtc

SEQ ID NO: 5055 - DNA, 1501 bp, Homo sapiens
caccgcagggagtcaagggaggagggagattagagaaggagccagggagggtggcagggaggccacgtgatccgagtcccctcacccctttccttcccacaggtccctggccaaagatttatttctcttgacaaccaagggcctccgtctggatttccaaggaagaatttcctctgaagcaccggaacttgctactaccagcaccatgccctaccaatatccagcactgaccccggagcagaagaaggagctgtctgacatcgctcaccgcatcgtggcacctggcaagggcatcctggctgcagatgagtccactgggagcattgccaagcggctgcagtccattggcaccgagaacaccgaggagaaccggcgcttctaccgccagctgctgctgacagctgacgaccgcgtgaacccctgcattgggggtgtcatcctcttccatgagacactctaccagaaggcggatgatgggcgtcccttcccccaagttatcaaatccaagggcggtgttgtgggcatcaaggtagacaagggcgtggtccccctggcagggacaaatggcgagactaccacccaagggttggatgggctgtctgagcgctgtgcccagtacaagaaggacggagctgacttcgccaagtggcgttgtgtgctgaagattggggaacacaccccctcagccctcgccatcatggaaaatgccaatgttctggcccgttatgccagtatctgccagcagaatggcattgtgcccatcgtggagcctgagatcctccctgatggggaccatgacttgaagcgctgccagtatgtgaccgagaaggtgctggctgctgtctacaaggctctgagtgaccaccacatctacctggaaggcaccttgctgaagcccaacatggtcaccccaggccatgcttgcactcagaagttttctcatgaggagattgccatggcgaccgtcacagcgctgcgccgcacagtgccccccgctgtcactgggatcaccttcctgtctggaggccagagtgaggaggaggcgtccatcaacctcaatgccattaacaagtgccccctgctgaagccctgggccctgaccttctcctacggccgagccctgcaggcctctgccctgaaggcctggggcgggaagaaggagaacctgaaggctgcgcaggaggagtatgtcaagcgagccctggccaacagccttgcctgtcaaggaaagtacactccgagcggtcaggctggggctgctgccagcgagtccctcttcgtctctaaccacgcctattaagcggaggtgttcccaggctgcccccaacactccaggccctgccccctcccactcttgaagaggaggccgcctcctcggggctccaggctggcttgcccgcgctctttcttccctcgtgacagtggtgtgtggtgtcgtctgtgaatgctaagtccatcaccctttccggcacactgccaaataaacagctatttaaggggg

SEQ ID NO: 5056 - DNA, 646 bp, Homo sapiens
ctcctgagcatgtgtttattcatccgggatggaagctgctggaagtcccagaaggacgaaccaattttgataatgacattgcactggtgcggctgaaagacccagtgaaaatgggacccaccgtctctcccatctgcctaccaggcacctcttccgactacaacctcatggatggggacctgggactgatctcaggctggggccgaacagagaagagagatcgtgctgttcgcctcaaggcggcaaggttacctgtagctcctttaagtttcactcctaacatgatctgtgctggaggagagaagggcatggatagctgtaaaggggacagtggtggggcctttgctgtacaggatcccaatgacaagaccaaattctacgcagctggcctggtgtcctgggggccccagtgtgggacctatgggctctacacacgggtaaagaactatgttgactggataatgaagactatgcaggaaaatagcaccccccgtgaggactaatccagatacatcccaccagcctctccaagggtggtgaccaatgcattaccttctgttccttatgatattctcattatttcatcatgactgaaagaagacacgagcgaatgatttaaatagaacttgattgttgagacgccttg

SEQ ID NO: 5057 - DNA, 671 bp, Homo sapiens
gtgtatgtgcgggggagaagatggcggcggcgggggaggcagcgtgagcagccggaggagcgccgagtcccattgaaaccggcagccatggccctccacagcccgcagtatatttttggagattttagccctgatgaattcaatcagttctttgtgactcctcgatcttcagttgagcttcctccatgcagtggaacagttctgtgtggcacacaagctggggataaactacctgatggacgattcgtttatgagaagactggtggtgtcagaagcttatcaaaaatactgaatatcctgtggacttggaaattagtaaagaactgctttctccaggggttaaaaataagaattttaaatgccacagaacctatcggctctttgcagtggtctaccatcacggcaacagtgcgacgggtggacattacactagagacgtcttccagatcggtctgaatggctggctgcgcatcgatgaccagacagtcaaggtgatcaaccagtaccaggtggtgaaaccaactgctgaacgcacagcccatctgctgtattactgccgagtggacctgctgtaaaccctgtgtgcgctgtgtgtgagcccagtgtccgctttgtaggacaccacctcacactcacttcccgcctctctttattggctctttagagagaaa

SEQ ID NO: 5058 - DNA, 1190 bp, Homo sapiens
ctcagctttagattctccctgtactggaaagggatgtcgcaaggttggggacgaaacctctgagtttgcgaccgtagctgtcgctttccggccaacacagaggtgcctgaaggctggttggggtggtgaggcccgaggcagctcttgttcagcttctggaatttctgagcagccctcgtcagtacaagatggaccccgtagtcttgagttacatggacagtctactgcggcaatcagatgtctcactattggatccgccaagctggctcaatgaccatattattgggtttgcgtttgagtactttgccaacagtcagtttcatgactgctctgatcacgtcagtttcatcagccctgaagtcacccagttcatcaagtgcactagcaacccagcagagattgccatgttccttgaaccactggacctccccaacaagagagttgtatttttagccatcaatgataactccaaccaggcagctggaggaacccactggagtttattggtctacctccaagataaaaatagcttttttcattatgattcccatagcaggagcaactcagttcacgcaaagcaggtagcagagaaactggaggctttcttaggcagaaaaggagacaaactggcctttgtggaagagaaagcccctgcccaacaaaacagctatgactgtgggatgtacgtgatatgtaacactgaggccttgtgtcagaacttctttaggcaacagacagaatcactgctgcagctactcacccctgcatacatcacaaagaagaggggagaatggaaagatctcattaccacacttgctaaaaagtagctattgaagtatatttgcgacttttgaaggctcctctttctgcccttccccatttgttggatggctgcaatctcagtgcctgagggaagatgcctagtagaggaaagcttaatactctttttcctgaaagaatatcatcctctgcattatccccatggaacgtttcactttaaccctgactggggagcaatatgttctgtgaaaatatcttgaaattgtacaccaaaaccttacaaccaacttatttgaacatttattacacacagggtttacgtaagacttttcttattggtatataattaatttcctttggtctcccttatccacattggcttattctggaggaaaagcagtgatctgtaa

SEQ ID NO: 5059 - DNA, 616 bp, Homo sapiens
ggtaggaggtgcaggctgccaccatcacaggtgagagggcagaggctcacctgatggggacgaggcttgaggtgggctcaggctggcccccacatcacatccagccctggcgagtgtccttcaggaggtggctgtgcccctcctggactcgaacatgtgtgagctgatgtaccacctaggagagcccagcctggctggccagcgcctcatccaggacgacatgctctgtgctggctctgtccagggcaagaaagactcctgccagggtgactccggggggccgctggtctgccccatcaatgatacgtggatccaggccggcattgtgagctggggattcggctgtgcccggcctttccggcctggtgtctacacccaggtgctaagctacacagactggattcagagaaccctggctgaatctcactcaggcatgtctggggcccgcccaggtgccccaggatcccactcaggcacctccagatcccacccagtgctgctgcttgagctgttgaccgtatgcttgcttgggtccctgtgaaccatgagccatggagtccgggatcccctttctggtaggattgatggaatctaataataaaaactgtaggttttt

SEQ ID NO: 5060 - DNA, 3050 bp, Homo sapiens
  misc_feature (1475)..(1475): n is a, c, g, or t
atttctccgtaatttccactgcttgaaggctgctcgaggaacaggagcagcggcgaaacccaggtctgtcggtttacgagaatgcagtttccaagtacggctctcagttccaaggcaattcccagcacgacgccctggaattcctgctctggttgctggatcgtgtacatgaggacctggagggttcatcccgagggccggtgtcggagaagcttccgcctgaagccactaaaacctctgagaactgcctgtcaccatcagctcagcttcctctaggtcaaagctttgtgcaaagccactttcaagcacaatatagatcttccttgacttgtccccactgcctgaaacagagcaacacctttgatcctttcctgtgtgtgtccctacctatccccttgcgccagacgaggttcttgagtgtcaccttggtcttcccctctaagagccagcggttcctgcgggttggcctggccgtgccgatcctcagcacagtggcagccctgaggaagatggttgcagaggaaggaggcgtccctgcagatgaggtgatcttggttgaactgtatcccagtggattccagcggtctttctttgatgaagaggacctgaataccatcgcagagggagataatgtgtatgcctttcaagttcctccctcacccagccaggggactctctcagctcatccactgggtctgtcggcctccccacgcctggcagcccgtgagggccagcgattctccctctctctccacagtgagagcaaggtgctaatcctcttctgtaacttggtggggtcagggcagcaggctagcaggtttgggccacccttcctgataagggaagacagagctgtttcctgggcccagctccagcagtctatcctcagcaaggtccgccatcttatgaagagtgaggcccctgtacagaacctggggtctctgttctccatccgtgttgtgggactctctgtggcctgcagctatttgtctccgaaggacagtcggcccctctgtcactgggcagttgacagggttttgcatctcaggaggccaggaggccctccacatgtcaagctggcggtggagtgggatagctctgtcaaggagcgcctgttcgggagcctccaggaggagcgagcgcaggatgccgacagtgtgtggcagcagcagcaggcgcatcagcagcacagctgtaccttggatgaatgttttcagttctacaccaaggaggagcagctggcccaggatgacgcctggaagtgtcctcactgccaagtcctgcagcaggggatggtgaagctgagtttgtggacgctgcctgacatcctcatcatccacctcaaaaggttctgccaggtgggcgagagaagaaacaagctctccacgctggtgaagtttccgctctctggactcaacatggctccccatgtggcccagagaagcaccagccctgaggcaggactgggcccctgnccttcctggaagcagccggactgcctgcccaccagttacccgctggacttcctgtacgacctgtatgccgtctgcaaccaccatggcaacctgcaaggtggcattacacagcctactgccggaactctctggatggccagtggtacagttatgatgacagcacggtggaaccgcttcgagaagatgaggtcaacaccagaggggcttatatcctgttctatcagaagcggaacagcatccctccctggtcagccagcagctccatgagaggctctaccagctcctccctgtctgatcactggctcttacggctcgggagccacgctggcagcacaaggggaagcctgctgtcctggagctctgccccctgcccctccctgccccaggttcctgactctcccatcttcaccaacagcctctgcaatcaggaaaagggagggttggagcccaggcgtttggtacggggcgtgaaaggcagaagcattagcatgaaggcacccaccacttcccgagccaagcagggaccattcaagaccatgcctctgcggtggtcctttggatccaaggagaaaccaccaggtgcctccgtcgagttggtggagtacttggaatccagacgaagacctcggtccacgagccagtccattgtgtcgctgttgacgggcactgcgggtgaggatgagaagtcagcatcgccgaggtccaacgtcgcccttcctgctaacagcgaagatggtgggcgggccattgaaagaggtccagccggggtgccctgtccctcggctcaacccaaccactgtctggcccctggaaactcagatggtccaaacacagcaaggaaatcaaggaaaatgcagggcaggacatcaagcttcccagaaagtttgacctgcctctcactgtgatgccttcagtggagcatgagaaaccagctcgaccggagccagaaggccatgaaactggaaggagagcttccagatgggaagcaaaagcagcccaccctccccctatatgggattctctggaaacagcaaagacagtcgccgaggcacctctgagctagacagacccctgcaggggacactcacccttctgaggtccgtgtttcggaagaaggagaacaggaggaatgagagggcagaggtctctccacaggtgccccccgtctccctggtgagtggcgctgagccttccatggacggcaggctccagctcacctcctgccctcaggatcccagagggcctgccaggggcctgggcagccggctcgagagggatgtctggtcagcccccagctctctccgcctccctcgtaaagccagcagggccccgagaggcagtgcactgggcatgtcacaaaggactgttccaggggagcaggcttcttatggcacctttcagagagtcaaatatcacactctttctttaggtcgaaagaaaaccttaccggagtccagcttttgatggagcgtgtcagtattgtgtgacgctggcattcttgggactttgccaagcaactgtaggcagctcatgttgagaatgggtttccaggaaacccgttgtcttgtaatctct

SEQ ID NO: 5061 - DNA, 1908 bp, Homo sapiens
tctgctctgagcccccgcccagcccagaaaccccactagcctggggcctgagaacagccacgccactccctcctgagagcccaccgcgccacagcttggaggaagagcctgcggggaactggctgcaggacgctctcttcttgagtgcaggtgctggctctgctgtgaccatgcccgtgacctttgccctcctgctcctcctgggccaggccactgcggacccatgctacgatccacagggccgcccccaattctgcctcccgccagtgacacagctggctgccgtggcggcctcctgccctcaggcctgtgccctgtccccaggaaaccaccttggcgccagggaaacctgcaatggcagcctgactttggccctgggtggccccttcctcctgacatctgtcagcttgcgcttctgtaccccaggacccccagccctcatcctgtctgctgcctgggcctcagggggtccctggaggctgctgtggcacaggcccgcctggcctggggccttagggggccctgaaagggtgaccttccactccacaccaggtcctaaggccactgtggcggccagccacctccgtgtggagtttgggggccaggccgggctagcggcagctgggctgagaggccgctgccagtgtcatggccacgctgcccgctgtgccgcccgtgcccggcccccccgctgccactgccgccaccataccactggcccggggtgcgagagctgccgcccgtcccatcgagactggccctggcggcctgccacgccccggcacccccacccttgcctaccctgctcctgcaaccagcacgcccgacgctgccggttcaactctgagctgttcagactgtcgggcggccggagtgggggtgtttgtgagcggtgccgccaccacacagctgggcggcactgccactactgccaacctgggttctggagggaccctagccagcctatcttcagccgcagggcctgcagagcctgccagtgccaccctattggggcaacaggaggaacctgcaaccagaccagtgggcagtgcacctgcaagttaggggtcacaggcctgacctgcaaccgctgtggccctggctaccagcagagccgctcccccaggatgccctgccagcgaattccagaggcaacaaccacccttgccactactcctggtgcttatagctctgaccctcagtgtcaaaactactgcaatatgtcggacaccagggtacacatgagccttcggaggtactgccagcaggaccatgttctccgcgcgcaggtgctagcgtccgaggcggcgggcccggcatggcagcggctggccgtgcgcgtgctggccgtttacaagcagcgggcgcagcccgtgcgacgcggcgaccaggacgcctgggtgccccgcgccgacctgacctgcggctgcctgcgcctgcagccaggcaccgactacctgctgctgggcagcgccgtgggcgaccccgaccccacgcgcctcatcctcgaccgccacggcctcgcgctgccatggaggccgcgctgggcccggcccctgaagcggctgcagcaggaggagcgcgccggaggctgccgcggcgtgcgggcacccacacccagtcccaggccggagcactagacgtgagatggggctgcctcgagcaccaacaaagtaatttgggagcgactaggagctgagccttctacctcgacggtgcactgcagagagccaatcagacgtcgcagagccccgacgacactatgcttgcgcccacgccgagcaggcgtgcggaacttttagcaaaaggcggcaagcgggacttctggtcccaacatttcctcctttggcctgtggcttattccccgccagtgatctgtttcccccaataaagtctcaaatctttggg

SEQ ID NO: 5062 - DNA, 675 bp, Homo sapiens
cttctgcacatgtagttcctagagctgctgcttattaaaatgtcaacatcttcatcttctagctgggacaacctcttagagtctctctctctcagcacagtatggaattggatacaagcaagttttttgggagagactagtgcacctcagcaaacaagtttgggactattagataatcttgctccagctgtgcaaatcatcttgaggatttctttcttgattttattgggaataggaatatatgccttatggaaacgaagtattcagtcaattcagaaaacattgttgtttgtaatcacactctacaaactttacaagaagggctcacatatttttgaggctttgctagccaacccagaaggaagtggtctccgaattcaagacaataataatcttttcctgtccttgggtctgcaagagaaaattttgaaaaaacttaagacagtggaaaacaaaatgaagaacctagaagggataatcgttgctcaaaaacctgccacgaagagggattgctcctctgagccctactgcagctgctctgactgccagagtcccttgtccacatcagggtttacttcccccatttgaaatgtgatggactccaatcttttccaggaaagcactgtttccctcatgtgtgcagtggtgtatcaataaagatagagaacgctattg

SEQ ID NO: 5063 - DNA, 937 bp, Homo sapiens
gggtccaggctgcggcgcgtggggagcgggcggagcgggggcgggggccgagcgcggggcacccgggggcctcctgtataggcgggcaccatgggctcctgctccggccgctgcgcgctcgtcgtcctctgcgcttttcagctggtcgccgccctggagaggcaggtgtttgacttcctgggctaccagtgggcgcccatcctggccaactttgtccacatcatcatcgtcatcctgggactcttcggcaccatccagtaccggctgcgctatgtcatggtgtacacgctgtgggcagccgtctgggtcacctggaacgtcttcatcatctgcttctacctggaagtcggtggcctcttaaaggacagcgagctactgaccttcagcctctcccggcatcgctcctggtggcgtgagcgctggccaggctgtctgcatgaggaggtgccagcagtgggcctcggggccccccatggccaggccctggtgtcaggtgctggctgtgccctggagcccagctatgtggaggccctacacagttgcctgcagatcctgatcgcgcttctgggctttgtctgtggctgccaggtggtcagcgtgtttacggaggaagaggacagctttgatttcattggtggatttgatccatttcctctctaccatgtcaatgaaaagccatccagtctcttgtccaagcaggtgtacttgcctgcgtaagtgaggaaacagctgatcctgctcctgtggcctccagcctcagcgaccgaccagtgacaatgacaggagctcccaggccttgggacgcgcccccacccagcaccccccaggcggccggcagcacctgccctgggttctaagtactggacaccagccagggcggcagggcagtgccacggctggctgcagcgtcaagagagtttgtaatttcctttctctt

SEQ ID NO: 5064 - DNA, 2433 bp, Homo sapiens
ccccccgccacctcacacacccccatccgggagacccacgtgcagctgggcccgggctggcgccgcacctcggggtctgcgcgtctccccggcgcgttccgggcgcagccccacgacacggacccctggcggggcggcatccgagaagtcgcaggcggagagggggcgtcctggaggccgggcgcggggacgctgcggcccgcggccacacaaaggaggcggcgggaaggcggggcaaggcgggccgggggcgggggcggcaggaaggggcgggggcccgcgcggcgccgccgataaagcccccgccgccgcggcagccagcttgcgctgtggggctgcccgggctgcgcggcgtctgcaggcgccaccgctgcctctttccggctgtgaccctcctcgccgccgccgcttggctgcgtcctccgactccccgcgccgccgagaccaggctcccgctccggttgcggccgcaccgccctccgcggccgccccctggggatccagcgagcgcggtcgtccttggtggaaggaaccatgaactggcatctccccctcttcctcttggcctctgtgacgctgccttccatctgctcccacttcaatcctctgtctctcgaggaactaggctccaacacggggatccaggttttcaatcagattgtgaagtcgaggcctcatgacaacatcgtgatctctccccatgggattgcgtcggtcctggggatgcttcagctgggggcggacggcaggaccaagaagcagctcgccatggtgatgagatacggcgtaaatggagttggtaaaatattaaagaagatcaacaaggccatcgtctccaagaagaataaagacattgtgacagtggctaacgccgtgtttgttaagaatgcctctgaaattgaagtgccttttgttacaaggaacaaagatgtgttccagtgtgaggtccggaatgtgaactttgaggatccagcctctgcctgtgattccatcaatgcatgggttaaaaatgaaaccagggatatgattgacaatctgctgtccccagatcttattgatggtgtgctcaccagactggtcctcgtcaacgcagtgtatttcaagggtctgtggaaatcacggttccaacccgagaacacaaagaaacgcactttcgtggcagccgacgggaaatcctatcaagtgccaatgctggcccagctctccgtgttccggtgtgggtcgacaagtgcccccaatgatttatggtacaacttcattgaactgccctaccacggggaaagcatcagcatgctgattgcactgccgactgagagctccactccgctgtctgccatcatcccacacatcagcaccaagaccatagacagctggatgagcatcatggtgcccaagagggtgcaggtgatcctgcccaagttcacagctgtagcacaaacagatttgaaggagccgctgaaagttcttggcattactgacatgtttgattcatcaaaggcaaattttgcaaaaataacaaggtcagaaaacctccatgtttctcatatcttgcaaaaagcaaaaattgaagtcagtgaagatggaaccaaagcttcagcagcaacaactgcaattctcattgcaagatcatcgcctccctggtttatagtagacagaccttttctgtttttcatccgacataatcctacaggtgctgtgttattcatggggcagataaacaaaccctgaagagtatacaaaagaaaccatgcaaagcaacgactactttgctacgaagaaagactcctttcctgcatctttcatagttctgttaaatatttttgtacatcgcttctttttcaaaactagttcttaggaacagactcgatgcaagtgtttctgttctgggaggtattggagggaaaaaacaagcaggatggctggaacactgtactgaggaatgaatagaaaggcttccagatgtctaaaagattctttaaactactgaactgttacctaggttaacaaccctgttgagtatttgctgtttgtccagttcaggaatttttgttttgttttgtctatatgtgcggcttttcagaagaaatttaatcagtgtgacagaaaaaaaaatgttttatggtagcttttactttttatgaaaaaaaaattatttgccttttaaattcttttcccccatccccctccaaagtcttgatagcaagcgttattttggtggtagaaacggtgaaatctctagcctctttgtgtttttgttgttgttgttgttgttgttttatataatgcatgtattcactaaaataaaatttaaaaaactcctgtcttgctagacaaggttgctgttgtgcagtgtgcctgtcactactggtctgtactccttggatttgcatttttgtattttgtacaaagtaaaaataaactgttatgagtagt

SEQ ID NO: 5065 - DNA, 600 bp, Homo sapiens
gagacggtactgaacagacaattaaccccattcagatcgtccgctactggaactacagtcatagcgccccacaggatgacctcatgctcatcaagctggctaagcctgccatgctcaatcccaaagtccagccccttaccctcgccaccaccaatgtcaggccaggcactgtctgtctactctcaggtttggactggagccaagaaaacagtggccgacaccctgacttgcggcagaacctggaggcccccgtgatgtctgatcgagaatgccaaaaaacagaacaaggaaaaagccacaggaattccttatgtgtgaaatttgtgaaagtattcagccgaatttttggggaggtggccgttgctactgtcatctgcaaagacaagctccagggaatcgaggtggggcacttcatgggaggggacgtcggcatctacaccaatgtttacaaatatgtatcctggattgagaacactgctaaggacaagtgagaccctacttctccctctgcattccactggctctgccatggactatacaagcagataattttccctctattcaaaataaaatctccaaatgaaaatttgggaatgtagc

SEQ ID NO: 5066 - DNA, 2499 bp, Homo sapiens
atgggctcctattatgcagtaacacatatgacttatggggaatgctggaatgccatcagggtggttaactctaatgaagggctatttgacagggattttcgagcttatgttaaggagtttcatctagctctttcattatctcaggaggaaagccactggttcagactgagtggggagctcctagtgactgctgggtcactaggatcctcctcgcctgaactcaaggcgctccccgccctaaccttccacgcccgcttctcccacacctggcagcagacagctggagatgaagcgtgtgacccaagtggcagggctgaaccttggcgacctctacctgaggttgtccaacgcggctccgtggagggccccgccctcgagctagaccctggcatggccgcgccagggctgctccctggactgcaggccatcctgggactagggactccacgaccagaactaacgctgttccctcggtccgactcgtcctcccgcgagggtcccgcgcccccacacccactcgggacatttctcagggctgctcttcggcctgcgggagcctcgggggaggactgtgtgccctttactctgtacctggccttccagcaggcaccgaaaaagccctgtgagcttctctctgagcggtggagaactgcacatgtatggatgttgctgcttcctgaagggcccatggcagccggggccctggaactcctccttcaggaccttccagatgcaccagaaggtgcaggcaaggccagcatcctggactttattgaacacacagatagtgttcaatccgtgcttttgaatgaatgcatgcaggcacaaatatctgccaagtgctctatttctgtgttcagctgtggggtctttaagtttgagggcaacagcttctgtttgggcaacactgaagagaggaaatgctccctagaaaagatgcattttgagggagcaagcaggacaagcagacggccagagattggactcctggtcctcctggtcccttatgaacagaaccctccatctgggcagaggaagtccccctgtcctggctgctggaagtgccaggatgagcagctattgggaggacctctccacttatccataccatggcagatgtacacatacagaaataactctgattcaaggacagttgaggccagagcttttgaaaaagggtttatatccgggctgtgggagcccaccacagagagcagtcaatgccaggctgactcaggcctgctcatgggggaggtgggagaaattccaagtaaggagatgatcacccaggaggctctagacactccaatacttcctgaccacctgacccacagcacccacccgaagcttattgcaacaggtccaggctctgctgatgacaaagttctcagtctcttcttcctgctatcttcatgcccccacccactcctcactgaaaaaccttcccagagtcccctcccaagcacctactcaaccagcagcaacataaacccaggctatcctggaaaaatctctagtcagacttggcaaaggcaaagaaagaaatttccacttgctgggggagagattgggctgggaggcagcaaccctcagtattaccaagggaatgtccactacccgagcgtcagcaagactggctcctgctccccaaggctgctcatggagaacttggttaccaaggagcttagcacagatgaatgtgtcatggactggaagcagatgcccacactgcacaatgtctcccaccacctcgaaggcagggactgcatgctcaccagtgcagatgacgtacaacaggcaaggctcaagggagggctggtaggaggcgttcccgcagctgccatccaggcttggcaatccatggatctggataacgtcactcaggagctgcagccacattggaagccggaacaaattcgtagcaaggtagcagagcaggcaccaggacggatggagcccttcagggctggaaccaggacgcggtgtacatctgttcatgcatttttccagttgcgagtcccacaggtgagcaaggtgcccaggggacaattcatctccattatgcctcaggccttgggcttcaaaatcctgggccagcttccttggtatagagcaaggtccatggataaagtcatgaagtctatgaacttaccagatgtaacagaagcggttcttctgttctcgtggaagatgaagttgtcctttgttttgatgagtcctgaaggacttaaagcatctgctgaagtgagtgacacacccagctttgagttaataaagtgtggtagtgcctatgaatgcagcaaactggtgcagacaaggacagcagtcacaggaggaacaggacctagaaagaagaggggcagctttgttggaatttattgctggttctggcccccttttgtaaaagagacgaggcaactgtttttccatctgggctctctgggctctctgggcctcctgggatccgaggatataggaccaagattacagaatgaataa

SEQ ID NO: 5067 - DNA, 825 bp, Homo sapiens
gcaatggggataccattctggaagacttgcccatccaatctggtgacatgctgatcattgaagaagaccaaaccaggcccagaagttcacctgcatttactaaacgtggtgcttctagttacgtcagggaaactttgcctgtgcttaccagaaccgtggtcccagcagacaactcttgcctctttactagtgtgtactatgtcgtcgaaggaggagtcttgaatccagcttgtgcccctgagatgagacgcctcatagcacaaattgtagcaagcgatccagacttctatagtgaggcaatactgggaaaaacaaatcaagagtactgtgactggatcaaaagggatgacacttggggaggagcaatagagatatcgattttgtccaagttttaccaatgtgaaatatgtgtagtggatacacagacagtaagaattgatcgttttggggaagatgcaggatataccaaaagggttctgcttatttatgatggcatccactatgatccacttcagcgtaacttccctgatccagatacacctcctctgaccattttctcctctaatgatgatattgttcttgtacaagcactggaattagcagatgaagctagaagaaggagacagtttactgatgtcaaccgcttcaccctgagatgcatggtatgtcagaaaggattaactggacaagcagaagcaagggaacatgccaaggagacaggccataccaactttggagaagtgtgacctatgcatgaatgagggttgaagcctactacctcacacatccagaaggctctgggttttccaataagctatggtaacc

SEQ ID NO: 5068 - DNA, 1323 bp, Homo sapiens
atggggactactatgatggaacaggaccttaaaggtggagtgccaaagaaagtattcaccaaagagggaccagtacatccaagagctggaggcattgaaatgcatagtgtttccagggaagagtcagaggactggaattgctggaacattccactggtgttaggaactggaaggaaaggttctggagacatagtcggggccagtgaagacaataagctgtatttaatcagagggttaactgaggaccacactgatcataataatctcccacattctgttgctggcagggaacctcagggcctggggaagctttgcaatctgaacggcagactgcttgggacaggactggctgtcgcggcctgctgccagtggccaaatgctagtgggagaactgctggattaggctgtgagagctggatgggtgctaccacccactattgtgcccctcttagcttcactagactttgcacccctgtggcttcccgtgatgctattgcccaactgaaaggacctgaggagaaggagaatagagaggagagtaagccagcacggaagcttggggctcctgctgacacttacattagcaaaaggagtgcccatgttcagcctgcttgtcacacagctgccttccaaatcaaagccttccatctgatcagtggtatccgcactcctctgagtaaaagataccactctggactggagctcatctctcccggctgtgggatgctgaagccatgcagatgcagagcaaagcgggcagctgctggctgtgaggagactgtggaaggtgtgaggaggatccatggtgaagaaggaataatttttggaacaaatggacctgttgaccagaaaaaggtaacaagttttttcagaggggattgttgtagaagtctaactggaaaacccaagcttttcattattcaggcctgccatggtacagaactggattctggcattgagactgacagtggtattgatgatgacatggctgttcttcttagggccatagatgtttgcccacaaaaactgagtcaacatgattccttgttcatatccactctggttctttccagaaaccttaaagaagcctcttcctcatgttaccttatattggctaagacaggccagtttgtgaatcaatctgtcaaggaaggatggaattactatgaccaacttatattgatcatctgcagtgaagtagatgttaccatcatgcttttacccttggaccgaattcttctaaatggatttaagcctttgagaacaaaagccagagaacttattcctactccccacttcaccgtcccatgcactttgccctaa

SEQ ID NO: 5069 - DNA, 831 bp, Homo sapiens
atgattgagcagcacaatcaggaatacagccaagggaaacacagcttcacaatggccatgaacgcctttggagacatgaccaatgaagaattcaggcaggtgatgaatggttttcaataccagaagcacaggaaggggaaacagttccaggaacgcctgcttcttgagatccccacatctgtggactggagagagaaaggctacatgactcctgtgaaggatcagggtcagtgtggctcttgttgggcttttagtgcaactggtgctctggaagggcagatgttctggaaaacaggcaaacttatctcactgaatgagcagaatctggtagactgctctgggcctcaaggcaatgagggctgcaatggtgacttcatggataatcccttccggtatgttcaggagaacggaggcctggactctgaggcatcctatccatatgaaggaaaggttaaaacctgtaggtacaatcccaagtattctgctgctaatgacactggttttgtggacatcccttcacgggagaaggacctggcgaaggcagtggcaactgtggggcccatctctgttgctgttggtgcaagccatgtcttcttccagttctataaaaaaggaatttattttgagccacgctgtgaccctgaaggcctggatcatgctatgctggtggttggctacagctatgaaggagcagactcagataacaataaatattggctggtgaagaacagctggggtaaaaactggggcatggatggctacataaagatggccaaagaccggaggaacaactgtggaattgccacagcagccagctaccccactgtgtga

SEQ ID NO: 5070 - DNA, 831 bp, Homo sapiens
atgattgagcagcacaatcaggaatacagccaagggaaacacagcttcacaatggccatgaacgcctttggagacatgaccaatgaagaattcaggcaggtgatgaatggttttcaacaccagaagcacaggaaggggaaacagttccaggaacgcctgcttcttgagatccccacatctgtggactggagagagaaaggctacatgactcctatgaaggatcagggtcagtgtggctcttgttgggcttttagtgcaactggtgctctggaagggcagatgttctggaaaacaggcaaacttatctcactgaatgagcagaatctggtagactgctctgggcctcaaggcaatgagggctgcaatggtggcttcatggataatcccttccggtatgttcaggagaacggaggcctggactctgaggcatcctatccatatgaaggaaaggttaaaacctgtaggtacaatcccaagtattctgctgctaatgacactggctttgtggacatcccttcacgggagaaggacttggcgaaggcagtggcaactgtggggcccatctctgttgctgttggtgcaagccatgtctccttccagttctataaaaaaggaatttattttgagccacgctgtgaccctgaaggcctggatcatgctatgctggtagttggctacagctatgaaggagcagactcagataacaataaatattggctggtgaagaacagctggggtaaaaactggggcatggatggctacataaagatggccaaagaccggaggaacagctgtggaattgccacagcagccagctaccccactgtgtga

SEQ ID NO: 5071 - DNA, 1695 bp, Homo sapiens
atggccctgaatagtaagaggagaggaacttccctacattttgccatagtccaacccttagtggttcttcagccctcacatccaaggtgccgatacaccatgaacaacttgcactattttgcagacagtgggatgacagagagaggagtccaaggtgctcaagggcacaccctgaaatccatgaacccaccagagttgagaatgggaaaagatgagatactgcaaacacaaggtgcctttctggagctggacttggcagctaaactgacaatgatgtatgtccctaggagtccccaggaaggggactttggagccactataaacacgcggggtaaggacagcagctacatctggaagcctgcagaagcttccattccaggaagtgctgtctgctacgctgtccctgttggggtgaggctggtcacctccttacttaccattggtgcagaagcacctggagcagtatctcccaaagcttcctgcttctctttgccttccctagtggccaagccagtcctgctgaagcccagagtagaaaaaaggcaacagattccgaggactcatcgttcaaatacatggaaaaaagccagacgagtccttttttctactactggcttcgctttcatctctgctgtttgtttccttactctggtgtgtaaagaggggtttggagaatccaagagtgacatttccaggcaccttttcccatatggctctgccaatagaaccagtgtactagctagtgagtggcacaccatgtcagatctggaaggcacaacaaagaaggctagtattctcctggggcagttgcagccacgacagatggtcacatggagggaaaagctatctcagaaatctccttatgtctattggcaggcactgagctccatggaacccttaactgtaaggaaggttgaaaatgcaatcttgaacgtggctttgggcacttctccacttgatcgtgtgctacctcctggatcccatctagaccagcccagcatccctgttctgcggattatgttcagaaccatctccatactagcaactttctggtacccatctagcaactggcactttaaaaaatcaaaattctatttccctgaggtggctaaggagagagaacatccccagggggttgtgatagctttaaggaatgaggcaaaggacacagtagccaatggggtgagctatgagccacctggatggtcttcccccatgagctggacccaagagtcctgtgcactggtagctgggccatcttcaagggactcatcatatggctgctacaatgagaagcacaggaacgctccaggcccttgccatatgatactggacccctcagctggggttagagcccatgatagcagctgcagctttgccttgacttgtgcagacacctgcacagggctgctgcagatgtatcccagcaaaagtgccatccagaaaaccatcataaaagaactagagcagccatgtgtagcctatggcatccccgctgatatcaacagtgaccagggctcgcactttactggacataaagtgcagggatgggtggaggccctggatatccactggcatttccacctgccaaacaactctacagcagcagggctgactgaacagatgaatgagctgttgaagcaacaactctggcaggagatgctgcttaccatcagccacctgcaccctgaatga

SEQ ID NO: 5072 - DNA, 534 bp, Homo sapiens
atgcctggcctcaacatccgcaacaaagaattcaactatcttcataatcgaaatggttctgaacttgaccttttggggatgcgagatctacttgaaaaccttggatactcagtggttataaaagagaatctcacagctcaggaaatggaaacagcactaaggcagtttgctgctcacccagagcaccagtcctcagacagcacattcctggtgtttatgtcacatagcatcctgaatggaatctgtgggaccaagcactgggatcaagagccagatgttcttcacgatgacaccatctttgaaattttcaacaaccgtaactgccagagtctgaaagacaaacccaaggtcatcatcatgcaagcctgccgaggcaatggtgctgggattgtttggttcaccactgacagtggaaaagccggtgcagatactcatggtcggctcttgcaaggtaacatctgtaatgatgctgttacaaaggctcatgtggaaaaggacttcattgctttcaaatcttccacaccacataagtga

SEQ ID NO: 5073 - DNA, 765 bp, Homo sapiens
atggccgacatgatcctcctgaagaagagacggctgcttatcaattcattgggtgaaggtacaataaatggcttactggatgaattattggagacaaatgtgctgagccaggaagacacagagatagtaaaatgtgaaaatgttacagttatcgataaggcccgagatttgcttgactctgttattcggaaaggggcacgggcatgtgaaatttgcatcacatacatttgtgaagaagacaggtacctggcagggacgctgggactctcagcagagtttgatagtctttctaaaataacgggagctgaggttgacatcataggcatgacgatgctgctgcaaaatctggggtacaaggtggacgtgaaaagaaatctcactgcttgggaaatgactacagagctggaggcatttgctcaccgcccagagcacaagacctctgacagcaccttcccggtgttcttgtctcatggtgttcgggaaggcatttgtgggaagaaatactctgaacaagtccgtgatatattacaactcaatgaaatatttaaaatgttgaatagcaagaactgcccaagtttgaaggacaaacccaaggtgatcatcttcgaggcctgctgtggtgattttgaggatgatgctattaagaaagcccacatagagaaggattttattgctttctgctcttccgcatcaggtaacaggtttcttgtacacagaatatctttgtgggtgttatcaatagaaaaactcacaaccacccactag

SEQ ID NO: 5074 - DNA, 1164 bp, Homo sapiens
atgagtcaggagttgaccaaagagcagaaagttttttataaaatggtgcaacaattacttaaggctatccagtgcactgtagagtccgaagctttgcataagcttatgcttttaatttggcaggaatgcccttggttacatgatcaaggaacattagatttaaagttatgggagcaggtgcgttgctgcctgaaaagaggattggagcagggccattttgctaatgttaccgttttgaccacctggagttggttacactctgcgttatacccttttgatatgccagactgtgatgagtcacatcacccattttcttcacctgaagggaattcagaagatttaaagggaaagggtacacaggaaccagaacaacaaagaggggctcctcgccccacttcactcccttcagtagggcataaagaagacactctggtgtcaggggtccacaccatctctaaaggaactcgccttgctcagactattcttattccttaccttcaagaaaatggtggggcctcaggattcggccactcaggcatgaaagttttttggagtagtccagtgtcatctcataaaccatacttggaagtaaaaattaatggagttatgtttatgggaattattgacacaagagctgatcaaactattatagctaaaaaacactggccttcagattgggcctcctcttctgccttatgttctatcatgggtgttggagagtatcagcagccattaaaaaacataaatataattagtgattcctcttatgcggtgtgtagtattactcatttagatctcgcacatctgaaaggcactactaatgaacccctactaaccctacttctcacagtgcaggagctcctctgtgcccgtcatcaccccctttatatcacacatattcgctctcattctgggctacctggtccctgtcagaagggaatgtttgagttgatgctctggtacaaccacagatgtggttttcagactctcttgcttttttgtgagctcaagctgatcattcctttttttcatcagaacgcccgcagtcttacacaacagtttcatttaacgcttgctcaagctcgcatgattattaaaacttgtcctgattgccaagggcattctctctcccctttttcattggaacttggtgccaacccatga

SEQ ID NO: 5075 - DNA, 753 bp, Homo sapiens
atgggtcaaagtcagagtggtggtcatggtcctggagacaaggagctgctggaacctggcttggtcctgctcaaccacaaggtgcatgccatgataggggcgctggtggatgacacggatcccctggtcacagtgatgaaggagacctatgccaatactggaggattggaaaccaaattcaggaaattaaggaatctggaatctgtggagcttcctctcacctattctgaatactatgaagaaatgggtatgaagcctcctcaagggggtcgttctctatggtccactgggcacaggggagatgtgaaagctatcatggccacaaaccaaatagaaactttggatccagcatttatcagaccaggctgcattgacaggaagatcgaggtcctcctgcctgatgaaaagaatgagaagcacatcattcagattcacactagcaggatgagggtggccgatgatgtaaccctgcatgacttgatcatggctaaagatgacctctctggtgatgacatcaaagcaatctgtacaaaagctggtctgaagtccttaagagaacttagaataaaagtaacaaatgaagacttcaaaaaatcgaaagaaaatgttctttataagaaacaggaaggggatctatttctagtgaaccacagctgccatcaggaaaatagttgggagatttcccgtcccctgagagggatgagtttgagggagtttcccaggggaatccctgttcccattgatttttcttag

SEQ ID NO: 5076 - DNA, 1533 bp, Homo sapiens
atggaggcctctcggtggtggctgctggtcactgtgctcatggctggggctcattgtgtggccctggttgaccaagaagcttctgatctcatccattctggcccccaggacagcagccctgggcctgccctgccctgccacaaaatctctgtgagcaacatagactttgccttcaagctctacagacagttggctttgaacgcccccggggagaacattctcttctccccagtgagcatctccctggccttggccatgctttcttggggggccccagtggccagcaggacccaactcctggagggcctggggttcaccctcaccgtggtgcctgaggaggagatccaggaaggcttctgggatctgctgatcaggctccgtgggcagggtccccggctcctcctgaccatggaccagcgcaggttcagcggcctgggcgcgagggccaaccagagcctagaggaggcccaaaaacacattgacgaatatacagagcagcagacccaggggaagctcggggcctgggagaaggacctcggcagtgaaaccacagcggttctggtgaatcacatgctcctcagagctgagtggatgaagccctttgactcacgtgccaccagcccaaaggagttctttgtagatgagcacagcgctgtgtgggtgcccatgatgaaggagaaggccagccaccgcttcctgcacgaccgtgagctgcaatgctctgtgctgcggatggaccacgctgggaacaccaccaccttcttcatcttccccaacaggggcaagatgaggcagctggaagatgccctgctgcctgaaacactgattaagtgggacagtctgctcaggaccagggacacagtcaccccccgggatgctgtcacctccatggtcactcataaggccatgatgacgctggatgagaggggctctgaagctgctgcagccaccagcattcagctcacccctgggcctcgcccagaccttgacttcccacccactctgggcactgagttcagtcggcccttcctgacgagaaaacagcaaggaaggctcaactcgggcttgcccggggggctcttccccttcggcgtggaagtttcaatgcgaggaagcaaagagcctaaaatacgaacacccaggaaattaagcaggggaaggggcccttctgagacagtaaagaaacatacatccgaagacggtggaaagtgttcagttgttggcttcagcaaatataaagcagaaagagccacgaggggtggacccagcctgggcgcggctggccggggcctccgcgctggatccagggaagcgccgtccccgcacccgccacgaggcggcgccagagcagcgtccacagcccgggcctctcggcaggcttggggctgcgagaggggccgcggagacaaaccaggcctccaaccaggcttcctgcaaagaccagggaagcggcagagcttctcctcggggagcggtgaaccgagggccgacgcagacacctccatgtgtgggacactgattagacaatcatag

SEQ ID NO: 5077 - DNA, 387 bp, Homo sapiens
atgagcaagagtctcatgatcctggtgcccacaatgcagcggctgggtaggttcctgcccctgtgtttctatcacctgcacggttacgccctccagctgccctccagctgcaatggcactgcagtactcattccttctgacatggggaaagtcagaaagatagaaggggcactgatgaaggagaattttgatacatggactcagcccttcccagtaaggcccttcctactattaatttttgaggaaggcagctgcaacctccccttcttggggaaatgctgggcaatgctcgggcctcctgaagaaaaaggaaaaccatggctggagctcatcaacacagctcgcaacttatggctccatcctctggtctgcacaaagcacctgtga

SEQ ID NO: 5078 - DNA, 696 bp, Homo sapiens
atgtccaagaccccagtgcccgtcccagagaatgacctggtgggcattgtggggggccacaatgcccccccggggaagtggccgtggcaggtcagcctgagggtctacagctaccactgggcctcctgggcgcacatctgtgggggctccctcatccacccccagtgggtgctgactgctgcccactgcattttctggaaggacaccgacccgtccatctaccggatccacgctggggacgtgtatctctacgggggccgggggctgctgaacgtcagccggatcatcgtccaccccaactatgtcactgcggggctgggtgcggatgtggccctgctccagctgccggggtcacctctctccccagagtcgctgccgccgccctaccgcctgcagcaggcgagtgtgcaggtgctggagaacgccgtctgtgagcagccctaccgcaacgcctcagggcacactggcgaccggcagctcatcctggatgacatgctgtgtgccggcagcgagggccgagactcctgctacggtgactccggcggccctctggtctgcaggctgcgggggtcctggcgcctggtgggggtggtcagctggggctacggctgtaccctgcgggactttcccggcgtctacacccacgtccagatctacgtgctctggatcctgcagcaagtcggggagttgccctga

SEQ ID NO: 5079 - DNA, 2583 bp, Homo sapiens
atgctgtggctactgctcctgaccctcccctgcctgatgggctctgtgcccaggaacccaggcgagtccgccccacccaatgcccctgctgcccaggaccccctccttgccctgccccgggctcagagtgccagccctggggtcagcctgaggttctacagcatgaagaagggtctgtgggagcccatctgtgggggctccctcatccacccagaggaggagttggaggcttgcgcgtttagagtgcaggtggggcagctgaggctctatgaggacgaccagcggacgaaggtggttgagatcgtccgtcacccccagtacaacgagagcctgtctgcccagggcggtgcggacatcgccctgctgaagctggaggccccggtgccgctgtctgagctcatccacccggtctcgctcccgtctgcctccctggacgtgccctcggggaagacctgctgggtgaccggctggggtgtcattggacgtggagaactactgccctggcccctcagcttgtgggaggcgacggtgaaggtcaggagcaacgtcctctgtaaccagacctgtcgccgccgctttccttccaaccacactgagcggtttgagcggctcatcaaggacgacatgctgtgtgccggggacgggaaccacggctcctggccaggcgacaacgggggccccctcctgtgcaggcggaattgcacctgggtccaggtggaggtggtgagctggggcaaactctgcggccttcgcggctatcccggcatgtacacccgcgtgacgagctacgtgtcctggatccgccactccacaccccactccctccagattcagtgggaagagcccaaggatgagctagctgtcctctccccaacacccatcgcagcgccgctgcccccggcccccgacctgcaagaggccgaggtccccatcatgaggacccgagcttgcgagaggatgtatcacaaaggccccactgcccacggccaggtcaccatcatcaaggctgccatgccgtgtgcagggaggaaggggcagggttcctgccaggttggcgtgctgagctggggcgtggcctccaggcatggggactaccctggtgtctacacctgggcagaggagccactgtgggcgtgggtccccgcagctgcccctaagaccctgaacgggacacagtggtcctgtcacagccacagccacagcctgcgcaccacgaggccccgtggtcccaaagcccctgcctgctgctgctgctgctgttcctggctgtctcctccctggggagctgtagcactgggagtccaggatccaggggacacgtgcacggcccggctcctgcccgagggcaggcgtgggctcccgtccccgagaatgacctggtgggcattgtggggggccacaacaccccaggggaagtggtcgtggcaggtcagcctgaggatctatagctaccactgggcctcctgggtgcccatctgcgggggctccctcatccacccccagtgggtgctgaccgccgctcactgcattttccggaaggacaccgacccgtccacctaccggattcacaccagggatgtgtatctgtacgggggccgggggctgctgaatccagatcgtcgtccacccaactactctgtcttcttcctgggggcagacatcgccctgctgaagctggccaccagtgtgagaacaacaaacactctcgcggcagtcgccctgccggttggggtgcagggttcagatatgctgccgcctccttaccgcccgcagcaggtgaaggtcctcacactgagcaatgcagactgtgagcggcagacctacgatgcttttcctggtgctggagacagaaagttcatccaggatgacatgatctgtgccggccgcacgggccgccgcacctggaagggtgactcaggcggccccctggtctgcaagaagaagggtacctggctccaggcgggagtagtgagctggggattttacagtgatcggcccagcattggcgtctacacacgcccagagaccagctggcagggtgccaaccatgcagacgcccagagaccagctggcagggtgccaaccatgcagaggcccagagacatgggccagggccaggagtgggtctgcaggcccttcacccacgtcacctgctacccgacggccatccccaggcccttcacccatgtcacctgctacctgatggctgtccccagcaccctcacccacgtcacctgctacccgacggccgtccccaggcccttcacccatgtcacctgctacctgatggctgtccccagcaccctcacccacatcacctgctacatgatggccgtccccaggccctttacccacatcacctgctacccaatggctgtccccagcacccttacccacgtcacctgccacccgacggccatccccaggcccttcacccacatcacctgctacacgatggccatccccaggccttcaaccacgccacctgctacacgacggccatccccagcaccctcacccacgtcacctgctacacgatggccgtccccaggcccatcacccatgtcacctgctacacgatag

SEQ ID NO: 5080 - DNA, 2182 bp, Homo sapiens
caggtgtcccaccgtgccagatacgctgcctaaactgcttccagcttctttttttttttttccccccttctgcaataagtctgtgatcagccacgggacagaggcgccagcagcctgcctgtgacaggcatcaggttagctggctcccactcgggtggcgcgcccaggatataaatccgggcgcgggcccctgctgtggctcctctccctgcacactcaggagagggagcttccttctaaagacctttcttttatctgaagccgcacagcccggcaggctgtgctgacttggtggaggcagcagcggcagagcagcctgagcagcagcctgagcaggaaacctgctggggtggggagggcaggtgtctgcagcccctgagaagaaggccctggtgggccccagaccctggcatcgtttcaggggaggtctctagccgccccagcctgcaccatgtgggccccaaggtgtcgccggttctggtctcgctgggagcaggtggcagcgctgctgctgctgctgctactgctcggggtgcccccgcgaagcctggcgctgccgcccatccgctattcccacgccggcatctgccccaacgacatgaatcccaacctctgggtggacgcacagagcacctgcaggcgggagtgtgagacggaccaggagtgtgagacctatgagaagtgctgccccaacgtatgtgggaccaagagctgcgtggcggcccgctacatggacgtgaaagggaagaagggcccagtgggcatgcccaaggaggccacatgtgaccacttcatgtgtctgcagcagggctctgagtgtgacatctgggatggccagcccgtgtgtaagtgcaaagaccgctgtgagaaggagcccagctttacctgcgcctcggacggcctcacctactataaccgctgctacatggatgccgaggcctgctccaaaggcatcacactggccgttgtaacctgccgctatcacttcacctggcccaacaccagccccccaccacctgagaccaccatgcaccccaccacagcctccccagagacccctgagctggacatggcggcccctgcgctgctcaacaaccctgtgcaccagtcggtcaccatgggtgagacagtgagcttcctctgtgatgtggtgggccggccccggcctgagatcacctgggagaagcagttggaggatcgggagaatgtggtcatgcggcccaaccatgtgcgtggcaacgtggtggtcaccaacattgcccagctggtcatctataacgcccagctgcaggatgctgggatctacacctgcacggcccggaacgtggctggggtcctgagggctgatttcccgctgtcggtggtcaggggtcatcaggctgcagccacctcagagagcagccccaatggcacggctttcccggcggccgagtgcctgaagcccccagacagtgaggactgtggcgaagagcagacccgctggcacttcgatgcccaggccaacaactgcctgaccttcaccttcggccactgccaccgtaacctcaaccactttgagacctatgaggcctgcatgctggcctgcatgagcgggccgctggccgcgtgcagcctgcccgccctgcaggggccctgcaaagcctacgcgcctcgctgggcttacaacagccagacgggccagtgccagtcctttgtctatggtggctgcgagggcaatggcaacaactttgagagccgtgaggcctgtgaggagtcgtgccccttccccagggggaaccagcgctgtcgggcctgcaagcctcggcagaagctcgttaccagcttctgtcgcagcgactttgtcatcctgggccgagtctctgagctgaccgaggagcctgactcgggccgcgccctggtgactgtggatgaggtcctaaaggatgagaaaatgggcctcaagttcctgggccaggagccattggaggtcactctgcttcacgtggactgggcatgcccctgccccaacgtgaccgtgagcgagatgccgctcatcatcatgggggaggtggacggcggcatggccatgctgcgccccgatagctttgtgggcgcatcgagtgcccgccgggtcaggaagcttcgtgaggtcatgcacaagaagacctgtgacgtcctcaaggagtttcttggcttgcactga

SEQ ID NO: 5081 - DNA, 339 bp, Homo sapiens
atggggggccggccctggggagctaagaatgggccctttgcccagcacaggaagtcgggaaggggccctggaagtgacatgggtattgcaggcaccaatggaacaggttggggaggagagtttgggaccaagaacacccatgaacccttagaagccaccatagagaagctgcagaatgtgatgacctggggtccctgctcggagcctggcctcccgggagtctacacacctgtgaatcccttcatttcctggatccaagataatgtctccaacgtctcctttgacacctctgccaacagatgctgttggggctggcccaggacaagacagaggcagtga

SEQ ID NO: 5082 - DNA, 909 bp, Homo sapiens
atgcagggactgttgacattcagggatgtagccatagaattctgtctggaggagtgtcaatacctggatgctgctcagcagaatttgtgtatggatgtgatgttacagaactacagaaactctgtcttcttggttgaggataacttcaatatagaatttctaatttaccctgaaggtattgtcttctctaagccagacctggtcacctgtctggagcaaaggaaaaagccatggagtatgaagcacccaggccttactcaacataacatagttcatactggagacaaaccctacaaatgtaaagattgtggcaaaatttttaagtggtcttcgaaccttactatacatcagagaattcatagtggagagaaaccctacaaatgtgaagaatgtggcaaagcctttaagcaatcttcaaaactgaatgaacatatgagagctcatactggagagaaattctacaaatgtgaagaatgtggcaaagcttttaagcacccttcaggccttactctacataagagaattcatactggagagaacccttacaaattcgaagaatgtgataaagccttttattgggttttaagctttactaaacatatgataattcataggggagagaaaccctacaaatatcaagaatgtggcaaagcttttaagtggtcttcaaaccttactatacacaagagaattcatacgggagagaaaccctgcaaatgtgaagaatgtggcaaagcttgtaagcagtctttggggcttactattcaaaagagaattcatactgaagagaaaccctacaaatgtgaagaatgtggtaaagccttttactggtccttaagctttactaaacatgatagttcatactggagagaagcactacagttgtcaagaatgcatcaaagcttttaa

SEQ ID NO: 5083 - DNA, 2985 bp, Homo sapiens
atgctgaagaagggaaacacacacacagctgtgctgtgtgagcattactggctgaccgactctaccccggacacccatggtcacatcaccatccacctcctagctgaggagcctgaggatgagtggaccaagcgggaattccagctgcagcacgctcccagctccctgctcgcctttatggagctgctcctcaggggctgtccctgcggtgtgggcatgggccggacaggcaccttcgtggccctgtcgaggctgctgcagcagctggaggaggagcagatggtagacgtgttccatgctgtgtatgcactccggatgcaccagcccctcatgatccagaccctgatctatggtggccgggacgcagcagctggccagtggccatggcaggccagcctgctctactggggctcgcacctctgtggagctgtcctcatcgactcctgctggctggtatcaactacccactgctttctcaaaacctcctcatccttcatcctcagctctggcagggagttccctggcccctgtgtctgtctgctcaacccagacatgcgtgagagcattggcagtgtctgtgctggccacctgcagggcttctcttcagtgtgcaccatgctcctcctgactcagtgcccagcttctgaacagtcatggagggacccagagggagaggaaggcatcacagtccaggtatggagtcagcttgggcacctagtggctttgagactccaactattgggcaccaccctctatggcacagagtgtggcaagaccccaagtgaaggtgtctctatgggaaggcgaggcacaagctccaacaagcaggatgcaggagagaaagcccagacaacatgtctcattgacatgtgcctgtcctcctttgccacaccaaagatgattatggacttttttgctctgcgtaacaccatctcttttgaaggctgcatttctcagatcttttttttacacctcttcaatgggactgagattgtgctgttgatctccatgtcttttgacagggactactcctccacaggatcctccaaggctctttctacctgtacagcgcattttattgttgtgttaatgttctttgggccctgtattttcatttatgtgtggccttccacaaacttcctggttgggatgtcctcctccactccaaaaggcacaggctgtgggccaggtgagtgtctgctactctctctggcccatgctcgggacagaatagatgctgaaagcatcttaggtacagtctcccctggaaggcaggaagcaggtgtgcagagcctccaggcctgtggaggaggaagagctgcgcttggggcctgtggtgccagaagccagaagttcaaatcagtgctgtgtcttggatttcagatgaagaacatggggcccagaggggctcaacaagtggcaggggtggagctgggatttgaacccagctgctatgaatcagcaagacacaaaggatttagaggaagcatgggctgtggagtcacatgttcaaaaacaaacgccaaaccacacaccttctctgttgagattactgagtgcagccaagccactcgcgtgagccgactcagctgcagaaagtcattttctttacaaacagcagctgcttcacagttagaaccagggtggtccaggcccccacttcctgacgctcttctggctgctcttcttctgggagcctctcctcatggctcagccagaagacatccaggccacggcctgggcaggaggcccgaggagcaggctctgctccaccaccgtgtgtgcaccagaggctctgtgagcagacgcctgtgccaacgcaggcccgccagtcgtggtcccttccctagcccagaacagccccttggtgtcacaatgccggaagtgccacccccggagccacactcctggagcaccctgttagcatgcccaggtgccctcaaggagggtagcccctcccagattgttgggctcctcatactggccactcgtcagctgaggaatctcatgcaccaactcaacgcattagcttccaaacacactgccccctcgcaggggctgtttcctctctgctcgccagcgcagcgctggtccatgcaggtgccacccgaggtgagcgcggaggcaggcgacgcggcagtgctgccctgcaccttcacgcacccgcaccgccactacgacgggccgctgacggccatctggcgcgcgggcgagccctatgcgggcccgcaggtgttccgctgcgctgcggcgcggggcagcgagctctgccagacggcgctgagcctgcacggccgcttccggctgctgggcaacccgcgccgcaacgacctctcgctgcgcgtcgagcgcctcgccctggctgacgaccgccgctacttctgccgcgtcgagttcgccggcgacgtccatgaccgctacgagagccgccacggcgtccggctgcacgtgacaggcgaggcggcagtgactgtccccagtggctctcagacgaagaggcgagaaagacaagtgaatggcaatcctaaatatgccaagaggtgcaatgtggtgtgtgctaccagcccggaaagacactcgcagcccctctacccaggggtgcacagacagcccaccaacttggcagccgtgcggagcccgcgtgagggtcacggccacctagtgaccgccgaactgcccgcactgacccatgacggccgctacacgtgtacggccgccaacagcctgggccgctccgaggccagcgtctacctgttccgcttccatggcgccagcggggcctcgacggtcgccctcctgctcggcgctctcggcttcaaggcgctgctgctgctcggggtcctggccgcccgcgctgcccgccgccgcccagagcatctggacaccccggacaccccaccacggtcccaggcccaggagtccaattatgaaaatttgagccagatgaacccccggagcccaccagccaccatgtgctcaccgtga

SEQ ID NO: 5084 - DNA, 753 bp, Homo sapiens
atgaagctgggactcctctgtgctctgctctctctgctggcagggcatggctgggcagacacccgtgccatcggggccgaggaatgtcgccccaactcccagccttggcaggccggcctcttccaccttactcggctcttctgtggggcgaccctcatcagtgaccgctggctgctcacagctgcccactgccgcaagccgtatctgtgggtccgccttggagagcaccacctctggaaatgggagggtccggagcagctgttccgggttacggacttcttcccccaccctggcttcaacaaggacctcagcgccaatgaccacaatgatgacatcatgctgatccgcctgcccaggcaggcacgtctgagtcctgctgtgcagcccctcaacctcagccagacctgtgtctccccaggcatgcagtgtctcatctcaggctggggggccgtgtccagccccaaggcgctgtttccagtcacactgcagtgtgccaacatcagcatcctggagaacaaactctgtcactgggcataccctggacacatctcggacagcatgctctgtgcgggcctgtgggaggggggccgaggttcctgccagggtgactctgggggccccctggtttgcaatggaaccttggcaggcgtggtgtctgggggtgctgagccctgctccagaccccggcgccccgcagtctacaccagcgtatgccactaccttgactggatccaagaaatcatggagaactga

SEQ ID NO: 5085 - DNA, 1039 bp, Homo sapiens
ggtccccaggcctcctttgccggagtatctggtggagggcgctgtgcctgcaaaggccgggggttggggtggagacaaccgcaggcaatgtcggccccgcccctgcacctcggccccgcctccaggcttccagagcgacgttggcctgaccccttcctggactcagggacaggggaggaatctggccaccctctggagccttggacgaccggaagctatagggctaaggcgcttaccctctccctactgtgtccccatcagcgaccgggacagggacagcatcgtgagggaacaaagttccacacgcctgcagcttcgggcaattctccttctaacgcccgtggagctggggacgttttccaggtctctgcctcagtgctccgcgacggagggcagcaggggaggggacaatgattattatcaacatgattattaccagccaccacctgagaccatcgatttctcagaaacgcccgcctgggctccaggcgttgctggccacagccaggctccccctttccggccgttggctgagggtgggagccacggcccgaagacctctgcggggagacgccagcctgcgtctgccatggggctcgggttgaggggctggggacgtcctctgctgactgtggccaccgccctgatgctgcccgtgaagccccccgccccgtcatccgttcctcccgcctcgtccctgactcaggccgtccctccagcaggctcctggggggcccagatcatcgggggccacgaggtgaccccccactccaggccctacatggcatccgtgcgcttcgggggccaacatcactgcggaggcttcctgctgcgagcccgctgggtggtctcggccgcccactgcttcagccacagagacctccgcactggcctggtggtgctgggcgcccacgtcctgagtactgcggagcccacccagcaggtgtttggcatcgatgctctcaccacacaccccgactaccaccccatgacccacgccaacgacatctgcctgctgcggccccgggggtggatctga

SEQ ID NO: 5086 - DNA, 447 bp, Homo sapiens
atggttgaggctctgggaaatggttatgagatggctgtgcatgactggaaaactctgggaaaagttttggcttcagctgctgaatatactgtgtggtggagagagtacagtgatctagccatgcagcaatccttgcaaaatttggataatatcctgatacagcttgatatgtatgctgttggagacagggccttttgcttcagctcaggcttaggctcagattattcttactccttaccttcaagtaatgttcaacagacctgtggggcctcaggattcggccactcaggcatgaaggttttttggagtactccagtgtcatgtcatagaccatacttagaagtaacaattaatggagttatgtttatgagaattgttgacatgggggctcatcaaactataatagctaaaagacagtggccttcagattgggcctctcctgcctga

SEQ ID NO: 5087 - DNA, 459 bp, Homo sapiens
atggattccttgaggcaggcaatgcgagagataaaggacttcaccatcacctgtgggaagacggacgtggaggatccccaggagcacatccacatccagtgggtggatgacgacaagaactttagcaaatgtgtcataagtcctataaatgagaagtccatggagactataacaaatgtgaagctattccatggatcagaatgtaaagcaaatggaaaagttatcagatggacagagcttctgaaggaagatggaatgaccaaactgggactaagtatgacacttgactcagatcaggtttgctatcaagcagggagcaatggccagccccttccctcacagtatatgaatgatctggacagcaccttggtgccagtgatccccggaggggcctgtcagctcagtgagggccctgtcgtcatggaactcatcttttatatcctggaaaacatcgcataa

SEQ ID NO: 5088 - DNA, 1602 bp, Homo sapiens
atgctgctggctgtgctgctgctgctacccctcccaagctcatggtttgcccacgggcacccactgtacacacgcctgccccccagcgccctgcaagtcttcactctcctcttgggggcagagactgtgttgggccgcaacctagactacgtttgtgaagggccgtgcggcgagaggcgtccgagcactgccaatgtgacgcgggcccacggccgcatcgtggagaaagcccggcatgcgggcggaggggcagggtctccgaggggcctgcggggtgtgcccctgtccttcctgcgtctcagctgccgctcgacccgcagcgccccgaatgagcttctgtggactgtgacgctggcagaggggtcccggggggagcaagcggaggaggtgccagtgaaccgcatcctgccccaccccaagtttgacccgcggaccttccacaacgacctggccctggtgcagctgtggacgccggtgagcccggggggatcggcgcgccccgtgtgcctgccccaggagccccaggagccccctgccggaaccgcctgcgccatcgcgggctggggcgccctcttcgaagacgggcctgaggctgaagcagtgagagaggcccgtgttcccctgctcagcaccgacacctgccgaagagccctggggcccgggctgcgccccagcaccatgctctgcgccgggtacctggcggggggcgttgactcgtgccagggtgactcgggaggccccctgacctgttctgagcctggcccccgccctagagaggtcctgttcggagtcacctcctggggggacggctgcggggagccagggaagcccggggtctacacccgcgtggcagtgttcaaggactggctccaggagcagatgagcgcagcctcctccagccgcgagcccagctgcagggagcttctggcctgggaccccccccaggagctgcaggcagacgccgcccggctctgcgccttctatgcccgcctgtgcccggggtcccagggcgcctgtgcgcgcctggcgcaccagcagtgcctgcagcgccggcggcgatgcgagctgcgctcgctggcgcacacgctgctgggcctgctgcggaacgcgcaggagctgctcgggcctcgtccgggactgcggcgcctggcccccgccctggctctccccgctccagcgctcagggagtctcctctgcaccccgcccgggagctgcggcttcactcaggctgccctgggctggagcccctgcgacagaagttggctgccctgcagggggcccatgcctggatcctgcaggtcccctcggagcacctggccatgaactttcatgaggtcctggcagatctgggctccaagacactgaccgggcttttcagagcctgggtgcgggcaggcttggggggccggcatgtggccttcagcggcctggtgggcctggagccggccacactggctcgcagcctcccccggctgctggtgcaggccctgcaggccttccgcgtggctgccctggcagaaggggagcccgagggaccctggatggatgtagggcaggggcccgggctggagaggaaggggcaccacccactcaaccctcag

SEQ ID NO: 5089 - DNA, 1347 bp, Homo sapiens
atggtcctgtatcaggcttctgagcaggtgtctggaaaggcaggttcttctggggccctctgctctcttgcagggagggatgtgatcctggaaggccaatgggaacaagtgggagaggaaaggagtattggccatagcccagatgaactgagagaagagcaccaagagttagtggagatccccgaacaggactctgatcccagagagaatttggtcaaacccattacttgtcttggtcatcgcatacaagactgtgagttgccagcaggatacccaagagttcctgacattccttatgggagcggctacaccttgaaatcaaccacggaggccgcggggctccaccagtccctgcccatggtccagctccctctccaccccaccaaggggagtgctctgctaaaagagtctgagttaaatgatgctgactgggccaacctaatgtggaagcgttatctggaagaacaagaggacagcaagatggtggatctgtttgtgggccagatgaaaagttatctcaagtgccaggcctgtgggtaccactctatgaccttcaaggttttttttttttgtgacctctccctgaccatccccaagaaaggatttgctgggggcaaggtgtctctgcgggattgtttaagccttttcaccaaggaagaagagctagagttagagaatgcctcactgtgtgccctttggaaccactcaggcagcatccactgtggccactacacaaccctgtgccagtgccagactggttggcacgtttacaatgactcttgtgtctcccctggatggattgtgaaatccagtcctgataaagagcatagtgaagactggcagagacctagggagaaagaaagaagtcacgccaatggctcagcagtcacaatgtggtcaaagaatggccccaggaacttgtctgctttagaaatgctgcctgatggaccagcaccaaggacgtttcttcagaagaaaagctgtctctttcccctgttctcttacattcttttgcataaggcaggtaaactcttccagcctgatgctcatggatttctagtgaagggcaaagatttcaatcatgtggagaaagaaaagattgtcaaaaatgtggaggaaaaagattataatcccagctttgttcaaaggaaaccctggctggctctgcccactcactggactcaagagccctcagcagtccatggagatgccagttacaaccttaacagcatgaggaggaagagaaaaaccccactatccacggatagtgagggagtggctgctggagactttgggaccacccagcctgggaaacctgggaatctgccctctcctgaccagacctag

SEQ ID NO: 5090 - DNA, 875 bp, Homo sapiens
ggtcctatccagctagaaagttccggctggccagcgtcaagtgttctcaggatcagactcctccagcctttcagaccttaccaagggctctgagcatttctctacaatcacagcagccaggggaaactgaagccaaagtattcctggatggaggagatcggcaccctgtttcatatatcaacaaagagaaagtgacaaaggctatgctggccccaggggtttgtggaaggaatagctaccgtgacagcaatggagactatgcatggctcgacagcaaggaacttcaattcactaaggccaatctagctgctgctatttccagatgtcatgtctgccagccacagaaaccgatgctgagcccggatgtggtacaatttcagtccaaccagccacctgggggcaagcacaggggattcgtcttgactgaaatcgacgtatattctaggtatgagtttgcctttgtttgcaaggcctcggtcaactatctgaagacttggacatgtatatgtctgggcaaggccatttcaagccaagggaagagcataaggaacatgctctttgctgagacagagttcggcaaaagcaaggaattcagtttgacagaatacagtttaagtaaagtaacagtggatgagcgaacaagaaactgctgggatcaagcttttctggccatccaagtagtgaatgaacttgcagcaaaccttggaaaaccttatgcaatcctgtgtcaagaatctcgtgacaaaggcccaatcttgtcattgtgcagcccaactgctcgtggaatgccggggccagagcagatgcccaataggcatttgccagccgacgaaaaccagataattactgagtttgaagaactgctcactgactga

SEQ ID NO: 5091 - DNA, 951 bp, Homo sapiens
atgattgtggctgttccaaccacttactacccaactcttaacaataaaaacagagggtttgcctctgagaaggcaagaaaggagaagatgacggggtatgaggatgaacgagcatcaccccaagatccctgcaaattggacatgaattttggaagctgctatgaagttcactttagatatttctacaacagaacctccaaaagatgtgaaacttttgtcttctccggctgtaatggcaaccttaacaacttcaagcttaaaatagaacgtgaagtagcctgtgttgcaaaatacaaaccaccgctgattctggatgcaccagaactctgcccaggcttaagccctggaaagataaaaatcagagatatgaattcaactcctcacatgagaaggacagctaacccttcagatatttcagtcaagtccgggattcttctatctgctgtctgcaacatcatgaagcctgaatgggctcacttttctctatggctcctcatcttgtccatgcttctccacacaccttcagggaacatatttcctccacaactcagaaaacagttacgtgaaagtggacatcttggagaatactgcaactatcctctgaagaagggcacctgtaattcatatttgaccagattctactacaacactttgacatttttatgtgagccctttgtcttcagtggctgtggaggcaacagaaacaactttaaacagaaatatttctgtgaaaaaatgtgtattactgaaaaagtgctgtcaattccctaccatggagccctagctttgcataaatcatacgagccccaatttccttccagttcactgtcatttgcccaagtcagccagtatctttctgttgatggtaaccaagaacccttacgcccaaccatccaattagaggagggctccattccagggcagggcaggcttacccagctgctaggctaa

SEQ ID NO: 5092 - DNA, 2718 bp, Homo sapiens
atggacattcactggctgaatcgaggagaggagaaaatgttgaacggatatcaggaaactcacagaccagctggaaatattagggaatcaggcttagaaaacacgcaggcgcaaagagtgaccatgaagcccagcactacagccaaaactgcaccacaaagcccatcagggatcagagtcaccaaggtggactggcagcggtcgaggaatggcgctgcccaccacacccaggagtacccctgccctgagctggtggttcgcaggggccagtcgttcagcctcacgctggagctgagcagagccctggactgtgaggagatcctcatcttcacgatggagacaggaccccgggcttctgaggccctccacaccaaagctgtgttccagacatcggagctggagcggggtgagggctggacagcagcaagggaggctcagatggagaaaactctgaccgtcagtctcgccagccctcccagtgctgtcattggccgctacctgctgagcatcaggctttcctctcaccgcaaacacagcaaccggaggctgggcgagtttgttctccttttcaacccatgcaaggccagagccccagtccacaccgggcctgatgactgcttttcagaggacgatgtgtttctggcctcagaggaggagagacaggagtacgtgctcagcgacagcggcatcatcttccgaggcgtggagaagcacatacgagcccagggctggaactacgggcaggtctccaggggcacaggccagacaaggatgtgggctggggcatggggagcctctaagcacagcctctctggggagcagtttgaggaggacatcctgaacatctgcctctccatcctggatcgaagccccggtcaccaaaacaacccagccaccgacgtgtcctgccgccacaaccccatctacgtcaccagggtcatcagtgccatggtgaacagcaacaacgaccgaggtgtggtgcaaggacagtggcagggcaagtacggcggcggcaccagcccgctgcactggcgcggcagcgtggccattctgcagaagtggctcaagggcaggtacaagccagtcaagtacggccagtgctgggtcttcgccggagtcctgtgcacagtcctcaggtgcttggggatagccacacgggtcgtgtccaacttcaactcagcccacgacacagaccagaacctgagtgtggacaaatacgtggactccttcgggcggaccctggaggacctgacagaagacagcatgtggaatttccatgtctggaatgagagctggtttgcccggcaggacctaggcccctcttacaatggctggcaggttctggatgccaccccccaggaggagagtgaaggtgtgttccggtgcggcccagcctcagtcaccgccatccgcgagggtgatgtgcacctggctcacgatggccccttcgtgtttgcggaggtcaacgccgactacatcacctggctgtggcacgaggatgagagccgggagcgtgtatactcaaacacgaagaagattgggagatgcatcagcaccaaggcggtgggcagtgactcccgcgtggacatcactgacctctacaagtatccggaagggtcccggaaagagaggcaggtgtacagcaaggcggtgaacaggctgttcggcgtggaagcctctggaaggagaatctggatccgcagggctgggggtcgctgtctctggcgtgacgacctcctggagcctgccaccaagcccagcatcgctggcaagttcaaggtgctagagcctcccatgctgggccacgacctgagactggccctgtgcttggccaacctcacctcccgggcccagcgggtgagggtcaacctgagcggtgccaccatcctctatacccgcaagccagtggcagagatcctgcatgaatcccacgccgtgaggctggggccgcaagaaggtagttatcagcttattgctattaaaaataacactaaacttttgtttatctacagagtgtcagagaagagaatcccaattacaatatcttactctaagtataaagaagacctgacagaggacaagaagatcctgttggctgccatgtgccttgtcaccaaaggagagaagcttctggtggagaaggacattactctagaggacttcatcaccatcaaggttctgggcccagccatggtgggagtggcagttacagtggaagtgacagtagtcaaccccctcatagagagagtgaaggactgtgcgctgatggtggagggcagcggccttctccaggaacagctcagcatcgacgtgcctaccctggagcctcaggagagggcctcagtccagtttgacatcaccccctccaaaagtggcccaaggcagctgcaggtggaccttccccagtggaaagcagaagccgccccaacagccaatgagaaagccctgcttgtgagtgggagaggtagagaaattgacagaagacagcttagaagtccaagggagagtgtgagtgggaatgtggttttggaaattacaaagaaaaatgtgcaggctgaggaagacagatctttctgcagcctgccctcagtacagcccacagtgggtgccttgactcagatggtgcatatgctccctcctggaacttggatcttaagagatcagaatggagagaagcttcagaaggcactaaaggtggtggtggtggtagtgccctag

SEQ ID NO: 5093 - DNA, 1839 bp, Homo sapiens
atgctttcccttgaggcatactccaggacccaaactcagatcctggggtgtttgggattcaaccttacagacacatcaatgatagagatcttgcatggcttccagcacatgatctactcactgaattttccaaagaagaagctagaactgcaaatgggaaacactctcttcactggaaagtggctggaaccactggcaaagttattggatgatgagataaaaggtaatatggaaaggaaagccaaaggaaaagttgtaagccttatccacaccctcaaactgaacttcatcatggtcttagtgaactcgatttgctttaaagctgactccaagttgcctaaccctaaagatatccccagtgttcttcaagaggtgagacataactgctccccacaccccactgggaatttccccaaaatgcccttttggtgtgccaagactaacccaatgaagtacaaaagacaagtggaccatagtcaagtcaccccaggcctcttaaaggagtcctgcccaggttgcatagtggaagttggagacagagtaggggacaaaggaaacacctctgattcctgtcaaagagaaaagcacaactttcccccatttgaaaaccacgattactattcctgtaactgcaatataaccccatgcagagtagtaagatgcacccaagaggcaaaggagggaaacctgataaaacttctgtccaaagagtggggtgctgttagagattcagttgtcttccaaagcacagtgttcaagcttaaggagacccaacagtgcactgatggggatgtcattcgccatgcatcccatgccccttttcatgctcaggctgctggcatcatcaagagccagagtggagcttgtgacggggcagccctggaccctggattcatcgggagtgccttggtgcctgaagaatgggtggctgaagccgaggcagaggtagcccctgaggatttccaggaggcaatagaagctgttttggaggaggaggaagatgaggcctgggaacatgaggagcggggagagacacttgcgccaggggagtgggaggatccgggagtgggaggatctgggagcaggaggacccgggagcgggaggacctgggaacaggagcatctgggagtgagcgcacccgggagcaggaggacccaggagtgggagccgaggtctggcagggcgtgtacctggcagaaggagccttgcccggggagccagaggaacctgcagaggtcgctgcattcctgcaggcagaggaaacggcaggggaggtggaggcctctggcttagttgctcagaccctacctgccttggttcagcagcgggtcaatgctgtcaggaaacttcaggcagcatatgcacaagtagaagctcaagtctataaagggccaggaacaatcagcagcacagggtgtgagatctgttggaaagaggggaaaaatattatggtgaaaaatatcaagaagcaaaaatgtgagggtcctggaagtgttgtacttaccagtaggaacattctcagctattctttttcccctacatatttctattccccaggttctgctgagcatagagtatgggatacggctactgaggataaactggaataccttttccaagaacgtctcccaatatctgaattattcttctctaaagaagcggctgaatataagtatgaaaattctgatgaggaggctcaagaagctggaggcaagaaggagagagaagaggatgaaaatgaagaactggaagaaggacttgaaaaggatctggactcagcagagcacagccccttcaaaaaatccaggtattcatgtatagtcttgagtattagctaa

SEQ ID NO: 5094 - DNA, 603 bp, Homo sapiens
atgaaggacttcaccatcacccgtgggaaggcgcacgcagaggatccccaggagcacatccacacccaatgggtggatgatgacaagaacgttagcaagggcgtcgtaagtcctatagatgggaagtccatggagactataacaaatgtgaagatattctatggatcagaatgtaaagcaaatggaaaagtcatcagatggacagaggtgtttttcccagaaaatcctgaccagcacaattgcctcagtgatcctgcagatcacagtagattgactgagcatgttaccaaggctttttgtcttgctctctgtcctcacctgaagcttctgaaggaagatggaatgaccaaactgggactacgtgtgacacttgattcagatcaggtcggctatcaagcagggagaaatggccagccccttccctcgcagtgcatgaatgatctggacagcgccttggtgccggtgatccatggaggggcctgtcagctcatgcaggaaagtacattagaagaatgtaggaatgagtgttgggcactgggcatcaatcagccttgtctacccccacacttctggcttgttaacagattgtttcatgtgttttag

SEQ ID NO: 5095 - DNA, 867 bp, Homo sapiens
atggatgatccgaagagtgaacagcagcgcatactgcgccgccaccaacgcgagaggcaggagctgcaggcccagatccggagcttaaaaaactcggtccccaagaccgacaagacgaaaagaaagcagttgctccaagacgtggcccgcatggaggccgagatggctcagaagcaccggcaggagctggagaagttccaagacgacagtagcattgaatctgtcgtcgaagacctggccaagatgaatctggaaaaccggcctccccgctcctccaaagcccacagaaagagagaaagaatggagtccgaggagagggagcgccaggagagcatcttccaggctgagatgtcggagcacctggccggcttcaagcgcgaggaggaggagaagctcgccgccatcctgggagccaggggtctggagatgaaagcgatcccggccgacggccactgcatgtaccgcgccatccaagaccagctggtgttcagcgtgtctgtggagatgctgcgctgccgcaccgccagctacatgaagaagcacgtcgacgagttcctgcccttcttcagcaaccccgagaccagcgactccttcggctacgacgacttcatgatctactgcgacaacatcgtgcgcaccacggcatggggaggccagctggagctgagggccctgtcgcacgtcctgaagacccccatcgaggtgatccaggccgactcgcccaccttgatcatcggggaggagtacgtcaagaagccgatcatcctggtctacctgcgctatgcctacagcctcggcgagcactacaactccgtgacaccgctcgaggccggcgccgccgggggcgtgctcccgcgtctcctgtag

SEQ ID NO: 5096 - DNA, 2241 bp, Homo sapiens
atgacaagcaaagaactgctaacagagaaggctgttctagtctgtaagtcacccattaccataaactctggttttgagctacttgcagcagcagctattggctgtgtaaaaaatttcacattgatgctacactgtttgactgaaacatattacgtagacaaagcaaaaactcaactatatataatcctagtcatcagaaacagtatttctacaattgaaaaaacagttagtgataaagatgatgattgttcaaagatgaggaacaaaattgtgaggtggccacgtttagaggatagatttcaaatgtttctgttagaggcacaagccacagtcatttggagcaatgtttctgacagtgtcttaagggccaggaagggccaggatctgccaaggcctgtgttccagggtggggtcgatggaatccaggcgtgtatgctggtggggggtactgtggacagaggaggggagagaatggcggtgtccggcatgtgctggagacatgggacgtggttgggttggtcaaagtctagggaactcatcacctgccaggacgtctcacctcctgctgtcctctctaccctactctccacatcttcacagtgcagtggagatgattggccgctaggtgatgcccgaagacaaccgatgcttgcaagtgtcagtcggcacggaaaagaaacgaataatgagtctttctgtgtcagggtggaggttggggatggagtgcggaagaggcacaccccagtcactggcctcttccagatccctctcacatcagggagaactcccaggcaattcccacgactagcgaccagagccccacagaggacacagcctacgtttctgcccatgggatcttctggaacttccattcccccagagagaaaagaggaccacgggggcacgggtgtgcggatggaggctagggctggaggtaaatcacccacatcaatgtatttcagtcctgatatcgatgcaagttctttgccaagtgtggttttccaacccctggcgtaccgacaaggacccgaagggccccatcactgcatccacatgggacttttactggatccagtaagtccctgccagctccccacaggctcctggtatgtcacttgttctgggcctgtggacagacaaccaggacacttgctcagtgcccacttcctccttgtaggcctacagcctattgctcaaccccaagctcaccagcctttgcttcctaagccattcgccactggagctgctcaagtaccacagcctgaacttcacaaaacactttgtcatgccatgaaagaaaagggagctgtcagtgtgacagggggcacctctggaagtggtggccatttgcttctatctgacctcagggcagcttctcagggcaagaagatcctagagcagatggaagtctcagagaagaagcctatgtccaggttcttggctcgaggtttcaccacagctgacccttggatccagggggtgatttacaacatgtgcaaggcagtcagctccatcagctgtacagccttcaacattcacttcaccttggacatctcaccagaaagcattgaggactggccaacgcagaagctctgcaaacggtctgagggacagcagaagcggccttctgggttcactcagaccacgtggttcctggagcctcggatcggctacttcagacacagacgtctcagagtcgtcagtgcagatttggacttcccctggggaagtaaacttgggtcacctgatctgctgttagtctcagtcagcaaatggccactgactgctctagtattagagggacagcacttctccctgaccgcaccaacagaaagcattcagggtttgcttgacgatttcatgacggaaatatattgggatggaagaatgttccctgcaagcttgttttggaacttcagagctcaggcaggctccagtgacaatcgtgtgattagggagcccagactgatggcagacccagggcccactactctcctccaaattcgcgaggctcccattgtcatggctcacaggaatccaagaagagcaccagggacaggaggcagacatcctgacattgtgacaaggatgggtgcatgggcattcttgctagaccttctactctcctggaactgccaggcccctggtgttgcatattcccctggttctcagggccctttgcgatgcatcttccccatccctcatgaccctcatggcctacctgctaggcccacggtctag

SEQ ID NO: 5097 - DNA, 330 bp, Homo sapiens
atgtttctagatccatggccagaaattaggaatcttcccctacgcaagccgtaccccatgagacaagaagtacacaaaaataaaacatcaaatgtttatttcttagaaagatcaaatagtgctaggatgacacttacaaaagctttcaaactttggatgagtgggcagggggaagcccccaaagggcagcagataaatctgggaaaaagagaaataatttttaaatgtaatttgaagccagatgacaaagatgccttagatgagcataagtcctctccaacagaatatgctccattatatcctcatccaacaggctttatgtatcaatag

SEQ ID NO: 5098 - DNA, 2151 bp, Homo sapiens
atgcagtcagaccctggaccccagtctgaaggtgatgttatccaaccttggatctatgctgaaaccaatactgtcagacactggacccattctgaaactgataaaataaaacaatggactgagcctgaatctcaagcaagtaggacctggcctgaggcagtctctacctctacaaatgccttggcttttacctccactgccagtgcttttcggccacacttcatctttctgccacagcctcagagtaaggctcaaaaacttgctttggcagatcagattgctctgcaatatgctatgccttggcaagctgtgatcaacagccatggaagtgatttctgctgtggttccgtggttagccactgttggattctcacagctgcccactgtgtcaggaacatgaatcctgaaaacactgctgtgattctgggcctgaggcacactggcacaccactgagaattgtgaaggtgtctatcatgctatttcatgagagattccagttgttgagtaggccaccagctccccagcctgaccatcatgtagcacagcaggacgtcattatggtttctgacccatgccgacatctgggtgtgccaaacaatctacctctggtcaaggagcctccagatgattggccatcccaaatcggcagctgcaaggatatggctctggcccagaagccggagatgccctgtggcctggggcattcacggagcccagctccaagtgaaggacctgcagcaagtccattgactgcccggacccgggcctatggagtccagctaatcctcgtcacccctaggctctgggggccgctcctcaggaggccccctccccaaaaggcccatgggcagccacctgctgagaacctagtcccacacctactagtacccaggtttcctaaggagccccgatgggcccgcagattgcagcagtcgccgtggggctcaagtcccctgcagggtcaactgcgcacaggagctcgggagccagaggacgaggacctgggcttgcagagccccaccagcaggcaccagagccgctgctgcgcgtgtgggagcctctggatccgcaaggcagtgcacaacagcatgcacgcaggccgtcgatggccagtcctggaggctggcctcctgtttgcccagggcgtggtggtctgtgggagtccggagaagggcactgtcttcaggatggaggctctacaggagggagctccaggggcgcagagcgaggaggcagcctgggtggaggaggcggtgctggtgttggatgacataatcacggaggtggaggtggtggcccaggaggaggccgacgtggagcgtctggaggaggaccagcgggcacagcttggccctgggcccatgaccccagagtcgacactggaggaactactggccattcaggtggagctagagccggttaatgccggagccatggagaggtgctcttggagaagtgtaagtaacttacgggcagcttggcatcgatgcgactatttggggaaaaacggagagttgccatggacaagtgtggctgtagaaagccggagcagacgcgggctctttgacctaaatcagattgcaaaccacctccagatgtcagccctgatctctgaccaagatgaagacatgctgagctacatgatcaacttggaggtgatgccgggaagactgaggctagagggtttagcgggggaggaatacagggcttcccattccactccaattcagcggtatccgaattatgaagtggaggcctatcgccacagacaccacaacaggagacttaacttcttcaactggttttctgaccacgactttgcaggatctaataggattgctgaggtggatcctcactgggaaacatcaggaatgactctgtctttgcatggaaaagcaataaaagtagaacaagccaagaaaccatcttttcaaagtggtggtaggcggagaccaccaacttcttcgagaaacagaagcccttcaggaagtctgagatctgcaagaggaagcagtggaggaacaagagggtggcttccctcacatgaagggcacctgagtaatgttttaaaatataaagatggaaccataggactgaaagaaaataagtttgacgatatcgaaatttctcaaattttatttcgtgtatga

SEQ ID NO: 5099 - DNA, 1899 bp, Homo sapiens
atgcctgacattaatactgtgagttcttggtttcagactcaaaacaatgtaagaataaatgttactcaacctcattctcgagcaggtactacctggatgcagccagaatggcaaataatccacccatggaaccaatctgaaaagaatgcagtcagaccctggacccagtctgaaggtgatgttctgcaaccttggatctatgctgaaagcaatacagtcagactctgggcccattctgaaactgataaaataaaacaatatactgagcctgaatctcaagcaattaggatgtggcctgaagaggatatgttcgcactttggtccccaacacaaaacgatgcagtttggccatggacccaagtggaatcacaaatgacccactcctggacccagaatcaacttagtataaattacccttggactcagcatgtacctgctgcaatcagaccatggacttactctgaaattcaaccctgcacccaccctgaagccaatacagtgataagatactggttccagactcaaatgagttcattaaatcctgggaccaacctgaaactgaagtattccaaatttggactgtcccaagggacctctaggacctgggttgatcttcctgaagcaaccactacattttcaacccaggttccttcctatacgcctggagcaatgtctggaacaagagaaaatatacaactatatgactgttggctacaaagtcctggaattgtgcaaaaacggcacctgagcatcctacaagtcagcacttgtgcccaattttggctcaagctgaatgaactcactttctgggtggaggccaagaaagccatgtggatggctgactatcagggagtgacacagtctagctatgctccctggtacaagcaagggcccatgactacctctgcttctatgtcccattcagtctctacctctacaaatgcttcagcttttacctccacccctgcttctctttggccacacttctctctgccacagcctcagagtaaggctcaaaaacttggtagagatcagatttatctgcgatatgccatgccttggaaggctgtcatcatcatctgtgggagtcagatctgcagtggttccatagttggcagctcttggattctcacagctgcccactgtgtcaggaacatggatcctgaagacactgctgtgatactgggcctgaggcaccctgaggcaccactgagagttgtgaaggtgtctaccattctactgcatgacagattctggttggtgactgaggcagcaagaaatattctggaattgctactcctccacgatgtccagactcccatttggctcttatcactcttgggctatctgaggaacctgaatagttcagaatgctggctctctaggccacatattgttacaccagctgtcctgcttagacacccctgggccccagggggaccgcaacctcacccaggcactggaccactcccacagattcaggctcagcagcctaacctgcaaatccatcatgtagctcagcaggacttcatcatttgtgaccctggtccatatctgggcccaagtcttgagcaccatgtgtttctggggccgccctctcccgcagagcctccagacttaacacggtgccctcctagggctcccacagaccaagggctcacagtctgcgtgtgcctgaacccaccaccaccttgcacaagcatcttctcagaggaggactaccgcgggaggatggagctgcaggccacccaggggaggggctcctcaggagacgcctaccgctcttgcaataattggcagatgcccactgccttcccaatgattggctggaggccagctgcagcggtctttcctgcagttggccctgtggtgtcccgaagccggatgcatacgacctga

SEQ ID NO: 5100 - DNA, 1152 bp, Homo sapiens
atgcctggatctcagtctggacccaagcctgaacaacaacctcttaggtattcagaactcagtgtttccctggaaagtcctggaattgtgcaaaaacggcacctgagcatcctacaagtcagcacttgtgcccaattttggctcaagctgaatgaactcactttctgggtggaggccaagaaagccatgtggatggctgactatcagggagtgacacagtctagctatgctccctggtacaagcaagggcccatgactacctctgcttctatgtcccattcagtctctacctctacaaatgcttcagcttttacctccacccctgcttctctttggccacacttctctctgccacagcctcagagtaaggctcaaaaacttggtagagatcagatttatctgcgatatgccatgccttggaaggctgtcatcatcatctgtgggagtcagatctgcagtggttccatagttggcagctcttggattctcacagctgcccactgtgtcaggaacatggatcctgaagacactgctgtgatactgggcctgaggcaccctgaggcaccactgagagttgtgaaggtgtctaccattctactgcatgacagattctggttggtgactgaggcagcaagaaatattctggaattgctactcctccacgatgtccagactcccatttggctcttatcactcttgggctatctgaggaacctgaatagttcagaatgctggctctctaggccacatattgttacaccagctgtcctgcttagacacccctgggccccagggggaccgcaacctcacccaggcactggaccactcccacagattcaggctcagcagcctaacctgcaaatccatcatgtagctcagcaggacttcatcatttgtgaccctggtccatatctgggcccaagtcttgagcaccatgtgtttctgggctgcgaagacatggctctggcccggaaaccggggatgccctgtggcttgaggcatttacaaagcccagctgcaaatgatggacctccagcgagtccgttgcgggccggggcatactggggccagggcccggctctgcccagtggtcctcctgctgctgctccacgtcggcctcttccttggccaccacttccacttctgtcgtga

SEQ ID NO: 5101 - DNA, 681 bp, Homo sapiens
atgggtgaaagtcagagtgggggttatggtcctggagtttgcaagaagaatggaaggacaagaaaaataaatatgaacctcctgtaccaactagagtggagaagaagaaaacaaagggaccagatgctgccagcaaactgccactgccacaaggtgcatgcagtgataggggtgctgatggatgacacggatcccctattcacagtgatgaaggaaattaaggaatctgtgaagcctcctctcacccaacatgaatattatgaagagacgggtgtaaagcctcctacggggtggggggtcattctctatggtccacctggcacagttgctgaagaacacgcaccatccactgtgtttattgatgatattaatgtcactgggacaaaaagatatgactcaaattctggtggtgagatagcaattcagcgaacaatgttggaactgtggaaccagttggatggatttgattctaggggagatgtgaaaatgcatacaagcatgatgacactggccgatgatgtaaacctggacgacttgataatgactaaagatgacctctttggtgctgacatcaaggcaatctgcacagaagcttgcctgatggccttaagagagccacagaatgaagaaaatgttctttgcaaaaaacaggaaggcactcccaaggggctctatctctag

SEQ ID NO: 5102 - DNA, 1128 bp, Homo sapiens
atggcttcctgtacatctgtgtcactatggatgattgcccttcttgtgtttggagtgttggcaatctttggaataactattggtctccttgttcattttctggcagtagcaaacaggatctacttctaccaaggtagctttaaaatgctggatatcccatataatagcaattatgaaagggagacatcaccagaaaataactatcttagccaaattcttgagactaggacaaaaaatccaaaaaactatactgtcagctttggcacgaaagtaactcttccctatatgcaacatgatgttcaacaaattattattcatgaagactacatccaggatgaacatcatgatgatatcgcacttatactgctcactaaaaaagttttatttaagaatgatgtacatcgagtttgtcttcctgaagccacacagatttttccacctggtgaaggagttgttgttacaggatggggaagactttcatttaatggtaagatcagtgaaaacttaacataccataaagcatctgtgaagattactgatacaaacacttgtaatgctaaagaagcctatcgtagtatggtacaggatagagtgctatgtgctgggtacatggaaggaaatatagacgcctgccagggagactctggaggaccactagttcatcctaattctctaaatatttggtatatttggtaccttgttggagtagtgagctggggaaggaatgaatgtggtgcaatcaatagtccaggggtctacacgtctgacagagggatgtggccggtgggcctcttgaaggcccctgggggccgcaggctccttgctgcgctggaggaagaggcctgcccagcgcgggttgggcccctccagcctgctgagtctgagggctccgcgctggttttgcgtcttccacagactctgggcgccctgtcgcttctcctgggccagctctcagaagtggcccatgccctccagggtcacgtcgtcgcggtagaaatggaggatgagagagaggtaggtaagggaagcccgcagctgccggtggaccaggctgctgacggcggcttccacttcggtgcagtaattctggctgatgtgggaactcatggttctttggaaaggagctaa

SEQ ID NO: 5103 - DNA, 1221 bp, Homo sapiens
atgggcattcctttgtttgcggaccaacatgataacattgctcacatgaaggccaagggagcagctgttatattggacttgagcacaaagtcaaagaagacttactattatcaaggtgattttcatatttctggagtcacatacaatgataattgtgaaaacgcagcttcacaagccagcacaaatctaagcaaagatattgagactaagatgttaaatgcatttcaaaattccagtatatataaggaatatgtcaaatctgaggtcatcaaacttctgcctaatgccaatggttcaaatgtgcagttacagctgaaattcaagtttcctccagcagaaggagttagcatgaggactaaaatcaaggctaaattacatcagatgttgaaaaacaacatggcatcctggaatgcagttcctgcttccattaaactcatggaaatcagcaaggctgcttctgaaatgcttaccaacaactgttgtgggagacaagtagccaacagtatcataactggcaacaaaattgtgaatggaaaaagctccctggagggggcatggccatggcaggccagcatgcaatggaaaggccgtcactactgtggagcctctctgatcagcagcaggtggctattatctgcagctcactgctttgctaagaaaaataattcaaaagattggactgtcaactttggaattgtagtaaataaaccatatatgacacggaaagtccaaaacattatttttcatgaaaattatagcagtcctgggcttcatgatgatattgcccttgtgcagcttgctgaagaagtttcttttacagagtacattcgtaagatttgtcttcctgaagccaaaatgaagctctcagaaaatgacaatgttgtagttacaggttggggaacactttatatgaatggttcatttccagtgatacttcaagaagactttttgaagattattgacaacaaaatttgcaatgcctcatatgcatactctggctttgtgactgatacaatgttatgtgctggatttatgtcaggagaagctgatgcatgtcagaatgattctggtggaccactagcttaccctgattccagaaatatctggcatcttgttggaatagtaagctggggtgatggatgtggtaaaaagaataagccaggtgtctatactcgagtgacttcttatcgcaattggattacatccaagactggactctga

SEQ ID NO: 5104 - DNA, 1047 bp, Homo sapiens
atggaggtaatgcaccagtggggtcatgtgagtcaaatacctgttgaattttcagaagctgaattctcacgagctgaatatcaaagaaagcagcaattttgggactcagtacggctagctcttttcacattagcaattgtagcaatcataggaattgcaattggtattgttactcattttgttgttgaggatgataagtctttctattaccttgcctcttttaaagtcacaaatatcaaatataaagaaaattatggcataagatcttcaagagagtttatagaaaggagtcatcagattgaaagaatgatgtctaggatatttcgacattcttctgtaggcggtcgatttatcaaatctcatgttatcaaattaagtccagatgaacaaggtgtggatattcttatagtgctcatatttcgatacccatctactgatagtgctgaacaaatcaagaaaaaaattgaaaaggctttatatcaaagtttgaagaccaaacaattgtctttgaccataaacaaaccatcatttagactcacacgctgtggaataaggatgacatcttcaaacatgccattaccagcatcctcttctactcaaagaattgtccaaggaagggaaacagctatggaaggggaatggccatggcaggccagcctccagctcatagggtcaggccatcagtgtggagccagcctcatcagtaacacatggctgctcacagcagctcactgcttttggaaaaataaagacccaactcaatggattgctacttttggtgcaactataacaccacccgcagtgaaacgaaatgtgaggaaaattattcttcatgagaattaccatagagaaacaaatgaaaatgacattgctttggttcagctctctactggagttgagttttcaaatatagtccagagagtttgcctcccagactcatctataaagttgccacctaaaacaagtgtgttcgtcacaggatttggatccattgtagatgatggtgagcagtttcaacctaattttcttagcacaagaatgtcttga

SEQ ID NO: 5105 - DNA, 816 bp, Homo sapiens
atggtgactatgaaaatgtgtggtcctaaaaaagagttagagggaggcctgaagttttactattaccagacctccttccagatccccagtattgaatataatcctgatttttcagtagaacactcaaaacttagcaccgacctgaaacaaaaagtcagtaacgagagaatggcgctaaacttaattgatgttacagtgaaatatatgaatgcagcacaagcagaacacattctgaacagctgttgtggtttagggaaggagtttccatccaccaaaagaattgctgatggtcggattgcaagaaaagctagcctgcaggtggaggggatccatttgtgtggtgcatctttgatcagtgaagagtggctcctgacagcgggtcactgttttgacttaaagggggagtcaattattattcatgagaactatgctgcccataaacacgaggatgatatcgctgtagtgaagctcttcacccccatcatattttccaatgaggtgcacagagtctgtcttccagaagctacttttgaagccttgcctaagagtaaagtgtttgtcactggatggggagcacttaaattagatggtccctttcccaatatgctacgggaagttgaggtagagatcataagtaatgatatatgtaatcaagttcatgtgtatgtatcatcaggaatgatatgtgctggattcttgtcaggaaaactagatgcctgtaagggtgattctggaggtcctctggttattgcacgtgatagaaatgcctggtaccttgttggaatagtaagctggggaatagactgtggaaaataa

SEQ ID NO: 5106 - DNA, 1221 bp, Homo sapiens
atgtatcggacagtgggatttggcacccgaagcagaaatctgaagccatggatgattgccgttctcattgtgttgtccctgacagtggtggcagtgaccataggtctcctggttcacttcctagtatttgaccaaaaaaaggagtactatcatggctcctttaaaattttagatccacaaatcaataacaatttcggacaaagcaacacatatcaacttaaggacttacgagagacgaccgaaaatttgtgggcaactcagcccagccccattgtggtagctcccagggtggcaggctctggggggctcccagggatgggctccaaggactgtccaccttctccccacgccctccctgcagtggccatggtcaagaatggcaatgtggggccaggttccggagcaggagaggctccaggcctgggagcaggtcctgcctggtcaccaatgagctcatcaacaggggagttaactgtccaagcaagttgtggtaaacgagttgttccattaaacgtcaacagaatagcatctggagtcattgcacccaaggcggcctggccttggcaagcttcccttcagtatgataacatccatcagtgtggggccaccttgattagtaacacatggcttgtcactgcagcacactgcttccagaagtataaaaatccacatcaatggactgttagttttggaacaaaaatcaaccctcccttaatgaaaagaaatgtcagaagatttattatccatgagaagtaccgctctgcagcaagagagtacgacattgctgttgtgcaggtctcttccagagtcaccttttcggatgacatacgccagatttgtttgccagaagcctctgcatccttccaaccaaatttgactgtccacatcacaggatttggagcactttactatggtggggaatcccaaaatgatctccgagaagccagagtgaaaatcataagtgatgatgtctgcaagcaaccacaggtgtatggcaatgatataaaacctggaatgttctgtgccggatatatggaaggaatttatgatgcctgcaggggtgattctgggggacctttagtcacaagggatctgaaagatacgtggtatctcattggaattgtaagctggggagataactgtggtcaaaaggacaagcctggagtctacacacaagtgacttattaccgaaactggattgcttcaaaaacaggcatctaa

SEQ ID NO: 5107 - DNA, 1248 bp, Homo sapiens
atgatagttgaggtggaggaacttccagcagtggcagctcaagtggccaagacaagagtggcggaaaaagaagaaaaaacaaagggacaagatgttgccagtaaactgccactggtgacacttcacactcagtgtcggttaaaattactgaagttagagagaattaaagactaccttctcatggtggaagaattcattagaaatcaggaacaaataaaactattagaagaaaagcaagaggagggaagatcaaaagtggatgatctgagggggaccccaatgtcagtaggaaacttggaagagatcatcgatgacaatcatgccattgtgtctacatctgtgggctcagaacactatgacagcattatttcatttgtagagaaggatctgctggaacctggctgctcgattctgctcagacacaaggtacatgcggtgataggggtgctgatggatgatacgggtcccctggtcacaatgatgaaggtggagaaggccccccaggagacctatgtcaatactggggggttggacaaccaaattcaggaaattaaggaatctatggagcttcctctcccccatcctgaatattatgaagagatgggtacaaagcctcctaaaggggtcattctctgtggtccacctggcacagccactttcttgagagtggttggctctgaacttattcagaagtacctaggtgatgggcccaaactcgtacggcaagtatttcaagttgctgaagaacatgcaccatccatcatgtttactgatgaaattgaagccattgggacaaaaagatatgactccaattctggtggtgagagagaaattcagcaaacaatgttggaattggaactgttgaaccaattgggtggatttgattctagggaagatgtgaaagttatcatggccacaaaacaagtagaaactttggatccagtacttatcagaccaggccgcattgacaagaagatcgagttccacctgcctgatgaaaagactaagaagcacatctttcagattcacacaagcaggatgacactggccaatgatgtaaccctggacgacttgatcatggctaaagatgacttctctggtgctgacatcaaggcaatctgtacagaagctggtctgatggccttaagagaacatagaatgaaagcaacaaatgaagacttcaaaaaatctatagaaagtgttctttataagaaacacgaaggcatccctgaggggctttatctctag

SEQ ID NO: 5108 - DNA, 1089 bp, Homo sapiens
atgaatccttcactcctccttgctgtcttttgcctgagattagcctcagctagtctaacacttgatcacagtttagatcagtggaaggcaaagcacaagagattatatggcatgaatgaagaaggatggaggagagcagtgtggcagaacatgaagatgattgagcagcacaatcaggaatacagggaagggaaacacagcttcacaatggccatgaacgcctttggagaaatgaccagtgaagaattcaggcaggtggtgaatggctttcaaaaccagaagcacaggaaggggaaagtgctccaggaacctctgcttcatgacatccgcaaatctgtggattggagagagaaaggctacgtgactcctgtgaaggatcagtgtgcatcttcttatgcttttagtgcagctggggctctgcttcaaggcaatgttggctgcatttttggagaaccattattttgcttccagtatgttgccgacaatggaggcctggactctgaggaatccttttcatatgaagaaaaggaaaaagcctgtaggtacaatcccaagtattctgctactaatgacactgggtacatgcaaatactccctgtggaagagaaggccctaatgaaggctgtggcaactgtggggcgcatctctgctgttgtttatggacttcttgattccttctggtcctataaaaaaagaagacttgatttgattccattcactcctcacaacaaccacgtgaagaaagaatcacgaagcaattgtataattgaaacacaaaaggaaagttacttgtgtgcccttggtcaatattctgggaagcatcaagtgcagtgtcatcttatcgaggaggctctgcagatgctaagtggtggggatgaggatcacgatgaagacaaatggccccatgacatgaggaatcatctggctggagaggcccagagcaacacagaacgttttgactgtcagtgcctagtcactatttacaatcagagccaaaaaggcttctctgaagaggaagaaacttttggaaaacattgcccctgtaggcagacacttcatgtaagagacacagctgcttgccttggttga

SEQ ID NO: 5109 - DNA, 693 bp, Homo sapiens
atggtgctgacttcaaaggaacatcaagggtccaaggggcacagctggcaccaaaagttcaaaacagatattgtgacgccagaagtgatggttggattttttgttatattttggagtaggctttcagttcttggatctaaaacatttgaagcgcccgagggcaccgggctctgcgtgtgcgcgcagcgcggcaccgtctgcggctccgacggtcgctcgtaccccagcgtctgcgcgctgcgcctgcgcgctcggcacacgccccgcgcgcaccccggtcacctgcacaaggcgcgcgacggcccttgcgagttcgctcctgtggtcgtcgttcctccccgaagtgttcacaacgtcaccggggcgcaggtgggcctgtcctgtgaagtgagggctgtgcctaccccagtcatcacgtggagaaaggtcacgaagtcccctgagggcacccaagcactggaggagctgcctggggaccatgtcaatatagctgtccaagtgcgagggggcccttctgaccatgaggccacggcctggattttgatcaaccccctgcgaaaggaggatgagggtgtgtaccagtgccatgcagccaacatggtgggagaggctgagtcccacagcacagtgacggttctagatctgagtaaatacaggagcttccacttcccagctcccgatgaccgcatgtga

SEQ ID NO: 5110 - DNA, 1098 bp, Homo sapiens
atgggctactgccagggtgtgagccaggtcgctgttgtcctgctgatgttccccaaggagaaagaggccttcttggcactagctcagctgctgaccagcaaaaacctgccagacactgtagatggacagctgcctatggggcctcacagccgggccagccaggtggctccagagacgacatcaagcaaggtggaccggggtgtctccacagtgtgtgggaagcctaaggtggtggggaagatctatggtggccgggacgcagcagctggccagtggccatggcaggccagcctgctctactggggctcgcacctctgtggagctgtcctcatcgactcctgctggctggtatcaactacccactgctttctcaaaacctcctcatccttcatcctcagctctggcagggagttccctggcccctgtgtctgtctgctcaacccagacatgcgtgagagcattggcagtgtctgtgctggccacctgcagggcttctcttcagtgtgcaccatgctcctcaaatcccaggccccgaagaactatcaggttctgttgggaaacatccaactgtatcatcaaacccagcacacccagaagatgtctgtgcaccggatcatcacccatccagactttgagaagctccacccctttgggagtgacattgccatgttgcagctgcacctgcctatgaacttcacttcctacattgtccctgtctgcctcccatcccgggacatgcagctgcccatgcaactgtcaccacccttctatctccaggagggcaagggcgattctggggggcctctagtctgctacctccccagtgcctgggtcctggtggggctggccagctggggcctggactgccggcatcctgcctaccccagcatcttcaccagggtcacctacttcatcaactggattgacaaaatcatgaggctcactcctctttctgaccccgcgctggctcctcacacctgctctccacccaagcctctgagggctgctggcctgcctgggccctgcgcagcccttgtgctgccacagacctggctcctgctgccacttaccctcagggccccatggcagaccctgtga

SEQ ID NO: 5111 - DNA, 2088 bp, Homo sapiens
atggccctggaaaaaaaggcaccagataatgaagctgtgtccactgcaaacctatctgtggtgaagagcctgctgcaggagcgacgaaggtggaaagttcaaatcaaaagaggtgcatatcttctggctcaggcctgtgtttcctcctgtccccaaggcacatggccttccgtaaggagtgggagctgcgagaactgtacggaggcctgtgccatctgctctggagccgatctttgcaaaaaatgccagatgcagccgggccaccctctcttcctccatgaaggcaggtgctactccaagtgcccggagggctcttatgcagaagacggcatatgtgaacgctgtagctctccttgcagaacatgtgaaggaaacgccaccaactgccattcttgtgaaggaggccacgtcctgcaccacggagtgtgccaggaaaactgccccgagaggcacgtggctgtgaagggggtatgcaagcattgcccagagatgtgtcaggactgcatccatgagaaaacatgcaaagagtgcacgcctgagttcttcctgcacgatgatatgtgccaccagtcctgtccccgtggcttctatgcagactcgcgccactgtgtcccctgccataaagactgtctggagtgcagtggccccaaagccgacgactgcgagctctgtcttgagagttcctgggtcctctatgatggactgtgcttggaggagtgtccagcaggaacctattatgaaaaggagactaaggagtgcagagattgccacaagtcctgcttgacctgctcatcatctgggacctgcaccacctgtcagaaaggcctgatcatgaaccctcgtgggagctgcatggccaacgagaagtgctcaccctccgagtactgggatgaggatgctcccgggtgcaagccctgccatgttaagtgcttccactgcatggggccggcggaggaccagtgtcaaacatgccccatgaacagccttcttctcaacacaacctgtgtgaaggactgcccagagggctattatgccgatgaggacagcaaccggtgtgcccactgccacagctcttgcaggacatgtgaagggagacacagcaggcagtgccactcctgccgaccgggctggttccagctaggaaaagagtgcctgctccagtgcagggaaggatattacgcagacaactccactggccggtgtgagaggtgcaacaggagctgcaaggggtgccagggcccacggcccacagactgcctgtcttgcgatagatttttctttctgctccgctccaaaggagagtgtcatcgctcctgcccagaccattactatgtagagcaaagcacacagacctgtgagagatgccatccgacttgtgatcaatgcaaaggaaaaggagcgttgaattgtttatcctgtgtgtggagttaccacctcatgggagggatctgcacctcggactgtcttgtgggggaatacagagtgggagagggagagaagtttaactgtgaaaaatgccacgagagctgcatggaatgcaagggaccaggggccaagaactgcaccttgtgccctgccaacctggtgctgcacatggacgacagccactgcctccactgctgcaacacctctgatccccccagtgcccaggagtgctgtgactgccaggacaccacggacgaatgcatccttcgaacaagcaaggttaggcctgcaactgagcatttcaagacagctctgttcatcacctcctccatgatgctggtgcttctgctcggggcagctgtggtagtgtggaagaaatctcgtggccgagtccagccagcagcaaaggccggctatgaaaaactggccgaccccaacaagtcttactcctcctataagagcagctatagagagagcaccagctttgaagaggatcaggtgattgagtacagggatcgggactatgatgaggatgatgatgatgacatcgtctacatgggccaggatggcacagtctaccggaaatttaaatatgggctgctggatgacgatgacatagatgagctggaatatgatgacgagagttactcctactaccagtaa

SEQ ID NO: 5112 - DNA, 981 bp, Homo sapiens
atgagcattcataagctgtataaggcacagttcctgttctatgcattattcatttatgcaaactgttgtaaagatgatccaggaacatgtacatcttgcgctatggggtattacagaattggacaaagcaatgtggtgacaagagaaggcgacccacctgtccaaaaacaaatacacttgaaatgtggtaataggtttgatcaccattgttataaaacctgtcctgagaagacctacagtgaggaagtggaatgcaaggcgtgtgatagtaactgtggcagctgtgaccagaatgggtgttactggtgtgaagagggcttctttctcttaggtggcagttgtgtgaggaaatgtggtcctggattctatggtgaccaagaaatgggagaatgtgagtcctgccaccgagcatgcgaaacctgcacaggccctggtcatgacgagtgcagcagctgccaggaaggactgcagctgctgcgtgggatgtgcgtgcatgccaccaagacccaggaggagggcaaattctggaatgtcacaaaaacaggagctgctcttcatttgatttcgaggcaagaatttgttaaaagggtcacttcggtgcaaaggcaacggcagccgaagagagtgctgtacaggaggagtgtgctaagggctcgagggagtgacagctctgtggtttttgctgggctggagaggaggcacgtccatggctgctgtctactacggcagttttacacatgtgacttcaaggaagagcagctcagagaccgtggaaagcccagcagccaaaggccacggagaacacgggccctatttcagagacagagccgagaagattattcaatccagattgggctatcttctgcatttaagaggcagtgcaagccaaaaggaaaatggtctggtgctgtgtttctagctgaacatctgtattttatctggcgtccagatgatgacacggtccagggagccaagagttag

SEQ ID NO: 5113 - DNA, 1047 bp, Homo sapiens
atggatgagtcttacctgggaagacaggaagagagcgggaagaacattaccaatgaacttgctccagttaccagtgaacttgctgcatacaaggtgcttagggaaagtgctggagaaaagcaagtccacatcacatatgttgcaaggcaagggggagaatatgttgatgagcatggccactgccagacctgtgaggcctcatgtgccaagtgccagggaccaacccaggaagactgcactacctgccccatgacaaggcaccagttagcttgtttggaagcagattcgggattgttttcccagccagtttctggcatgctggctgttaggtccaaatcttgggccaaggatgggatttttgatgatggccgctgtgtttcgaactgcccctcatggaaatttgaatttgagaaccaatgccatccatgccaccacacctgccagagatgccaaggaagtggccctacccactgcacctcctgtggagcagacaactatggccgagagcacttcctgtaccagggagagtgtggagatagctgcccagagggccactatgccactgaggggaacacctgcctgccctgcccagacaactgtgagctttgccacagcgtgcatgtctgcacaagatgcatgaagggctacttcatagcgcccaccaaccacacatgccagaagttagagtgtggacaaggtgaagtccaagacccagactatgaagaatgtgtcccttgtgaagaaggatgtctgggatgcagcttgggcactcttgtcattgctgtcagcctcagtgacaccatcaacgtcttaagtaggctttcttcaatacaaacaggatcactgttcagtgaggatcttatcatggaggtgggaacagtgacaagaaaaccatggtcactaggtgttcgcattggcctcattctccacttagctgacccagctaaagatgagaccaaggggaagtcactggaaatggactccacagcagacactgaccctctggggactcaaaatccaaaagactcaccttgcaaaaaaagatag

SEQ ID NO: 5114 - DNA, 1443 bp, Homo sapiens
atgagggatgaggtagcagagaaagaaaaggcagacatcaacgtgacattagtgtttcaaggctatgagaatacaccaataatgggactgttgacattcagggatgtagccatagaattctgtctggaggagtgtcaatacctggatgctgctcagcagaatttgtgtatggatgtgatgttacagaactacagaaactctgtcttcttggttgaggataacttcaatatagaatttctaatttaccctgaaggtattgtcttctctaagccagacctggtcacctgtctggagcaaaggaaaaagccatggagtatgaagcacccaggccttactcaacataacatagttcatactggagacaaaccctacaaatgtaaagattgtggcaaaatttttaagtggtcttcgaaccttactatacatcagagaattcatagtggagagaaaccctacaaatgtgaagaatgtggcaaagcctttaagcaatcttcaaaactgaatgaacatatgagagctcatactggagagaaattctacaaatgtgaagaatgtggcaaagcttttaagcacccttcaggccttactctacataagagaattcatactggagagaacccttacaaattcgaagaatgtgataaagccttttattgggttttaagctttactaaacatatgataattcataggggagagaaaccctacaaatatcaagaatgtggcaaagcttttaagtggtcttcaaaccttactatacacaagagaattcatacgggagagaaaccctgcaaatgtgaagaatgtggcaaagcttgtaagcagtctttggggcttactattcaaaagagaattcatactgaagagaaaccctacaaatgtgaagaatgtgggtcttcaaatcttactatatataagaaaattcatgctggagagaaaccatacaattgtgaaaaatgtggcaaagcgttttactgttcctcaaaccttattcaaaataacatagttcatgctgaagagaaacactacaaatgtcaagaatgtggcaaagcttttaagaagtctttagaccttaatgtacataagataattcatagtggagagaaaccctacagatatgaagaatgtggcaaaataactcatagtggagaggaatcctacaaatgtgaagaatgtggcaaaggcttttactgttcctcaagccttactaagcatatgatagttcatactgaagagaaactgtacaaatgtgaagaatgtggcaaagcttttaagtggtcctctgagcttactatacatcagagaattcgtactgaagagaaaccctataaatgtgaagaatgtgtcagagtctttaaacactcctcaaaactgaatgaacataagagaaatcatactggagagaaaccctacaaatgtgaagcatgtggcaaagctttttaa

SEQ ID NO: 5115 - DNA, 480 bp, Homo sapiens
atgactgaaaatagtaatagagcagaaaatgatgaaaagtcgtgttctgtgcaccacgaacgttcttctccccactccaaaagttttcgacacctagaaaatataaagaaaggactgatagcaactggcatcacgttgaggccagtctcagttgggaaaaacaccaaacagccgcttgtctcctgtaagaaccctgaagttggtcctgatgtcttctttctggactctggccctgatcttaactcctcagggaagtcaggtacttcccaaaatacagagaatggctgtgcgggacagatgcatggagcagctgagcctgggacctgccaaagcgtgcaaggggcagtggtggcctgcagggagagaaactcgcaaaggccagttcccgcaggaagctccagaaacattcctgcccccactcaggaagtgaccgtgagagacatgctgtcagccagaagggttcaggccctggagagctga

SEQ ID NO: 5116 - DNA, 1364 bp, Homo sapiens
aggctcaggatgagatcccagcactgtccgtgtcccggccccagaccggcctgtccttcctgggccctgagcctgaggacctggaggacctgtacagccgctacaagaagctgcagcaagagctggagttcctggaggtgcaggaggaatacatcaaagatgagcaaaagaacctgaaaaaggaatttctccatgcccaggaggaggtgaagcgaatccaaagcatcccgctggtcatcggacaatttctggaggctgtggatcagaatacagccatcgtgggctctaccacaggctccaactattatgtgcgcatcctgagcaccatcgatcgggagctgctcaagcccaacgcctcagtggccctccacaagcacagcaatgcactggtggacgtgctgccccccgaagccgacagcagcatcatgatgctcacctcagaccagaagccagatgtgatgtacgcggacatcggaggcatggacatccagaagcaggaggtgcgggaggccgtggagctcccgctcacgcatttcgagctctacaagcagatcggcatcgatcccccccgaggcgtcctcatgtatggcccacctggctgtgggaagaccatgttggcaaaggcggtggcacatcacacaacagctgcattcatccgggtcgtgggctcggagtttgtacagaagtatctgggtgagggcccccgcatggtccgggatgtgttccgcctggccaaggagaatgcacctgccatcatcttcatagacgagattgatgccatcgccaccaagagattcgatgctcagacaggggccgacagggaggttcagaggatcctgctggagctgctgaatcagatggatggatttgatcagaatgtcaatgtcaaggtaatcatggccacaaacagagcagacaccctggatccggccctgctacggccaggacggctggaccgtaaaattgaatttccacttcctgaccgccgccagaagagattgattttctccactatcactagcaagatgaacctctctgaggaggttgacttggaagactatgtggcccggccagataagatttcaggagctgatattaactccatctgtcaggagagtggaatgttggctgtccgtgaaaaccgctacattgtcctggccaaggacttcgagaaagcatacaagactgtcatcaagaaggacgagcaggagcatgagttttacaagtgacccttcccttccctccaccacaccactcaggggctggggcttctctcgcacccccagcacctctgtcccaaaacctcattcccttttttctttacccaggattggtttcttcaataaatagataagatcgaatcc

SEQ ID NO: 5117 - DNA, 635 bp, Homo sapiens
gcaaactgccactggtgacacctcacactcagtgccagttaaaattactgaagttagagagaattaaagactatcttctcatggaggaagaattcattagaaatcaggaacaaatgaaaccattagaagaaaagcaagaagggaaaagatcaaaagtggatgatctgagggggaccccaatgtcagtaggaatcttggaagagatcattgatgacaatcatgccatcgtgtctacatctgtgggctcagaacactacatcagcattctttcatttgcagacaaggatcttctggaacctggctgctcggtcaggctcaaccacaaggtgcataccatgataggggtgctgatggatgacatggatcccctggtcacagtgatgaagattcgggaaattaaggaatctgtggagcttcctctcacccatcctgaatattatgaagagatgggtataaagcctccaagggggtcattctctgtggtccacctggcacaggtaaaaccttgttagccaaagcagtagcaaaccaaacctcagccactttcttgagagtggttggctctgaacttattcagaagtacctaggtgatgggcccaaactcggacgggaattgtttcgagttgctgaagaac

SEQ ID NO: 5118 - DNA, 2681 bp, Homo sapiens
caggtattgcactctcagtctcgccatgttgaagtcagaatggcctgtattcactgtcttcgagagaacagagagaaatttgaagcgattataggaggatcatttgaaggatatttaaagcgcttggaaaatccacaggaatgggtaggacaaatggaaataagtgccctttctcttatgtacaggaaagattttataactaatctggaacctaatgtttctccttcacaagtaactgaaaataattttcctgaaaaggtgttactgtgtttttcaaatggaaatcattatgatattgtgtatcccgtaaagtataaagaaagctctgctatgtgtcagtctctcctttatgaattgctgtatgagaaggtatttaaaactgatgttagtaaaattgtgatggaactagacacgttggaagtagctgatgaagacaacagtgaaatatcagattcagaggatgacagctgcaagagtaaaactgctgttgctgctgctgatgtgaatggatttaaacctttgtcaggcaacgagcagctgaagaacaatgggaactctactagcctgcctttggctagaaaggttcttaagtcactcaatcctgcagtctatagaaatgtggaatatgaaatttggctggagtctaaacaagctcagcaaaaacgtgattattccattgctgctggcttacaatatgaagttggagacaaatgtcaagttaggttggatcacaatggaaaatttttgaatgcagacgttcaaggagttcattctgagaatggaccagttttggttgaagaactgggaaagtacacatcaaagaacctcaaggcacctcccccagaaagctggaacacagtgtcagggaagaagatgaaaaaaccttccacttctggacaaaatttccattctgatatggattacagagggccaaagaatccaagcaagccaataaaagccccattagcactacctcctcgactgcagcatccttcaggagtaagacaacgtgagttctctagtcattcttcagggtcacagtctcagaaattctccagtgagcacaaaaatcttagccggacaccttcacagatcataagaaaacctgatcgtgaaagagttgaggattctgatcacacaagtcgagaatctaactattgctacttctcagagtagcaatccatgtgtccagagaaaatcatcacacgtaagtgatagaaaaggaagcaggcggagaatggatacagaagaacgaaaagacaaagactctattcatggacatagttggataaaagacccgaaccaagcatattggagaatattactgatgataaatatgcaacagtttcatcaccatcaaagtcaaagaagttagagtgcccttctcctgcagaacaaaagccagcagaacatgtgtctttgtcaaatccagctccccttctagtttctccagaggtacatctaactcctgcagtgccttctttaccagccactgtgccagcctggccaagtgaacctacaacttttggaccaacaggtgtccctgctccaattcctggtcggtcagtgacacagactttgacccctggacctgattctgctgtatcccaaactcatttaacaccctctccagttcctgtgtcaatacaggcagttaaccagcccttgatgcctttgcctcagacattgagcctttatcaagacccactctatcctgggtttccttgtaatgaaaagggagatcgagccattgtaccaccttcttcactgtgtcagactggggaggacctacctaaagataagaatattcttcgattcttcttcaatcttggtgtgaaggcatacagttgtcctgtgtgggccccacattcttacctgtaccctctgcaccaggcctacctggcagcctgcaggatgtacccaaaggtccctgtccctgtttatcttcataatccctggttcaaagaggctcctgccgcccagaattaaagtgattgtacctgtactgatgcccactttcctatgcagactgaggctagtgttaatggtcaaatgctacagccagtgattggaccgccgacattttcttcacctctggttatccctccatctcaggtgtctgaaagtcacggacaattgtcttaccaggctgatcttgaatctgagacccctgggcagcttctgcatgctgattatgaagagtcactgagtggcaagaatatgttcccccagccatcttttggacccaatccattcttaggcccagttcctattgcacctcctttctttcctcatgtttggcatgggtacccttttcagggattcatagaaaatccagtaatgaggcagaatattgtcctgccctctgatgagaaaggagaattggatctgtctctggaaaatctggatctgtctaaagattgtggttcagtttccacagtagatgagtttccagcagccaggagtgaacatgtacattctctccctgaagcaagtgtgagcagtaagccagacgaaggccggacagagcaatcttcccagacacgaaaggcagatatggcattggcttccatccctcctgtagcagagggaaaggctcaccctcccactcagattctaaacagagagagagagaaattgtgcctgttgaacttgaacctaaaaggaccattcaaagtctg

SEQ ID NO: 5119 - DNA, 476 bp, Homo sapiens
aatatcacagccatcttcatccttcctgatgagggcaagctgaagcacttggagaagggattgcaggtggacactttctccagatggaaaacattactgtcacgcagggtcgtagacgtgtctgtacccagactccacatgacgggcaccttcgacctgaagaagactctctcctacataggtgtctccaaaatctttgaggaacatggtgatctcaccaagatcgcccctcatcgcagcctgaaagtgggcgaggctgtgcacaaggctgagctgaagatggatgagaggggtacggaaggggccgctggcaccggagcacagactctgcccatggagacaccactcgtcgtcaagatagacaaaccctatctgctgctgatttacagcgagaaaataccttccgtgctcttcctgggaaagattgttaaccctattggaaaataaaggagaattcctgcttgccacagaccccg

SEQ ID NO: 5120 - DNA, 1934 bp, Homo sapiens
caggcattggttgctttcccgccgatgtaccacctgatgaagttcattcctctgtattccaaagtgcaaaggccctgtacgtcaacacccaagatagacagctttgtttggctaatgaatgagtttactaatatgccagtacctccaaaacccggacaagctcttggagatgaaatcgtgagggatattcaccctggagttgcctttgagcccacgtatatttagactcctgacagttaacaagtcaagcctgtctgaaaaggatcgacaagaagatgctgaggaatacttaggcttcattctaaatggacttcatgaggaaatgttgaacctaaagaagcttctctcaccaaataatgaaaaacgtgcgatttccaatggccccaaaaaccagtcaatgaagaagagcaagaaaaacaaggtgaaggaagcgaggatgaatgggaacaagtgggcccccggaacaagacttccgtcacctgccaggcggattttgttcagactccaatcaccgcatttttggtggccacatcaggtctgtggtttaccagcagagtgcaaaagaatctgccactttgcagccatttttcacgttgcagttggatatccagtctgacaaaatacgcacagtccaggatgcactggagagcttggtggcaagagaatctgtccaaggttataccacaaaaaccgaacaagaagttgagataagtcgaagagtgactctggaaaaactccctcctctcctcgtgctgcacctgaaacgattcgtttatgagaagactggtggtgtcagaagcttatcaaaaatactgaatatcctgtggacttggaaattagtaaagaactgctttctccaggggttaaaaataagaattttaaatgccacagaacctatcggctctttgcagtggtctaccatcacggcaacagtgcgacgggtggacattacactagagacgtcttccagatcggtctgaatggctggctgcgcatcgatgaccagacagtcaaggtgatcaaccagtaccaggtggtgaaaccaactgctgaacgcacagcccatctgctgtattactgccgagtggacctgctgtaaaccctgtgtgcgctgtgtgtgagcccagtgtccgctttgtaggacaccacctcacactcacttcccgcctctctttattggctctttagagagaaactctttctccctttgcaaaaatgggctagaatgaaaaggggatgccttggggttcgtgcacaacatagcttctgttgactctaactttgaaatcaaaatcatttggttgaaacagactgtcgcttgattttaaaaaatacacaaaaacccatatttctgaaataatgctgattcctgagataagaaagtggatttgatccccagtctcattgcttagtagaataaatcctgcaccagcaacacttgtaaatttgtgaaaatgaattttatctttccttaaaaaagaaatgttttaatccatcacatttttcttccctaccctttagtttttgataaatgataaaaatgagccagttatcaaagaagaactagtttttacttcaaaagaaaaataaacataaaaaataagttgccggttcctaacaggaaaaaaattagtaattgtgctgagggaaactgcttacatagacattgcagatcaaatatttggagttaaaatgttagtctacatagatggatgattgtaactttactgccattaaaaagatttcagattgcattcatgcttctgtgtacacataatgaaaaatggacaaataatgaagatctctccttcagtctgctctgtttaattctgctgtctgctcttctctaatgctgcatccctaattgtacacagtttagtgatatctaggagtataaagttgtcacccatcaataaaaatcacaaagctggttt

SEQ ID NO: 5121 - DNA, 1624 bp, Homo sapiens
catggcttccctctggctcctctcctgcttctcccttgtgggggccgcctttggctgcggggtccccgccatccaccctgtgctcagcggcctgtccaggatcgtgaatggggaggacgccgtccccggctcctggccctggcaggtgtccctgcaggacaaaaccggcttccacttctgcgggggctccctcatcagcgaggactgggtggtcaccgctgcccactgcggggtcaggacctccgacgtggtcgtggctggggagtttgaccagggctctgacgaggagaacatccaggtcctgaagatcgccaaggtcttcaagaaccccaagttcagcattctgaccgtgaacaatgacatcaccctgctgaagctggccacacctgcccgcttctcccagacagtgtccgccgtgtgcctgcccagcgccgacgacgacttccccgcggggacactgtgtgccaccacaggctggggcaagaccaagtacaacgccaacaagacccctgacaagctgcagcaggcagccctgcccctcctgtccaatgccgaatgcaagaagtcctggggcaggaggatcaccgacgtgatgatctgtgccggggccagtggcgtctcctcctgcatgggcgactctggcggccccctggtctgccaaaaggatggagcctggaccctggtgggcattgtgtcctggggcagcgacacctgctccacctccagccctggcgtgtacgcccgtgtcaccaagctcataccttgggtgcagaagatcctggctgccaactgagcccgcggctccctccgaccctgctccccacagagcctcagtaaacccatggaacacacgtcggcgctgtccgtcttctgttttggggcctccaaggcctcactccactccggaacctgggcccccactgggctggactgggctgggctaggcatgggcggcctctgggaggacccttccttagtcccctctcccaccactcaggctcctgcttcccagagagtggccaggaacacacgggcagatgaaaaggggtgcagagacagacgggggatctggctggtggggaccgggtggaccttggcccccatcctcagcacctgcccccaggcgacaggttcttgccacccacccttgctctcttgctctgggccctgcaggagggcgtgggcagcgtgggggctgtggggggatgagctcactctggccccacagacctgtggctccaaggaatcttcccacggccactcctagggctgccagacatacgctggagccaggagcgttatcaacgcaaggactggtgatgagtagagacggggtttcaccgtgttaaccaggatggtctcgatctcctgacctcgtcatccgcccgccttggcctcccaaagtgctgcgattacaggcctgagccaccgcgcccagccctatggcaatgactcttaaaagttcgaggctcaggcaggccgggagccccaggtcaaacatgcccatccccagccccaaatgcccagaagcaaaaagcccgccgtgccatgtttcatcaaggcaccacatcctccgtggccagatcgtcctccccttcctcctcacaccctgccagctggcccc

SEQ ID NO: 5122 - DNA, 630 bp, Homo sapiens
ggacatgtgcccactggtctcaaatgccatcctgaccaggagcatatgatttatcctcttggttgcacagtcctcattcaggcaataaatactaaagagcagaacttcctacagggtcatggcaacaacgtctcctgcttggccatctccaggtctggagagtacatcgcctccggacaagtcacattcatggggttcaaggcagacatcattttgtgggattataagaacagagagctgcttgctcggctgtcccttcacaaaggcaaaattgaagctctggccttttctccaaatgatttgtacttggtatcactaggaggcccagatgacggaagtgtggtggtgtggagcatagccaagagagatgccatctgtggcagccctgcagccggcctcaatgttggcaatgccaccaatgtgatcttctccaggtgccgggatgagatgtttatgactgctggaaagtatgtgtctgcgttcggagttttcagaactcataaattgctatattttcttgcacagaaaacatggtcattctgatctgggggaacacgtctttagtcctggataaataccttacatcatagtttttgtgattttgtactcattaaaagttctcttcactgg

SEQ ID NO: 5123 - DNA, 1389 bp, Homo sapiens
gccccgcgaggatgagcccagggctccacggtccctacctagaccccacgcgattcctcacctgagaccccgtcccacacagccccagctggggcaaacagccccctccccacttcccatctgtaatttgcagggagatcgacgacgtgatcagcgcagacctgcagtctctccaggtggggactgttcctggaggggcggcatggggcggggatcttggccagcgctaaacttccgccatgcggcagggcccctacctgcccctggagctggggttggagcagctgtttcaggagctggctggagagccagggcccatacctccacccccagagagatcgggctcaggacctgtgagcagctgctgcagtgtttcgggcatgggcaaagcctggccttacaccacttccagcagctctggggctacctcctggagtggcaggccatatttaacaagttcgatgaggacacctctggaaccatgaactcctacgagctgaggctggcactgaatgcagcaggcttccacctgaacaaccagctgacccagaccctcaccagccgctaccgggatagccgtctgcgtgtggacttcgagcggttcgtgtcctgtgtggcccacctcacctgcatcttctgccactgcagccagcacctggatgggggtgagggggtcatctgcctgacccacagacagtggatggaggtggccaccttctcctaggatctccggatgggcgcacctgctgctcagggcagggttgctgagcaagaccacctccctaggccttgcctggcatgggtgccactctctctggcatccacctgtctggggctagtctctggccctcactgctcacggccgggtgaccactctggcctgcgtactcctcactcagaaacaagaacagcgacagcccttctcgagcagatgacacgagctagtccacgttgacagcttaagacagtgctagctctgccctggctctcctagaaggtggaggacagacacaggagaaataaaaaaagatgatgctgcaggaatccttcttaaaaatattacatgttttattatcctgtccccagagggtggtttatccagaaaccaagaaaaaaaatcaatcagaataaactcaaaaaaaaaaggtagggggagcaaaaccatcaaccaccaggcagccaggccatcagcccacctccacctctggagggtccccagagacccacgcccgacgcagacccggaggagcatcagcaaggggcccgggcagagaatcggctatgtcttcattatgagagcaggagagacggcagagatatgttgctaggtgaatatatatttatataataaatccgtaagttaataaagtaaatagtaattctctgaaa

SEQ ID NO: 5124 - DNA, 1360 bp, Homo sapiens
ggtctgttgggagttgtggcggcggcgaggcccaagcacagctggccaaggcgggtgtaaaacgcgggtcgtgtccaccccaaagctcgacgcctctagaagccatggcttttctgctgaagctagagccggacatgcaggggaaagtagatttgtttcgagcccgtatcgcccaggaggccgaggatctcgtgtccaccttctttcctcagaaggtcttggagctgaatagccgagttcaggagctccggctgcaagacctgtccagaatccattcggtgccaacctcggagcccctggccaccccaggcaacaagggagatgggcccaaccaaaatctgccagttctgctgactcagttctccatcaaggtcccagcactgcttggcagcgagggacagcttctgcggagcaaccagcatctggtggagttgactgagtgggtgaaacctgagatcaagctgctgagagagaaatgcaacacagtgcacatgtaggtgcacccgcttatcctgaaggtgcaggacggcaacaacttcagggtgtctatccaggaagacactgtggaccagctgtggaccgtggatagcacagcggcctcctctctatgcggcttctccacctactacaacacccaggccaagttggtatccaagatagtgaagtacccccaagtggaagattatcgctgcactgtagcagaggtcgacgaaaacgagtacctgagtgtgcgccagatcctgctgcacctacggaacgagtatgccaccttgcgtgatgtaatccttaaaaacattgagaagatcaagatccctcggagcaccaaccgtgataacctatactgatagcctttctccaccccatttgccttcaggagttggcggagctgtttaggcacctagaaggctggttattaatgactctacaggtcatgaaattactggaaatgtgtgttaccatttagaatttcatacagcttatcctcatactgaatcatcttttggtgtaatttttatttgattttccttttgtgaggagaatggggacaaaccatcaaaaagaaaagactgccatttttaaaagcagctttatagataaatgttggcccaaggtttctttattatggccttagcgacattgaatggttttaggggctacttaaaaactaaatcttaaagttaaatgaagtttttcctaaagttctgctatccgttgaactttgttcaaacttacagaaatgctccttttacagcatcatttttctttttttgcgaggaacggagtttaaagggatatgtttaggtcattgtatgcctccagtttaacagattgaaataaaacttggttataaaattttgtg

SEQ ID NO: 5125 - DNA, 443 bp, Homo sapiens
gaccaggggagcatgctcacgctgagggccattgatctgtcgtactacacaggctccctgcactggatacccatgactgcaagaatactggcagttcactgtggacagtttgacatcgactgcgggcgcctgagcagcattcccacggctgtcttcgagatccacggcaagaagtaccccctgccaccctccgcctataccagccaggaccagggcttctgcaccagtggtttccagggtgactatagttcccagcagtggatcctggggaatgtcttcatctgggagtattacagtgtctttgacaggaccaataaccgtgtggggctggcgaaggctgtctgattgcatcactggccatggacctcaatgtgaccaaacacacacacgcacatagatgagatgtgcaggcagatggttcccaataaacaccgcatttctgc

SEQ ID NO: 5126 - DNA, 1924 bp, Homo sapiens
caggcattggttgctttcccgacaatgtaccacctgatgaagttcattcctctgtattccaaagtgcaaaggccctgtacgtcaacacccaaggtagacagctttgtttggctaatgaatgaatttactaatatgccagtacctccaaaacccggacaagctcttggagataaaatcgtgagggatattcgccctggagctgcctttgagcccacgtatatttagactcctgacagttaacaagtcaagcctgtctgaaaaggatcgacaagaagatgctgaggaatacttaggcttcattctaaatggacttcatgaggaaatgttgaacctaaagaagcttctctcaccaaataatgaaaaacgtgcgatttccaatggccccaaaaaccagtcaatgaagaagagcaagaaaaacaaggtgaaggaagcgaggatgaatgggaacaagtgggcccccggaacaagacttccatcacccgccaggcggattttgttcagactccaatcaccacatttttggtggccacatcaggtctgtggtttaccagcagagtgcaaaagaatctgccactttgcagccatttttcacgttgcagttggatatccagtctgacaaaatacgcacagtccaggatgcactggagagcttggtggcaagagaatctgtccaaggttataccacaaaaaccgaacaagaagttgagaaaagtcgaagagtgactctggaaaaactccctcctgtcctcgtgctgcacctgaaacgattcgtttatgagaaaactggtggtgccagaagcttattgaatatcctgtggacttggaaattagtaaagaactgctttctccaggggttaaaaataagaattttaaatgccacagaacctatcggctctttgcagtggtctaccatcacggcaacagtgcgacgggtggccattacactagagacgtcttccagatcggtctgaatggctggctgcgcatcgatgaccagacagtcaaggtgatcaaccagtaccaggtggtgaaaccaactgctgaacgcacagcccatctcctgtattactgccgagtggacctgctgtaaaccctgtgtgcgctgtgtgtgagcccagtgtccgctttgtaggacaccacctcacactcactttccgcctctctttattggctctttagagagaaactctttctccctttgcaaaaatgggctagaatgaaaaggagatgccttggggttcgtgcacaacatagcttctgttgactctaactttgaaatcaaaatcatttggttgaaacagactgtcgcttgattttaaaaaacacacaaaaacccatatttctgaaataatgctgattcctgagataagaaagtggatttgatccccagtctcattgcttagtagaataaatcctgcaccagcaacacttgtaaatttgtgaaaatgaattttatcttccttaaaaaagaaatgttttaatccatcacatttttcttccctaccctttagtttttgataaatgataaaaatgagccagttatcaaagaagaactagttcttacttcaaaagaaaaataaacataaaaaataagttgctggttcctaacaggaaaaaaattagtaattgtgctgagggaaactgcttacatagacattgcagatcaaatatttggagttaaaatgttagtctacatagatggatgattgtaactttactgccattaaaaagatttcagattgcattcatgcttctgtgtacacataatgaaaaatggacaaataatgaagatctctccttcagtctgctctgtttaattctgctgtctgctcttctctaatgctgcatccctaattgtacacagtttagtgatatctaggagtataaagttgtcacccatcgataaaaatcacaaagttggttt

SEQ ID NO: 5127 - DNA, 2172 bp, Homo sapiens
gcagcagttgagtccatgtaagatgattgtgcacgtgtgtgtgtgtgtgtgtgtgtgtgtgtgtgtcctcactcacttaaaaaagaccatttctgtgcattctttatgctggaaccctcctctgcctccctctccaggaaatcccataggatcccatacctgctttagaatgtgtgtgagacacttcccagtgcctggcatgtggtaggagctcagtacatgtaaactgttttcctttgaccactcaaagtagtcacttgttggggaggccaatggcggcttccccggtctctgagctgatgggcgtctggtccctgcctccccttccttcactggctgatgacaaatacctgaatgtcatcacatcctccgtgtcctcatctgttattctggaacacaggccagggagggtacagggtagtcccccttcaacagaggctggcctttcttgggatgtgggctggctggtgttggtccaaggatggatgcagagggtgaggcacccatcctgctagtccggccggatgctggcaggagggcggggtgaggaggggcggagcttccagaacaaaggagaatggggagcccaggggccagcctaggcatcaaaaaggctctgcagagtgaacaggccacagcactgcctgcctctgccccagcagtcagccagccgaccgcgcctgctccctcctgcttgcccaaggccgggcaagtcatccccactctgcttcgagaggccccgttttccagcgtgattgcgccgacactgctctgtgggtttctcttcttggcgtgggttgctgctgaggttccagaggagagcagcaggatggccgggagcggagccaggagtgaggaaggccgccggcagcatgccttcgtcccggaaccttttgatggggccaatgtcgtcccaaacctctggctgcacagctttgaagtcatcaatgacctcaaccattgggaccatatcaccaagctaaggttcctgaaagagtccctcagaggagaggccctgggtgtctacaataggctcagtccccaggaccagggagactatgggactgtgaaagaggccctcctgaaggcctttggggtccctggggctgcccccagccacctgcccaaagagatcgtctttgccaacagcatgggtaagggctactatctcaaggggaagattggcaaagtgcccgtgaggttcctggtggactctggggcccaggtctctgtggtccacccaaacttgtgggaggaggtcactgatggcgatctggacaccctgcagccctttgagaatgtggtaaaggtggccaatggtgctgaaatgaagatcctgggtgtctgggatacagcggtgtccctaggcaagctgaagctgaaggcacagttcctagtggccaatgcgagtgccgaggaagccatcattggcactgatgtgctccaggaccacaatgctatcctggactttgagcaccgcacatgcaccctgaaagggaagaagtttcgccttctgcctgtgggagggtccctggaagatgagtttgacctggagctcatagaggaggacccctcctcagaagaagggcggcaggagctatcccactgagaagccaccttttctttaacctcctaaatattggtgggaagacccaccgctgtggggggggttgcatatcctcatgggggtcactgggcttggccagtctgcttatcaactcttgctcttctctcccctttgcctccctctgcaggggccttaatctgcccctggtaggggaggcttccactgaacaggcacaggtgagggagagcaggctggcttagagggacagggtccccatggtcatcaagctgctgttgatgacaaagactcaaaggctggaagagctcccaaggaagctagaaatgcttgtctttgaaagaactgtgggaccccttcagattccctgaggtatggcttggtcactctcaggtcctcaaagcctgtcttagttgggctgggtcctagctgcagggtctttgtgagggtcacagttgctctgggacacctccctgaagagcctttccacctgtacaatcgtattttctttctgtcatttgctttgaagcccattgtgccttatgccaataattcaattgctgcaaacaccaataaagattgattcatgg

SEQ ID NO: 5128 - DNA, 1821 bp, Homo sapiens
tcgggggcggggcctgttccctctgctctgggtctccgccggcgcccgccccgccagcctcacctgcgcggcacgtgacccgcaccgcccgtgggcaccttgaaggcggatcccgcgcgcccccgctcctgcaggctgtttttcttcaaataaagaacatggtgaaactgattcacacattagctgatcatggtgacgatgtcaactgctgtgccttctccttttccctcttggctacttgctccttggacaaaacaattcgcctgtactcgttacgtgactttactgaactgccacattctccattgaagtttcatacctatgctgtccactgctgctgtttctccccttcaggacatattttggcatcgtgttcaacagatggtaccactgtcctatggaatactgaaaatggacagatgctggcagtgatggaacagcctagtggcagccctgtgagggtttgccagttttccccagactccacgtgtttggcatcaggggcagctgatggaactgtggttttgtggaatgcacagtcatacaaattatatagatgtggtagtgttaaagatggctccttggcggcatgtgcattttctcctaatggaagcttctttgtcactggctcctcatgtggtgatttaacagtgtgggatgataaaatgaggtgtccgcatagtgaaaaagcacatgatcttggaattacctgctgcgatttttcttcacagccagtttctgatggagaacaaggtcttcagttttttcgactggcatcatgtggtcaggattgccaagtcaaaatttggattgtttcttttacccatatcttaggttttgaattaaaatataaaagtacactgagtgggcactgtgctcctgttctggcttgtgctttttcccatgatgggcagatgctagtctcagggtcagtggataagtctgtcatagtatatgatactaatactgagaatatacttcacacattgactcagcacaccaggtatgtcacaacttgtgcttttgcacctaatacccttttacttgctactggttcaatggacaaaacagtgaacatctggcaatttgacctggaaacactttgccaagcaaggcgcacagaacatcagctgaagcaatttaccgaagattggtcagaggaggatgtctcaacatggctttgtgcacaagatttaaaagatcttgttggtattttcaagatgaataacattgatggaaaagaactgttgaatcttacaaaagaaagtctggctgatgatttgaaaattgaatctctaggactgcgtagtaaagtgctgaggaaaattgaagagctcaggaccaaggttaaatccctttcttcaggaattcctgatgaatttatatgtccaataactagagaacttatgaaagatccggtcatcgcatcagatggctattcatatgaaaaggaagcaatggaaaattggatcagcaaaaagaaacgtacaagtcccatgacaaatcttgttcttccttcagcggtacttacaccaaataggactctgaaaatggccatcaatagatggctggagacacaccaaaagtaaaattgttgatattgtattatttatattttcagtgatctcatttgaatgatttataggtaaatactaatcagacattattaaaagcaaaacaggaaaaaggtaaacttcttaaatttagttacctataaaaattgtcaattttcattctttaaaaaacacatggacttactataaaagcctttttgtactagtgaaaagaatcttcagctatatagaaataaagttatacttt

SEQ ID NO: 5129 - DNA, 491 bp, Homo sapiens
ggatttgtcaaggggatggtggcaaactggcttgggggcgatgctgagtaatcatgtggtgtgcgtgtgtgtgtgtgtgtgcgtgcgtgcgtgtgtgtggtgtttgctcactaagcagggtcgtccccttacacatgcctggaatgcagccaacgtttccagtttgagttccccgcgtcggacgagcgcaaaagcgccttctcgcagccagcacgctctttctcgcagctgtccccgctggtgctgggccagaagctgggcgcgctcgagccatgccaccccgccgacggcgtgggccccaccagactctatcccgccgccgcggaccctctagcggtgaagctccagggggccgcggacctgaacggaggttgcgggtccctgccgagcggcggcggcggcctgcctaagcagagccccttcctgtacgccaccgccttctggcccaagagctccgctgccgctgcagccgcggctgcggcggcggccgc

SEQ ID NO: 5130 - DNA, 1022 bp, Homo sapiens
acaaaagagtgctaactactctaggagagattaaagcctgtgaaatagaacttttccagataatggcgagtttttaggcttgctcatgctgaagcttaatataagctaataagtagagaaattaggaggcttggatattgcaaactttattggttggggtgttacccaggctaatagaaaaaaaattatatcctagaaagacagaacaggtgcgacttctgagaagaaaggttagagaagactagaaaggctgggaccaccttgaatttggcacacacacacacacacccacacgcacacacaaaatcaccaaatgatctggaatgtgctatgcgatgagtcagcctccactgctgtacgtccttggctacagactcctggaacagcagctcttctcaaggctagttgtgacagactcctggaacagcagctcttctcaaggctagttgtgacatccaaagtgacaagagcaggcccatattcagccacctcatccaggccttatcaaagaagagtcttatatgagatcaaatggctgcctttccccacaagattatatttttcctggtatgctctactttgacacatgtggctttctcaggaattttcaataaacgtgacttcactaggtggcctaagccccgatgtaaaatgtatatcccactggaccctgattacaatgcagactgccccaatgtgacagcacctgtttgtgcctcaaatggccacactttccagaatgagtgtttcttttgtgttgaacagagggaatttcattatcgtataaaatttgaaaaatatggaaaatgtgattaatgggtaccagagtaactacacttgcttattctttttctacttaattcagaatagtatttcttttagagtgtgagaatgtaaattaaataacatccctatgctgtacttaaatgtcgaacaaaatgagagacaaaaatgaaggaatcaaactgacaagaaccaaatatcacatttgttacaaataaacaacaaaagagctgatattc

SEQ ID NO: 5131 - DNA, 442 bp, Homo sapiens
ctgccgcgaagaccggctccccgacccgcagaagtcaggagagagggtgaagcggagcagcccgaggcggggcagcctcccggagcagcgccgcgcagagcccgggacaatggggccgcggcggctgctgctggtggccgcctgcttcagtctgtgcggcccgctgttgtctgcccgcacccgggcccgcaggccagtcacgtttaggtggggcgtgccacccccttcgcgggcccagccgatgcccctttggactcgatcttggagggtgcagcccgcctgccacggggtgttggatatggaggaggatggagcggaagccccctgggggagcctgcagtcctgcgttgcacttgtcattgtgtttctcccaggaccacccccaaaaagaaaagctctcacgttgctccaccaataaacgtttcgatctttaaaatataaa

SEQ ID NO: 5132 - DNA, 4933 bp, Homo sapiens
aaccacgatgtctttggcacagcctctcatctgtcagatgggagcggggaccccggagagggagtcagccgaggtcctggcattccttgtgaacccccgtctgtgggtttctggtccagtgtcccttctccagattagatggcttaggcctcctctaagggggtgggcgtgcacatccggagagctgtctggtgtgcaggactgggctgcaggttaccctgaactgcaaccatcttagagcaaggcccagcttgcagcaggaggagctgcaggccgcccaccctagccacggcccctgccctggcaggaagcttccaagagtaaacactgcctaatcgtcccgcccagtagtgagcaggcctgtcccattccatactgaccagattcccagtcaccaaggccccctctcactccgctccactcctcgggctggctctcctgaggatgcaccagcgtcacccccgggcaagatgccctcccctctgtgtggccggaatccttgcctgtggctttctcctgggctgctggggaccctcccatttccagcagagttgtcttcaggctttggagccacaggccgtgtcttcttacttgagccctggtgctcccttaaaaggccgccctccttcccctggcttccagaggcagaggcagaggcagaggcgggctgcaggcggcatcctacacctggagctgctggtggccgtgggccccgatgtcttccaggctcaccaggaggacacagagcgctatgtgctcaccaacctcaacatcggggcagaactgcttcgggacccgtccctgggggctcagtttcgggtgcacctggtgaagatggtcattctgacagagcctgagggtgccccaaatatcacagccaacctcacctcgtccctgctgagcgtctgtgggtggagccagaccatcaaccctgaggacgacacggatcctggccatgctgacctggtcctctatatcactaggtttgacctggagttgcctgatggtaaccggcaggtgcggggcgtcacccagctgggcggtgcctgctccccaacctggagctgcctcattaccgaggacactggcttcgacctgggagtcaccattgcccatgagattgggcacagcttcggcctggagcacgacggcgcgcccggcagcggctgcggccccagcggacacgtgatggcttcggacggcgccgcgccccgcgccggcctcgcctggtccccctgcagccgccggcagctgctgagcctgctcagcgcaggacgggcgcgctgcgtgtgggacccgccgcggcctcaacccgggtccgcggggcacccgccggatgcgcagcctggcctctactacagcgccaacgagcagtgccgcgtggccttcggccccaaggctgtcgcctgcaccttcgccagggagcacctggatatgtgccaggccctctcctgccacacagacccgctggaccaaagcagctgcagccgcctcctcgttcctctcctggatgggacagaatgtggcgtggagaagtggtgctccaagggtcgctgccgctccctggtggagctgacccccatagcagcagtgcatgggcgctggtctagctggggtccccgaagtccttgctcccgctcctgcggaggaggtgtggtcaccaggaggcggcagtgcaacaaccccagacctgcctttggggggcgtgcatgtgttggtgctgacctccaggccgagatgtgcaacactcaggcctgcgagaagacccagctggagttcatgtcgcaacagtgcgccaggaccgacggccagccgctgcgctcctcccctggcggcgcctccttctaccactggggtgctgctgtaccacacagccaaggggatgctctgtgcagacacatgtgccgggccattggcgagagcttcatcatgaagcgtggagacagcttcctcgatgggacccggtgtatgccaagtggcccccgggaggacgggaccctgagcctgtgtgtgtcgggcagctgcaggacatttggctgtgatggtaggatggactcccagcaggtatgggacaggtgccaggtgtgtggtggggacaacagcacgtgcagcccacggaagggctctttcacagctggcagagcgagagaatatgtcacatttctgacagttacccccaacctgaccagtgtctacattgccaaccacaggcctctcttcacacacttggcggtgaggatcggagggcgctatgtcgtggctgggaagatgagcatctcccctaacaccacctacccctccctcctggaggatggtcgtgtcgagtacagagtggccctcaccgaggaccggctgccccgcctggaggagatccgcatctggggacccctccaggaagatgctgacatccaggtttacaggcggtatggcgaggagtatggcaacctcacccgcccagacatcaccttcacctacttccagcctaagccacggcaggcctgggtgtgggccgctgtgcgtgggccctgctcggtgagctgtggggcagggctgcgctgggtaaactacagctgcctggaccaggccaggaaggagttggtggagactgtccagtgccaagggagccagcagccaccagcgtggccagaggcctgcgtgctcgaaccctgccctccctactgggcggtgggagacttcggcccatgcagcgcctcctgtgggggcggcctgcgggagcggccagtgcgctgcgtggaggcccagggcagcctcctgaagacattgcccccagcccggtgcagagcaggggcccagcagccagctgtggcgctggaaacctgcaacccccagccctgccctgccaggtgggaggtgtcagagcccagctcatgcacatcagctggtggagcaggcctggccttggagaacgagacctgtgtgccaggggcagatggcctggaggctccagtgactgaggggcctggctccgtagatgagaagctgcctgcccctgagccctgtgtcgggatgtcatgtcctccaggctggggccatctggatgccacctctgcaggggagaaggctccctccccatggggcagcatcaggacgggggctcaagctgcacacgtgtggacccctgtggcagggtcgtgctccgtctcctgcgggcgaggtctgatggagctgcgtttcctgtgcatggactctgccctcagggtgcctgtccaggaagagctgtgtggcctggcaagcaagcctgggagccggcgggaggtctgccaggctgtcccgtgccctgctcggtggcagtacaagctggcggcctgcagcgtgagctgtgggagaggggtcgtgcggaggatcctgtattgtgcccgggcccatggggaggacgatggtgaggagatcctgttggacacccagtgccaggggctgcctcgcccggaaccccaggaggcctgcagcctggagccctgcccacctaggtggaaagtcatgtcccttggcccatgttcggccagctgtggccttggcactgctagacgctcggtggcctgtgtgcagctcgaccaaggccaggacgtggaggtggacgaggcggcctgtgcggcgctggtgcggcccgaggccagtgtcccctgtctcattgccgactgcacctaccgctggcatgttggcacctggatggagtgctctgtttcctgtggggatggcatccagcgccggcgtgacacctgcctcggaccccaggcccaggcgcctgtgccagctgatttctgccagcacttgcccaagccggtgactgtgcgtggctgctgggctgggccctgtgtgggacagggtacgcccagcctggtgccccacgaagaagccgctgctccaggacggaccacagccacccctgctggtgcctccctggagtggtcccaggcccggggcctgctcttctccccggctccccagcctcggcggctcctgcccgggccccaggaaaactcagtgcagtccagtgcctgtggcaggcagcaccttgagccaacaggaaccattgacatgcgaggcccagggcaggcagactgtgcagtggccattgggcggcccctcggggaggtggtgaccctccgcgtccttgagagttctctcaactgcagtgcgggggacatgttgctgctttggggccggctcacctggaggaagatgtgcaggaagctgttggacatgactttcagctccaagaccaacacgctggtggtgaggcagcgctgcgggcggccaggaggtggggtgctgctgcggtatgggagccagcttgctcctgaaaccttctacagagaatgtgacatgcagctctttgggccctggggtgaaatcgtgagcccctcgctgagtccagccacgagtaatgcagggggctgccggctcttcattaatgtggctccgcacgcacggattgccatccatgccctggccaccaacatgggcgctgggaccgagggagccaatgccagctacatcttgatccgggacacccacagcttgaggaccacagcgttccatgggcagcaggtgctctactgggagtcagagagcagccaggctgagatggagttcagcgagggcttcctgaaggctcaggccagcctgcggggccagtactggaccctccaatcatgggtaccggagatgcaggaccctcagtcctggaagggaaaggaaggaacctgagggtcattgaacatttgttccgtgtctggccagccctggagggttgacccctggtctcagtgctttccaattcgaactttttccaatcttaggtatctactttagagtcttctccaatgtccaaaaggctagggggttggaggtggggactctggaaaagcagcccccatttcctcgggtaccaataaataaaacatgcaggctg

SEQ ID NO: 5133 - DNA, 641 bp, Homo sapiens
cctttctgcccatggacgccgccgaagaagcatcgttaaagtctctcttctcccttccgtcatgtctaagtcaaagtctcctaaagagcctgaacagcagaggaagctcttcatcggagggttgagctttgaaacaaccgatgagagcctgaggagccattgtgagcaatggggaatgctcacggactgtgtggtaatgagagatccaaacttcaagcactccaggggttgtgggtttgtcacatatgccactgtggaggaggtggatgcagccatgaatgcaaggccacacaaggtggatggaagagttgtggaaccaaagagagctgtctcaagagaagattctcaaagaccaggtgcccacttaactgtgaaaaagatatttgttggtggcattaaagaagatactgaagaacatcacttaagagattattttgaacagtgaaaaattgaagtgactgaaatcatgactgaccaaggcagtggcaagaaaaggggctttgcctttgtaacctttgacgaccatgactctgtggataagcttgtcattcagaaataccatactgtgaatggccacaactgtgaggttagaagtggttctggaaactttggtggtggtcttggacgtggtttcagtggga

SEQ ID NO: 5134 - DNA, 4050 bp, Homo sapiens
gcccacgtgatccacacggccagccccagccccgtcctactgcagacctgtcaggctcctttcctgaccctgaagctggctgatatgctctctggatcctggaggagattgacccctacctgcatcctggtggcaacttcttccaagacttcaaagctggacaatcctgcctctgtgttccagagcagttgcacacgcacagtgctatctgtgagcagttctgtgttcatgagagtttgctacatgagaggcataactcagcccagccaattcatcagaatcagggatgtggaactgggctgccagcggacatatagcctgggcatgttaacatctacaagatctctgattgccttgggattctgcagccagaggtgcgtggctcatctagggagcgtggttgatctagggagcgtggttcatctagggagcgtggcccatctagggagcgtggttcatctagggagcgtggcccatctagggagcgtggcccatctagggagcatggttcatctagggagcgtggcccatctagggaatgtggttaatctagggagcgtggcccatctagggagtgtggctcatctagggagcgtggttcatctagggagcatggcccatctagggagcgtggcccatctagggagcgtggttcatctagggagcgtggcccatctagggagcgtggttcatctagggagcatggcccatctagggagcgtggcccatctagggaatgtggttcatctaggtagcgtggctcatctagggagcgtggttcatctagggagtgtggctcatctagggagcgtggctcatctaggcagtgtggttcatctagggagcgtggcccatctagggagcgtggctcatctagggagagtggttcatctagggagcgtggcccatctagggagcgtggcccatctagggagcgtggttcatctagggagcgtggctcatctagggagcgtggctcatctaggcagtgtggttcatctagggagcgtggctcatctagggagagtggttcatctagggagcgtggcccatctagggagcgtggctcatctagggagagtggttcatctagggagcgtggcccatctagggagcgtggcccatctagggagcgtggttcatctagggagcgtggctcatctagggagcgtggctcatctaggcagtgtggttcatctaaggagtgtggcccatctggggagtgtggcccatctagggagcgtggctcatctagggagagtggttcatctagggagcgtggcccatctagggagcgtggcccatctagggagcgtggttcatctagggagcgtggcccatctagggagcatggttcatctagggagcatggcccatctagggaatgtggttaatctagggaggagcgtggcccatctagggaatgtggttcatctagggagcgtggcccatctagggagcgtggttcatctagggagcgtggcccatctagggagcgtggttcatctagggagcgtggcccatctagggagcgtggttcatctagggagcgtggcccatctagggagcgtggttcagctagggagcgtggcccatcaagggagcatggttcagctagggagcgtggcccatctagggagcgtggcccatctagggagtgtggttcatctagggagtgtggcccatctagggaatgtggttcatctagggagcgtggcccatctagggagcgtggttcatctagggagcgtggcccatctagggagcgtggcccatctagggagcgtggttcatctagggagcgtggcccatctagggagtgtggttcatctagggagcgtggcccatctagggaatgtggttcatctagggagcgtggcccatctagggagggtggctcatctagggcgcgtggttcatctagggagcatggcccatctagggagcatggcccatctagggagcgtggcccatctagggagcatggcccatctagggagcgtggctcatctagggagcgtggttcatctagggagcgtggcccatctagggagcgtggcccatctagggagcgtgtttcatctagggagcgtggcccatctagggagcgtggttcatctagggagtgtggctcatctagggaatgtggttaatctagggagcatggcccatctagggagcgtggctcatctagggagcatggttcatctagggagcgtggcccatctagggaacgtggttcatctagggagcatggcccatctagggagcgtggcccatctagggaatgtggttcatctagggagcgtggctcatctagggagtgtggttcatctaaggagcgtggcccatctagggagtgtggttcatctagggagcgtggcccatctagggaatgtggttcatctagggagtgtggctcatctagggaatgtggttaatctagggagcgtggcccatctagggagcgtggcccatctagggagtgtggttcatctagggagtgttgctcatctagggagcagggccaaagccctcactgtccccatgcccttccgcatggaccatgccatggttcccccaaggaccatgcccttccccatggggacaccctgggaggagagaccctgtcccagcttgacctcacctgtattgaggaatcatggggccaaaaccagagacttccagaatccttggggtctggtccttgctgaggtcaccctgtggcctgtgtcaccagatcagttgtctgccagagtgtacaaaggcattctcctgaaggtctggggctgggtgtggtcagtcctgctaaacattgaggaaaccaagcctgagaaccctgggaaatatgaggtcatgaaagaaaagggcaagaggtcctctgaacctatccaccagattgacctggaggaggtgggctaccgcagggacctgagccacgctgctgccttgtttctcctttatgggcctggggaggatgcattctgggcactggcccagctgttggcttgtgagaggcactccccacaggcagagggcatctcatcctcgccgtggccgccctctatgtcctggagccacgctctccagctcgaattctatgcagctgactctcccctccctgagagtcctcctggcctccagctggctgggcttcagctgcccttggttcccacaggaagaatggggacctgccacccccagatgggcttccataccaggccccctcctgagtcaccctctggggcagtcaatagtgggggagcgcccgggacccccaagcctactacctgggccttcctcttgtgccttttcttcctccttttcctcctggactctaagaaagacaataggcccccggtcctcagggcaggtgctcagtgcatgtgcactgcacatgctgtgcacgcaggagggggatgtgggcaagacctctccaacaagccccctcccactttccacggtgtcccgcccccccccaacagggcccttgacggcactggaggagccagacccatttcactgacagcctcagagagcagcagaggcccctcactcctgaacatccctccaagggtgccaggacaacgagccttgagccagggagacaagggagtcggtgtccctgacccccagagctttcagggcaagggcacaggtgggacccctggcccagagccagagccaagagttcagccagcagcctgcaggtgtgtcctcagtgtcagaccccaggggccaccgagagaccctgaggactccggagacccaggcaggtggggcccggcccagaaaggactctttgggcccactggagccaaacccaggcaagggtcctcagcagccagggctgtgctggcttcacgtggcaggaaggccctctgcaagggggatgggcagccctgggaccatggggcaggcttagccccggaagcccatggggacccccatatcaggccctgcctaggcccatcaggactaagagggaagttgggagatgcccccacagcagcatgggcacctgcatctggcccccttggtggccaatga

SEQ ID NO: 5135 - DNA, 291 bp, Homo sapiens
atgggtataaagcctcctaagggggtcattctctatggtccacctggcacagcacttatcagaccaggccacattaacagaaatatcgagttcccccttcctgatgaaaagactaggaagcacatctttcagattcacacaagcaggatgacgctggctgatgatacaaccctggacgatttgattatggctaaagatgacctctctggtgctgacatcaagagaagctggtctgtggccttaagagaatgtagaatgaaagtaacaaatgaagacttcaaaaaaatctaa

SEQ ID NO: 5136 - DNA, 1073 bp, Homo sapiens
gtgagacctcagacgagctgcaggagatgcagctcccgctgatcctggagccctggtgccacctgctctacggacacatgtcctacatcatgcccgacatgctgtgtgctggggacatcctgaatgctaagaccgtgtgtgagggcgactccgggggcccacttgtctgtgaattcaaccgcagctggttgcagattggaattgtgagctggggccgaggctgctccaaccctctgtaccctggagtgtatgccagtgtttcctatttctcaaaatggatatgtgataacatagaaatcacgcccactcctgctcagccagcccctgctctctctccagctctggggcccactctcagcgtcctaatggccatgctggctggctgtgggatctatggccacttccacggtaatcctatcttagcatgcatccatgcaccgaaaacacaaggccatgggggcttggatgcacttctggccaggtggctgcagcagctccctgtgtgcccatccctagctctggccccgacggacccccggacccccatcatctggagtgtccgcctggccctacttccagggacctctgcccacccccacctgcagccgcccaaggcccctctcttcacccacccacccccttcatgggaacccccgaaggccccctccctctgtcatccccgctcctcaccctaccctccctgctctcctgccagcctcctgtggggcgctgcctgttccctgtgccctggaagttcaggggcccaggaagagcaaaatggggtggggcccgtgtcccccaaccacttgggaacgcctcagggacctgccacccccaccgagtccagacacgcactcaggcatcccaggcttcaggtgcccagagatcaggtgtccagggctcaggtgcccacagcccaagtgtccacagcccaggtatccaagccccaggtgcccacagcccagggaaggctccgtgggaggctgggcaaggccgcctgcagctgcaccccagaccagccctggagcttagctccccggagggcagccatgggggccgagcacatgtgctag

SEQ ID NO: 5137 - DNA, 285 bp, Homo sapiens
atgaagatgactgagcagcacaatcaggaatacagccaagggaaacacagcttcacaatggccatgaacacctttggagacatgaccactgaagaattcaggcaggtgatgaatggttttcaataccagaagcacaggaacgggaaacagttccaggaacgcctgcttcttgagatccccacatctgtggactggagagagaaaggctacgtgactcctgtgaaggatcaggcttcaaagctgtctgggccaagacgtcaatttagctgcatcatgggtcaatga

SEQ ID NO: 5138 - DNA, 1496 bp, Homo sapiens
ctcccagttgtgggcagagtctggttaaggtacagccttggaattattttaacattttcagtcgcattcttggaggaagccaagtggagaagggttcctatccctggcaggtatctctgaaacaaaggcagaagcatatttgtggaggaagcatcgtctcaccacagtgggtgatcacggcggctcactgcattgcaaacagaaacattgtgtctactttgaatgttactgctggagagtatgacttaagccagacagacccaggagagcaaactctcactattgaaactgtcatcatacatccacatttctccaccaagaaaccaatggactatgatattgcccttttgaagatggctggagccttccaatttggccactttgtggggcccatatgtcttccagagctgcgggagcaatttgaggctggttttatttgtacaactgcaggctggggccgcttaactgaaggtggcgtcctctcacaagtcttgcaggaagtgaatctgcctattttgacctgggaagagtgtgtggcagctctgttaacactaaagaggcccatcagtgggaagacctttctttgcacaggttttcctgatggagggagagacgcatgtcagggagattcaggaggttcactcatgtgccggaataagaaaggggcctggactctggctggtgtgacttcctggggtttgggctgtggtcgaggctggagaaacaatgtgaggaaaagtgatcaaggatcccctgggatcttcacagacattagtaaagtgcttccctggatccacgaacacatccaaactggtaatcggagaaagagctccagagcctggtgcagtgagcaggatgtcatagtcagcggggctgaggggaagctgcacttcccagaaagcctccacctatattatgagagcaagcaacggtgtgtctggaccctgctggtaccagaggaaatgcatgtgttgctcagtttttcccacctagatgttgagtcttgtcaccacagttacctgtcaatgtattctttagaagacagacccattgattcaggttgcagttacttaactgtcctttttgaagaaggtctcatacagagtctaaactatcctgaaaactacagtgacaaggctaactgtgactggatttttcaagcctccaaacatcacctaattaagagtctggaaatagaagaaagtggagactgcacttccgactatgtgacagtgcacagcgatgtagaaaggaagaaggaaatagctcggctgtgtggctatgatgtccccacccctgtgctgagcccctccagcatcatgctcatcagcttccaatcagatgaaaacgggacctgcaggggctttcaggctacagtctccttcattcctaaagcagcccaagctgtgaactcacaagcaattccttctggaggctctaacccagcccctaccacaacagatgccgtttataaagagttgaagcaactgctgtaa

SEQ ID NO: 5139 - DNA, 877 bp, Homo sapiens
gaacacagatataaattacagcaggtacccgacttcaaagaatttagaacttagcaggagagatggggagaagaaaggcagttatgacagtgacagaatggtgtgcaaaggggatcttttttcccaaatcccagagcttactattgaaaaatccatgaacaagatctgcatatttgtacctttagctaagagaattgagaaatacaaaaaaatcagacaggattgcatgaaaaaagtgctgtctaatctgagacttgaaggatacacagacagtagtagacaaacaagaaggaatgagaagatctatccaataaaggagagaaaggaccgcatacgcctggttctcatcatatgcaataaagagtttgaccatctgcctccaagaaatggggctgactttgccatcatggagatgaagaagctgcttgaggatctgggttacagtgtggatgtagaagagaatctgacagccaggcctccgtggggagataacacaggggttggactggactaccagaaggagacaaccttggagagacatgaatgcagtgccttcaaagtacgagaagctacctgtgaaagagctgagctgaaaatgaaactggcacatgagaagcacaaagagaagaccagtatgactcaagtttggaggagaagggacatagtatataacgtgtccaggagagacagcacaaggggctccatcttcatcacacaactcatcgcatgcttccagagatattcctggcgctgccacctagaggaagtattttggaaggttcagcaagcatttgaaagtccggaggcaacagtccaaatgcccaccatagaacgagtgtccatgacaagatatttctacctctttcctggcaattga

SEQ ID NO: 5140 - DNA, 312 bp, Homo sapiens
atgaatattatatttcacaaggggatagatcagaatgactattacaaacttatccaaaagagatatattatttcctcacattataaaacacaagatcaatctaataaaaaaaaaaacagaaagatctgcaaatacctggctctcattataagcaatacaaagtttgactatctgactccaaggaatggggctcacttcgacatcacgggaatgaaggagctgtttcaaggcctgggcttcttctgccccatacttgatattagatgtgtgattatatgtgtaattaacttagctacagagttttatgagtaa

SEQ ID NO: 5141 - DNA, 666 bp, Homo sapiens
atgcttgctctcattatctttaacaaagagtttgacagtctttctaaaagagtgggagctgaggttgatgtcataggcatgatgatgctgctacaaaatctggggtacaaggtggatgagaaaagaaatctcactgcttcgactaaaaggttttttggccctccattgtttgtcatgaaattacttaagaaatccttaagtacttatttattggctttccaaggtgccatgagggttaatcacatagtccaaaatcagcagtatggtctctttcaggaaatgactacagagttggaggtattttctctgcaccaagagcacaaggcctctggcatttgtgggaagaaatactctgagcaagtcccagatgtattacaactcaatgaaatctttaaaacgttgaatagcaagaactgcccaagtttgaaggacaaacccaaggtgataatcatccaggcctgccatgttgagaaccatggtgtggtgttggtaaaagattcagtaccggcctctgaaaatatatctttaccaactccgggagattttgaggatgatgctattaatcaagttcaactttcatttgagcagccagatgataaagcacagatgcccagcactgaaagagttacttcgacaagacgtttctatctcttcccagtacattaa

SEQ ID NO: 5142 - DNA, 1680 bp, Homo sapiens
atgcgggagatgaactggaatggactcctgaacatggattcttactcagttaaggaaagctgtttaagatccttggacctgagagctgagaggagacttggagatcacttaggcacgtctctgatgccgactgcagcgctgacagtttcccgtaaagcacacatccccttgcatcaagtctgcaaacagatgaagcagaaggtcacactttccaagaacaaactccttgggtctgagagccagctggagatgtttcagtcccaattaggtaattttgagggggctctaaacacccacaagggatttgaattcactactgaagcagcagcaaggcagcagctgtcactcagcacctgccacaggggaactggccagatttcagaaagggtcctccgaggccaaagatggcagcaaggagagattccagtgggatcaggggtgacagctggagttgaaggggaagatgcagagaggagcttgaaggggaaaggagaaagggtgggcaaaaagcaagtaaccgtgtatgaaaagaggaagaaagaggcaaaatggaaaaggggtgaccctcaaacaaagccagagggcactaagaggagtactgggggcactgctcgccccgcggtctacgtgccccccggccctttgtgccctgctgaagttggggagagggcgcagggaagaaagggcagaatatggatattagaggtgttggctataggcaagagtgtattctgtaggaaatccaggtgttttgagggatgttttaatcgtctaaagctaaaggaagaagacaagctctgtgacagcatgggctcacctctagcgagcgccttcctactgacagtgcttggcggcgatctgaaaaaaaccactgtgatgaatgctgtgatgtactgcccagacgtacttcaggatgaagcatacattcctccagctgctggacgtgtaggtggatgggggccaggtcacacattcaagtcaaaagaacccagggatacgatgcaagtcacggaagaagagtttccaattacaccatggcggagaagaaagaaagaaaatgacacaaccacacgtaccacagctcagagtttcaaagaccacgttaagcctgcccccccagccctgtatcaccagccctatgcttcattaagggagcacaatgtgtccccgtggtcgcctgccagccgggatgtcctgtgtgacagcagatgcaaagagaatgaacaggcggctgaaaaggctggagacaaaaagagcacattgtccagagctctgaaagggctgcctgagaggggacatatgcatctgaaaaaaataccccacccctcccaaggtatccttaagtggaccccacagactcagacagcatctccccgggaaatgagctcaccggctgtgtgcgagcagatgtggggaagaaaatccatgacatgtgaggaatgggctggcttggtctgccagacgtgggggctccttgcccactgggtcgggcagtccactcaagagaccacagaggcagcggctgtaaaggtctttgttgctgttgctgccatgttaatgacccagcttggggcgctgccgccgccgccggccgcttcttccaaagaaaacaaatcaaaggagctggagaacagacttctgattccaaaacattctgaaaagccaaatggaggcgtctag

SEQ ID NO: 5143 - DNA, 3134 bp, Homo sapiens
ggagggaggacgtgcgaggccggtgcgtggaggctatgggcctgctggccagtgctggtttgttgctgttgctggtcatcggccaccccagaagcctaggactgaagtgtggaattcgcatggtcaacatgaaaagtaaggaacctgccgtgggatctagattcttctctagaattagtagttggagaaattcaacagtgactggacatccatggcaggtctccctaaaatcagatgagcaccacttctgtggaggaagcttgattcaagaagatcgggttgttacagcagcacactgcctggacagcctcagtgagaagcagctgaagaatataactgtgacttctggggagtacagcctctttcagaaggataagcaagaacagaatattcctgtctcaaaaattattacccatcctgaatacaacagccgtgaatatatgagtcctgatattgcactgctgtatctaaaacacaaagtcaagtttggaaatgctgttcagccaatctgtcttcctgacagcgatgataaagttgaaccaggaattctttgcttatccagtggatggggcaagatttccaaaacatcagaatattcaaatgtcctacaagaaatggaacttcccatcatggatgacagagcgtgtaatactgtgctcaagagcatgaacctccctcccctgggaaggaccatgctgtgtgctggcttccctgattggggaatggacgcctgccagggggactctggaggaccactggtttgtagaagaggtggtggaatctggattcttgctgggataacttcctgggtagctggttgtgctggaggttcagttcccgtaagaaacaaccatgtgaaggcatcacttggcattttctccaaagtgtctgagttgatggattttatcactcaaaacctgttcacaggtttggatcggggccaacccctctcaaaagtgggctcaaggtatataacaaaggccctgagttctgtccaagaagtgaatggaagccagagaggaaagggtaaggtctgtggaaaaatattgccttcaccattgctggcagagaccagtgaggccatggttccatttgtttctgatacagaagacagtggcagtggctttgagcttaccgttactgctgtacagaagtcagaagcagggtcaggttgtgggagtctggctatattggtagaagaagggacaaatcactctgccaagtatcctgatttgtatcccagtaacacaaggtgtcattggttcatttgtgctccagagaagcacattataaagttgacatttgaggactttgctgtcaaatttagtccaaactgtatttatgatgctgttgtgatttacggtgattctgaagaaaagcacaagttagctaaactttgtggaatgttgaccatcacttcaatattcagttctagtaacatgacggtgatatactttaaaagtgatggtaaaaatcgtttacaaggcttcaaggccagatttaccattttgccctcagagtctttaaacaaatttgaaccaaagttacctccccaaaacaatcctgtatctaccgtaaaagctattctgcatgatgtctgtggcatccctccatttagtccccagtggctttccagaagaatcgcaggaggggaagaagcctgcccccactgttggccatggcaggtgggtctgaggtttctaggcgattaccaatgtggaggtgccatcatcaacccagtgtggattctgaccgcagcccactgtgtgcaattgaagaataatccactctcctggactattattgctggggaccatgacagaaacctgaaggaatcaacagagcaggtgagaagggccaaacacataatagtgcatgaagactttaacacactaagttatgactctgacattgccctaatacaactaagctctcctctggagtacaactcggtggtgaggccagtatgtctcccacacagcgcagagcctctattttcctcggagatctgtgctgtgaccggatggggaagcatcagtgcagagctacatctgaacttaaatacatttctaacaacactttctgcttacttcatcatcgagctctctctgaatgtttcttcattagatggtggcctagcaagtcgcctacagcagattcaagtgcatgtgttagaaagagaggtctgtgaacacacttactattctgcccatccaggagggatcacagagaagatgatctgtgctggctttgcagcatctggagagaaagatttctgccagggagactctggtgggccactagtatgtagacatgaaaatggtccctttgtcctctatggcattgtcagctggggagctggctgtgtccagccatggaagccgggtgtatttgccagagtgatgatcttcttggactggatccaatcaaaaatcaatggtcctgcttcacttcagacaaataataaatgcaaaaccttaaaacaacaattgccaccacccacaccttcaccagacagtgcatcttggccaggttgttgctctgaagcagagctagaaaagcctagaggcttttttcccacaccacggtatctactggattatagaggaagactggaatgttcttgggtgctcagagtttcagcaagcagtatggcaaaatttaccattgagtatctgtcactcctggggtctcctgtgtgtcaagactcagttctaattatttatgaagaaagacacagtaagagaaagacggcaggtccaaaggacagtaaaataaccagactttcccaaagttcaaacagagagcacttggtcccttgtgaggatgttcttctgaccaagccagaagggatcatgcagatcccaagaaattctcacagaactactatgggttgccaatggagattagtagcccctttaaatcacatcattcagcttaatattattaacttcccgatgaagccaacaacttttgtctgtcatggtcatctgcgtgtttacgaaggatttggaccaggaaaaaaattaatagctcatttacatggctccaagaaagagtttatcttgatatccagtgctgcttacctgactgtgcattttaagactgatgagtctgagagaaagaggttttaa

SEQ ID NO: 5144 - DNA, 1428 bp, Homo sapiens
atcttcttgacactcctgtcattcagctatgttgctaaagcactagctggaatttttatgaaaatatcaaccactcaaatagaaaggagatttgagatatcctcttctcttgttggtttaattgatggaagcttcgaaataggaaatttgtttgtgattgtatttgtaagttactttggatctaaactacacagaccgaagttaattggaattggttgttttcttatgggaactggaagttgtgtgaaggaatctgggtcacacatgtggatctatgtcttcatgggtaatatgcttcgtggcataggggaaacccccatagtaccattggggatttcttacattgatgattttgcaaaagaaggacattcttccttgtatttaggtactgtgaatgtaatgggaatgactggtctagtttttgcctttatgctgggatctctgtttgctaaaatgtatgtggatatcggatatgtggatctgagcactatcaggataactcctaaggactctcgttgggttggagcttggtggcttggtttccttgtgtctggaatagtatccattatttcttctataccattctttttcttgcctctaaatccaaataaaccacagaaagaaaggaaagtttcactatttttgcatgtgctaaaaactaatgataaaaggaatcaaatagctaatttgaccaaccgaagaaaatatattaccaaaaatgtgactggctttttccagtctttgaaaagcatccttaccaatcccctgtatgttatatttgtaatttttacattgttacacatgagcagctacattgcttctcttacttatatcattaaaatggtggagcaacagtatggttggtctgcatctaagactaactttttgttgggagtcctcgccctacctgctgttgcaattggcatgttttcaggaggatatatcattaaaaaattcaaattgtctttagttggacttgccaaattggcattttgttctgcaacagtgcatctcttatctcaagttttatatttctttctaatctgtgaaagcaaatcagttgccggcctaaccttgacctatgatggaaatagtccagtaagatctcatgtagatgtaccactttcttattgcaactcagagtgcaattgtgatgaaagtcaatgggaacccgtctgtggaaacaatggaataacttacctgtcaccttgtctagcaggatgcaaatcttcaagtggtaataaagagcccatattatatctgaaacattttccttggattgatatcttcttatctcatgttgcaggaggtattctagttccaatatattttggggctctgattgatacaacgtgtatgaagtggtccaccaacagctgtggagcacgaggggcttgtaggatatataattccacatatttggggtaa

SEQ ID NO: 5145 - DNA, 1953 bp, Homo sapiens
atgtcactggtggcattattaaaagactctgccaacatcctgctttatggaaaaaccaacatgtactgtcacctgggatcaatctattactctttctatgaaataattattccaaagaggctgacagtccagggaggagatagcccagtggaaggactgtcctacttgttacttatgcaaggccagaagcacctggttcatctgaaggtgaagagaaaccattttgtgaataactttccagtctacagttaccacaatggcctcctggggcaagaatcgcctttcatctcacatgactgccactatgaaggctacatagaaggagtgtctcaggggcacatcctcctgattaaggaggaaaaatcttacagcattgagcccatggactcttcaagacggtttgaacatgtgttatacaccatggcacatcaagcctggcaacaagggagcaggaagcctcatgatctacaggcactgtcctacttgtggtcacacaaaaagtacgtggagatgtttgtcgtggtcaacaaccagcggttccagatgtggggcagtaacgtcaatgagacggtccagacagtagtggatgtcattgctctggccaacagcttcactaggggaataaacacagaggtggtgctggctggaatggagatttggaccgagggggacctaatagatgtcacagtggacttgcaaatcacactcaggaatttcaatcactggagacaagagatgctcttccatcgtgcaaaacacgatgttgcccacatgatcgttgggcatcaccctggacagaatatgggccaggcctttctcagtggtgcctgctcaagcggttttgcggcagctgttgaatccttccatcatgaagatgtgctgttgtttgcagccctgatggcccatgagctcgggcacaacctgggtattcagcacgaccactcggcctgcttttgtaaagataagcacttttgcctcatgcatgaaaatatcacaaaagaaagtggcttcagcagctgcagctctgactacttctaccagttccttcgagaacacaaaggggcctgcctatttaacaagccacggcccaggggccgcaagcgtagggattctgcctgtggaaatggtgtggtggaggacacggagcagtgtgactgtggttctctatgtcagcatcatgcatgctgtgatgaaaactgtatactgaaggcgaaagcagagtgcagtgatggtccatgttgtcataagtgtaaatttcaccgtaagggatatccttgctgtccttctagtcgttcctgtgatctcccagaattttgcaatggtacatctgcattatgccccaacaacaggcataagcaagatggctcaaaatgtcatacaatttacgagtgccttaaagttcattgtatggaccctaataatcagtgcttacaattatatggatatggtgcaaaatcagcctcacaagagtgttacaattcaatgaacagcaaaggggaccaatttggaaactgtggcatttctaccagtcctgggtcacaatatgttcggtgttcagatggtaatatattttgtgggaaacttatatgttcaggtattacaggcttaccaaaaatcaatctccaacatacaatgattcaggtccctcagggagatggctcatgttggagcatggatgcctatatgagtactgacattcctgatgaaggagatgtgcacaatggcacttactgtgcaccaaacaaagtctgcctgaattccgcctgcacagataaaaccccagtgatttctgcctgcaacccagaaaaaacgtgtaatgggaagggagtttgtaatgatttagggcactgccactgtaatgaagggcatgccccccctgactgtgttactgcaggaagtggaggtagtgtggacagtggccctcctggaatgtctgatggaaattcctcctaa

SEQ ID NO: 5146 - DNA, 3000 bp, Homo sapiens
atggaggccagtaccatcgatgactcaggacatttactagccaactccccgacttcagacatattttgttccaaaatggcatcttacctttatggagtactctttgctgttggcctctgtgctccaatctactgtgtgtccccggccaatgcccccagtgcatacccccgcccttcctccacaaagagcacccctgcctcacaggtgtattccctcaacaccgactttgccttccgcctataccgcaggctggttttggagaccccgagtcagaacatcttcttctcccctgtgagtgtctccacttccctggccatgctctcccttggggcccactcagtcaccaagacccagattctccagggcctgggcttcaacctcacacacacaccagagtctgccatccaccagggcttccagcacctggttcactcactgactgttcccagcaaagacctgaccttgaagatgggaagtgccctcttcgtcaagaaggagctgcagctgcaggcaaatttcttgggcaatgtcaagaggctgtatgaagcagaagtcttttctacagatttctccaacccctccattgcccaggcgaggatcaacagccatgtgaaaaagaagacccaagggaaggttgtagacataatccaaggccttgaccttctgacggccatggttctggtgaaccacattttctttaaagccaagtgggagaagccctttcaccctgaatatacaagaaagaacttcccattcctggtgggcgagcaggtcactgtgcatgtccccatgatgcaccagaaagagcagttcgcttttggggtggatacagagctgaactgctttgtgctgcagatggattacaagggagatgccgtggccttctttgtcctccctagcaagggcaagatgaggcaactggaacaggccttgtcagccagaacactgagaaagtggagccactcactccagaaaaggtggatagaggtgttcatccccagattttccatttctgcctcctacaatctggaaaccatcctcccgaagatgggcatccaaaatgtctttgacaaaaatgctgatttttctggaattgcaaagagagactccctgcaggtttctaaagcaacccacaaggctgtgctggatgtcagtgaagagggcactgaggccacagcagctaccaccaccaagttcatagtccgatcgaaggatggcccctcttacttcactgtctccttcaataggaccttcctgatgatgattacaaataaagccacagacgttcccagaattgacctgacaaatattgaccaggttgctgtcatcttcaaacaccattttcctgtgggtagaggtgatgcagtgctgaagacctgggcccctgctcagtgcctttgctctagaatgggtccagcttggctttggctactgggaacagggatcctggcctctgtccactgtcagccccttcttgcccatggagataaaagtctgcaggggcctcaaccccccaggcatcagctctcagagccagcccccgcctaccacagaatcacacccaccattaccaattttgctttgcgtttgtataaagagctggcagcagacgcccccggaaacatcttcttctcgccagtgagcatctccaccaccctggccctgctctctcttggggcccaagctaacacctcagctctgatcctggagggcctgggattcaacctcacagaaacccctgaagccgacatccaccagggcttccggagcctcctccacacccttgccctgcccagccccaaactcgaactaaaagtaggaaactccctgttcctagacaagcgactaaagcctcggcagcactatttggacagcatcaaggagctttatggagcttttgctttttctgccaacttcacagattctgttacaactgggaggcagattaatgactatttgagaaggcaaacatacgggcaagtcgtggactgcctcccggagttcagccaggacacgttcatggttcttgccaattacatcttcttcaaagccaagtggaagcaccctttcagtcgctaccagacccagaagcaggaaagtttctttgtggatgagaggacttctctccaggtccccatgatgcaccaaaaggaaatgcacagattcctctatgaccaggatttggcttgcaccgtcctccagatagaatacagaggaaatgccttggcgctgctggtcctccctgacccggggaaaatgaagcaggtggaggctgctctgcagccacagaccctgagaaaatggggccaattgctcctgcccagtctgttggatttgcacttgccaaggttttcaatttctggaacatataacctggaagacatacttccccaaattggtctcaccaacatactcaacttagaagctgacttctcaggagtcactgggcagctcaacaaaaccatctccaaggtgtcacacaaggcgatggtggacatgagtgagaaggggaccgaggccggggctgcttcaggcctcctctcccagcccccatctctgaacaccatgtcagacccacatgcccacttcaacaggcctttcctcttgctcctttgggagataactccttcagtcatctgtgaattaggtaaaagaacagaagctcggagcctttcagtagcttgtagttcaggttcctggaaaacgcagatttgcatgcaagaagtttatcagggaacactctcaggaacaacctctgtgaaggagcaagaaaaacaggtttgcaccaaaggaaaacttcaacgcaattgcaacagcaatgtcagattgcacaggatgctctgtaatggagatatgccaaatgaaattgaagaggagcgagcctttgtacccccacatcaacccatcactggtgcagatttatccccagaggggttgtcactttgggcatggcagcttcctacagtagaaaaccattttcagagagaaacaaaaccatga

SEQ ID NO: 5147 - DNA, 840 bp, Homo sapiens
atgggcgcgcgcggggcgctgctgctggcgctgctgctggctcgggctggactcgggaagccggaggcctgcggccaccgggaaattcacgcgctggtggcgggcggagtggagtccgcgcgcgggcgctggccatggcaggccagcctgcgcctgaggagacgccaccgatgtggagggagcctgctcagccgccgctgggtgctctcggctgcgcactgcttccaaaacagtcgttacaaagtgcaggacatcattgtgaaccctgacgcacttggggttttacgcaatgacattgccctgctgagactggcctcttctgtcacctacaatgcgtacatccagcccatttgcatcgagtcttccaccttcaacttcgtgcaccggccggactgctgggtgaccggctgggggttaatcagccccagtggcacacctctgccacctccttacaacctccgggaagcacaggtcaccatcttaaacaacaccaggtgtaattacctgtttgaacagccctctagccgtagtatgatctgggattccatgttttgtgctggtgctgaggatggcagtgtagacacctgcaaaggtgactcaggtggacccttggtctgtgacaaggatggactgtggtatcaggttggaatcgtgagctggggaatggactgcggtcaacccaatcggcctggtgtctacaccaacatcagtgtgtacttccactggatccggagggtggaggacggggtcaccaagagggcagccgggacccctgggctgcagacaagaaagggactgtggggtccaccgggtctgggccacatcaagaagtgtggttga

SEQ ID NO: 5148 - DNA, 1464 bp, Homo sapiens
gttgtagatgagcatgagagtgtggagcagagtcggcgagcgcaagtcgagcccatcaacctggacagctgtctccgtgctttcaccggtgaggaagagctaggggaagatgagatgtactactgttccaagtgtaagacccactgcttagcaacaaagaagctggatctctggaggcttccacccttcctgaaaattgtcaaatttcctcgggaaagttttgacctgagtgcttttttggtaccacgagacccggctctctgccagcatcaaccactcacaccccagggggatgagctctccaagcccaggattctggcaagagaggacatgctcctgagcaaaagcccatcctcactcagcgctaacatcagcagcagcccaaaaggttctccttcttcatcaagaaaaagtggaaccagctgtccctccagcaaaaacagcagccctaatagcagcccacggactttggggaggagcaaagggaggctctggctgccccagattggcagcaaaaataaactgtcaagtagtaagaagaacttggatgccagcaaagagaatggggctgggcagatctgtgagctggctgacgccttgagccgagggcatatgcggggggtgggcagccaaccagagctggtcactcctcaggaccatgagtgccattcaggaattctgagtgggggccattacgtcacttatgccaaaaacccaaactgcaagtggtactgctacaatggcagcatctgtgaggaacgtcaccctgatgaaattgacaccaactctgcctacattcttttctatgagcagcagaggatagactacgcacaatttctgccaaagattgatggcaaaaagatggcagacacaagcagtatggatgaagactttgagtctgattacaaaaagatacttcaagtatcctcagaaatgtattctgcacccccggccccgcccatgctgagggaaggggagcagttgccaatatttgcaccatcttcacatgcacatgttgcaacaagagcttctgggaagtcctcagagtacagcaagtggaagttcaccaacagccccacgttcctggagctgctggaggagttcccatccctgcaggtgtctgctggcttcctgctctccctgctccccattctgaagcccaggttttactccatcagctcctcccaggatcacacgcccacagcgatccacctgactgtggccgtgctcatgtaccacactcgagggctcagggtctgccctctgagccccaacttcaacacctcccatgggaaccctccaaagaatgaaccaggaatggaaaccatagagcccacggcaccccggcacctgagacccaatgagaatcaacactgcctctccagccaacatgcaaggctgcagcctggacccagtgccagcatcccaaatgcaggccctccatttggggagtggatggagtag

SEQ ID NO: 5149 - DNA, 1260 bp, Homo sapiens
atgggtcaaagtcagagtggtggtcatggtcctggaagtggcaagaaggatgacaaggacaaaaaaaagaaatatgaaccttctgtaccaactagagtgaggaaaaagaagaagaaaacaaagggaccagatgcagtcagcaaactgccactggtgacacctcacactcagtgccggttaaaattactgacattagagagaattaaagactatcttctcatggaggaagaattcattagaaatcaggaacagatgaaaccattagaagaaaagcaaaaggaggaaagatcaaaagtggatgatctgagggggaccccgatacaaggatcttctggaaactggctgctcggtcctgctcaaccacaaggtgcatgccgtgatggggtgctgatggatgacacggatcccctggtcacagtgatgaagatggaaaagaccccccaggagacctatgccaatattggggggctggacaaccaaattcaggaaataaaggaagctgtggagtttcctctcacccatcctgaatattatgaagagatgggtaaaaagcctcctaagggggtcattctctatggtccacctggcacaggcaaaaccttgttatccaaagcagtagcaaaccaaacctcagccactttcttgagagtggttggctctgaacttattcagaagtacctagttgctgaagagcatgaactatccatcatgtttactgatgaaattggagccattgggacaaaaagatatgactcaaattctggtggccgcattgacaggaagatcaagttctccctgcctgatgaaaggactaagaagcgtatctttcagaatcacacaagcaggatgacactggccgatgaagtaaccctggacgacttgatcatggttaaagatgacctctctggtgctgacatcaaggcaatctgtacagaagctggtctgatggcctcaagagaacgtagaatgaaagtaacgaatgaattcttcaaaaaatataaagaaatgttctttataagaaacaggaaggcacccctgaggggctctatctctagtgaaccacagctgccatcaggaaaatggttgggcgattcctcgacccctgaaaaggatgagcaacttgttcccaaagctggagaagacactcctgagggctatttaggacaacttatgactcagctctttgagcagaaagaggccaaaaagttcagcagaaaaagccctgaactcttggaagagctggcttcaagcctggcttag

SEQ ID NO: 5150 - DNA, 2307 bp, Homo sapiens
atgcgtttggtgacttttcctgggttcttgcttaagcggagccacaggttgtgggggcggccaggcctctggggaagagcaggtgccgcggtgccggcgcgccagcagcccgcggccaaggccacctgctcccagggccccggcacctctgcggggaggcggcaggcagaggacgcgcgcgcagtcgcgcaggagccctcaggcgagtgggggaagcatcgcaagagacgcggacctggagcgcggtcactgcgttaccgcagcgacctggtctgcaagcgctgcgtggagccagggcccgcgcggccgcaggtgcggcgcgtgaacgtggtgctgagcggcctgctggagaagtgcttcccggccgagtgccggctgcgcaggctggcaggccaggcgcggagcctgcagcgccagcagcagccggaggccgcgctgctcaggtgcgaccaggccctggagctggctcctgatgataattcattattgctgctgcgggcggagttatatttgaccatgaagaactatgagcaagctctccaagatgccagtgcagcttgtcagaatgaacctctcttgattaaggtatttgtatttgttagctttggagataatcaatgtgaagtttatatgattttcttaaaaacaaaaggacatcaagtaaaagctcaggctctttctggattgggaagaagtaaggaagtgttaaaggaatttctctactgccttgctctgaatcctgaatgtaactctgtgaagaaagaagcacagaaggtaatgtgtgaagtgctgttttcagctacagcaaatgtgcatgaaaatttaacatcttccatccaaagcagattaaaggctcagggtcacagccacatgaatgcccaggctctgctggaagaaggtgatgcagggagctcggagaattcatctgagaaatctgatatgcttggaaataccaattcttcagttttgtattttatactgggtctacactttgaagaggataaaaaggcgttagaaagcatccttccaacagcacccagcgctggcttaaagagacagtttccggatgacgtggaggatgcacctgacctgaacgcccctggaaaaattcccaagaaagatctctcacttcaaaggagcccaaactctgagacagaagaaagtcaggggctctcgcttgatgtaactgactttgagtgtgccctctgcatgagattgctctttgaacctgtcactacgccctgtggacacacattttgcctaaaatgccttgagcgctgccttgaccacgccccacactgtcctttgtgcaaagacaaactttcggaattattggcaagcagaaactttaacataactgttctggccgaagaattaatatttcgatatttgccggatgaattgtctgataggaagagaatttatgatgaagaaatgtcagaactgtcaaatctgaccagagacgtccccatctttgtgtgtgccatggccttccccacggtcccatgtccactccacgtttttgagccccgctatcggcttatgataagaagatgcatggaaactggcaccaagcggtttggcatgtgtttatctgctgagcacgcggggctttcagagtatggatgcatgctggagattaaggacgtgagaacgtttcctgatggaagttctgttgtagacgcgattggcatcagtcggttccgagtgctaagccaccgccacagagatggctataacacagcggacattgaatatcttgaagatgaaaaggtggagggtccagagtatgaagaacttgccgctctccacgattctgtgcatcaacagtctgtttcctggttcgcgtctctccaggatcgcatgaaagaacaaattttaagtcattttggggtaatgccagacagagaacctgagcctcagagtaatcccagcggccctgcctggtcctggtggatcctggccgtgctgcccctggagcgcaaggctcagctggccatcctcggcatgacctcgctcaaagagcggctccttgccatccgacggatattagtcatcatcacgccgttgctggctcggttatcagactctcatccaacacaagctcacagggaaagccgttccttgctccttgtggagggagctaccgtcattgccctgagaccaccagccaagaaagtaggtatgtccagagcagtcgctactgctcagcagataaccaaggtgccagctgagcggaaccagcctcacaggcctgcagaggctcagatctgcatgttggcccagaccccaaaaatggaacggtag

SEQ ID NO: 5151 - DNA, 819 bp, Homo sapiens
atgcttcagggtgctgggccacaccggggcaggcaaagtgcagatgtaggagctgctgaggagcagttcttagttttggtgccatcaaccaggccagtacttcctaaaatgggactctcaggacttctgccaatcctggtaccattcatccttttgggggacatccaggaacctgggcacgctgaaggcatccttggcaatatatgcagtatgccacaggaggctggcccctgcctggcctccataccacactggtgccaggggaacaataacaacttccaaactgaagctatctgtctggtcacctgcaaaaaataccataagtcccagaggtcccggtctcctgtgctcaccaaggccacactgggagagcttcgatcagaactagcacgagacactatcaaggatctcctcccaaatgtatgcgcttttcctatggaaaagggcccttgtcaaacctacatgacgcgatggtttttcaactttgaaactggtgaatatcctggttgggactgcccagccatgggcacaaggttcttccatggtcgccagaattgtcatagaaccccagattcaggcttgtgtacccaatgggcagctgatgccaacattgatgcatgggtgtttggagatggagaaatgtttattcaatgtaaccaaagcaagaaggcagaaggagagatcatttgtcatatggtttttgcccacacagaagggaatatgattgtctgcacagcatatgttcatgaatgtctaaagtgtagcatgaaggttggccagccagattatgatgcagcacattgtactggcctgtgctga

SEQ ID NO: 5152 - DNA, 2502 bp, Homo sapiens
atgggccagcggtcactgtgtgtcatgcccagtgtggatccgagtgtggatcttgggagaggagacaaagaggaagcagctggcggcaggggtggtggtcagattgcaggaggggcctgggtcagattcaggagacaggagcggcaccagctggggaccgggcagccgctggggccctggagaaccgtcaggccatgtcggatcgatggccaggtggccgccaggtctagaggacgtcgattgtgcaagatcggcttttcagactgtcgggctagcagcctgggctgggggcctgggccttttgaccttccaaaggacaggatggggatgcccgtggccgaggccccccaggtggctggcgggcagggggacggaggtgatggcgaggaagcggagccggaggggatgttcaaggcctgtgaggactccaagagaaaagcccggggctacctccgcctggtgcccctgtttgtgctgctggccctgctcgtgctggcttcggcgggggtgctactctggtatttcctagtgggaagtaatggagaaaccaaatcggactgtgcctctacactgtacactgtagaaggcccattcatttgttcatttactcagtgccaagcacctcctgtgtgccagaggagtttaattccccctgattatgctcctggggtaaatcaccccccaccccaggagaggtgctccatggggctgaggacccaagggccaaacaggctttcagcccgggtcctcaccatggtccccgtgctaccggccccgtgccccatgctgctccctctgctggaagggtacaaggcggaggtgatggtcagccaggtgtactcaggcagtctgcgtgtactcaatcgccacttctcccaggatcttacccgccgggaatctagtgccttccgcagtgaaaccgccaaagcccagaagatgctcaaggagctcatcaccagcacccgcctgggaacttactacaactccagctccgtctattcctttggggagggacccctcacctgcttcttctggttcattctccaaatccccgagcaccgccggctgatgctgagccccgaggtggtgcaggcactgctggtggaggagctgctgtccacagtcaacagctcggctgccgtcccctacagggccgagtacgaagtggaccccgagggcctagtgatcctgggtcagtactgcgagtggaaacaagccagtgtgaaagacatagctgcattgaattccacgctgggttgttaccgctacagctacgtgggccagggccaggtcctccggctgaaggggcctgaccacctggcctccagctgcctgtggcacctgcagggccccaaggacctcatgctcaaactccggctggagtggacgctggcagagtgccgggaccgactggccatgtatgacgtggccgggcccctggagaagaggctcatcacctcggtgtacggctgcagccgccaggagcccgtggtggaggttctggcgtcgggggccatcatggcggtcgtctggaagaagggcctgcacagctactacgaccccttcgtgctctccgtgcagccggtggtcttccaggcctgtgaagtgaacctgacgctggacaacaggctcgactcccagggcgtcctcagcaccccgtacttccccagctactactcgccccaaacccactgctcctggcacctcacggtgccctctctggactacggcttggccctctggtttgatgcctatgcactgaggaggcagaagtatgatttgccgtgcacccagggccagtggacgatccagaacaggaggctgtgtggcttgcgcatcctgcagccctacgccgagaggatccccgtggtggccacggccgggatcaccatcaacttcacctcccagatctccctcaccgggcccggtgtgcgggtgcactatggcttgtacaaccagtcggacccctgccctggagagttcctctgttctgtgaatggactctgtgtccctgcctgtgatggggtcaaggactgccccaacggcctggatgagagaaactgcgtttgcagagccacattccagtgcaaagaggacagcacatgcatctcactgcccaaggtctgtgatgggcagcctgattgtctcaacggcagcgacgaagagcagtgccaggaaggggtgccatgtgggacattcaccttccagtgtgaggaccggagctgcgtgaagaagcccaacccgcagtgtgatgggcggcccgactgcagggacggctcggatgaggagcactgtggtgagccctgcctggctgccggggccctggagcttgggagggaggggggcccctccagccgcattgttggtggagctgtgtcctccgagggtgagtggccatggcaggccagcctccaggttcggggtcgacacatctgtgggggggccctcatcgctgaccgctgggtgataacagctgcccactgcttccaggaggacaggtag

SEQ ID NO: 5153 - DNA, 1755 bp, Homo sapiens
atgggtctgtgggcaggagagggcacactccagtggtgtctgaggctgttgcttcagaaggttggaggcagaccagctacgagctggagcacaggaagaaaaggaacagaagaggggatccatccatatgtgactgagatatggtcgaatctaaaccaagtcacaaaatcagtgatatccattgtgcggaggtatccactagatgccactgccaagttaagagagctgaatcctaatcgtgaggttttgaggggagatcattcacagaagtctctgtctcctttcatctacagtcgcagctgttttccagacgccttgctcctcaggtcggggagtgatctgatggcccaggttcgagaaacttctttgccctccggctctggggtccgctggatctccggaggtgggggaggagcctctcctgaggaggcggttgagaaggcggggaaaatggaggaggcggcggcgggggctacgaaggcgtcttcgagacgtgaagccgaggagatgaagctggagccattacaagagcgtgagcccgcgccggaggagaacttgacgtggagcagcagcggcggcgacgagaagtttatgacatcagggtttgaagacaagcaatcaacctgtgagacaaaggaacaggagccaaaattggtgaaacccaagaaaaagagaagaaaaaagtcagtctatactgtaggcctgagagggctaatcaatcttgggaacacttgttttatgaattgtattgtccaggcacttacccatattcctctactgaaagatttcttcctctctgacaagcacaaatgtataatgacaagccccagcttgtgtctggtctgtgaaatgtcttcgctttttcatgctatgtactctgggagccgaactcctcacattccctataagttactgcatctgatatggatccatgcagaacatttagcagggtacaggcagcaggatgcccatgagttccttattgcaatattagacgtgctacatagacacagcaaagatgatagtggtgggcaggaggccaataaccccaactgctgtaactgcatcatagaccaaatctttacaggtggcctgcaatcagatgtcacatgtcaagcctgccatagtgtttctaccaccatagacccatgctgggacatcagtttggacttgcctggctcttgtgccacattcgattcccagaacccagagagggctgacagcacagtgagcagggatgaccacataccaggaatcccctcacttacagactgtctacagtggtttacaaggccagagcacctaggaagcagtgccaaaatcaaatgcaatagttgccaaagctaccaggagtctactaaacagctcacaatgaaaaaattacccattgtggcttgttttcatctcaagcggtttgagcatgtaggcaaacagaggcgaaagattaatacctttatctcctttcccttggagctggacatgactccgtttttggcctctactaaagagagcagaatgaaagaaggccagccaccaacagattgtgtgcccaatgagaataagtattccttgtttgcagtgattaatcaccatggaactttggaaagtggccactataccagcttcatccggcaacaaaaggaccagtggttcagctgtgatgatgccatcatcaccaaggctaccattgaggacttactctacagtgaagggtatttactgttctatcacaaacagggtctagagaaagactag

SEQ ID NO: 5154 - DNA, 314 bp, Homo sapiens
tctcttcaaacgctgtgtccattctcagcatgctgctaattcaaactcttcttgtcagtgaatccagtatagttctgtatcaaatccaaacagaagaaaacaagattctgtataattcactattcatggaaaatgtaaaaagatctcacccaccagaaaaacttgtggtactcaaaaatactgacaaaccaaagttaaataacacaggagatagaaaagagtacaatattcatgtcctaagacagcttcaagacatctttgttcatttagctgtttccaaactacagtcctatgtactgaaggaattttggtaa

SEQ ID NO: 5155 - DNA, 300 bp, Homo sapiens
atgcaactatacataatcacccttgtcacaaacaatatttctgtaattgaaaacacaggtagtgatacaaacaattattgttcaaagatgagaaacaaaatagatctccgagatgatgtgtttagatatcattataaatttgaagagaaaccagcattaaacaagacagaagataggaaagcgtacaatattgatctcctaagacaatttcagatggtagccagtgactcagatcactggtataaatttgatgttggagatgtaacagaattgaaaatagaagatgataaagaaatttaa

SEQ ID NO: 5156 - DNA, 330 bp, Homo sapiens
atggctaatagatctcacccaccagaaagatttgtgggactcaaaaatgctgaaataaaaaaactgccagaagagccagctcttccagtctgttcctcttccattaccatcaatcctggttttgatctgcttgtagcaccagctattggctgtgtaaagaaccttaaaaagatagtagactgtttgaatgcaatatattacagagagaaagcaacaactagttgtgaagcactttttgagtgggaatatctgctctctgttagatctcacctgccagaaatatttgcgggactcaaaaatgctgatgtgaacattttaaataagatttga

SEQ ID NO: 5157 - DNA, 2661 bp, Homo sapiens
atgcctgacattaatactgtgagttcttggtttcagactcaaaacaatgtaagaataaatgttactcaacctcattctcgagcaggtactacctggatgcagccagaatggcaaataatccacccatggaaccaatctgaaaagaatgcagtcagaccctggacccagtctgaaggtgatgttctgcaaccttggatctatgctgaaagcaatacagtcagactctgggcccattctgaaactgataaaataaaacaatatactgagcctgaatctcaagcaattaggatgtggcctgaagaggatatgttcgcactttggtccccaacacaaaacgatgcagtttggccatggacccaagtggaatcacaaatgacccactcctggacccagaatcaacttagtataaattacccttggactcagcatgtacctgctgcaatcagaccatggacttactctgaaattcaaccctgcacccaccctgaagccaatacagtgataagatactggttccagactcaaatgagttcattaaatcctgggaccaacctgaaactgaagtattccaaatttggactgtcccaagggacctctaggacctgggttgatcttcctgaagcaaccactacattttcaacccaggttccttcctatacgcctggagcaatgtctggaacaagagaaaatatacaactatatgactgttggctacaaagtcctggaattgtgcaaaaacggcacctgagcatcctacaagtcagcacttgtgcccaattttggctcaagctgaatgaactcactttctgggtggaggccaagaaagccatgtggatggctgactatcagggagtgacacagtctagctatgctccctggtacaagcaagggcccatgactacctctgcttctatgtcccattcagtctctacctctacaaatgcttcagcttttacctccacccctgcttctctttggccacacttctctctgccacagcctcagagtaaggctcaaaaacttggtagagatcagatttatctgcgatatgccatgccttggaaggctgtcatcatcatctgtgggagtcagatctgcagtggttccatagttggcagctcttggattctcacagctgcccactgtgtcaggaacatggatcctgaagacactgctgtgatactgggcctgaggcaccctgaggcaccactgagagttgtgaaggtgtctaccattctactgcatgacagattctggttggtgactgaggcagcaagaaatattctggaattgctactcctccacgatgtccagactcccatttggctcttatcactcttgggctatctgaggaacctgaatagttcagaatgctggctctctaggccacatattgttacaccagctgtcctgcttagacacccctgggccccagggggaccgcaacctcacccaggcactggaccactcccacagattcaggctcagcagcctaacctgcaaatccatcatgtagctcagcaggacttcatcatttgtgaccctggtccatatctgggcccaagtcttgagcaccatgtgtttctggggccgccctctcccgcagagcctccagacttaacacggtgccctcctagggctcccacagaccaagggctcacagtctgcgtgtgcctgaacccaccaccaccttgcacaagcatcttctcagaggaggactaccgcgggaggatggagctgcaggccacccaggggaggggctcctcaggagacgcctaccgctcttgcaataattggcagatgcccactgccttcccaatgattggctggagcacaatggtagaagcagattgtcatggcaagcttttcattggtggcctcaatagagaagccaatgaaaaggtgcttaaagaagtatttgcaaaacatggtccccttttggaagttcttttgataaaaggtcgaaccagtaagtccagagattttgtggtcattatttttgagaatgctgcagatgctaagaatgctgccagagatatgaatggaaagtctttggatggaaaagaaataaaagtagaacaagcaaagaaaccatcttttccaagtggtggtaggcggagaccaccaccttcttcaagaaacagaagcccttcaggaagtctgagatctgcaagaggaagtagtggaggaacaagaccgtggctgccctcacatgaaggacacttggatgatggtggatacgctcttgatctcaacacgagttcttctaggggagccattccaattaaaagaggtccatcttcacgaagtggaggtcctcctcctaaaacatctgctccttctgctatggcaagaagcaatagttggatgggaggccaaggtcccatatcacgtggaagagagaattatggaggtcctccatgcagagagccaatctcttcctggagaaatgaccgtatgtcaccaagagatgatggttatgcaattaaggaaagaaatcatccactttcccgagaatctagggattatgctccactgtctagagactatgcataccatgattatggtcattctagttgggatgaacatttctctagaggatatagagatcattctgaacgtccaagtggaagttcttatagagatgcatttcagagatag

SEQ ID NO: 5158 - DNA, 390 bp, Homo sapiens
atggctaatagatctcacccaccagaaagatttgtgggactcaaaaatgctgaaataaaaaaactgccagaagagccagctcttccagtctgttcctcttccattaccatcaatcctggttttgatctgcttgtagcaccagctattggctgtgtaaagaaccttaaaaagatagtagactgtttgaatgcaatatattacagagagaaagcaacaactagttgtgaagcactttttgagtgggaatatctgctctctgttagatctcacctgccagaaatatttgcgggactcaaaaatgctgacaatccagagttaataaagacagaagatagaaaagagaacaatatttgtgtcataagacatcttcaagacatctttgttcattga

SEQ ID NO: 5159 - DNA, 2721 bp, Homo sapiens
atggacaaagaaaacagcgatgtttcagccgcacctgctgacctgaaaatatccaatatctcagtccaagtggtcagtgcccaaaagaagctgccagtgagacgaccaccgttgccagggagacgactaccattgccaggaagacgaccaccacaaagacccattggcaaagccaaacccaagaagcaatccaagaaaaaagttcccttttggaatgtacaaaataaaatcattctcttcacagtatttttattcatcctagcagtcatagcctggacacttctgtggctgtatatcagtaagacagaaagcaaagatgctttttactttgctgggatgtttcgcatcaccaacatcgagtttcttcccgaataccgacaaaaggagtccagggaatttctttcagtgtcacggactgtgcagcaagtgataaacctggtttatacaacatctgccttctccaaattttatgagcagtctgttgttgcagatgtcagcagcaacaacaaaggcggcctccttgtccacttttggattgtttttgtcatgccacgtgccaaaggccacatcttctgtgaagactgtgttgccgccatcttgaaggactccatccagacaagcatcataaaccggacctctgtggggagcttgcagggactggctgtggacatggactctgtggtactaaatggtgattgttggtcattcctaaaaaaaaagaaaagaaaggaaaatggtgctgtctccacagacaaaggctgctctcagtacttctatgcagagcatctgtctctccactacccgctggagatttctgcagcctcagggaggctgatgtgtcacttcaagctggtggccatagtgggctacctgattcgtctctcaatcaagtccatccaaatcgaagccgacaactgtgtcactgactccctgaccatttacgactcccttttgcccatccggagcagcatcttgtacagaatttgtgaacccacaagaacattaatgtcatttgtttctacaaataatctcatgttggtgacatttaagtctcctcatatacggaggctctcaggaatccgggcatattttgaggtcattccagaacaaaagtgtgaaaacacagtgttggtcaaagacatcactggctttgaagggaaaatttcaagcccatattacccgagctactatcctccaaaatgcaagtgtacctggaaatttcagaatcttagaaaaggaatatgcagcagtgctttgaattgttttatcacaaaagtcatcagcacagcaccatccaatttaggtctgccaggcataagcatggatttttacgggccatgtactgtggctcctacatggatcatcagacaattttttgagtgcccagccctctggttcacattcagctccagtgcagttcaaggctttcagacaagccacttttggcagaatatggcagttacaacatcagtcaacgaagagctgtttggtagagggagttcaaatatcagccctcagaatattgagtttgaaattcatactgaaaactactggaagagcggccaggaagtgctcatcagaaaaggcaatgtgatgaatgattcaagatcgggaatgaatcttgaatcagggaatggatcattaatcagaagcctggttgaagaggaaagactagtggacagggaggcccagcgttgtgatggagtaaatgactgctttgatgaaagtgatgaactgttttgcgtgagccctcaacctgcctgcaataccagctccttcaggcagcatggccctctcatctgtgatggcttcagggactgtgagaatggccgggatgagcaaaactgcactcaaagtattccatgcaacaacagaacttttaagtgtggcaatgatatttgctttaggaaacaaaatgcaaaatgtgatgggacagtggattgtccagatggaagtgatgaagaaggctgcacctgcagcaggagttcctccgcccttcaccgcatcatcggaggcacagacaccctggaggggggttggccgtggcaggtcagcctccactttgttggatctgcctactgtggtgcctcagtcatctccagggagtggcttctttctgcagcccactgttttcatggaaacaggctgtcagatcccacaccatggactgcacacctcgggatgtatgttcaggggaatgccaagtttgtctccccggtgagaagaattgtggtccacgagtactataacagtcagacttttgattatgatattgctttgctacagctcagtattgcctggcctgagaccctgaaacagctcattcagccaatatgcattcctcccactggtcagagagttcgcagtggggagaagtgctgggtaactggctgggggcgaagacacgaagcagataataaaggctccctcgttctgcagcaagcggaggtagagctcattgatcaaacgctctgtgtttccacctacgggatcatcacttctcggatgctctgtgcaggcataatgtcaggcaagagagatgcctgcaaaggagattcgggtggacctttatcttgtcgaagaaaaagtgatggaaaatggattttgactggcattgttagctggggacatggatgtggacgaccaaactttcctggtgtttacacaagggtgtcaaactttgttccctggattcataaatatgtcccttctcttttgtaa

SEQ ID NO: 5160 - DNA, 987 bp, Homo sapiens
atgggccctgctggctgtgccttcacgctgctccttctgctggggatctcagtgtgtgggcaacctgtatactccagccgcgttgtaggtggccaggatgctgctgcagggcgctggccttggcaggtcagcctacactttgaccacaactttatctgtggaggttccctcgtcagtgagaggttgatactgacagcagcacactgcatacaaccgacctggactactttttcatatactgtgtggctaggatcgattacagtaggtgactcaaggaaacgtgtgaagtactacgtgtccaaaatcgtcatccatcccaagtaccaagatacaacggcagacgtcgccttgttgaaactgtcctctcaagtcaccttcacttctgccatcctgcctatttgcttgcccagtgtcacaaagcagttggcaattccacccttttgttgggtgaccggatggggaaaagttaaggaaagttcagatagagattaccattctgcccttcaggaagcagaagtacccattattgaccgccaggcttgtgaacagctctacaatcccatcggtatcttcttgccagcactggagccagtcatcaaggaagacaagatttgtgctggtgatactcaaaacatgaaggatagttgcaagggtgattctggagggcctctgtcgtgtcacattgatggtgtatggatccagacaggagtagtaagctggggattagaatgtggtaaatctcttcctggagtctacaccaatgtaatctactaccaaaaatggattaatgccactatttcaagagccaacaatctagacttctctgacttcttgttccctattgtcctactctctctggctctcctgcgtccctcctgtgcctttggacctaacactatacacagagtaggcactgtagctgaagctgttgcttgcatacagggctgggaagagaatgcatggagatttagtcccaggggcagataa

SEQ ID NO: 5161 - DNA, 1041 bp, Homo sapiens
atggcaggagaacaggtcaccgccaatgtcagcagataccctggacagaaaacgatgtcctttcctgaaaaaacatttctcctttcttatagggcatcactccttgctgttgtaacacacagatccaataatagtcgtgggcgagcttttgagagtcaggttcttcccgatttgacagcaggggacgccgcagaccccccaattcctcccttgggtcctggagctgcacttctgaagtctggtcccttcaggatctggcagggggtgaagaccaaaggagaggagggggacagagacacgggcactgctggctatgcattcacgctgctccttctgctggggatttcgggtgagcccccagaatggggctggggggctagtgtggggcagtggccctggcaggtcagcatccgccagggcttgattcacgtctgctcagataccctcatctcagaggagtgggtgctgacagtggcgatctgcttcccattatccccccaccctgatttccaagcaaacacatctagtgccatcgctgtggtagaactgccctccccagtttctgttagccctgttgtcctgctcatctgccttccctcatctgaagtctacctgaagaagaatacaacctcctgctgggtgactggatggggctatactggaatattccaatatatcaagcgttcttatacactgaaggagctgaaagtgcccctcattgatctccagacatgcggtgaccactatcaaaatgaaatcttgctgcacggagttgagctcatcatcagtgaagctatgatctgctccaagctcccagtggggcagatggatcagtgtactgtcctggcaggagtggtaagccagggatcaaactgcatccaaaccagtgggcctggaatatacacaaacatccatttctacaagtcttggattgagaagtctcccatctcgcttgctgagttttctgctaccctcagtctgggcctctctgggctcctgcctattatgcttctgcctctgattttcctgaggccaccttaa

SEQ ID NO: 5162 - DNA, 852 bp, Homo sapiens
atgttggagggcttccagatcttggttcagaatacagtacaaggaacaattcacaagataaaatgtgtctgtgactcccaaatgagcgtgtcagaaatgtcttgtagtgaaagtacatccgcatgtcagtctctcgaagacgggtcagttccagaaattctcattagcctgctttataatgccacaaatgggagactatcagcagaagtgataaaaggcagccacttaaaaaattgggcagcaaacagaccacccaatacatatgttaagttaactctacggaaatccacggatcaagagatgtccaaatgcaagatatccatccgcagagggcggccaaatccagtatacaaggaaacttttgttttcaaagtgaccctatttcagctttctcatgtgacactcatgctgtctgtgtataacaaaagcagcatgagaagaaagatgataggctggatttatttaggtctcaacagctctggagaagaactcaatcactggactgaaatgaaagagtcaaaaggacggcaagtacgacctatacaaaatacacttcggcaagccagagtggaaaccataagcactgatgtgtgtaacagaaaggatgtgtatgatggcctgataactccaggaatgttatgtgctggattcatggaaggaaaaatagatgcatgtaagggagattctggtggacctctggtttatgataatcatgacatctggtacattgtaggtatagtaagttggggacaatcatgtgcacttcccaaaaaacctggagtctacaccagagtaactaagtatcgagattggattgcctcaaagactgccccaatttctattatgttctaa

SEQ ID NO: 5163 - DNA, 645 bp, Homo sapiens
atggcagccatcattggtgatgccctgaatgcccaaagagcatctaagggaaacccgaaggactataaagataataccagcaaaggcaagtcttgcttcaaatgcaagaaaagcgggcattgggcaaaggaatgtactaagcccccgccctccagctcccctcaggcccctgctgtcaacgcaaaggcaccagtcacgaaccctggcactggagaattgattgcctctgctcccactgaggggctgggggcaaattacactgtccttactgcttatgcagggaaacttccctcctggtccatgagtgttatgggaatggaagggaagccacaaaccagattttttactcctcctttgatttgtcaatttgagaaacgaatcttccaacaggagtgcctagtagtatcaagctacgcaatccccctgctgggaagagagattatggttaaaataagggcactactacaatttaagcatcacccagtgaaattgctaatagtcaaaaatacagacaatgtccaagaccacattaataaacaggttaacctgctggcattgtatactagaaaactgaggaaggctaaaacagcagtgccagtcaaaatacagcttgaagaccccagctgttttcccagtcaaaaataa

SEQ ID NO: 5164 - DNA, 276 bp, Homo sapiens
atgggttttggttaccatgaacaatggggatttagctttgcacttctaactgtgcaatttgttctttctccaactgctcctcttcaattgattcttgcttcgctctcttctggtgatcaaacaaaagggacaaaggtgaactgttccagatacattaaaggcttaaagactgcatgcccaagagactggagaccaatatgtggcacagatcagaaaacttacagtaatgaatgcatgttttgcatgcaaaaccaggaagtgttatactcaatttga

SEQ ID NO: 5165 - DNA, 906 bp, Homo sapiens
atggctcacaggaagcagagaaaggtgaaatttctaacatcaccaccagtgttacatctacaactgatgagatttatgtatgaccctcagacgaaccaaaatatcaagatcaatgataatagagataatcatggtagacattatgtggtttatctaaaccccaaaggggatggcaaatggtgtaaatttgatgatgatgtggtgtcaaggtgtactagaaaggaagtaattgagcacaattatgggggtcacgatgacaacctgtctgtccgacgctgcactaatgcttacgtgttagcctatatcagggaatcaaaactgagtggaagttttacagaagagaaaaggatcaacgctcagaaggtagcctcagaggaccagttttgtggccaccagggaaatgacatgtacgatgaagaaaaagtgaaatatactgtgttcaaagtattgaagaactcctcacttgctgagtttgttcagaacctctctcagatcatggaatttccacaagatcaaattcaattgtggcccatgcaagcaaggagtaatggaacaaaacggccagcaatgttagataatgaagctgatggcaataaagcaatgattgaggtcagtgataatgaaaactcttggacaatattcctggaaacagtcgatctcgagctggctgctagtggagtgaccttacccaagtttgataaagctcatgatgtaatgttttttttgaagatgtatgatcccaaaatgcggagcttgaattactgtgggcatatctacacaccaatatcctgtgaaatacgtgacttgctcccagttatgtgtaacagagcaggatttattcaagatactagccttatcctctatgaggaagttaaactgaatttaacagagagaattcaggactaa

SEQ ID NO: 5166 - DNA, 1359 bp, Homo sapiens
atgcccaaaagctctgacagaacctcctacaggatgaaaagcgtgatttctaaaagaagtacagctgtggaattacaccaactggaatttgaatcccaggaacccactcactcaccacctgggcgcctggtacaagtcggggtaaccctgaggcttgtgcatccagagaagctaggtccccggtggagactagcttgggataaggttggggagacgccctccgttcttctagatgcctggggtctcaacagcaagcaccccgcatttgaggcagatgctaagatgatggtaaatacagtgtgtggcatcgaatgccagaaagaactcccaactcccagcctttctgaattggaggattatctttcctatgagactgtctttgagaatggcacccgaaccttaaccagggtgaaagttcaagatttggttcttgagccgactcaaaatatcaccacaaagggagtatctgttaggagaaagagacaggtgtatggcaccgacagcaggttcagcatcttggacaaaaggttcttaaccaatttccctttcagcacagctgtgaagctttccacgggctgtagtggcattctcatttcccctcagcatgttctaactgctgcccactgtgttcatgatggaaaggactatgtcaaagggagtaaaaagctaagggtagggttgttgaagatgaggaataaaagtggaggcaagaaacgtcgaggttctaagaggagcaggagagaagctagtggtggtgaccaaagagagggtaccagagagcatctgcgggagagagcgaagggtgggagaagaagaaaaaaatctggccggggtcagaggattgccgaagggaggccttcctttcagtggacccgggtcaagaatacccacattccgaagggctgggcacgaggaggcatgggggacgctaccttggactatgactatgctcttctggagctgaagcgtgctcacaaaaagaaatacatggaacttggaatcagcccaacgatcaagaaaatgcctggtggaatgatccacttctcaggatttgataacgatagggctgatcagttggtctatcggttttgcagtgtgtccgacgaatccaatgatctcctttaccaatactgcgatgctgagtcgggctccaccggttcgggggtctatctgcgtctgaaagatccagacaaaaagaattggaagcgcaaaatcattgcggtctactcagggcaccagtgggtggatgtccacggggttcagaaggactacaacgttgctgttcgcatcactcccctaaaatacgcccagatttgcctctggattcacgggaacgatgccaattgtgcttacggctaa

SEQ ID NO: 5167 - DNA, 800 bp, Homo sapiens
caccatgaatctacttctgatccttacctttgttgcagctgctgttgctgccccctttgatgatgatgacaagatcgttgggggctacatctgtgaggagaattctgtcccctaccaggtgtccttgaattctggctaccacttctgcggtggctccctcatcagcgaacagtgggtggtgtcagcaggtcactgctacaagtcccgcatccaggtgagactgggagagcacaacatcgaagtcctggaggggaatgaacagttcatcaatgcggccaagatcatccgccaccccaaatacaacagccggactctggacaatgacatcctgctgatcaagctctcctcacctgccgtcatcaattcccgcgtgtccgccatctctctgcccactgcccctccagctgctggcaccgagtccctcatctccggctggggcaacactctgagttctggtgccgactacccagacgagctgcagtgcctggatgctcctgtgctgagccaggctgagtgtgaagcctcctaccctggaaagattaccaacaacatgttctgtgtgggcttcctcgagggaggcaaggattcctgccagggtgattctggtggccctgtggtctccaatggagagctccaaggaattgtctcctggggctatggctgtgcccagaagaacaggcctggagtctacaccaaggtctacaactatgtggactggattaaggacaccatagctgccaacagctaaagcccctggtccctctgcagtctctataccaataaagtgaccctgctctcac

SEQ ID NO: 5168 - DNA, 732 bp, Homo sapiens
aacagtgctcaggaagagacagtggggagtaaggcagaagtgatgtcaggtgcagataatagttttgccataatccaggaaaaaggaaatgaagaactgagcaagatagggacatcaagaataaagaataagggttcagcatgggagatgtgtagaaataaaattgagcaatgcagctgctggttggatgtgagaaatagaaaggccaaaatgttgatattggacaataaaagcaccatcactgccagcaacagagactgtcaccaagtctcccttatggaggcttttcttcgggatacctactggccacagttgacaagttcacaactgaatggatggagcctttcatcctggaagggtcagcggtttgttcacacaggaatggatgcacattcaagtgtggagttgttttctgccggccaggtctcagccagcattattagccaaaggcttacagagagcttgattcaccagtacaggatcccacataacactgcattggaccgggggcctactttagagaaaagcaagtgcaggagtggactcatgaccatgagactcgatggtcacatcccatacacaccacccagaagttgtcagcataatagagatttggaacgacttgttgggagcacagccagaacaccagcttggagtcaactacatgaggatgactcaggacgctggatacatatttatatgtgtagaaaggacttttatttgagtgcataa

SEQ ID NO: 5169 - DNA, 1056 bp, Homo sapiens
atgcaaattaagcacagatacccctctgacctagacagcccacctccaggaacatctcacagaaatgcagacacagcaccaagtgatgtgtgtaaggaaattcatcagaacaccgtctgtgattgggaaaaggcggaaaccatccaaagaagtatcggtgcagggctggttaaacgaagcaagtcatttaggggctccatcactcagagtggcagcgccaagacagccggcctcactgggttttgtaagctgtgcaagaccagcagctggcacacaggagctgctcagatacttgaaggaggaatggagaaggcaaacagcccccagtatgcagacgtgagggtctcccagcggcaccatcctttgccatctcatgccgagggacaaagacagagcagagctctccaccaaggctgggttctcctccaaggaaatgtgataacaggacagaaagcatcgtggaaggataggggctttggagtcccacaaaccacagtttgcaagaccaggagcatcctgcacttccttgcacacatcctggcaacctcagccaatgagtccaacgtcaacttcctgtccttgcctgacactaacagccctgagatcagacctgaccattcacctccagtaccagataggtccgtcagtcctttggaacatatcccacgaacattccccaaaccaggcaccggactccacacatcaacaccgtcacagagagcttcagcctgtgtagtccagctgtgctcaaatggaaatccagaaacccagatgttggtccaaacaccctgtctcagggagctggctctgcaggtccccagcgtgggagtgaaccgggtgggccacctgcccttcctgcccacatccctgcttcctggaatcctggaccctgagaaccagggggacatgcaagaaggaaaatccctgcaacgtggatgcacctctgcaggaatccctctgcaggagccccaagatgagaataaccttcctgatctggtttcaaccctggatgctttcaactggtgcgtccatcaaggatttcagggactccagtga

SEQ ID NO: 5170 - DNA, 1030 bp, Homo sapiens
cgccttctgcctcctggcggtggccttggcgaccgaggtgaagaaacctgcagccacagcagctcctggcaccgcagagaagctgagccccaaggcagccacgctggccgaacacagcgccggcctggccttcagcctgtaccaggccatggccaaggaccaggcggtggagaacatcctggtgtcgcccgtggtggtggcctcgtcgttggggctcgtgtcgctgggcggcaaggcgaccacggcgtcggaggccaaggcagtgctgagtgccaagcagctgagcgacgaggagggacccagctcagtgagtttcgctgatgacttcgtgcgcagcagcaagcagcactacaactgcgagcactccaagatcaatttccatgacaagcgcagtgcgctgcagtccatccacgagtgggccgtgcagaccaccgacggcaagctgcccaaggtcaccaaggacatggagtgcatggatggcgccctgcttgtcaacaccatgttcttcaagccacactggaatgagaaattccaccacaagatggtggaaaaccgtggcttcatggtgactcggttctataccgtgggtgtcatggtgatgcaccagacaggcctctacaactactatgacaatgagaaggaaaagctgcaaatcgtggagatgcccctggcccacaagctctccagcctcatcatcctcatgccccaccacgtggagcccctcgaggccttaaaaagctggcttggcctgactgaggccattgacaagaacaaggcaaacttgtcacgcatgccacacaagaaggacctgtacctgaccagcgtgttccacgccaccgcctttgagttggacacagacggcaactcctttgaccaggacatctatgggagcaaggagctgcgcagccccaagctgttctactccgaccaccccttcatcttcctggtgtgggacacccagagcggctccctgctgttcactgggcacctggtccggcctaaggttgacaagatgcaagacgagttttag

SEQ ID NO: 5171 - DNA, 1142 bp, Homo sapiens
gcgagaagagcagacaccgtgctcctggaatcacccagcatgttgcaaggtctcctgccagtcagtctcctcctctctgttgcagtaagtgctataaaagaactccctggggtgaagaagtatgaagtggtttatcctataagacttcatccactgcataaaagagaggccaaagagccagagcaacaggaacaatttgaaactgaattaaagtataaaatgacaattaatggaaaaattgcagtgctttatttgaaaaaaaacaagaacctccttgcaccaggctacacggaaacatattataattccactggaaaggagatcaccacaagcccacaaattatggatgattgttattatcaaggacatattcttaatgaaaaggtttctgacgctagcatcagcacatgtaggggtctaaggggctacttcagtcagggggatcaaagatactttattgaacctttaagccccatacatcgggatggacaggagcatgcactcttcaagtataaccctgatgaaaagaattatgacagcacctgtgggatggatggtgtgttgtgggcccacgatttgcagcagaacattgccctacctgccaccaaactagtaaaattgaaagacaggaaggttcaggaacatgagaaatacatagaatattatttggtcctggataatggtgagtttaaaaggtacaatgagaatcaagatgagatcagaaagagggtatttgagatggctaattatgtcaacatgctttataaaaagctcaatactcatgtggccttagttggtatggaaatctggactgacaaggataagataaagataaccccaaatgcaagcttcaccttggagaatttttctaaatggagggggagtgttctctcaagaagaaagcgtcatgatattgctcagttaatcacagcaacagaacttgctggaacgactgtgggtcttgcatttatgtctacaatgtgttctccttattctgttggcgttgttcaggaccacagcgataatcttcttagagttgcagggacaatggcacatgaaatgggccacaactttggaatgtttcatgacgactattcttgcaagtgtccttctacaatatgtgtgatggacaaagcactgag

SEQ ID NO: 5172 - DNA, 1097 bp, Homo sapiens
gtcagcaggatggacctggagatgtcagggctgaagaccctggagcatgtggcagtgacagtctccatcactcacccacggcgcggcagcttggagctgaagctgttctgccccagaggcatgatgtccctcatcggcacccccggcagcatggactcggatcccaacggcttcaatgactggaccttctccactgtgcgatgctggggggagagagcccgagggacctacaggcttgtcatcagggatgtcggggatgagtcattccaggtcggcatcctccggcaatggcagctgaccctatatggctctgtgtggagtgcagtagacatcagggacagacaaaggctgttagagagtgccatgagtggaaaatacctgcacgatgacttcgccctgccctgcccaccggggctgaaaattcctgaggaagatggttacaccatcacccccaacaccctcaagaccttggtgctggtaggctgtttcaccgtcttctggaccgtttactacatgctggaagtatatgtgaaccagaggaatgtggcttccaatcaagtttgtatgagtggaccctgccactggccctatcgaagccagaaagccaaggaggaagggacagagctagaatcagtgccactttgcagcagcaaggatccagacgaagtggaaacagagagcaggggccctcccaccacctctgacctccttgccccagacctgctggagcaaggggactggagcctgtcccagaacaagagcgccctggactgccctcatcagcacctagacgtaccgcacgggaaggaggagcagatctgctgacctcagggcctgacagtgtgggacaggctcttctttcccaaaattagggagctcttgacagaaagcagttctgatgcttacatctggaatctgaggcatcctctgactccactcaaagagggtgagggccttcttaagatacaaatggcggaggattgctgccagagaagtctggtcagagccacagggtctgcctccagccaaacgggagcttttggtgagaaggtgttggacaggggattggcgccccctttgggttggcctccatcctc

SEQ ID NO: 5173 - DNA, 1688 bp, Homo sapiens
ggaacaattgcctattaaagtacagtcccggaggaacacctaccgctataaaggtgctgagtaacgtggaatctggattctcactgaagccctgtgccctttcagaaattggttgccacatgaacatcttccagcatcttgcgttctcagatgtggatgttgccagggttctcactccagatgcttttgtgtgtcggaccatctgcacctatcaccccaactgcctcttctttacattctatacaaatgtatggaaaatcgagtcacaaagaaatgtttgtcttcttaaaacatctgaaagtggcacaccaagttcctctactcctcaagaaaacaccatatctggatatagccttttaacctgcaaaagaactttacctgaaccctgccattctaaaatttacccgggagttgactttggaggagaagaattgaatgtgacttttgttaaaggagtgaatgtttgccaagagacttgcacaaagatgattcgctgtcagtttttcacttattctttactcccagaagactgtaaggaagagaagtgtaagtgtttcttaagattatctatggatggttctccaactaggattgcgtatgggacacaagggagctctggttactctttgagattgtgtaacactggggacaactctgtctgcacaacaaaaacaagcacacgcattgttggaggaacaaactcttcttggggagagtggccctggcaggtgagcctgcaggtgaagctgacagctcagaggcacctgtgtggagggtcactcataggacaccagtgggtcctcactgctgcccactgctttgatgggcttcccctgcaggatgtttggcgcatctatagtggcattttaaatctgtcagacattacaaaagatacacctttctcacaaataaaagagattattattcaccaaaactataaagtctcagaagggaatcatgatatcgccttgataaaactccaggctcctttgaattacactgaattccaaaaaccaatatgcctaccttccaaaggtgacacaagcacaatttataccaactgttgggtaaccggatggggcttctcgaaggagaaaggtgaaatccaaaatattctacaaaaggtaaatattcctttggtaacaaatgaagaatgccagaaaagatatcaagattataaaataacccaacggatggtctgtgctggctataaagaagggggaaaagatgcttgtaagggagattcaggtggtcccttagtttgcaaacacaacggaatgtggcgtttggtgggcatcaccagctggggtgaaggctgtgcccgcagggagcaacctggtgtctacaccaaagtcgctgagtacatggactggattttagagacaacacagagcagtgatggaaaagctcagatgcagtcaccagcatgagaagcagtccagagtctaggcaatttttacaacctgagttcaagtcaaattctgagcctggggggtcctcatctgcaaagcatggagagtggcatcttctttgcatcctaaggacgaaagacacagtgcactcagagctgctgaggacaatgtctggctgaagcccgctttcagcacgccgtaaccaggggctgacaatgcgaggtcgcaactgagatctccatgactgtgtgttgtgaaataaaatggtgaaagatc

SEQ ID NO: 5174 - DNA, 1208 bp, Homo sapiens
gcctccttcctgacctcgcacccagctcggagcccggagcgtgcctcggcggcctgtcggttttcaccatggagcagctgagctcagcaaacacccgcttcgccttggacctgttcctggcgttgagtgagaacaatccggctggaaacatcttcatctctcccttcagcatttcatctgctatggccatggtttttctggggaccagaggtaacacggcagcacagctgtccaagactttccatttcaacacggttgaagaggttcattcaagattccagagtctgaatgctgatatcaacaaacgtggagcgtcttatattctgaaacttgctaatagattatatggagagaaaacttacaatttccttcctgagttcttggtttcgactcagaaaacatatggtgctgacctggccagtgtggattttcagcatgcctctgaagatgcaaggaagaccataaaccagtgggtcaaaggacagacagaaggaaaaattccggaactgttggcttcgggcatggttgataacatgaccaaacttgtgctagtaaatgccatctatttcaagggaaactggaaggataaattcatgaaagaagccacgacgaatgcaccattcagattgaataagaaagacagaaaaactgtgaaaatgatgtatcagaagaaaaaatttgcatatggctacatcgaggaccttaagtgccgtgtgctggaactgccttaccaaggcgaggagctcagcatggtcatcctgctgccggatgacattgaggacgagtccacgggcctgaagaagattgaggaacagttgactttggaaaagttgcatgagtggactaaacctgagaatctcgatttcattgaagttaatgtcagcttgcccaggttcaaactggaagagagttacactctcaactccgacctcgcccgcctaggtgtgcaggatctctttaacagtagcaaggctgatctgtctggcatgtcaggagccagagatatttttatatcaaaaattgtccacaagtcatttgtggaagtgaatgaagagggaacagaggcggcagctgccacagcaggcatcgcaactttctgcatgttgatgcccgaagaaaatttcactgccgaccatccattccttttctttattcggcataattcctcaggtagcatcctattcttggggagattttcttccccttag

SEQ ID NO: 5175 - DNA, 804 bp, Homo sapiens
  misc_feature (54)..(106): n is a, c, g, or t
  misc_feature (468)..(647): n is a, c, g, or t
acactctaccaccatgaatccactcctgatccttgcctttgtgggagctgctgnnnnnnnnnnnnnnnnnnnnnnnnnnnnnnnnnnnnnnnnnnnnnnnnnnnnngagaattctgtcccctaccaggtgtccctgaattctgggtaccacttctgcagtggctccctcctcagcgaacagtgggtggtgtcagcagctcactgctacaagtaccgcatccaggtgagactgggagagcacaacgtcgaagttctggaggggaatgagcagttcatcaatgcagccaagatcatccgccaccccaaatacaacagttggactctggacaatgacatcctgctgatcaagctctccatgcctgctgtcatcaatgcccacatgtccaccatctctctacccaccgcccctccagctgctggcaccaagttcctcatctctggctagggcaacactctgagctctggtgnnnnnnnnnnnnnnnnnnnnnnnnnnnnnnnnnnnnnnnnnnnnnnnnnnnnnnnnnnnnnnnnnnnnnnnnnnnnnnnnnnnnnnnnnnnnnnnnnnnnnnnnnnnnnnnnnnnnnnnnnnnnnnnnnnnnnnnnnnnnnnnnnnnnnnnnnnnnnnnnnnnnnnnnnnnnnnnnnnnngagttgtctcctggggctatggctgtgcccagaagaacaggcctggagtctacaccaaggtctacaactatgtggactggattaaggacaccatagctgccaacagctaaagcctctggtacctctgcagtctctataccaataaagtgaccttgct

SEQ ID NO: 5176 - DNA, 2115 bp, Homo sapiens
ggacccaagccgtcagagctgctggggacccgagccacattcttcctcacccgggtccagcccgggaatgtctggagcgcttctgatttcaccattgactccaactctctccaagtttcccttttcacaccagccaatgcagttattggccattacactctgaaaatagagatctctcagggccaaggtcacagtgtgacttacccgctgggaactttcatcctactttttaacccttggagtccagaggacgacgtctacctgccaagtgaaatactgctgcaggagtatatcatgcgagattatggctttgtttacaagggtcatgaaagattcatcacctcctggccctggaactacgggcagtttgaagaggacatcatagacatctgctttgagatcctgaacaagagcctgtatcacttaaagaacccggccaaagactgttcccagcggaacgacgtggtgtatgtgtgcagggtggtgagtgccatgatcaacagcaacgatgacaatggcgtgctgcaggggaactggggcgaggactactccaaaggggtcagtcctctggagtggaagggcagtgtggccatcctacagcagtggtcagccaggggcgggcagcctgtgaagtacggacagtgctgggtcttcgcctctgttatgtgcaccgtaatgagatgcttaggtgttccaacccgtgttgtttccaatttccgttccgcgcacaacgtggataggaacttgaccatcgatacgtactatgaccgaaatgccgagatgctgtcaactcagaaacgagacaaaatatggaacttccacgtctggaatgagtgctggatgatccggaaagatctcccaccaggatacaacgggtggcaggttctggaccccactccccagcagaccagcagtgggctgttctgctgtggccctgcctctgtgaaggccatcagggaaggggatgtccacctggcctatgacaccccttttgtgtatgccgaggtgaacgccgatgaagtcatttggctccttggggatggccaggcccaggaaatcctggcccacaacaccagttccatcgggaaggagatcagcactaagatggtggggtcagaccagcgccagagcatcaccagctcctacaagtacccagaaggatcccctgaggagagagctgtcttcatgaaggcttctcggaaaatgctgggcccccaaagagcttctttgcccttcctggatctcctggagtctgggggtcttagggatcagccagcgcagctgcagcttcacctggccaggatacccgagtggggccaggacctgcagctgctgctgcgtatccagagggtgccagacagcacccaccctcgggggcccatcggactggtggtgcgcttctgtgcacaggccctgctgcatgggggtggtacccagaagcccttctggaggcacacagtgcggatgaacctggactttgggaaggagacacagtggccgctcctcctgccctacagcaattacagaaacaagctaacggacgaaaagctcatccgcgtgtctggcatcgcggaggttgaagagacagggaggtccatgctggtcctaaaagatatctgtctggagcctccccacttgtctattgaggtgtctgagagggctgaggtgggcaaggcgctgagagtccatgtcaccctcaccaacaccttaatggtggctctgagcagctgcacgatggtgctggaaggaagcggcctcatcaatgggcagatagcaaaggaccttgggactctggtggccggacacaccctccaaattcaactggacctctacccgaccaaagctggaccccgccagctccaggttctcatcagcagcaacgaggtcaaggagatcaaaggctacaaggacatcttcgtcactgtggctggggctccctgagacccgccctccagctgccctccctggcacccctgccccacctggctcctttctactcctggctatgtcgtcttggctccacctctgtcctctctctagcctgcctgggaatgaatgaagctctgttagaaacaccgtgtgctttgggaagagacaataaagatgtctttattt

SEQ ID NO: 5177 - DNA, 567 bp, Homo sapiens
ggaaaaagcagcttgtagagattgagaaggttgttctacaccctaactactcccaggtagatattgggctcatcaaactcaaacagaagtgtctggctggggacaaagtgacaactttaaacttactgaccatctgaagtatgtcatgctgcctgtggctgaccaatacgattgcataacgcattatgaaggcagcacatgccccaaatggaaggcaccgaagagccctgtaggggtgcagcccatactgaacgaacacaccttctgtgtcggcatgtctaagtaccaggaagacacctgctatggcgatgcgggcagtgcctttgccgttcacgacctggaggaggacacctggtacgcggctgggatcctaagctttgataagagctgtgctgtggctgagtatggtgtgtatgtgaaggtgacttccatccagcactgggttcagaagaccatagctgagaactaatgcaaggctggccggaagcccttgcctgaaagcaagatttcagcctggaagagggcaaagtggacgggagtggacaggagtggatgcgataagatgtg

SEQ ID NO: 5178 - DNA, 1433 bp, Homo sapiens
ggccgctgtagtcactgccctggaggacgtgttccaggccctgggctttgagagctgcgagaggagggaggtcccggtccagggcttcctcgaggaactggcttggttccaggagcagctggatgcccacgggcgccctgtggggtgtgccttagtggccttgatgcccccagagggcagctgaggcagccacagcagctggtccgggagctgagcggctgccgggccctgcggggctgccccaaagtcttcctgctgctctcaagtggtcctgggtcctccctggagcccggagccttccttgctggcctgagagagctgtgtggccgctctcctcactggtccctggtgcagctgctgacgaagctcttccgcagggtggctgaagagtccgcagggggcacctgctgccccgtccttcggagctccttgaggggggcactgtgcctgggaggcgtggagccctggaggcctgagccggcccccggtcccagcacacagtatgacctgtccaaggccagggctgccctcctcctggctgtgatccaaggccggcctggggcccagcatgacgtggaggcgctggggggcctgtgctgggccctgggctttgagaccaccgtgagaacggaccctacagcccaggctttccaggaggagctggcccagttccgggagcaactggacacctgcaggggccctgtgagctgtgcccttgtggccctgatggcccatgggggaccacggggtcagctgctgggggctgacgggcaagaggtgcagcccgaggcactcatgcaggagctgagccgctgccaggtgctgcagggccgccccaagatcttcctgttgcaggcctgccgtgggggaaacagggatgctggtgtggggcccacagctctcccctggtactggagctggctgcgggcacctccatctgtcccctcccatgcagatgtcctgcagatctacgctgaggcccaaggcagctcctgcaggggcacccctccagggagctctgaccaagcagacatcctgacggtctactcagccgcagagggttatgtggcctatcgcgatgacaagggctcagactttatccagacactggtggaggtcctcagagccaaccccgggagagaccttctggagctgctgactgaggtcaacaggcgggtgtgcgagcaggaggtgctgggccccgactgcgatgaactccgcaaggcctgcctggagatccgcagctcgctccggcgccggctctgcctccaggcctgagggtgcggcggccacgggggcgctgctgagacggtggccagatcccagcgccattcttgcctccatccaccccccatccccccggtttcctcatctgagagcgaggcgtggcagcgtgggggtggccgtgcaataaatatctgccgtgaacagtg

SEQ ID NO: 5179 - DNA, 1015 bp, Homo sapiens
cgggggagaagatggcggcggcgggggaggcagcgtgagcagccggaggagcgccgagtcccattgaaaccggcagccatggccctccacagcccgcagtatatttttggagattttagccctgatgaattcaatcagttctttgtgactcctcgatcttcagttgagcttcctccatgcagtggaacagttctgtgtggcacacaagctggggataaactacctgatggacaagaatatcggagaattgagtttggtgtcaatgaagtcattgaacccagtgacactttgctgagaacccccagctacagtatttcaagcacactgaaccctcaggcccccgaatttattctcggttgtacagcttccaaaacaacccctgatggtatcactaaagaagcaagctatggctccatcgaccagtacccaggctgtgccctcgctttggatggaagttctagtgtggaggcggaagttttggaaaatgatggtgtctcaggtggtcttggacaaagggagcgtaaaaagaagaaaaagcagccacctggatattacagctgtttgaaagatggtggcgatgatagtatttccacagaagccctggctgcgcatcgatgaccagacagtcaaggtgatcaaccagtaccaggtggtgaaaccaactgctgaacgcacagcccatctcctgtattactgccgagtggacctgctgtaaaccctgtgtgcgctgtgtgtgagcccagtgtccgctttgtaggacaccacctcacactcactttccgcctctctttattggctctttagagagaaactctttctccctttgcaaaaatgggctagaatgaaaaggagatgccttggggttcgtgcacaacatagcttctgttgactctaactttgaaatcaaaatcatttggttgaaacagactgtcgcttgattttaaaaaacacacaaaaacccatatttctgaaataatgctgattcctgagataagaaagtggatttgatccccag

SEQ ID NO: 5180 - DNA, 4509 bp, Homo sapiens
taaggcggtggcggcggcgccgggacgggggaggggcgcgccggaaccggaaccgacctgcgccggaaccggaacggagagcgggttgccagggcccgaagagggctggctgcggcggtctcgctcggctgtccgttccttgctggagaatttggccacaaagagttgccaagatagctgggccaggaagaaagcgccgcagccctgacccagacgctgttgccgaccccggggcactctggctgtcgaccaagcggctcaagatgtctggcggggccagtgccacaggcccaaggagagggcccccaggactggaggacaccactagtaagaagaagcagaaggatcgagcaaaccaggagagcaaggatggagatcctaggaaagagacagggtctcgatatgttgcccaggctggtcttgaacctctggcctcaggtgatccttctgcctcagcctcccatgcagctgggatcacaggctcacgccaccgtacccggctgttctttccttcatcgtcagggtcagcatccactcctcaagaggagcagaccaaagagggagcttgtgaagaccctcatgatctcttggctactcccactccagagttgttgctcgattggaggcagagtgcagaagaggtgattgtcaagcttcgtgtgggagtaggtcccctgcagctggaggatgtagatgctgctttcacagatacagactgtgtggtgcggtttgcaggtggtcagcagtggggtggtgtcttctatgctgagataaaaagctcttgtgctaaagtgcaaacccgcaagggcagtctcctgcacctgacactgcccaaaaaggtgcctatgctcacgtggccctccctcctggttgaggctgatgaacagctttgcataccaccgctgaactcccaaacctgtctcctgggctcagaggagaatttagcccctttggcaggagagaaagcagtgcctcccgggaatgacccagtctctccagccatggtccggagcagaaaccctgggaaagatgactgtgccaaggaggagatggcagtggcagcagatgctgcaaccttggtggatgagcccgagtcgatggtgaacctggcgtttgtcaagaatgactcgtatgagaagggcccggattcagtggtggtgcacgtgtacgtgaaggagatctgcagggacacctcaagagtacttttccgtgagcaggacttcacgctcatcttccagaccagggatggaaacttcctgaggctgcacccgggctgtgggccccacaccaccttccgttggcaggtgaagctcaggaatctgattgagccagagcagtgcaccttctgtttcacggcttctcgcatcgacatctgccttcgtaagaggcagagtcagcgctgggggggcctggaggccccggctgcacgaggtgcagtgggtggtgcaaaggttgccgtgccgacaggtccaacccctctggattcaaccccaccaggaggtgctccccaccccctgacaggccaggaggaggcccgggctgtggagaaggataaatccaaggcacgatctgaggacacagggctagacagtgtggcaacccgcacacccatggagcatgtaaccccaaagccagagacacacctggcctcgcccaagcctacatgcatggtgcctcccatgccccacagcccagttagtggagacagcgtggaggaggaggaagaggaagagaagaaggtgtgtctgccaggcttcactggccttgtcaatttaggcaacacctgcttcatgaacagcgtcattcagtctctgtccaacactcgggaactccgggacttcttccatgaccgctcctttgaggctgagatcaactacaacaacccactagggactggtgggcgtctggccattggctttgccgtgctgcttcgggcgctgtggaagggcacccaccatgccttccagccttccaagttgaaggccattgtggcgagtaaggccagccagttcacaggctatgcacagcatgatgcccaggagttcatggctttcctgctggatgggctgcacgaggacctgaatcgcattcagaacaagccctacacagagaccgtggattcagatgggcggcccgatgaggtggtagctgaggaagcatggcagcggcacaagatgaggaatgactctttcatcgtggacctatttcaggggcagtacaagtcgaagctggtgtgccctgtgtgtgccaaggtctccatcacttttgacccgtttctttatctgccggtgcccttgccacaaaagcaaaaggttctccctgtcttttattttgcccgagagccccacagcaagcccatcaagttcctggtgagcgtcagcaaggagaactccactgcgagcgaagtattggactccctctctcagagtgttcatgtgaagcctgagaacctgcgtttggcagaggtaattaagaatcgttttcatcgtgtgttcctaccctcccactcactggacactgtgtccccatctgatacgctcctctgctttgagctgctatcctcagagttggctaaggagcgggtagtggtgctagaggtgcaacagcgcccccaggtgcccagcgtccccatctccaagtgtgcagcctgccagcggaagcaacagtcggaggatgaaaagctgaagcgctgtacccggtgctaccgtgtgggctactgcaaccagctctgccagaaaacccactggcctgaccacaagggcctctgccgacctgagaacattggctaccccttcctggtcagtgtacctgcctcacgcctcacttatgcccgcctcgctcagttgctagagggctatgcccggtactctgtgagtgtattccagccaccctttcagccaggccgcatggccttggagtctcagagccctggctgcaccacactgctctccacaggttccctggaggctggggacagcgagagagaccccattcagccacctgagctccagctggtgacccctatggctgagggggacacagggcttccccgggtgtgggcagcccctgaccggggtcctgtgcccagcaccagtggaatttcttctgagatgctggccagtgggcccattgaggttggctccttgccagctggcgagagggtgtcccgacccgaagctgctgtgcctgggtaccagcatccaagtgaagctatgaatgcccacacaccccagttcttcatctataaaattgattcatccaaccgagagcagcggctagaggacaaaggagacaccccactggagctgggtgacgactgtagcctggctctcgtctggcggaacaatgagcgcttgcaggagtttgtgttggtagcctccaaggagctggaatgtgctgaggatccaggctctgccggtgaggctgcccgggccggccacttcaccctggaccagtgcctcaacctcttcacacggcctgaggtgctggcacccgaggaggcctggtactgcccacagtgcaaacagcaccgtgaggcctccaagcagctgttgctatggcgcctgccaaatgttctcatcgtgcagctcaagcgcttctcctttcgtagttttatctggcgtgacaagatcaatgacttggtggagttccctgttaggaacctggacctgagcaagttctgcattggtcagaaagaggagcagctgcccagctacgatctatatgctgtcatcaaccactatggaggcatgattggtggccactacactgcctgtgcacgcctgcccaatgatcgtagcagtcagcgcagtgacgtgggctggcgcttgtttgatgacagcacagtgacaacggtagacgagagccaggttgtgacgcgttatgcctatgtactcttctaccgccggcggaactctcctgtggagaggccccccagggcaggtcactctgagcaccacccagacctaggccctgcagctgaggctgctgccagccaggcttcccggatttggcaggagctggaggctgaggaggagccggtgcctgaggggtctgggcccctgggtccctgggggccccaagactgggtgggccccctaccacgtggccctaccacaccagatgagggctgcctccggtactttgtcctgggcaccgtggcggctttggtggccctcgtgctcaacgtgttctatcctctggtatcccagagtcgctggagatgagctcgcctgcaggcagctgctgtgagctggcctacctgcctgccccaggccatgcctgcctttgttgtggggaacacctctgggctttgggcctcagcttatgcatctggtgggagagggtggggaggttgtggcccctgcaggggcagagtatcctagggtgtgtatccatctggctgtctgtccattcatcctgctgctctgacccttggcctcaggcttggccctgcccaagctacttcctgtacttaaaagtgttaataaaaccagactattcaggccc

SEQ ID NO: 5181 - DNA, 2541 bp, Homo sapiens
gggagctggtccctgcgctccctgcgccctggggatgcccctgccgccctgacgcccgccagcctgagccaccggcgcatgtgaccgcgcgtccgccccagtcccatccgtaggcgcccggcgcccggccccgcagcggcctcgttgtccccgccggcccccgcccggtctcccgcgctgccacccgccgccggccctgccgccatgcaggcgcgagcgctgctcctggccgcgttggccgcgctggcgctggcccgggagccccctgcggcgccgtgtcccgcgcgctgcgacgtgtcgcggtgtcccagcccccgctgccccggcggctacgtgcccgacctctgcaactgctgcctggtgtgcgccgccagcgagggcgagccctgtggcggccctctggactcgccttgcggcgagagcctggagtgcgtgcgcggcctatgccgctgccgctggtcgcacgccgtgtgtggcaccgacgggcacacctatgccaacgtgtgcgcgctgcaggcggccagccgccgcgcgctgcagctctccgggacgcccgtgcgccagctgcagaagggcgcctgcccgttgggtctccaccagctgagcagcccgcgctacaagttcaacttcattgctgacgtggtggagaagatcgcaccagccgtggtccacatagagctcttcctgagacacccgctgtttggccgcaacgtgcccctgtccagcggttctggcttcatcatgtcagaggccggcctgatcatcaccaatgcccacgtggtgtccagcaacagtgctgccccgggcaggcagcagctcaaggtgcagctacagaatggggactcctatgaggccaccatcaaagacatcgacaagaagtcggacattgccaccatcaagatccatcccaagaaaaagctccctgtgttgttgctgggtcactcggccgacctgcggcctggggagtttgtggtggccatcggcagtcccttcgccctacagaacacagtgacaacgggcatcgtcagcactgcccagcgggagggcagggagctgggcctccgggactccgacatggactacatccagacggatgccatcatcaactacgggaactccgggggaccactggtgaacctggatggcgaggtcattggcatcaacacgctcaaggtcacggctggcatctcctttgccatcccctcagaccgcatcacacggttcctcacagagttccaagacaagcagatcaaagactggaagaagcgcttcatcggcatacggatgcggacgatcacaccaagcctggtggatgagctgaaggccagcaacccggacttcccagaggtcagcagtggaatttatgtgcaagaggttgcgccgaattcaccttctcagagaggcggcatccaagatggtgacatcatcgtcaaggtcaacgggcgtcctctagtggactcgagtgagctgcaggaggccgtgctgaccgagtctcctctcctactggaggtgcggcgggggaacgacgacctcctcttcagcatcgcacctgaggtggtcatgtgaggggcgcattcctccagcgccaagcgtcagagcctgcagacaacggagggcagcgcccccccgagatcaggacgaaggaccaccgtcggtcctcagcagggcggcagcctcctcctggctgtccggggcagagcggaggctgggcttggccaggggcccgaatttccgcctggggagtgttggatccacatcccggtgccggggagggaagcccaacatccccttgtacagatgatcctgaaagtcacttccaagttctccggatattcacaaaactgccttccatggaggtcccctcctctcctagcttcccgcctctgcccctgtgaacacccatctgcagtatcccctgctcctgcccctcctactgcaggtctgggctgccaagcttcttcccccctgacaaacgcccacctgacctgaggccccagcttccctctgccctaggacttaccaagctgtagggccagggctgctgcctgccagcctggggtccctggaggacaggtcacatctgatccctttggggtgcgggggtggggtccagcccagagcaggcactgagtgaatgccccctggctgcggagctgagccccgccctgccatgaggttttcctccccaggcaggcaggaggccgcggggagcacgtggaaagttggctgctgcctggggaagcttctcctccccaaggcggccatggggcagcctgcagaggacagtggacgtggagctgcggggtgtgaggactgagccggcttccccttcccacgcagctctgggatgcagcagccgctcgcatggaagtgccgcccagaggcatgcaggctgctgggcaccaccccctcatccagggaacgagtgtgtctcaaggggcatttgtgagctttgctgtaaatggattcccagtgttgcttgtactgtatgtttctctactgtatggaaaataaagtttacaagcacacggttctcagcca

SEQ ID NO: 5182 - DNA, 1401 bp, Homo sapiens
ctttcccgagtccgtttgaggaagtccccgaggcgcacagagcaagcccacgcgagggcacctctggaggggagcgcctgcaggaccttgtaaagtcaaaaatgtcagaaacttccaggaccgcctttggaggcagaagagcagttccacccaataactctaatgcagcggaagatgacctgcccacagtggagcttcagggcgtggtgcccggggcgtcaacctgcaagagtttcttaatgtcacgagcgttcacctgttcaaggagagatgggacactaacaaggtggaccaccacactgacaagtatgaaaacaacaagctgattgtccgcagagggcagtctttctatgtgcagattgacttcagtcgtccatatgaccccagaagggatctcttcagggtggaatacgtcattggtcgctacccacaggagaacaagggaacctacatcccagtgcctatagtctcagagttacaaagtggaaagtggggggccaagattgtcatgagagaggacaggtctgtgcggctgtccatccagtcttcccccaaatgtattgtggggaaattccgcatgtatgttgctgtctggactccctatggcgtacttcgaaccagtcgaaacccagaaacagacacgtacattctcttcaatccttggtgtgaagatgatgctgtgtatctggacaatgagaaagaaagagaagagtatgtcctgaatgacatcggggtaattttttatggagaggtcaatgacatcaagaccagaagctggagctatggtcagtttgaagatggcatcctggacacttgcctgtatgtgatggacagagcacaaatggacctctctggaagagggaatcccatcaaagtcagccgtgtggggtctgcaatggtgaatgccaaagatgacgaaggtgtcctcgttggatcctgggacaatatctatgcctatggcgtccccccatcggcctggactggaagcgttgacattctattggaataccggagctctgagaatccagtccggtatggccaatgctgggtttttgctggtgtctttaacacatttttacgatgccttggaataccagcaagaattgttaccaattatttctctgcccatgataatgatgccaatttgcaaatggacatcttcctggaagaagatgggaacgtgaattccaaactcaccaaggattcagtgtggtacccatccattcctgctgctggaatgtctccaaagagcgcctgaagccctcattccactcaagtctcacttgagagtaaaccaaggggagtttgggggtaaaatgtcagaggtcattgtaataacttcttgggaaattaggcagaaagggaaaaaaagtgggaatcatttaataaaccacatagaaa

SEQ ID NO: 5183 - DNA, 1122 bp, Homo sapiens
ctctgtcacccccgggcccacagcacagcccagggccatgctcctgttctcagtgttgctgctcctgtccctggtcacgggaactcagctcggtccacggactcctctcccagaggctggagtggctatcctaggcagggctaggggagcccaccgccctcagccccctcatccccccagcccagtcagtgaatgtggtgacagatctattttcgagggaagaactcggtattccagaatcacaggggggatggaggcggaggtgggtgagtttccgtggcaggtgagtattcaggcaagaagtgaacctttctgtggcggctccatcctcaacaagtggtggattctcactgcggctcactgcttatattccgaggagctgtttccagaagaactgagtgtcgtgctggggaccaacgacttaactagcccatccatggaaataaaggaggtcgccagcatcattcttcacaaagactttaagagagccaacatggacaatgacattgccttgctgctgctggcttcgcccatcaagctcgatgacctgaaggtgcccatctgcctccccacgcagcccggccctgccacatggcgcgaatgctgggtggcaggttggggccagaccaatgctgctgacaaaaactctgtgaaaacggatctgatgaaagcgccaatggtcatcatggactgggaggagtgttcaaagatgtttccaaaacttaccaaaaatatgctgtgtgccggatacaagaatgagagctatgatgcctgcaagggtgacagtggggggcctctggtctgcaccccagagcctggtgagaagtggtaccaggtgggcatcataagctggggaaagagctgtggagagaagaacaccccagggatatacacctcgttggtgaactacaacctctggatcgagaaagtgacccagctagagggcaggcccttcaatgcagagaaaaggaggacttctgtcaaacagaaacctatgggctccccagtctcgggagtcccagagccaggcagccccagatcctggctcctgctctgtcccctgtcccatgtgttgttcagagctattttgtactgataataaaatagaggctattctttcaa

SEQ ID NO: 5184 - DNA, 968 bp, Homo sapiens
gatggtgatgtgattggcgtcaattcattgagggtgactgatggaatctcctttgcaattccttcagatcgagttaggcagttcttggcagaataccatgagcaccagatgaaaggaaaggcgttttcaaataagaaatatctgggtctgcaaatgctgtccctcactgtgccccttagtgaagaattgaaaatgcattatccagatttccctgatgtgagttctggggtttatgtatgtaaagtggttgaaggaacagctgctcaaagctctggattgagagatcacgatgtaattgtcaacataaatgggaaacctattactactacaactgatgttgttaaagctcttgacagtgattccctttccatggctgttcttcggggaaaagataatttgctcctgacagtcatacctgaaacaatcaattaaatatcttgttttaaagtgggattatctaaaaaaaaaaaaaccagttatatcacgtggtttgtattggagatgtgccaaacatggcaagaagtttttggatctttttcttacaaagaaaaatggatggttatcaacccaaatgcccatcaatgacagactggataaagcaaatgtggtacatatacaccatggaatactatgcagccataaaaagcaacagtcctctgcagggacatggatggagctggaaaccattatcctcagcaaactaacgcaggaacagaaaaccaaatactgcatgttctcacttataagtgggagctgaacaatgagaacacatgaacatagggaggggaacaacacacactggggcctggcagtgggtagggtagagggagggagagcattagcaaaaatagctaatgcatgctgggcttaacacccaggtgatgggttgattgataggtgcagcaaaccatcatggcacacatttacctatgaaacaaacctgcacatcctgcatatgtacctcagaa

SEQ ID NO: 5185 - DNA, 879 bp, Homo sapiens
gtgaatgtgtagaatcaaggataattaaggcttcagcacatgtttgttcacaacagtgttctggacatggagtgtgtgattccagaaacaagtgccattgttcgccaggctataagcctccaaactgccaaatacgttccaaaggattttccatatttcctgaggaagatatgggttcaatcatggaaagagcatctgggaagactgaaaacacctggcttctaggtttcctcattgctcttcctattctcattgtaacaaccgcaatagttttggcaaggaaacagttgaaaaagtggttcgccaaggaagaggaattcccaagtagcgaatctaaatcggaaggtagcacacagacatatgccagccaatccagctcagaaggcagcactcagacatatgccagccaaaccagatcagaaagcagcagtcaagctgatactagcaagtaagtgaattagggggcattttttttatataataagtatatgttaaaaattgagatgaacaaattgataattaacaattacttgctaactattaactgagtagccacaattagtaaagtactgtaccttaaaacaacctatttgctgatctagtaacttgcgagtatttgtctaaataagacaatatcttctttcctgcagtttagttaatatgtgttgggagtttatttttgggaaacaaaggaaaacatttttggtgaaatgtttaaggagctaattcataaaaaggatctttttgtattctttttcttggagtacaccaaggggaagtttacttttttatttggagatggcacaactagaaactaatatgtatgctgatgaataactgagtgaatgctcgcatagatcacctgggaagaatttgttg

SEQ ID NO: 5186 - DNA, 2038 bp, Homo sapiens
agttgccggtgagcttgggagaaccgtgggcgctgaggcgctgtaggtggctccctcccaccccaacgatttcagagagaaacaagtcggaatctgagaagtgaggctccagataaactgtaaactgctggaagggggcgatggctgtggccctgggttgtgcaatccaggcatccttgaatcaaggctctgtgtttcaagaatatgatactgactgtgaagttttccgtcagcgcttcaggcagttccagtacagagaagcagctgggcctcatgaagcatttaacaaactctgggagctttgctgtcaatggctgaagccaaagatgcgctctaaggaacaaatcctggagctgctagtgttggagcaattcctaactatcctgcccacagagatagagacctgggtgagggagcactgcccagagaatagagaaagagttgtgtcactgatagaagacttacagagagaacttgagataccagagcagcaggtaagaaaagaatgtgggatctttgtgattggtccaaaggaagtagctgaggcagctgggactagaccacacatttgtctctatgtcattccccagcctcaagatttctccagagtcctcttcctttttctcttctgctgaactcagcaaatgagtcagtgcttttaactctatcagactcaattccccttctataacaaatagtttataatgtccactttactatgcacaaatgaaattgatagacaacataatctacccacatacatcaacccaaagcatcagtaaattgctccatggcctgaaggccaattctagccataccctgtttatctgtatactctgtatgtaatggtttttttatcttgttgaaaggtcattgaaaaaaagaggaaggagaagaactgacagtgaatgtgccccacagtgcctaaaatatttactatttggctctttataaagtttgccaaccctgaatcaagtctagaaggaatataaaggaaaagaaacatagtttgttataaattgatagggatttgtacatatatgtgcttgggcctgaccgaatgtcatgaagttgtcagatgtttgcatctatgcttagaatcattgtgaatgggacagccagaaattcagactgataaagctcaagtactacgaacagtgttgctcctcgtcatgtgattttccaaaatggcatacgactctaggtaaatctgaacaataagcagtgtagtctttgcttttcacattagtgcattcctagaaaatttcatttgtgctgaaactatgcaaaacaaaacaaacaattgtacttatttgaccaacaaggtggggttcttgacaggttctttttactcacatgaatgtttgagtgggacattccacacttggtagggacctagaacaattctgcattgtaaattatgttccattaaattctgatagccaccacctgtcagcatatccaaaactccccatggggacagtggcactgtctgccattcagaatgactgtgtaaagcctcttttcagaagtgccgtgactgagagagggcagtatctttgggaaaagggagcaggagcttccagatgggcatcagggatactccagtcttgtctatgggggttctctgcaggagctgttagcttcagggctcctgaacaggagtcttctgaagttttctgtctccctagggtacttgggttggtggttgcccttcctttctctgtctccttggttttgtttactatataagattttatcttcatgtggtctagacatttgctgctgaatacagtcactactagtcatgtacagctcttgagcccttgaaatatggccaatacaaattgagatctgctgtaagtatgaaatacacaccacatgcagaagacttggtatgaaaaaagtaggtgaaatatctcactaataattgttcatattgattacatgttgaaatcctgattgtttgcactggattaagtaacacgtactattaagattggccttactttttaaaaaatttattcatatggccact

SEQ ID NO: 5187 - DNA, 291 bp, Homo sapiens
atgggtataaagcctcctaagggggtcattctctatggtccacctggcacagcacttatcagaccaggccacattaacagaaatatcgagttcccccttcatgatgaaaagactaggaagcacatctttcagattcacacaagcaggatgacgctggctgatgatacaaccctggacgatttgattatggctaaagatgacctctctggtgctgacatcaagagaagctggtctgtggccttaagagaatgtagaatgaaagtaacaaatgaagacttcaaaaaaatctaa

SEQ ID NO: 5188 - DNA, 2838 bp, Homo sapiens
atgggccccactggtgattctgcagatagtccctgcacatcccggagaagagcagacacggtgtggtggcaccagggctatgacaaggaggaagggggaagcctggtcctgcagcctcgggaagccggggcagctgtgggaagccggggcagcggctatgggaagccggggcagctgggggatctgcagaacacacccactgcatgctggacagcagcccccttcctgggcctggggacatccatgtccctctgtgcacaggcttcatcattctctgggtgcacggtaacgaccccggaggacgaggacggcgactacgaggagctggtgctagccttgcgttccgaggaggacggcctggccgaagcacccgagcacggaaccacagccaccttccaccgctgcgccaaggatccgtggaggttgcctggcacctacgtggtggtgctgaaggaggagacccacctctcgcagtcagagcgcactgcccgccgcctgcaggcccaggctgcccgccggggatacctcaccaagatcctgcatgtcttccatggccttcttcctggcttcctggtgaagatgagtggcgacctgctggagctggccttgaagttgccccatgtcgactacatcgaggaggactcctctgtctttgcccagagcatcccgtggaacctggagcggattacccctccacggtaccgggcggatgaataccagccccccggcctttctttccactgttccctctgcctggtgtggcctggctatggaagggagggaggaggagcggccatggaaaacggtctgcattctagcagggacttgcagcctcctgaccctgtcccagcaggacagtgggctggtgtgagcgggcaggaaccgcctgcacttagaaggtgtggggctgcctccccgagcttccatctgccgctggggccacaccccaggcccagggatgggaccccacagtggtcacatcatcttgcagcagaacccagactcgacggaggcagcctggtggaggtgtatctcctagacaccagcatacagagtgaccaccgggaaatcgagggcagggtcatggtcaccgacttcgagaatgtgcccgaggaggacgggacccgcttccacagacaggccagcaagtgtgacagtcatggcacccacctggcaggggtggtcagcggccgggatgccggcgtggccaagggtgccagcatgcgcagcctgcgcgtgctcaactgccaagggaagggcacggttagcggcaccctcataggcctggagtttattcggaaaagccagctggtccagcctgtggggccactggtggtgctgctgcccctggcgggtgggtacagccgcgtcctcaacgccggctgccagcgcctggcgagggctggggtcgtgctggtcaccgctgccggcaacttccgggacgatgcctgcctctactccccagcctcagctcccgaggtcatcacagttggggccaccaatgcccaggaccagccggtgaccctggggactttggggaccaactttggccgctgtgtggacctctttgccccaggggaggacatcattggtgcctccagcgactgcagcacctgctttgtgtcacagagtgggacatcacaggctgctgcccacgtggctggcattgcagccatgatgctgtctgccgagccggagctcaccctggccgagttgaggcagagactgatccacttctctgccaaagatgtcatcaatgaggcctggttccctgaggaccagcgggtactgacccccaacctggtggccgccctgccccccagcacccatggggcaggttggcagctgttttgcaggactgtgtggtcagcacactcggggcctacacggatggccacagccatcgcccgctgcgccccagatgaggagctgctgagctgctccagtttctccaggagtgggaagcggcggggcgagcgcatggagcccattctaaagcagattcccatttccgtctttgactctaaggcccaagggggcaagctggtctgccgggcccacaacgcttttgggggtgagggtgtctacgccattgccaggtgctgcctgctaccccaggccaactgcagcgtccacacagctccaccagctgaggccagcatggggacccgtgtccactgccaccaacagggccacgtcctcacaggctgcagctcccactgggaggtggaggaccttggcacccacaagccgcctgtgctgaggccacgaggtcagcccaaccagtgcgtgggccacagggaggccagcatccacgcttcctgctgccatgccccaggtctggaatgcaaagtcaaggagcatggaatcccggcccctcaggagcaggtgaagaggcccaaggatgtcggagggagaaatgaagtgtgggtgggggtcccgggccacgctagacatgtgctttcttttcctcgggctctggcaggtgaccgtggcctgcgaggagggctggaccctgactggctgcagtgccctccctgggacctcccacgtcctgggggcctacgccgtagacaacacagggttagcaggtggtcaccagggatcggggaggaaggggtgtggcttgcaggaaggcgaaaatctggactagcaaatagggaaggggacccatgtgagcaacgctggccactaggaatgagactgagacctgtgggatctagcaagaagcccagtgtgaccagcgacacgatctatgctggggaccacttgggagagccaaaagctttggtggagatgaatggagaccatcaacctaagttcagcatcctcctctaa

SEQ ID NO: 5189 - DNA, 1077 bp, Homo sapiens
gccatcctgcggcctgccgagcgccgggaacgccgcgacccggggccggtgctgccatctgcggacagctcccgggatggcgcggcccggcgccggggaggctcgcgaatcgcggtccagagttggggctcccaccggaacccgaggccacctttgcagcccatagggaagaaggctaggatagttgtggccgtccggaaaacacccggggagttagcagagggtcagcctctcacactatgctatctcactgacccagcaaagtcttctctttctctgaccacacaatccttttcacgggaacacaaggacatagacaaacacttcatggtggaaaaccttcctggagtgagtcagccagccctgaggatggtgtgccttatagctcccctcccagtggagcaggtgtctgagagtacagtgcagccctgcccttctgtccaccctacagagcccacggccatggcagcccaggcagctggtgtatctaggcagcgggcagccactcaaggtcttggctccaaccaaaacgctttgaagtacttgggccaggatttcaagaccctgaggcaacagtgcttggactcaggggtcctatttaaggaccctgagttcccagcatgtccatcagctttgggctacaaggatcttggaccaggctctccgcaaactcaaggcatcatctggaagcggcccacggagttgtgtcccagccctcagtttatcgttggtggagccacgcgcacagacatttgtcagggtggtctagaacaaacgcagcagcctctgtggtggctgccccggggagcccagccgctgcagtggtggtttttaatgaacagagcggaaaggggctggggagtccaatctcctgaaaggagccaggtgcagactgagcctttgccagtagaagaggagattcacagcgccaaggctataacccagagcgtcaggtggactctcaagggtgcacatcactcaggaaacttcagcgacccagccagtccctccactgctcgttccagcacagtctctctcccttgcattttggcctatgcacgtctcagagcatcttga

SEQ ID NO: 5190 - DNA, 285 bp, Homo sapiens
atgaagatgactgagcagcacaatcaggaatacagccaagggaaacacagcttcacaatggccatgaacgcctttggagacatgaccactgaagaattcaggcaggtgatgaatggttttcaataccagaagcacaggaaggggaaacagttccaggaacgcctgcttcttgagatccccacatctgtggactggagagagaaaggctacgtgactcctgtgaaggatcaggcttcaaagctgtctgggccaagacgtcaatttagctgcatcatgggtcaatga

SEQ ID NO: 5191 - DNA, 821 bp, Homo sapiens
attgtggaacagcaccgcttaaggatgtgttgcaagggtctcggattatagggggcaccgaagcacaagctggcgcatggccgtgggtggtgagcctgcagattaaatatggccgtgttcttgttcatgtatgtgggggaaccctagtgagagagagcgatcctttaatgtggacagctgtgattggaactaataatatacatggacgctatcctcataccaagaagataaaaattaaagcaatcattattcatccaaacttcattttggaatcttatgtaaatgatattgcactttttcacttaaaaaaagcagtgaggtataatgactatattcagcctatttgcctaccttttgatgttttccaaatcctggacggaaacacaaagtgttttataagtggctggggaagaacaaaagaagaaggtaacgctacaaatattttacaagatgcagaagtgcattatatttctcgagagatgtgtaattctgagaggagttatgggggaataattcctaacacttcattttgtgcaggtgatgaagatggagcttttgatacttgcaggggtgacagtgggggaccattaatgtgctacttaccagaatataaaagattttttgtaatgggaattaccagttacggacatggctgtggtcgaagaggttttcctggtgtctatattgggccatccttctaccaaaagtggctgacagagcatttcttccatgcaagcactcaaggcatacttactataaatattttacgtggccagatcctcatagctttatgttttgtcatcttactagcaacaacataa

SEQ ID NO: 5192 - DNA, 336 bp, Homo sapiens
atggcgtgttgtcccttggacgtcctcgtcacggttatcccaggagggactggattgggcagtgggggtgctcagaaccacacgttgcagaggctgcaacaggtgctgcacgcaggctcagggccctgcctcccccatctgctgagccgcctctgccaggacctgggccccggcgcgttccgactggctgccaggatgtacctgcagaaagatgacctggcaaacatcaaccaatgggtgaaggaggccacggaggggaagattcaggaattcctctctgggctgccggaagacaccgtgttgcttctcctcaacgccatccacttccagggctga

SEQ ID NO: 5193 - DNA, 509 bp, Homo sapiens
gtgccaacctgatgaccacagcagaaaccccctgcaccaggctcctgggatatgtcgtccacaatgtcacaggagctgtgattccccctgaaggatcccagactccattcccaagcactttctccagtgccagcaaagtcctcattggtggcaacaggaatacagtctgcacttgcagccctggcaggcagccagcaccgtcagtggaaaactttaagacgctggggcatcttagagcatccacagtgggtgctgtcggctgcacactgcctccagaagttcccaaaagagagagaaaggggaaaagaccagagggcaagaagttctctgtggttggggatgaagataaggtcactggatacaggttgtaccatttcggcaacttccagtgcaaggacgtcctgctgcatcctcactgggtgctcactactgctcactgcatcacccggttttacagctgcagcctgtttttccagaacttctcctttcatctcctatcctacatgtga

SEQ ID NO: 5194 - DNA, 486 bp, Homo sapiens
atgctctccctgcagctgaacggctctgctgtcctgggccctgcagtggggctgctgaggccgccagggagaagggccaggccccccacagcggggacacggtgccgggtggctggctggggcttcgtgtctgactttgaggagctgccgcctggactgatggaggccaaggtccgagtgctggacccggacgtctgcaacagctcctggaagggccacctgacacttaccatgctctgcacccgcagtggggacagccacagacggggcttctgctcggccgactccggagggcccctggtgtgcaggaaccgggctcacggcctcgtttccttctcgggcctctggtgcggcgaccccaagacccccgacgtgtacacgcaggtgtccgcctttgtggcctggatctgggacgtggttcggcggagcagtccccagcccggccccctgcctgggaccaccaggcccccaggagaagccgcctga

SEQ ID NO: 5195 - DNA, 417 bp, Homo sapiens
atggcccccagggcggccttcagcatccgtgcccaggcctctgcctccgcaatggcccccagggcggccttcagcatccgtgcccaggcctctgcctccacaatgccccccggggcggccttcagcatccgtgcccaggcctctgcctccacaatgccccccggggcggccttcagcatccgtgcccaggcctctgcctccacaatgccccccggggcggccttcagcatccgtgcccaggcctctgcctccgcaatgccccccggggcggccttcagcatccgtgcccaggcctctgcctccgcaatgccccccggggcagccttcagcatccgtgcccaggcctctccctccgcaatggcccccaggggcggccttcagacgcttcttagtagagtgctcagaaccatcccctga

SEQ ID NO: 5196 - DNA, 1773 bp, Homo sapiens
atggtggaggacttagcagcctcctatattgttctgaaattggagaatgaaattcggcaggctcaagtgcagtggctgatggaagaaaatgctgctctccaggcccagatcccagagcttcagaagtcccaagcagccaaggagtatgatctactccgaaagtcctcagaggccaaggagccccagaagctcccagagcacatgaatcccccagcagcctgggaggcccaaaagaccccagagttcaaggaaccccagaagccaccagagccacaggatcttctaccctgggaacccccagcagcctgggaactccaggaggccccagcagccccagagtccctggcgcctccagcaacccgggagtcccagaaacctccaatggcccatgagatcccaacagtcttggagggccaggggcctgcaaacacccaggatgccacaatagcccaagagcccaagaattcagaaccccaggatcccccaaatattgagaagccccaggaggcaccagaataccaggaaactgcagcacagctagagttccttgagcttccacctccccaggagcctctggagccttcaaatgcccaggaattcctagaactctcagcagcccaggagtccctggagggtctaatagttgtggagacatcagcagcttcagagtttccacaggcccctattgggttagaggctacagatttccccctgcaatacactttaaccttcagtggagattcccagaagcttcctgagttcctggttcagctgtatagttacatgagagtcagagggcacctgtatcccactgaagcagccctggtgagctttgttggcaattgcttctcaggtagggcaggatggtggttccagctcttactggatatccaaagccccttactggagcaatgtgaaagtttcatacctgtgctccaggatacttttgataatccagaaaacatgaaagatgccaaccagtgcatccatcaactctgccaaggggagggtcatgtagcaacccacttccacctcattgctcaagagctgaactgggatgaaagcactctctggatccaatttcaagaaggtcttgccagttctatacaagatgaactgtctcacacaagcccagccaccaacctatctgatctcatcactcagtgcatcagcctggaagagaagcctgatcccaatccattagggaaaagttcctctgcagagggagatggacccgagagtccaccagctgaaaaccaacctatgcaggctgcaatcaactgcccacacatcagtgaagctgaatgggtccgttggcacaaaggccgcttatgcctctactgtggttatcctggtcattttgccagagattgccctgtcaagcctcatcaggccctgcaggcgggaaacatccaggcctgccaaaacagcattgatcatactgtggttcttcgagagaagctgcccatccgcagtaatatcttccctctgatgctggaaactgtcgacggccatccacttattaatggacccataactaaggaaacatcacctgtccaagttcaaattggaaaccatgttgaagagctccagtttgacattattcatgcaccacgataccctctgattattggaatccattggcttgagacacatgacccaaacatagaatggagtacccgcactgtgtcctttctatcacgttattgtcactacaattgcttcaggcacaggtggaatagaagaaatcgtgatgaaataatttctgggtag

SEQ ID NO: 5197 - DNA, 498 bp, Homo sapiens
atgagtagtggtctcagagctggaaaggcagaaagggccttccaagtggggatcctcatgaccagagaagaaaataaggatgatgctcatcgcataggaatgtgtgcatgtgtttttgaaaacgctgcggcaagccgtcaagatgatttggcagattcagaagagcctgataaattcctcatagcaagtatcaagggagaggtacctttgagttttcagccttatgttacagatgctctgaatggaaccctggctgtgtcacacgacccagtcaagctagtaactaccagtcctctaccagcagagatggatattcctctattctctggcagtataactcaggtcagaagtcctgttggaagtgcaatgagccttattcctgaagatggccttcctcctattctcatctccactggtgtaaaaggagactatgctgtggaagataaaccatcacagatttatttcagaaatgcagcagttggaagacggtggccctga

SEQ ID NO: 5198 - DNA, 279 bp, Homo sapiens
atgggtcaaagtcagagtggtggttatggtcctagaggtggcaagaaggatgacaaggacaataaaaagaaatatgaacctcttgtaccaattataggggaggaaaagaaggagaaaacaaaaagaccagatgctgccagcaaactgccactggtgatacctcacattcaatgccagttaaaattattgaaattagtgagaatgaaagactctattctcatggaggaagaagccattagaaatcaggaacagataaaaccattagaagaaaagcattag

SEQ ID NO: 5199 - DNA, 1233 bp, Homo sapiens
atggcgtcccaggacggcctccgcaggggccgtggaggcacacgcctgagcctccacctcctgatctggcttcagttccttcaacccctgctcagtgagccataccgacccgaggaggattccagaatgaccccggcaagcccagaagcccggacgtctcctgtgcacccgaaattccccaaaattccagaaacttctgtagctccagggtctccagcgaccgcagggcctccaggatcctgggttacttcagcatctacagtgggagaagccttggaatccgacggaatctctgaccttggaaggcagttttctcagggtattgtttctggtgctagatctgtcctggcctgcggggtgagcctgcagaccagcaacatacaccactgcggaggctccctcatcgacaggcgctgggtgctcactgccgcccactgtgtctttagcaattttgattttgccactttgacaagcgacattgcccttgctctgctcgcctactctgtgaattattcctcacatatccagcctgcgtgcctccccgaaaagctttttgaagtggaagctgggacagagtgctgggtgactggatggggccaagtgtcagagagtgtttcaggaccaatgccacttgttcttcaggagactgagctaaacattatgcgtcatgagaaatgttgtgagatgctcaagaacaagaatatatccaagagtaaaatggtcacgagggggaccgtctgtggctataatgaccaagggaaggatgcctgtcagggagattctggggggcccctggtctgtgaattaaatggcacatgggtccaggtggggattgtgagctggggcattggctgcggtcgcaaaggataccctggagtttacacagaagcctcgaaaaagcccaagacagcagaagcagacacctccagtgaactagcaaagaaaagcaaagaagtattcagaaaagagatgtcccagttcatcgtccagtgcctgaacccttaccggaaacctgactgcaaagtgggaagaattaccacaactgaagactttaaacatctggctcgcaagctgactcacggtgttatgaataaggagctgaagtactgtaagaatcctgaggacctggagtgcaatgagaatgtgaaacacaaaaccaaggagtacattaagaagtacatgcagaagtttggggctgtttacaaacccaaagaggacactgaattagagtga

SEQ ID NO: 5200 - DNA, 2374 bp, Homo sapiens
cctttcggcgcggggggctgttaaaccagacaccccaggccacactcctctcgttcgaaatgaccatttcggggttctccgtggcggggagctccgccgccgccgtcccccttccacgcgcgggaggtcggcgagggcagggcggggacccggagtgcggcccccggtcctgcttcgtggcccgaaacgcctcgcaatggagtcactcatgacaggggactcagcgcacggggcggctgctgagccccgcagcgatcggcgggcgcggcgacgggcgagcggccctagcgggctgcagggaggacgccgcgtggacggagagccggcgcccgggggccagatcccctcccgggacggggcgccaggtccccgcgagctgcggcgcgacgcgcgggcacccgtgtcccacccgccgcttcagaggaagctcggcggctgtggccgcggcgaacaggccggacgcctcgtcgctggcggggcttcccttggagctgacgaaggcggggtccgcggtccaggctgctgccgcgacggggccggcggcggggcagctgccaggaacgagggtagcagctgcatccagatctcattatgcatcagaaaaatgaaaaaacagaggaaaattctatggaggaaaggaatccacttagccttttctgagaaatggaatactgggtttggaggctttaagaagttttattttcaccaacacttgtgcattctgaaagctaagctgggaaggccagttacttggaatagacagttgagacatttccagggtagaaagaaagctcttcaaatccagaaaacgtggatcaaggatgaacccctttgtgctaagaccaagttcaatgtggctactcaaaatgttagtactttgtcctctaaagtgaaaagaaaggacgctaaacacttcatttcctcctcaaagactctcctgagactccaagcagagaagctgttgtcatcagcaaagaattctgaccatgaatactgcagagagaaaaatctcttgaaggcagttactgactttccatcaaatagtgctttaggtcaggccaatggtcacagacctaggacagacccacaaccttctgactttcccatgaagttcaatggggagagccaaagtccaggtgagagtggcacgattgtggtcaccttgaacaaccataagagaaagggcttttgttacggctgctgccaagggccggagcaccacaggaatgggggacccttgattccaaaaaagttccaacttaaccaacatagaaggataaaattatctcctcttatgatgtatgagaaattatccatgattagatttcggtacaggattctcagatcccagcacttcagaaccaaaagcaaggtttgcaagctaagaaaagcccagcgaagctgggtacagaaagtcactggggaccatcaagagacccgtagggagaacggtgagggtggcagttgcagcccatttccttccccagaacctaaagacccttcttgtcggcatcagccgtactttccagatatggacagcagtgctgtggtgaaggggacgaactctcatgtgcctgattgccacactaaaggaagctctttcttgggcaaggagcttagtttagacgaagcattccctgaccaacagaatggcagtgccacaaacgcctgggaccagtcatcctgttcttctcctaagtgggagtgtacagagctgattcatgacatccccttaccagaacatcgttctaataccatgttcatttcagaaactgaaagagaaattatgactctgggtcaggaaaatcagacaagttctgtcagtgatgacagagtaaaactgtcagtgtctggagcagatacatctgtgagtagcgtagatgggcctgtgtcccaaaaggctgttcaaaatgagaactcataccagatggaggaggatggatctctcaagcagagcattcttagttctgagttgctggaccacccttactgtaaaagtccactggaggctcccttggtgtgcagtggactcaaactagaaaatcaagtaggaggtggaaagaacagtcagaaagcctctccagtggatgatgaacagctgtcagtctgtctttctggattcctagatgaggttatgaagaagtatggcagtttggttccactcagtgaaaaagaagtccttggaagattaaaagatgtctttaatgaagacttttctaatagaaaaccatttatcaatagggaaataacaaactatcgggccagacatcaaaaatgtaacttccgtatcttctataataaacacatgctggatatggacgacctggcgactctggatggtcagaactggctgaatgaccagataaatctttga

SEQ ID NO: 5201 - DNA, 606 bp, Homo sapiens
atgaacacagcagtaataactgttatggatcaaaaacctgatgccttggcacaagcgtcagatccaagagcaggattcactaaacttgtgttgtggtcctccagaggcatgttttcacatactttgagaaacactgatttcatccaactcccctgttgtagaagtgaagatgctggagcagcccagggaagctggacactagaacacgcttcctgtctttcattaccccgtgacctttcctatcagcagcccgtggctgtgaattctttatccctgggaacttggctgccacatgtgattctgatggaagatggaatgaagccgttggctgagccagcaggtgcaagcttcaagggagtacgtgcatctgcaacagcagagcatgactttgtcttcctgagctgcctgctaaaaggaaaacaaacctggctgtatgtggtctactgtgtctccactgatatcagcagtgaccagggctctcattttaccagtcatgaaatgcagcaatgggtggagaccctggatatccactggcattcccacctgccatgcaaccctacagcagcagagctgattgagtggatgaatggactgttgaagcaataa

SEQ ID NO: 5202 - DNA, 414 bp, Homo sapiens
atgcagcgccggggcgccctgttcggcatgccgggcggcagcggaggcaggaagatggctgcaggagacatcggcgagctgctagtgccccacatgcccacgatccgcgtgcccaggtccggcgacagggtctacaagaacgagtgcgccttctcctacgactctcccaattctgaaggtggactctatgtatgcatgaatacatttttggcctttggaagggaacatgttgaaagacattttcgaaaaactggacagagtgtatacatgcacctgaaaagacatgtgcgagaggcttacctatgggccaagtattttatccacatcagtatcatcaaaggttactcttccaatctggattcttggaaacagaagacacatgataccagcagagcccaggagatcgaaagctaa

SEQ ID NO: 5203 - DNA, 1584 bp, Homo sapiens
atggatgaggacagctgtgtcaatgcccaggccacgggaactccacttgctaaacagaatgttatcccggaaatctgtgcccttctctgtatgcctcttgtccttttttcactgccctattcagtaacttcacaaatatataatgagcacctgccaagaaccatgtcaggcctggggcaacaaacagcccctgctgtcaaggaacccgcaggcttgtggggccgtcatgctatcaaaaggcagctccaagagagacagtgggatgagtgtcaaacagatgtttcagccaagtatggcaggagctcagaggaggcctcatcacttgttgcctgggacagacgtctggctggtctgcccacctcccaccccagccctccctgtgcgctgctgccagaatgtcttcctgaacacagctatgactgggcctactggccttggctgtttgatctaagcagaggcctaactgagactgaactaagcatttttcctctcccaggaattggaattttggaaccacgaatgagcacctctgcagccaaggcccatgagcaatggcaccctggaggagaagcccaagaagcagacctggttccagcccctttcaccgcccggggtgccacggccctttcaacgtgtatggcaggaggtgtgcagggcattcaggaggcctcctggctggcactcgacccaattagtcattcaacgccaggtctggggctgctgtctgttgtctcaaagcccatctgtgaacacatggtagagtctccaacctgttcccagatgtccaacctggtctgcggcactgatgggctcacatatacgaatgaatgccagctctgcttggcccggatcctgtttgaattcttcggccaagtgaggtacagaccagggccctatgaacacctgcaagcaagacagccacgcagttgtgggtcaccttggaagaatattggagaatgcaagagagaacagggcagcagtgaaccagttgtccaagacctggcccaggttgttgaagaggtcataggggttccacagtcttttcagaaactcatatttaaggttttactatgcccaaacagaaatcctgatgggaaaggaaaatgccttgctatatctgtaatttatcaacatgaaaacattacggttttaatcataaaattcaagagatttaacttgtttgccatcagttctccaccaaggaaagataagttgatattgccagcctttcatgagcttcctcctaacagtaggcttatcgcctttgcacattcctatagcagagaacatagatctgactgccttaagggataccaatttcctctctcttcaaattctatcatcctcagtgggcaaacagaagccagaaaatcctgccaaaaacctttcatctggtcagggagtggaggccgtgctgtgcgcgccctcttgcgggagccaccaggcaagcatcttaagaggggcaagcggaaaagggtgtctgtggatctgccctgttctggtggtttcaggcagccctgctttcttcccgcctggcagtcagcagggggggagagtcactcagagcaagatggagagccttag

SEQ ID NO: 5204 - DNA, 468 bp, Homo sapiens
atggtcacagagatattcagttttcctgagcaaccttctgcaccaatgaacagtggccagactgacctcagagagatcagggaccagggctcctatggcttttgctgggttttgggggctttggaagccatctctgactggatctgcatccaccccaatgtctcagggaggaaatcatgtggcggtgtccgtggaggacaagctcacctgtttgtgtggggacggctgcaatgtggaggaagccttctctgtgtatttggacttcctgctgtacaagctcaaagaatagcaaggcgtcactggagagatgacggaggccatgccatctgcatcctgggctgcaaagtggagaacagcacgtcctactggctggttgcaaatcctggaataggacaagatcactatggaattgaatctgaagtggtggctgaaattccacacactgagcagtactgggaaaagatctaa

SEQ ID NO: 5205 - DNA, 462 bp, Homo sapiens
atggaagattatggtgtgccacgcttttatccagagagaccacaccaaaaaagtgtaggattctttctccagagcaatgctgaatctgactccacgtcacggacttgtcatgcacaagcgatgctgaagataataaattatggagatgacggaaaatcgttcagtcgtcgtattagtcatttgttcttccataaagaaaacgattggggattttccaattttatggcctggagtgaagtgactgatcctgagaaaggatttatagaagatgacaaagcggatgctcccgatgaagttgcgtgggattcaaagaagcacacaggctgtgttggcttgaagaatcagagagcgatttgttacataaacagcctgctacagacgttctttttcacaaatcagctacgaaagtctgtgtacatgatgcaaaccgagggggatgattcgtctaaaagcgtcccttaa

SEQ ID NO: 5206 - DNA, 297 bp, Homo sapiens
atgcaggcccgacaagtaatgctagcagtggcactttatagccacggctgcacagaaatcagaacattttctttagattttttgaagaagcgcatctttcagattcacacaagcaggatgacgctggctgatgatgtaaccctggacgacctgatcatggctaaagatgacctctctggtgctgacatcaaggcaatctgtacagaagctggtctgatggccttaagagaacgtagaatgaaagtaacaaatgaagactacattgacttttctaaaatagaaatcagggaaggttaa

SEQ ID NO: 5207 - DNA, 501 bp, Homo sapiens
atggactacacacttcactgtggatctgatggaaatgtatattccaacagatgtaccttttgcaataccgttgtaatcctttctaaacaacaggatgcatctacctttccaaactggggaacaaatgatctactcaggaagatagcagattgttttcaaaatatttcttgtaagtatggagcccagaattacaagtatggagcccagaaatgtgatgaaaaccaccacctctctcatattctagaaatgcaagagcctatcagagggcacagccagaaacgaccaagaacaactgacaagggcattattttcaataacagaatcagagtcttatcaaaagctatatgccactgccagcccagggtgtctctacccttccaagttgactgtggtgagttccaggaccccaaggtctactgcactcgggaatctaacccacactgtggctctgatggccagacatatggcaataaatgtgccttctgtaaggccatagtgtaa

SEQ ID NO: 5208 - DNA, 621 bp, Homo sapiens
atggcggccactgtggcaagacaccctggtgaatgtcagcacctggcagcttgtgagaggcctgctgagtccgtgggcgcagaaagtccctcttccttccaggggtccagctttgttccactctctcatcttcccaaacaagctgcattatcagcactggggcagtgtgatggagggcagggcagctcccacacacacgacggctccccccatactgtggcttccctgcacacgacagctccccccccacacaccatggttccccccacacggtggctccccctcacacagcagctcccccgctacacggcggctcccccgacacggtggctccccacacgtacctttgggactggccttctcaaggaagcccagctccttgttattgagaatgaagtgtgcaatcactataagtatatttgtgctgagcatttggccagaggcactgacagttgccagggtgacagtggagggcctctggtttgcttcgagaaggacaaatacattttacaaggagtcacttcttggggtcttggctgtgcacgccccaataagcctggtgtctatgctcgtgtttcaaggtttgttacttggattgagggaatgatgagaaataattaa

SEQ ID NO: 5209 - DNA, 624 bp, Homo sapiens
atgtggcagaaaccaggttataggttaacagactccgtggactctgttcttggcaaggacacttggactaaagattgggacagtttacagcttgatcaacttgtctgttcctggcgagatctgtctgccacgaagggttttctcatcgtcgctctcttgagtgcagctggagctgctctggctaaagactctaaagataatcaggagctgacatataattttactattccttacatggtctatcttcagtccttcccagaaccctgcgtggggtctctcattcaccttgactgggtattgacagctgcccactgccccttaccagtgctactcatacccactgcttcttcccagagttcccatttaggggtggagactttggtggttcgtagggaaattgattattatgacataatcagttgttatctccctggtctgacatgcctcacaagaaaaacagtggcagcccatgttgatgtttcggctgccccagccatctgcaatgggaggttgcatggaatcttgtcctgggcagaaggaagtgtcaccctaggaagtgaaggattcttcacaggtgttcatagctatgcaagatggatcttgaaaattatggatacccactga

SEQ ID NO: 5210 - DNA, 1101 bp, Homo sapiens
atggttcaaagtcagagtggtggtcatggtcctggaggtggaaagaaggatgacaaagacaagaaaaagaaatacaaacctcctgtaccaactagagtggggaaaaagaagaagaaaacagagggatcatatgctgccagcaaactgccactggtgacacctcacactcagtgccagttaaaattactgaaaaaacagaaacaaatggaaccactagaagaaaagcaagaggaggaaagatcaaaagtggatgatcttagggggaccccgatgtcagtaggaaccttggaagagatcatcaatgacagtcatgccactgtgtctacatctgtgggctcagaacgctatgtcagcattctttcatttgtagacaaggatctgctggaacctggctgcttagtcctgctcaaccacaaggtgcatgccatgataggggtgctgatggataacatggatcccctggtcacagtgatgaaggggttggacaaccaaagtcaggaaattaaggaatctgtggagcttcctctcactcatcctgaatattatgaagagatgggtataaagccccctaagggggtcattcactatggtccacctggcacagaatatgcactgtccatcatgtttattgatgaaattgacgcaattgggacaaaaagatatgactcaaattctggtagtgagagagaaattcagcgatcagcattggaactgttgaaccagtcagatggatttgattctaggggagatgtgaaagttatcatggccacaaaccaaatagaaactttggatccagcacttatcagaccaggctgcattgacaggaagattgagttcccccttcatgatgaaaatactaagaagcgcatctttcagattcacacaatcaggatgacgctggccaatgatgtaaacctggacgacttgatcgtgactagagatgacctctctggtgctgacatcaaggcaatctgtacagaagttggtctgatggcctcaagagaatgtagaatgcaagtaaaaaatgaagacttccaaaagtctaaagaaaatgttctttataagaaacaggaaggcacccctgagaggctctatctctag

SEQ ID NO: 5211 - DNA, 990 bp, Homo sapiens
atgcggactctgctcacccaggctgacctgcatcccctgcccctccctgagcccagggctcaatgtgaagtcactagtcccactctgccctgcattgtgatgcccctgccagaaaccactgtggctggcatgttgtcagctctggctggaggcaaagaaaacgtacaatgtggccacaggcctgcttttccaaactcgtcatggttaccatttcatgaacggcttcaagtccagaatggtgagtgcccgtggcaagtgagtatccagatgtcacggaaacacctctgtggaggctcaatcttacattggtggtgggttctgacagccgcacactgcttccgaagaaccctatgtgtctacaaatgtgaattgcactatcagtcacccttgttagcactggtgtttttatattcgttctttagattagacatggccgtggtaaatgtcactgtggtcatgggaacgagaacattcagcaacatccactcggagagaaagcaagtgcagaaggtcattattcacaaagattacaaaccgccccagctcgacagtgacctctctctgcttctacttgccacaccagtgcaattcagcaatttcaaaatgcctgtctgcctgcaggaggaggagaggacctgggactggtgttggatggcacagtgggtaacgaccaatgggtatgaccaatatgatgacttaaacatgcacctggaaaagctgagagtggtgcagattagccggaaagaatgtgccaagaggataaaccagctgtccaggaacatgatttgtgcttggaacgaaccaggcaccaatggtatcttcaagggagacagtggggcacctctggtttgtgctatttatggaacccagagactcttccaagtgggtgtcttcagtgggggcataagatctggctccagggggagacctggattggggtctcaaatgctgctggccaccatgtttaccgttgataaacctaactgctaa

SEQ ID NO: 5212 - DNA, 588 bp, Homo sapiens
atgaagggcagccctcctgctgcgggtcgccctgctgctgccctgggcctgcagctcctggcacggccctccatcctcggtgggcaggagactcccctagggagcttgctctcaagggtgacagtaggggggcctctggtttgccagaaaaagaacaaaagcacatggtaccagctgggtattatcagctggggtgtgggctgtggccagaagaacatgcctggagtgtacaccgagttgtccaattatctgctttggatcgagaggaagactgtgctggcagggaagccgtataagtatgagccagactctgttcaaaggcgcagctacgtgtgcagccctcagaggaaagaaagcagaagagttggacacatcgttaggctctttctgcaggcggggaagctaagaactgcattcaaggcctggcttggccaagcttttaccccacagctgacgggatctagagtcttgtctccaatgtcagtgctggcaaagatgggacacctgtcccgacccagtgccctacacaggccttcagaaggtcacccagagagccagacacacggctcccggggagcagacctataa

SEQ ID NO: 5213 - DNA, 3914 bp, Homo sapiens
tccctcgctcaccccatcctctctcccgccccttcctggattccctcacccgtctcgatcccctctccgccctttcccagagacccagagcccctgaccccccgcgccctccccggagccccccgcgcgtgccgcggccatggcggccgtgcgcggggcgcccctgctcagctgcctcctggcgttgctggccctgtgccctggagggcgcccgcagacggtgctgaccgacgacgagatcgaggagttcctcgagggcttcctgtcagagctagaacctgagccccgggaggacgacgtggaggccccgccgcctcccgagcccaccccgcgggtccgaaaagcccaggcggggggcaagccagggaagcggccagggacggccgcagaagtgcctccggaaaagaccaaagacaaagggaagaaaggcaagaaagacaaaggccccaaggtgcccaaggagtccttggaggggtcccccaggccgcccaagaaggggaaggagaagccacccaaggccaccaagaagcccaaggagaagccacctaaggccaccaagaagcccaaggagaagccacccaaggccaccaagaagcccaaagagaagccacccaaggccaccaagaagcccccgtcagggaagaggccccccattctggctccctcagaaaccctggagtggccactgcccccaccccccagccctggccccgaggagctaccccaggagggaggggcgcccctctcaaataactggcagaatccaggagaggagacccatgtggaggcacgggagcaccagcctgagccggaggaggagaccgagcaacccacactggactacaatgaccagatcgagagggaggactatgaggactttgagtacattcggcgccagaagcaacccaggccacccccaagcagaaggaggaggcccgagcgggtctggccagagccccctgaggagaaggccccggccccagccccggaggagaggattgagcctcctgtgaagcctctgctgcccccgctgccccctgactatggtgatggttacgtgatccccaactacgatgacatggactattactttgggcctcctccgccccagaagcccgatgctgagcgccagacagacgaagagaaggaggagctgaagaaacccaaaaaggaggacagcagccccaaggaggagaccgacaagtgggcagtggagaagggcaaggaccacaaagagccccgaaagggcgaggagttggaggaggagtggacgcctacggagaaagtcaagtgtccccccattgggatggagtcacaccgtattgaggacaaccagatccgagcctcctccatgctgcgccacggcctgggggcacagcgcggccggctcaacatgcagaccggtgccactgaggacgactactatgatggtgcgtggtgtgccgaggacgatgccaggacccagtggatagaggtggacaccaggaggactacccggttcacaggcgtcatcacccagggcagagactccagcatccatgacgattttgtgaccaccttcttcgtgggcttcagcaatgacagccagacatgggtgatgtacaccaacggctatgaggaaatgacctttcatgggaacgtggacaaggacacacccgtgctgagtgagctcccagagccggtggtggctcgtttcatccgcatctacccactcacctggaatggcagcctgtgcatgcgcctggaggtgctggggtgctctgtggcccctgtctacagctactacgcacagaatgaggtggtggccaccgatgacctggatttccggcaccacagctacaaggacatgcgccagctcatgaaggtggtgaacgaggagtgccccaccatcacccgcacttacagcctgggcaagagctcacgaggcctcaagatctatgccatggagatctcagacaaccctggggagcatgaactgggggagcccgagttccgctacactgctgggatccatggcaacgaggtgctgggccgagagctgttgctgctgctcatgcagtacctgtgccgagagtaccgcgatgggaacccacgtgtgcgcagcctggtgcaggacacacgcatccacctggtgccctcactgaaccctgatggctacgaggtggcagcgcagatgggctcagagtttgggaactgggcgctgggactgtggactgaggagggctttgacatctttgaagatttcccggatctcaactctgtgctctggggagctgaggagaggaaatgggtcccctaccgggtccccaacaataacttgcccatccctgaacgctacctttcgccagatgccacggtatccacggaggtccgggccatcattgcctggatggagaagaaccccttcgtgctgggagcaaatctgaacggcggcgagcggctagtatcctacccctacgatatggcccgcacgcctacccaggagcagctgctggccgcagccatggcagcagcccggggggaggatgaggacgaggtctccgaggcccaggagactccagaccacgccatcttccggtggcttgccatctccttcgcctccgcacacctcaccttgaccgagccctaccgcggaggctgccaagcccaggactacaccggcggcatgggcatcgtcaacggggccaagtggaacccccggaccgggactatcaatgacttcagttacctgcataccaactgcctggagctctccttctacctgggctgtgacaagttccctcatgagagtgagctgccccgcgagtgggagaacaacaaggaggcgctgctcaccttcatggagcaggtgcaccgcggcattaagggggtggtgacggacgagcaaggcatccccattgccaacgccaccatctctgtgagtggcattaatcacggcgtgaagacagccagtggtggtgattactggcgaatcttgaacccgggtgagtaccgcgtgacagcccacgcggagggctacaccccgagcgccaagacctgcaatgttgactatgacatcggggccactcagtgcaacttcatcctggctcgctccaactggaagcgcatccgggagatcatggccatgaacgggaaccggcctatcccacacatagacccatcgcgccctatgaccccccaacagcgacgcctgcagcagcgacgcctacaacaccgcctgcggcttcgggcacagatgcggctgcggcgcctcaacgccaccaccaccctaggcccccacactgtgcctcccacgctgccccctgcccctgccaccaccctgagcactaccatagagccctggggcctcataccgccaaccaccgctggctgggaggagtcggagactgagacctacacagaggtggtgacagagtttgggaccgaggtggagcccgagtttgggaccaaggtggagcccgagtttgagacccagttggagcctgagtttgagacccagctggaacccgagtttgaggaagaggaggaggaggagaaagaggaggagatagccactggccaggcattccccttcacaacagtagagacctacacagtgaactttggggacttctgagatcagcgtcctaccaagaccccagcccaactcaagctacagcagcagcacttcccaagcctgctgaccacagtcacatcacccatcagcacatggaaggcccctggtatggacactgaaaggaagggctggtcctgcccctttgagggggtgcaaacatgactgggacctaagagccagaggctgtgtagaggctcctgctccacctgccagtctcgtaagagatggggttgctgcagtgttggagtaggggcagagggagggagccaaggtcactccaataaaacaagctcatggc

SEQ ID NO: 5214 - DNA, 6237 bp, Homo sapiens
tcatcattgatattctgctcggatcaccaagtgctgagattcgccgggttgcctgtgatcagctgtacactcttagtcagacagacacatcagcgcatccagatgtgcagaagccaaatcagtttcttctaggcgtaatcctcacggctcagctgcctctctggtctccaactagtattatgagaggagtcaatcagagactgttatctcagtgtatggagtattttgatttgagatgccagttattagatgatctgacaacttcagaaatggagcagttaaggatcagcccagctacgatgcttgaagatgagattacttggctggataactttgaacctaatcgtacagctgaatgtgagaccagtgaagcggacaacatcttactggcagggcacttacgcctcatcaagacccttctttcactctgtggggcagaaaaggaaatgcttggttcatcactcattaaaccattgttagatgacttccttttccgagcttctagaattattttaaatagtcattctccagctggcagtgccgccatcagtcaacaggactttcatccaaagtgtagtacagcgaatagccgattggcagcctatgaagtccttgtgatgttggctgatagttcaccttcaaatcttcaaattattataaaagaactgctttctatgcatcaccagcctgaccctgctcttaccaaggagtttgattaccttcccccagtggatagcaggtccagttcagggtttgtggggctgagaaatggtggtgcaacttgttatatgaatgcagtcttccagcagctgtatatgcaacctgggctccctgagtcattactttcagtggatgatgacacagacaatccagatgatagcgtgttttaccaagtgcagtctctctttggacatttaatggaaagcaagctgcagtactatgtacctgagaatttttggaagattttcaagatgtggaataaagaactttatgtgagagaacagcaggatgcatatgaattctttactagtctcattgatcagatggatgaatacctcaagaaaatggggagagaccaaatttttaagaatacatttcagggcatctactctgatcagaagatctgtaaagactgtcctcacagatatgagcgtgaagaagctttcatggctctcaatctaggagtgacttcttgtcagagtttggaaatttctttggaccaatttgttagaggagaagttctagaaggaagtaatgcgtactactgtgaaaagtgtaaagaaaagagaataacagtgaaaaggacctgtattaaatctttacctagcgtcttggtaattcacctaatgagatttgggtttgactgggaaagcggacgctccattaaatatgatgaacaaataaggtttccctggatgctaaacatggagccttacacagtttcaggaatggctcgccaagattcttcttctgaagttggggaaaatgggcgaagtgtggatcagggcggtggaggatccccacgaaaaaaggttgccctcacagaaaactatgaacttgtcggtgtcatcgtacacagtgggcaggcacacgcaggccactactattccttcattaaggacaggcgagggtgtggaaaaggaaagtggtataaatttaatgacacagttatagaagaatttgacctaaatgacgagaccctggagtatgaatgctttggaggagaatatagaccaaaagtttatgatcaaacaaacccatacactgatgtgcgccgaagatactggaatgcctatatgcttttctaccaaagggtgtctgatcagaactccccagtattaccaaagaaaagtcgagtcagcgttgtacggcaggaagctgaggatctctctctgtcagctccatcttcaccagaaatttcacctcagtcatcccctcggccccataggccgaacaatgaccggctgtctattcttaccaagctggttaaaaaaggcgagaagaaaggactgtttgtggagaaaatgcctgctcgaatataccagatggtgagagatgagaacctcaagtttatgaagaatagagatgtatacagtagtgattatttcagttttgttttgtctttagcttcattgaatgctactaaattaaagcatccatattatccttgcatggcaaaggtgagcttacagcttgctattcaattcctttttcaaacttatctacggacaaagaagaaactcagggttgatactgaagaatggattgctaccattgaagcattgctttcaaaaagttttgatgcttgtcagtggttagttgaatattttattagttctgaaggacgagaattgataaagattttcttactggagtgcaatgtgagagaagtacgagttgctgtggccaccattctggagaaaaccctagacagtgccttgttttatcaggataagttaaaaagccttcatcagttactggaggtactacttgctctgttggacaaagacgtcccagaaaattgtaaaaactgtgctcagtactttttcctgttcaacacttttgtacaaaagcaaggaattagggctggagatcttcttctgaggcattcagctctgcggcacatgatcagcttcctcctaggggccagtcggcaaaacaatcagatacgtcgatggagttcagcacaagcacgagaatttgggaatcttcacaatacagtggcgttacttgttttgcattcagatgtctcatcccaaaggaatgttgctcctggcatatttaagcaacgaccacccattagcattgctccctcaagccctctgttgcccctccatgaggaggtagaagccttgttgttcatgtctgaagggaaaccttacctgttagaggtaatgtttgctttgcgggagctgacaggctcgctcttggcactcattgagatggtagtgtactgctgtttctgtaatgagcatttttccttcacaatgctgcatttcattaagaaccaactagaaacggctccacctcatgagttaaagaatacgttccaactacttcatgaaatattggttattgaagatcctatacaagtagagcgagtcaaatttgtgtttgagacagaaaatggattactagctttgatgcaccacagtaatcatgtggacagtagtcgctgctaccagtgtgtcaaatttcttgtcactcttgctcaaaagtgtcctgcagctaaggagtacttcaaggagaattcccaccactggagctgggctgtgcagtggctacagaagaagatgtcagaacattactggacaccacagagtaatgtctctaatgaaacatcaactggaaaaacctttcagcgaaccatttcagctcaggacacgttagcgtatgccacagctttgttgaatgaaaaagagcaatcaggaagcagtaatgggtcggagagtagtcctgccaatgagaacggagacaggcatctacagcagggttcagaatctcccatgatgattggtgagttgagaagtgaccttgatgatgttgatccctagaggaacatgcccagcctgagaggagtcaagacacaatactggatgctcagcaccttcttggaatcagaatctcgaaccctttggaagagcctggagattggactgggaaagctgctgtgacttgggcggatcgtgtatttctcaaggaaagcatttttaagccactagaaggtttgggagctgtttggcagtgggagaactccggcatgtggatcagctgtcccgggagcgtggtctatatgtggattcacatttctgtggagattttcggaaatagagccagtggcagacttttttgttacacgaacatacaagagtgagcataaagctgttgctttctctacgatgctacaaaagaaattcctttggtttttatattttaagaaaaagcaagctgcttttagatatgtgggggcaaatttttaatcttgcagtaatattaaacaggaatatccaatttaaaatgatgtaaagatgtaataaaattccttttcattgtaaaatagtaattaagtcaatttacacagacctttgtatttaatatgtctccctatttgtatagaatttcagatgggtctagatgagaaccctatgcataagcttggatcttgatgaaaggttaccaggatcaggatcaaaaattgggaaatactaagctcttgaagatatttttctgatataattagattgaaaagagcaattttgaaaatgctgtgttctccagaagtacagggtgcattatttgacatcaattacttaaagaagttatgagttgttccccaaacagattttaaaaacagcaaaataaaagcactttaagatataattttactgagtttaacttcacagaattatctttttaatgcttggagacatattgaataaactgtagtcttaaatcatgtgatctgcaatcgtttgcttttgcttaaaacataattactgaaacccttggtattggttgtatatgaagttaactatttgagttggtacacactgcttgtgagtttcatagttattgtaatgcagagaaggaatttgagaatttgtttctcctcaacatgactaattaacactgaaaagtcagtcaaggtttaagatttattttcccagaaataaatataaagcaattgaataaccatccatttagtcgtatttccaaagtatagcaccattcactcatttataccagctcccttttatggtgtgggggagaggtttacacccacatatttcatatatattttgtacattttgtattttgaattgctcacattttcggccctgttttgcctttagttacaggtcctgccttattttcatctcaccatgcacagaactagggagccttaggaagtgccaggttttcactgtcagatttgccaagtcacagaggcgcagccagccctgaagtgcctgtctggctgctgtggcattgtgtgggcatgtggccaggcagatggcatctcattactgtgctctcgccatggcccagtcttttcattctctggcagtgagggtttctgtgctgtcagacttcattgttattctgtgacttgctggaggttggcagtggcctttgtcaaacacactgagaagatggaagggccagcacttaagagcagaactgtacccttagagaaacggacagaggcgagtggcaaacttcagacggttccaatggtcttgcagtttgaaatgtgatgttctaccattggttttgagtacgtgaatacttcctgtcctactgtttcccctaccctattctcaccttctctccgcccacatcctcaccaagagattgtgtgggacatgaccttgaaatgctggcgatgatccacactgggatatcatcgctggcgactgcactctcaggagcccaaaatcaggagtgaaattgccacttctagtccccttatttcctatggaaacaacgccttccgcacccctagcacctgccgtcctcactgtaaagcttcatcaggatcgtccaccgtgtatattatacgcttcagatcatgttgcttatattgttgctgcaatgaccatcgttttcactttgctggtaaccacttgattgctgacagctacagtcaatgaacctgctgatgactttttttaatgtagtacaacagtgacagttatgacaggcttaccttggaagagttgtcatttttactgccaattttttggatgaagatgtttttataaacctttcaaaatggtctgcaaacagagcaggaattgcacaattaactcaataatgctgtgtgttctcaagaagctcccttagtgaggccgatcttaagatggccgattctgcccgttgaaggcatcctgggaaagaaaacaagcatcccagcgggcatctcaccacgacttctcctggagtcctcacacggtcactgacaactacagtcagttttaggaactagagtgccgtatcatcagacttaccctgtcctgccccaccttccctgctaacatcgaggtgtgtgcagttaccttctgagcttggaacaagcagactggaattttcctctgctacctcttgtgtataaaatcttgtttataaaatttcaaaaggaagtagatacactagggaagaaccttaattctaaatttggttcatgtgtggcaaagttcttagcttctaagagtataaaataaatttttcaaaaac

SEQ ID NO: 5215 - DNA, 1349 bp, Homo sapiens
tctccctcgagttgggacccgggaagaaccatgaagtggctgctgctgctgggtctggtggcgctctctgagtgcatcatgtacaaggtccccctcatcagaaagaagtccttgaggcgcaccctgtccgagcgtggcctgctgaaggacttcctgaagaagcacaacctcaacccagccagaaagtacttcccccagtggaaggctcccaccctggtagatgaacagcccctggagaactacctggatatggagtacttcggcactatcggcatcggaactcctgcccaggatttcactgtcctctttgacaccggctcctccaacctgtgggtgccctcagtctactgctccagtcttgcctgcagccaaccacaaccgcttcaaccctgaggattcttccacctaccagtccaccagcgagacagtctccatcacctacggcaccggcagcatgacaggcatcctcggatacgacactgtccaggttggaggcatctctgacaccaatcagatcttcggcctgagcgagacggaacctggctccttcctgtattatgctcccttcgatggcatcctggggctggcctaccccagcatttcctcctccggggccacacccgtctttgacaacatctggaaccagggcctggtttctcaggacctcttctctgtctacctcagcgccgatgacaagagtggcagcgtggtgatctttggtggcattgactcttcttactacactggaagtctgaactgggtgcctgttaccgtcgagggttactggcagatcaccgtggacagcatcaccatgaacggagagaccatcgcctgtgctgagggctgccaggccattgttgacaccggcacctctctgctgaccggcccaaccagccccattgccaacatccagagcgacatcggagccagcgagaactcagatggcgacatggtggtcagctgctcagccatcagcagcctgcccgacatcgtcttcaccatcaatggagtccagtaccccgtgccacccagtgcctacatcctgcagagcgaggggagctgcatcagtggcttccagggcatgaacgtccccaccgaatctggagagctttggatcctgggtgatgtcttcatccgccagtactttaccgtcttcgacagggcaaacaaccaggtcggcctggcccctgtggcttaagcctaagtctcttcagccacctcccaggaagatctggcctccgtcctatgcccactttagatgtatctaattctcctgactgttcttcccaggggagtgtgaaggtcttggccctgttccctgtcctaccaataacgtagaataaaaacat

SEQ ID NO: 5216 - DNA, 309 bp, Homo sapiens
ctccctcgagttgggacccgggaagaaccatgaagtggctgctgctgctgggtctggtggcactctctgagtgcatcatgtacaaggtccccctcatcagaaagaagtccttgaggcgcaccctgtccgagcgtggcctgctgaaggacttcctgaagaagcacaacctcaacccagccagaaagtacttcccccagtggaaggctcccaccctggtagatgaacagcccctggagaactacctggatatggagtacttcggcactatcggcatcggaactcctgcccaggatttcactgtcctctttg

SEQ ID NO: 5217 - DNA, 785 bp, Homo sapiens
taccccagcatttcctcctccggggccacacccgtctttgacaacatctggaaccagggcctggtttctcaggacctcttctctgtctacctcagcgccgatgaccagagtggcagcgtggtgatctttggtggcattgactcttcttactacactggaagtctgaactgggtgcctgttaccgtcgagggttactggcagatcaccgtggacagcatcaccatgaacggagaggccatcgcctgcgctgagggctgccaggccattgttgacaccggcacctctctgctgaccggcccaaccagccccattgccaacatccagagcgacatcggagccagcgagaactcagatggcgacatggtggtcagctgctcagccatcagcagcctgcccgacatcgtcttcaccatcaatggagtccagtaccccgtgccacccagtgcctacatcctgcagagcgaggggagctgcatcagtggcttccagggcatgaacctccccaccgaatctggagagctttggatcctgggtgatgtcttcatccgccagtactttaccgtcttcgacagggcaaacaaccaggtcggcctggcccccgtggcttaagcctaagtctcttcagccacctcccaggaagatctggcctctgtcctgtgcccactttagatgtatctaattctcctgactgttcttcccaggggagtgtggaggtcttggccctgttccctgtcctaccaataacgtagaataaaaacataacccactgaaacaggttttgtgga

SEQ ID NO: 5218 - DNA, 816 bp, Homo sapiens
atgattgagcagcacaatcaggaatacagccaagggaaacacagcttcacaatggccatgaacgcctttggagacatgaccaatgaagaattcaggcaggtgatgaatggttttcaataccagaagcacaggaaggggaaacagttccaggaacgcctgcttcctgagatccccacatctgtggactggagagagaaaggctacatgactcctgtgaaggatcagggtcagtgtggctcttgttgggcttttagtgcaactggtgctctggaagggcagatgttctggaaaacaggcaaacttatctcactgaatgagcagaatctggtagactgctctgggcctcaaggcaatgagggctgcaatggtggcttcatggataatcccttccggtatgttcaggagaacggaggcctggactctgaggcatcctatccatatgaaggaaaggttaaaacctgtaggtacaatcccaagtattctgctgctaatgacactggctttgtggacatcccttcacaggagaaggacctggcgaaggcagtggcaactgtggggcccatctctgttgctgctggtgcaagccatgtctccttccagttctataaaaaaggaatttattttgagccacgctgtgaccccgaaggtctggatcatgctatgctgctggttggctacagctatgaaggagcagactcagataacaataaatattggctgggtaaaaactggggcatggatggctacataaagatggccaaagaccggaggaacaactgtggaattgccacagcagccagctaccccactgtgtga

SEQ ID NO: 5219 - DNA, 501 bp, Homo sapiens
atggagcatggatacctctggcatgagacagtggtgcaagtattaaaacattcccggtgtgagctggcgttggataccagtaaaagggaatgcactggcagggatcaggtgttggatccatgtaatcaccagaatgcatttctctttaagagtccagacttctggcttaacaagattgaagatggaaatgattttggggtagcaatccaggataaggtgttggagagggtgaatgccatcaagaccaaagtggaagctttccagacaaccatttccaagtatttctcagaacgtggggatgcagtggccaaggcctccaaggagactcatgtaatggattaccgggtcttggtgcatgagcgagatgaggcagcctatgcggagctcagggccatggtgctggacctgagggccttctatgctgagctttatcatatcatcagcagcaacttggagaaaactgtccacccaaagggtgaagagaagccatctatgtactga

SEQ ID NO: 5220 - DNA, 1413 bp, Homo sapiens
atgtgcctactggagtctctggactgtttcttgaccgtcacacccatctctccctttcttcctggaggagcacttgacaaagagaggacccctccacctaccttgagtaatggccacaggaaacaagatttctctttatttgttatgcttgagtttcagagaaccctggtaaagctgcattcaactctgcagttaggctggagaaatgagacagaacaccagctaatgaaagagttaagcgtgaagtgcttcatgcacagagcaacagatgctcaacaaatcagtgatgaaatccaaggatgggccctaagtgatactgcatttggtattctgagaaagcttgtttataaaagcctaaaaggcttccttgctttcccccaagccagatatttgccaaatggcataggtcagaggtgcaaagttggttttgtcttagcaaggcaagagaatccactagcggactcacccttaccggagctgctgcggcccgactgccccgagcccgcgggcttggacgcgacacgggaggggcccgatcggaacttccgactgagcgagcaccgccaggccctggccgccgccaagcaccgaggccccgcggcgaccccggggagccccgatcccggccccggtccgtggggcgaagagcacttggcggagaggggccccaggggctgggagaggggcggcgatcgctgcgacgcgcccggtggggacgcggcgcggaggcccgacccagaggccgaggcaccccccgccgggagcatcgaggccgccccgagtagtgcggcggagccggtgatcgtctccaggtcggatcccagagacgagaagctggccctatacctggccgaggtggagaagcaggacaagtatctgcggcagaggaataagtaccgattccacatcattccagacggcaactgcctctaccgagctgtcagcaagacggtgtatggggaccagagcctgcaccgggagttgagggagcagacggtgcactacatcgccgaccatctcgaccacttcagccccctgattgagggcgacgtgggggagtttatcatcgctgctgcccaagacggggcatgggccgggtacccggagttgctggccatggggcagatgctgaatgtgaatatccatttaactactggagggaggctggagagtcccacggtgtctaccatgattcattatttgggcccagaggattccctgaggcctagtatttggctcagttggctcagtaacggacactatgatgctgtatttgatcactcctatcctaacccagagtacgacaactggtgcaaacaaactcaagtgcaaaggaaacgcgacgaagaacttgccaaatctatggccatatccttgtctaaaatgtatattgaacaaaatgcatgctcttga

SEQ ID NO: 5221 - DNA, 1827 bp, Homo sapiens
atggctttgcccattaagcacccaactaacagagttgtactgaagaccattagaggggcaatgtctcagagaagcaaagggaaaggaggccctcccaaggtcatagaggttagagaagagcccctaattccttcataccgcctgtggaaggaggctgaggaattcctctacagattcttgccacagaaaatcacatacctgaatcagctcttgcgagagggctccctcaagaaattcattctggtgattacatggatccagcacctaatccccaagattgaagatggaaatgattttggggtagcaatccaggagaaggtgctggagagggtgaatgctgtcaagaccaaagtggaagctttccagacaaccatttccaaccacatcattgggaagtttgcccaactaattcgagttgaagagaaaagagacagagtagttagcaggaatgtgaagagatcaccggctgagaatttgttggagaaacataagggctcagaaaatcaacaggaggctggagtaacaggcattaagcaactaaaaccagctggaactaatggcactggaggaccaggcagactcaaaacaccgggcgtcagaacatctctgatggctcagtacgtttttggtctagcaagtgtgtatcacatcttccttcttaaggccacttgcttaagttggtgtaaaattggagtcctgggcatatccagctggaaatttcctagtaaaactgaggaattcgagagctctgtctgcccctctgtggtgagatgccttcactatttgcactggcctcttgtggataatccattgcatgtagaaatgtcaatgacaggacagcccagaaggctggcttttggcacagctaacacagttgaccattctcatgctcctattgacctagaagaaatctggttgaaagtggccttccaagaaaatggtctttgtgatctgcttaggaaagagtggtcaaaaattaactattctatgaccaagggcaccatttctggcagccaccttccaactttgtccaggtttatacccagatatagcttcacgaggacccctcgctgcccaggggacccactcacatatctaggactcatctgcacagatttcccggtgctgactggagagaaaatcggcatcatgtatcccattaatatgctagctgctgctgctgattgcaaattatgcctgattcttcccaagtctgcattcaaatggcatcacgtttgtgcccggaaattggccatggggcagtccttacaccacaaagatgctataaatcagggtgccatggaactcatcaacagctcctacaatgtagcagaattcaggatcgatatgcagcaatgcagtcctgaccttttcaccatggaatcagtaacaccattgagaccacttttcctggattattatcctggcccacgatattggattcttattggaaaaacaattggtgttgatggacagagacagaagagtactacatctacattcagcttggaaaagagaatgagtgaattagtgctcggcagctacaacaggggctatttaaagccaacccatgctaaaatctgtttctaccccaccccatgtggaccaagccaaatgccggccttgacctaccaaccttttcctctcctgttcatttgccagtcaggtaccagaggattagaagtgattttagcttcgttttggcagtcacatcttgctgataaccagggaactgcctgcatctttgaaacggatattctctcctgtgtttctttaaaaatcgctctccgatcttgtaataccaaagcacctcgattttctttttaa

SEQ ID NO: 5222 - DNA, 402 bp, Homo sapiens
atgaggagtcctggaccttgggctgttcggcctgtccagacgtcctgcccgaccgcggatcgtgcagaaactcgctgtgcccatgatggacacacccaagtcaacctgctctacagcaaagacaccgagtttggctaccaacccgaaaccatcaagaatgacatgctgtgcgccggcttcgaggagggcaagaaggatgcctgcaagggcgactcgggcggccccctggtgtgcctcgtgggtcagtcgtggctgcaggcgggggtgatcagctggggtgagggctgtgcccgccagaaccgcccaggtgtctacatccgtgtcaccgcccaccacaactggatccatcggatcatccccaaactgcagttccagccagcgaggttgggcggccagaagtga

SEQ ID NO: 5223 - DNA, 2708 bp, Homo sapiens
aacccgacacccaatgggagtgggaattggggacgcgtcatgagtattcaggaagaaggacccgacgcaggttgggagaagtgaaactcaggggagtggagaatccccaacgcggcgcctccccaatgcagacacggcccttggagcctgagaccctgagagccccgcccgggacctgggacttcgtcctgatccctcttctcctacaccaagcatctttgtcacactgtgtgcctgagtcctggacaaggatctgtctgtggaaaccagggagagaccccaaggctgcgcccagccccttccccttcacttctcctcctggaatccccgtccctgaactggactccctgcctcccaccctttgccttaccttacctcacctcagaactgatttcaagcaacagcagtattacttccattcaatacttggacctgcaaacatcaaaaaagccactggagaaactgaacgactctctgaaagccttaaactaagatatgaagaagttgaaatctggaaaaaacttgaggaaaaggacaagcagggggaagcacagtggctacaacaaaaaaggcaggaaacaggaagagaggatggcagcacgttggctaaaggttctttggagattgtattggattccaaagacaaaacccaaaagagcaatggtgaaaagaatgaaaaatgtgagaccaaagagaaaggagcaatcacagcaaaggaactatacacaatgatgatggataaaaacatcagcttgattataatggatgctcaaagaatgcaggattatcaggattcctgtattttacattctctcagtgttcctgaagaagccatcagtccagtagtcactgctagttggattgaagcacacctcccagataattctatagacacatggaagaagagggggaatgtggagtatatggtacttcttgactggtttagttctgcaaaagatttacagattagaacaactctctggcatctgaaagatgcacttttcaagtgggaaagtaagactgtcctgtgcaatgggccttgggctttggttttagagggaggctataaaaactggttcctttgctattcccagtatacaacaaatgctaaggtcactccacccccacaacaccagaatgaagagttgtctatctcattggattttacttatccctcattggaagaatcaattccttctaaacctgctgccgagatgccacctccacctatagaagtggatgaagacatagaattgataagtgatcaaataagtgataatgatcaaaatgagaggacaggaccactgaatatatcaattccagttgaatcagttgctgcttctaaatctgatgtttcacccatcattcagccagtgcctagcataaagaatgttccacagattgatcatactaaaaaactggcagtcaaattgcctgaagagcatataatcaaatctgaaagtacaaatcatgagcaacagtctcctcagaatgaaaaagttattcctgattgttccgccaagccagccaagaaagtggataaagaaatctcagcaaagaagggcaaagaaataacaagagtaaaaagacaaagtaaaagtgatcatgaaacctctggtgccgagaagtctgtagaggacagggggagaagatgttcaaccccagaagtacagaaaaagtcaacaagagatgtgtcccatacatctgcgacaggggattcaggttcaggcaagccttttaagattaaaggacaaccagaaactggaattctaaggacagaaacttttagagaggatacagatgatactgaaagaaataaaactcaacgagaaccttcgataatagcacgaagtgaagaaatggggaggatgatttggaaactcaatcctgtttttggaggttctggaccagctcttactggacttcgtaacttaggaaatacttgttatatgaactcaatattgcagtgcctatgtaatgctccacatttggctgattatttcaaccgaaactgttatcagatgatattaacaagtgaagtggcagaagaatttggtataatcatgaaagccccgtggacaggacagtatagatatatcagtccaaaagaccttaaagtcaccattgggaagatcaattaccagtttgcaggatacagtcaagattcacaagaattttttctgttcctaatggatggtctccgtgaagatctaaataaaactgataatcggaagacatataaagaagaaaataatgatcatctcaatgactttaaagctgcagaacatgcctggcagaaacacaagcggctctatgagtctattattgttgcactttttcaggagctcgacgggattcttaaaaaagaaatctggaagttaccacctgtgcttttagtgcatctgaaacatttttcctacaatggcaggtggaaacaaaaattacagacatctgtggacttcccgttagaaaatcttgccttgtcacagtatgttattggtccaaagaacaatttgaagaactataatttgttttctgtttcagatcactgcggtgggctggatggaggccattacacagcctactgtaaaaatgcagcaaaacagcggtggtttaagtttgatgatcatgaagtttctgatatctctgtttcttctgtgaaatcttcagcagcttatatcctcttttatacttctttgggaccatga

SEQ ID NO: 5224 - DNA, 1251 bp, Homo sapiens
atgaccaggttcatcatcgcctctctcctcccctctacctttctccctggtttccatagagcagaaatctgggtcaaggtggagtgcattggatcaagagttgctatgatttgggaaaagctctgcaggataagtcgaataaaatcagaccttgcagaaactcaatctggcccctgggaactctccggtgtggagctggaggaaaaaccagtacagtactctctcaggaaaacaagctcagaggcggaatcaacaagacagctgacgaacacatcctcttcaagagaggccagggtctcaagctcaagtggccaaggcaagacgggtcaaagtcagagtggtggtcacagtcctggaggtggcaagaaggatgacaaggacaagaaaaagaaatatgaacctcctgtaccaactggagtggggaaaaagaagaaaacaaaaggatcagatgttgccagcaaactgccactggaatcgggaacaaatggaaccattagaagaaaagcaagaggaggaaagatcaaaggtggacgatctgaggggaccccgatgtcagtaggaaccttggaagagatcaatgacagtcatgccatcgtgtctacatctgtgggctcaggacactacgccaacattctttcatttgtagacaaggatctgctggcaactggctgctcagtcctgctcaatcacaaggtgcatgccatgagaggggtgctgatggatgacgtggatcccctggtcacagtgatgaaggtggaaaaggtcccccaggagacctatgccaatactgggaggttggataatcaaattcaggaaattaaggaatctgtggagcttcctctcacccatgctgaacattatgaagagatgggtataaagcctcctaagggggtcattctctatggtccacctggcatagttaaaaccttgctagccaaagcggtagcaaaccaaacctcagccactttcttgaaagtggttggctctgaacttattcagaagtacctaggtgatgggcccaaacttgtacgggaattgtttcaagttgctggagaacatgcaccatccatcgtgtttactgatgaaactgacgccattgggacaaaaagatatgactcaaattctggtgaagctggtctgatggccttaagagaacgtagaatgaaagcaacaaatgaagacttcaaaaaatctaaagaaaatgttctttataagaaacaggaaggcacccctgaggggctgtctctctag

SEQ ID NO: 5225 - DNA, 423 bp, Homo sapiens
atggtgggggcgagtgaagctggcaaagagttatggcttagagtcttttctttgaagttgaggaatgactggtggtttttggaagccaaggccgacttttctgggatgtcaactaggaagaatatgccctggttccagctgacccacatgtgctttgcagaggccagggaggaaggcgcaggatatccaggttacagaatgagagtctgtagtgcgacaaaaagaatgagccactggtactccacacccatcagcctgctggatctcccggggagttacgctgtgtttgctggcttctgccccctcatttggcagtcacctgccactgtgacctccccaagacccctctccaaactctataccttgatttctggtgtcccggaaatagagaccagaaacactgatgtcccactccaacgatag

SEQ ID NO: 5226 - DNA, 774 bp, Homo sapiens
atgtcagtagtaaccttggaagagattattgatgacaatcatgccatcatgtctacatctagcattcttgtagacaaggatctgctggaacctggctgctcggtcctgctcaaccacaaggttcgtgctgtgatatgggtgctgatggatgacacggataccctagtcacaatgatgaaggtggaaaagaccccccaggagacctgtgttgatactggggggttggacagccaaattcaggaaattaaggaaatcattctgaatattatgaagagatggaaatacctacatgatgggcccaaactcatatgggaattgtttctagttgctgaagaacatgcaccttccatcatgtttattgatgaaattgatgctattaggacaaaaagatgtgactcaaattctgatagtgagagagaaattcagcaaataatgctggaaatgttgaaccagttggatggatttgattcaaggggagatgtgaaagttatcatatccacaagccgaatagaaactttggatctagcacttatcagaccaggctacactgacaggaagctcaagttccccctgcctgatgaaaagactaagaagcacatctttcagatgcacacaagcagcatgacactggccaatgatgcaatctgcacagaagctagtctgatggccttaaaagaacatggaatgaaagtaacaaatgaaaacttcaaaaaatctcaagaaaatgttctttataaagaacaggaagacacccccaaggggctctgtctctag

SEQ ID NO: 5227 - DNA, 1347 bp, Homo sapiens
atgcatgaggtaattgaatctgactatgaggggagagataaaaccttgtcctgccttgtggtgggtgtgtgtgactactccactcggatgcttggtagaaatgatcacactgctgttactggccaacaaggagcctggtcagagtctgcctccttggaccacagtcccatcctcagtttcctgccccaggaattcccagcagatcgagatggttccttggctctccatagcacttatgaaagtcttcgtttgtctgcttcttcctggactgtgaatcctttgaggggtataaatatgatgccttcatcattggcaccaagtagccaaggttgtgggcccaaatgcaaagagactccactagagctggtgtttgtgatcgacagctcagaaagcgtggggccagagaactttcagatcattaaaaattttgtgaagactatggctgaccgggttgctctggaccttgccacggcccgcataggcataatcaactatagccataaggtggagaaggtggctaatttgaagcagttctccagcaaggatgacttcaagttggctgtggacaacatgcagtatctgggggaaggcacatacacagccactgctctgcaagcagccaacgacatgtttgaagatgcaaggccaggtgtaaaaaaagtggccttggtcatcactgatggacagacagattctcgtgataaagagaaactgacagaggtggtgaagaatgccagtgacaccaatgtggagatatttgtgataggggtggtgaagaaaaatgatcccaactttgaaatattccacaaagaaatgaatctaattgctactgacccagagcatgtttaccagtttgatgatttctttaccctgcaagacaccctgaagcaaaaattgtttcaaaaaatttgtgaggattttgattcctatctcgttcaaatttttggttcatcgtcacctcaacctggatttgggatgtcaggggaagaactcagtgaatctactccagagcctcaaaaagaaatttctgagtcattgagtgtcaccagagaccaggatgaagatgataaggctccagagccaacgtgggctgatgatctgcctgccactacctcatctgaggccaccaccacccccaggccactgctcagcacccctgtggatggggcagaggatcctagatgtttggaagccttgaagcctggaaactgtggtgaatatgtggttcgatggtattatgacaaacaggtcaactcttgtgcccgattttggttcagtggctgtaatggctcaggaaatagattcaacagtgaaaaggaatgtcaagaaacctgcattcaaggatga

SEQ ID NO: 5228 - DNA, 2557 bp, Homo sapiens
ttgtgctcctcgcttgcctgttccttttccacgcattttccaggataactgtgactccaggcccgcaatggatgccctgcaactagcaaattcggcttttgccgttgatctgttcaaacaactatgtgaaaaggagccactgggcaatgtcctcttctctccaatctgtctctccacctctctgtcacttgctcaagtgggtgctaaaggtgacactgcaaatgaaattggacaggttcttcattttgaaaatgtcaaagatgtaccctttggatttcaaacagtaacatcggatgtaaacaaacttagttccttttactcactgaaactaatcaagcggctctacgtagacaaatctctgaatctttctacagagttcatcagctctacgaagagaccgtatgcaaaggaattggaaactgttgacttcaaagataaattggaagaaacgaaaggtcagatcaacaactcaattaaggatctcacagatggccactttgagaacattttagctgacaacagtgtgaacgaccagaccaaaatccttgtggttaatgctgcctactttgttggcaagtggatgaagaaattttctgaatcagaaacaaaagaatgtcctttcagagtcaacaagacagacaccaaaccagtgcagatgatgaacatggaggccacgttctgtatgggaaacattgacagtatcaattgtaagatcatagagcttccttttcaaaataagcatctcagcatgttcatcctactacccaaggatgtggaggatgagtccacaggcttggagaagattgaaaaacaactcaactcagagtcactgtcacagtggactaatcccagcaccatggccaatgccaaggtcaaactctccattccaaaatttaaggtggaaaagatgattgatcccaaggcttgtctggaaaatctagggctgaaacatatcttcagtgaagacacatctgatttctctggaatgtcagagaccaagggagtggccctatcaaatgttatccacaaagtgtgcttagaaataactgaagatggtggggattccatagaggtgccaggagcacggatcctgcagcacaaggatgaattgaatgctgaccatccctttatttacatcatcaggcacaacaaaactcgaaacattattttctttggcaaattctgttctccttaagtggcatagcccatgttaagtcctccctgacttttctgtggatgccgatttctgtaaactctgcatccagagattcattttctagatacaataaattgctaatgttgctggatcaggaagccgccagtacttgtcatatgtagccttcacacagatagaccttttttttttttccaattctatcttttgtttccttttttcccataagacaatgacatacgcttttaatgaaaaggaatcacgttagaggaaaaatatttattcattatttgtcaaattgtccggggtagttggcagaaatacagtcttccacaaagaaaattcctataaggaagatttggaagctcttcttcccagcactatgctttccttctttgggatagagaatgttccagacattctcgcttccctgaaagactgaagaaagtgtagtgcatgggacccacgaaactgccctggctccagtgaaacttgggcacatgctcaggctactataggtccagaagtccttatgttaagccctggcaggcaggtgtttattaaaattctgaattttggggattttcaaaagataatattttacatacactgtatgttatagaacttcatggatcagatctggggcagcaccctataaatcaacaccttaatatgctgcaacaaaatgtagaatattcagacaaaatggatacataaagactaagtagcccataaggggtcaaaatttgctgccaaatgcgtatgccaccaacttacaaaaacacttcgttcgcagagcttttcagattgtggaatgttggataaggaattatagacctctagtagctgaaatgcaagaccccaagaggaagttcagatcttaatataaattcactttcatttttgatagctgtcccatctggtcatttggttggcactagactggtggcaggggcttctagctgacttgcacagggattctcacaatagccgatatcagaatttgtgttgaaggaacttgtctcttcatctaatatgatagcgggaaaaggagaggaaactactgcctttagaaaatataagtaaagtgattaaagtgctcacgttaccttgacacatagtttttcagtctatgggtttagttactttagatggcaagcatgtaacttatattaatagtaatttgtaaagttggttggataagctatccgtgttgcaggttcatggattacttctctataaaaaatatgtatttaccaaaaattttgtgacattccttctcccatctcttccttgacctgcattgtaaataggttcttcttgttctgagattcaatattgaatttttcctatgctattgacaataaaatattattgaactac

SEQ ID NO: 5229 - DNA, 976 bp, Homo sapiens
gaagaaatccttctgttgaactctactgtgtcaggccagcctgagttcatttctccttgagcaggaacagttcatggacgaactctgaggaccattctgaggacaagaggcatccagtgtcatgagtggaacatgcattttatggctacagagttaaggcaagggttgaattccacgagtcaaaaagcagcccttttcagagacccaactctctggggtgctcaggggcttgggctggattgagaagaaaactgacaagagtaagctgccctctcttctctggccatctcacaaaccacagtgcgggccaactggtcctgcctctttaccacacagaaccaagcactagggataagacagctgcccatggtgtccgcggcgggtctctctggggatggcaagatgcgaggggtgctcctggtgctgctcggccttctctattcttccaccagttgtggcgtccagaaagcttccgttttctacggtcctgaccccaaggagggcttggtcagcagcatggagttcccgtgggtggtgtcgctgcaggactcccagtacacacacctggctttcggctgcatcctgagcgagttctgggtcctcagcatcgcatccgccattcagaacaggaaggacattgtcgttatagtgggtataagtaacatggatcctagcaagattgctcacacagagtatccagtcaataccatcatcatccatgaggactttgataacaactccatgagcaacaacatagccctcctgaagacagacacagcgatgcattttggcaacctggtccagtccatctgcttcctcggcagaatgctgcatacaccaccagtcttgcagaactgctgggtgtcaggatggaatcccacatctgcagaaatcacatgacgatgagtgtcctgaggaaaatcttcgtgaaagatcttgacatgtgtcccctatacaaactccagaagacagaatg

SEQ ID NO: 5230 - DNA, 540 bp, Homo sapiens
cacatttgcattaaaccttttgaaaaagctaggggaaaacaactcaaacaacttatttttttccccatgagcatatcatcagccttggccatggttttcatgggggcaaagggaaacactgcagctcagatgtctcaggcactttgttttagtaaaatcggaggtgaagatggagatattcatcgaggttttcagtcacttcttgttgcaattaacagaactgacactgaatatgtgcttagaactgccaacgggctctttggagaaaagtcttatgatttcctcacaggttttacagattcctgtggcaaattctaccaagcaacgataaaacagctagactttgtgaatgatacagagaagtccacaacacgtgtaaactcctgggttgctgataaaactaaaggtgaaaatatattgttattctatttcgataatattttaaacagttttatagtcagttctttacaaaactgtcaaatataaaaaggagtccttttttctctaaacaactatgcaaacattaaaacctttctttgg

SEQ ID NO: 5231 - DNA, 5893 bp, Homo sapiens
cacacaacaaacttagctcatcgcaataaaaagcagctcagagccgactggctcttttaggcactgactccgaacaggattctttcacccaggcatctcctccagagggatccgccagcccgtccagcagcaccatgtgggtgaccaaactcctgccagccctgctgctgcagcatgtcctcctgcatctcctcctgctccccatcgccatcccctatgcagagggacaaaggaaaagaagaaatacaattcatgaattcaaaaaatcagcaaagactaccctaatcaaaatagatccagcactgaagataaaaaccaaaaaagtgaatactgcagaccaatgtgctaatagatgtactaggaataaaggacttccattcacttgcaaggcttttgtttttgataaagcaagaaaacaatgcctctggttccccttcaatagcatgtcaagtggagtgaaaaaagaatttggccatgaatttgacctctatgaaaacaaagactacattagaaactgcatcattggtaaaggacgcagctacaagggaacagtatctatcactaagagtggcatcaaatgtcagccctggagttccatgataccacacgaacacagctttttgccttcgagctatcggggtaaagacctacaggaaaactactgtcgaaatcctcgaggggaagaagggggaccctggtgtttcacaagcaatccagaggtacgctacgaagtctgtgacattcctcagtgttcagaagttgaatgcatgacctgcaatggggagagttatcgaggtctcatggatcatacagaatcaggcaagatttgtcagcgctgggatcatcagacaccacaccggcacaaattcttgcctgaaagatatcccgacaagggctttgatgataattattgccgcaatcccgatggccagccgaggccatggtgctatactcttgaccctcacacccgctgggagtactgtgcaattaaaacatgcgctgacaatactatgaatgacactgatgttcctttggaaacaactgaatgcatccaaggtcaaggagaaggctacaggggcactgtcaataccatttggaatggaattccatgtcagcgttgggattctcagtatcctcacgagcatgacatgactcctgaaaatttcaagtgcaaggacctacgagaaaattactgccgaaatccagatgggtctgaatcaccctggtgttttaccactgatccaaacatccgagttggctactgctcccaaattccaaactgtgatatgtcacatggacaagattgttatcgtgggaatggcaaaaattatatgggcaacttatcccaaacaagatctggactaacatgttcaatgtgggacaagaacatggaagacttacatcgtcatatcttctgggaaccagatgcaagtaagctgaatgagaattactgccgaaatccagatgatgatgctcatggaccctggtgctacacgggaaatccactcattccttgggattattgccctatttctcgttgtgaaggtgataccacacctacaatagtcaatttagaccatcccgtaatatcttgtgccaaaacgaaacaattgcgagttgtaaatgggattccaacacgaacaaacataggatggatggttagtttgagatacagaaataaacatatctgcggaggatcattgataaaggagagttgggttcttactgcacgacagtgtttcccttctcgagacttgaaagattatgaagcttggcttggaattcatgatgtccacggaagaggagatgagaaatgcaaacaggttctcaatgtttcccagctggtatatggccctgaaggatcagatctggttttaatgaagcttgccaggcctgctgtcctggatgattttgttagtacgattgatttacctaattatggatgcacaattcctgaaaagaccagttgcagtgtttatggctggggctacactggattgatcaactatgatggcctattacgagtggcacatctctatataatgggaaatgagaaatgcagccagcatcatcgagggaaggtgactctgaatgagtctgaaatatgtgctggggctgaaaagattggatcaggaccatgtgagggggattatggtggcccacttgtttgtgagcaacataaaatgagaatggttcttggtgtcattgttcctggtcgtggatgtgccattccaaatcgtcctggtatttttgtccgagtagcatattatgcaaaatggatacacaaaattattttaacatataaggtaccacagtcatagctgaagtaagtgtgtctgaagcacccaccaatacaactgtcttttacatgaagatttcagagaatgtggaatttaaaatgtcacttacaacaatcctaagacaactactggagagtcatgtttgttgaaattctcattaatgtttatgggtgttttctgttgttttgtttgtcagtgttattttgtcaatgttgaagtgaattaaggtacatgcaagtgtaataacatatctcctgaagatacttgaatggattaaaaaaacacacaggtatatttgctggatgataaagatttcatgggaaaaaaaatcaattaatctgtctaagctgctttctgatgttggtttcttaataatgagtaaaccacaaattaaatgttattttaacctcaccaaaacaatttataccttgtgtccctaaattgtagccctatattaaattatattacatttcatatgctatatgttatagttcattcatttctcttcaccatgtatcctgcaatactggtacacgaacacactttttacaaaaccacatacccatgtacacatgcctaggtacacatgtgcatgcactacagtttaaattatggtgtacctaatgtaacccctaaatattttagaagtatgtacctatagttttacctcaaaaaaaccagaaatctctaaagaccagtagaaatattaaaaaatgatgcaagatcaaaatgattagctaattctccatacataatctgcagatgatcttctttggttggcatttcaggtgtggccatcacccagagttaaataacacctaatctaggtgtttacatgtattcattatcctagttatttcatgtagtttctaattcttaaaggaaagagggtaatagttctatttgtgtaatttgtttcctccaaacttaaggccacttatttacacaagatatttgtagatctattttcctaaagcatttcttaagtgctcagatcagtatctaattgaagaagtttaaaagtgttttggtcattaaaaatgtacttaaataggttaaatctaagccttgctgctgtgattggcttctagctcactgcctttaaattttaaaaaatttaagaggaaaatttccaagtctccaaagttttataaatacccttcatcaagtcatgcattaaagtatatattggagaaaaaaataaaaatacttttctcaacctggaagattttagcctaataaagcttttttgaagtaaaagacaacttgtaaaaggaaagaaactagtttgtctcaactctgtattcatttattttttttttgaagtagagtggaatctgttgaatcagatattttatcaagatatgtttattttttcttatttcattttacaaagttcactcctaatgccatatgtaacagacatttaaattttgtgttctgtataacagccaaattatcatatttatcattgtatttgtcatgcttagctaaagatcatgtatttgttgagaaatagaataacaaaaagtaataggataggctttgaatttttgcagaaatcttcctgtacaaaacacctttaaaaataattttttgaatggtgtgaatccagtagtcccatttctctgacttagttttcttgagtgatttttatcaaggccaagtccccaaacaattccctaccagctctttagagtactgttcaatctggactaaaatggttttaagtttatggagagcttagtccacagaatatagggcggcgagtccagaaatgcttatacaatttttttttcataataagatatgtgctggcatcaagaaacttaaagtggaagcaaaaagacatccaactagttgctggtctctatcatcttatctgatggtatttctattttccttatataatacaccattttagtaagaactcctagaaatttcaagagcatattgccaaaatataaagtatatttcatagtttcttctggctgaaccagtgaaattttattattgcatattaatgatatttgtaaaacttttataaaaattgtcataattttaaatactcacattttaaaaatacttctttaatgactcttcctctaaatttcctggaaatacagataaagattagctagatacaagatacagctaagtatttagacattttgaggctagtatttttcattttattaaaggctaaaaacaataccaccaataaatcatcaaacaaaccgtacaaagtaattctctctttgggaggctcctttcgtgatagagggacatgggtggaattgacaatgaaacttagatgaacaaggtccatgttattttaggtggtagaacagggtagagtcatgtcattatttgctggtggaagacactatttaccaggtgttctttgctgaataaatcattaaacatttttaaaaatccaacaatccactttattttgtgtcattgacaaaaggatcttttaaatcagaaggtttcaatgcaatttttggtttggctgtttgaataatggttatgtactgttataattgtagacattttctcacgtctaccaggaattgaagtgtaaaactaaaatatttttcataatgcctctgccgtgcagaaggaatgataatccttttgtatacttctttaattttattgtaaaatgtgtaatgacttttacctatatgctgtgggcaggtcctcagtaaaatctattgagtcaatttctagtattaacaggcttttgcttgctatctaagtgtttcaaattatgggaagtgtgagacactggaaggcaagaaaattaacaataatggcatgtgatagcaaaattgtatttcacttattcctgtgaatatttcttgttggtaccaatggtactgtacaaagtgaatgttatagccacaacattctcttgaaaagaacactgtcaagaagtgggaaattgctgtcaggcatttcattgttgtttttaaacttttttaaaagaaatactggttttgcaatatagagatcatgtggtaaagaattttaataagatcttatactaaaaagccttaaatcaatttattgagattcaaaaaatactattataattaattacatcccatacatataggcaaactcatttaaaaaataaaactaattttggtaaaagtacatggcctttgtttttaaaatacataattttaaaataaatcacttgtcatgataaagtccaaaaagaagttatcattcaacattcaactaaggttggagctaagaatttactaatacaaaaaaagttaaaattttttggaccatatatatcttgacagtgtaacttttaagtaggttcatttccatttgcacagaaagtttctgtctttaggaaactgaaaatgaaatactgtggatgctatgactgtttgtcttgtatgtaaataggaaattaataagctgcctattgagtggtatagctgtatgcttacccaaaaaagggaacactgtggttatgacttgtattataaactttctgtagttaataaagttgttatttttataaccatgattatattattattattaataaaatattttatcaaaat

SEQ ID NO: 5232 - DNA, 819 bp, Homo sapiens
atggaggtcctgagggagaaggtggaggaggaggaggaggccgagcgggaggaggcggccgagtgggctgaatgggcgaggatggagaaaatgatgaggccagttgaggtgcggaaggaggaaatcaccttaaagcaggagacgctcagagacctggagaagaagctgtcagagatccagatcactgtctcagcggagctcccggcctttaccaaggacactattgacatctccaagctgcccatttcctacaaaaccaacacacccaaggaggaacacctgctgcaggtggcagacaacttctcccgccagtacagccatctgtgcccggaccgcgtgcccctcttcctgcaccccctgaacgagtgtgaagtgcccaagttcgtgagcacaaccctccggcccacactgatgccctaccccgagctctacaactgggacagctgtgcccagtttgtctccgacttcctcaccatggtgcccctgcctgaccctctcaagccgccctcgcacctgtactcctcgaccactgtgctcaagtaccagaaggggaactgctttgacttcagtacgctgctctgctccatgcttatcggctctggctatgatgcttactgcgtcaacggctacggctcgctggacctgtgccacatggacctgacgcgggaggtgtgcccactcactgtgaagcccaaggagaaagcaggcgaatactccctctatggtggtggcactcacgcgctagaattaccgaggagcctcatcttacgagaaaaagaactgtctgtggactgggaaacaaagtcttacgctctctga

SEQ ID NO: 5233 - DNA, 414 bp, Homo sapiens
atgttagctcctttgaagagactcagagttccaaaaccctattgtggctgtgagcaaccacttgagaaggcattaagcccagatgcaggtagagaaagaggctctttcagtgcagcaaatgcacaattctgctttgatgcctttaaagaaattagctatggccacgcaactgagaatctcttcttttgtcccttgactctcctgtctccttggctgtggggctttttggagccagaggcaacagtgcatctcacatggagaaggtgcatcacaacacactttcagtcatgtctagaggacaatcaggtgctccacttggatgaattaacaagaacttcaagttcttccaatgaggaggtattgtttctgttttcatttttacttctattacagcagtccatcttcagtccatga

SEQ ID NO: 5234 - DNA, 4491 bp, Homo sapiens
tctagaatgcacagaataactgcgtaaggaatgggtgcatagggcttcttttccttttaaatttgtactgctaaatacaccaaggaaattgacatcaaaaccaaattcaaggacttccacagacatttcaggtcaattttagttccaaaccgaagaaatcttttaaaagttcttatatagcccagttttcttttcttgatgaaatgttaactagacacctggttagtcagcttttattttgaccccacagttttttttttgagacggattctcactctgttgcccaggttggagtgcaatggtgtgatctcggcttactgcaacctacgcctcctgggttcaagcgattctcctgcctcaccttcctgagtagctgagattacaggcgcctgccaccacgccccgctaatttttgcatttttagtagggacagggtttcaccatgctggccaggctggtctcgaactcccgacctcaggtgatccgcctgcctcggcctcccaaagtgctgggattacaggggtgagccaccgtgcccgggccccacactttgtttttatgttagggcagttggaggaactgaactttgatcctgatcctttatatactcccatggtgaaacttgagcccattttacttaacacaatatatccgtgcattaggaaaacttggtagagaagattatatgcagatataaaatatctaaactcatttgttatgaaccaacgataatgagggaaaacttggacatccacatacagattttcttgaattaaagaaaaaaaccagacactgacaaaggagagctgaactgataaatggtaccctgaaaactgcagaaatgagggaaagaggcagtgggccacaaagaactttgtccttttcagagatccccagagaagccctgcccccttccccccaccccctgacagaatgttgtgtttcaaagaatgagcagattaacggatatcaagttgtgtggcctgagctgaggataaagaataatttgcctgaggagttacagtactggctggatcactacaggccttctacttggaatatcttcccatgaaagtaaaaggaatataactaaggaagattaaagttgttgctgttggaaggaagacatactaaagaaactgccgaaggccaggagagaagcaggaagagaaacacggcttgaagttctgtaagaatcagagttgggcaagaactgccaataagggagccagcgtagatctgagtactaaacacctgagcctccgagggtttgtgtgcgagggagagctctgctgatggacataggcccagaatcattaactgatttatttgggccatgtcactggtggcattattaaaagactctgccaacatcctgctttatggaaaaaccaagtggccttggaagaggctaagataaagtttcaaacttgggctccacagaagtggaacttaaggctggggctagtaccaggaccttcatgtatcaggttagagattttgatgcttttggtgatttttgtgccaagcatgtactgtcacctgggatcaatctattactctttctatgaaataattattccaaagaggctgacagtccagggaggagatagcccagtggaaggactgtcctacttgttacttatgcaaggccagaagcacctggttcatctgaaggtgaagagaaaccattttgtgaataactttccagtctacagttaccacaatggcctcctggggcaagaatcgcctttcatctcacatgactgccactatgaaggctacatagaaggagtgtcaggttcttttgtttctgtcaacatctgtgcaggtctcaggggcacatcctcctgattaaggaggaaaaatcttacagcattgagcccatggactcttcaagacggtttgaacatgtgttatacaccatggcacatcaagcgtgagtctcctgtggtgtctactagctggcaacaagggagcaggaagcctcatgatctacaggcactgtcctacttgtggtcacacaaaaagtacgtggagatgtttgtcgtggtcaacaaccagcggttccagatgtggggcagtaacgtcaatgagacggtccagacagtagtggatgtcattgctctggccaacagcttcactaggggaataaacacagaggtggtgctggctggaatggagatttggaccgagggggacctaatagatgtcacagtggacttgcaaatcacactcaggaatttcaatcactggagacaagagatgctcttccatcgtgcaaaacacgatgttgcccacatgatcgttgggcatcaccctggacagaatatgggccaggcctttctcagtggtgcctgctcaagcggttttgcggcagctgttgaatccttccatcatgaagatgtgctgttgtttgcagccctgatggcccatgagctcgggcacaacctgggtattcagcacgaccactcggcctgcttttgtaaagataagcacttttgcctcatgcatgaaaatatcacaaaagaaagtggcttcagcagctgcagctctgactacttctaccagttccttcgagaacacaaaggggcctgcctatttaacaagccacggcccaggggccgcaagcgtagggattctgcctgtggaaatggtgtggtggaggacacggagcagtgtgactgtggttctctatgtcagcatcatgcatgctgtgatgaaaactgtatactgaaggcgaaagcagagtgcagtgatggtccatgttgtcataagtgtaaatttcaccgtaagggatatccttgctgtccttctagtcgttcctgtgatctcccagaattttgcaatggtacatctgcattatgccccaacaacaggcataagcaagatggctcaaaatgtcatacaatttacgagtgccttaaagttcattgtatggaccctaataatcagtgcttacaattatatggatatggtgcaaaatcagcctcacaagagtgttacaattcaatgaacagcaaaggggaccaatttggaaactgtggcatttctaccagtcctgggtcacaatatgttcggtgttcagatggtaatatattttgtgggaaacttatatgttcaggtattacaggcttaccaaaaatcaatctccaacatacaatgattcaggtccctcagggagatggctcatgttggagcatggatgcctatatgagtactgacattcctgatgaaggagatgtgcacaatggcacttactgtgcaccaaacaaagtctgcctgaattccgcctgcacagataaaaccccagtgatttctgcctgcaacccagaaaaaacgtgtaatgggaagggagtttgtaatgatttagggcactgccactgtaatgaagggcatgccccccctgactgtgttactgcaggaagtggaggtagtgtggacagtggccctcctggtaagctaggtgggacaccttcaggagaaggtgaaaatcacaatatgactcattccagacgtgaagaacatgctgtagacatgatgatattatcattcattatactttttataatattattattaagtacaattatttgatctgcttgcttaaaaaatcaccagaggctgccccggcagaagctcctccagcagtggctccaccaccggccccagaaataaagccagaagcagcagaagtggccacagaagaaaaagaagagaaggaggaagaaaaagaagaggaggaggaggaagaagaggaggaagaatcagattcctaaggttagaaatagggagatgaagccaagtatatcaaactcctcaagtactgagtgggaatgagatgtttggtgaagtagaaatagatagctttagtggctctgactcagatatactgatgtagaaggaaggattctttcacttttattatttattttggtaattaaatttacattaatttaatatgttaaatattttagtaccttttgctttttcacatttcatttgaaccattaacatgcatctttggacatcaatgtccttgtctttttggcccaattgttttagtcaccagaaactttttcaggacatgctatcttctatttgtttgacatacagaatcatatgtacctgaatttattactaactctgggattttcattttaagtaacaactacctattatgtgaggacagttgtttatgtgattggttgttctaacttgccctataaatgtgcattcatcaaaggagaagtttttaaatccaaaaacaaataaaacccgattcatattagacaactcttcaggttccacatggtatagttactgagtccactttattctggggcactgtgggagggactatatcaaagtagaagaccctgattgcccgtaggttaagaggtcagcattgaggtcacctgctttccaaatctggcagatgtttaatatgatatatgtatatttgatttattacttcccaatatttctaga

SEQ ID NO: 5235 - DNA, 708 bp, Homo sapiens
tgtggaaagattgatcactggacacattcagaaacagtatcaatgacagactttgatatacaatatacttaccttgggggtcatgtatgtttgtctgcacatgcaagaaatggttcaaaacaatgggggacctatgcagaagctataagtgcatgtggtcaacacaggttatgtagattccaaggatgcaaatatcttagtgacataaatataacaagatataacataaattgcagagagaatagggcttgcaatgaacttttccattgtcagtgtgatcctggttatgcacctccagattgtgagccgccaatatcatcaccaggaggagtgtttaatgatggatttaggcttacggtagaaaaaagtgtacccttgtttccaaaacgacgtgctgctcctaaaaacaatggtcttttgatcagtttctacatttctttttcacctttgctcattttaattgctattgttagtcttaaatggaataaaatgaagagattttggagcaaaggcggaacaataagcagcatatctatctcagaagacagcagcaggaacaacaacgagtcacagagttaaagtagcccaagtgataacttcgaagccatagggtggagaaaggatattaccaagaaactcaccattaactggcctgatctaacaatgaaaaaaaaaagttttctctcattttgttatggcttaaagctt

SEQ ID NO: 5236 - DNA, 737 bp, Homo sapiens
tcctgacctgccctgtaggccccagtgacagytaggaatgtgcawttctccagccatcaagagactgagtacaagttgttccttaagtctagaacagcagactcagctcgtgacattctgattcgaatgacactgttcaggaatcggaatcctgtcgattagactggacagcttgtggcaagtgaatttgcctgtaacaagccagattttttaaaatttatatkgtaaatattgtgtgtgtgtgtgtgtgtgtatatatatatatatgtacagtwwtctaagttaatttaaagttgtttgtgcctttttatttttgtttttaatgctttgatatttcaatgttagcctcaatttctgaacaccataggtagaatgtaaagcttgtctgatcgttcaaagcatgaaatggatacttatatggaaattctgctcagatagaatgacagtccgtcaaaacagattgtttgcaaaggggaggcatcagtgtccttggcaggctgatttctaggtaggaaatgtggtagcctcacttttaatgaacaaatggcctttattaaaaactgagtgactctatatagctgatcagttttttcacctggaagcatttgtttctactttgatatgactgtttttcggacagtttatttgttgagagtgtgaccaaaagttacatgtttgcacctttctagttgaaaataaagtgtatattttttctataaaaaaaaaaaaaaaaaaaa

SEQ ID NO: 5237 - DNA, 1066 bp, Homo sapiens; identical to SEQ ID NO: 2

SEQ ID NO: 5238 - DNA, 921 bp, Homo sapiens; identical to SEQ ID NO: 3

SEQ ID NO: 5239 - DNA, 796 bp, Homo sapiens; identical to SEQ ID NO: 4

SEQ ID NO: 5240 - DNA, 794 bp, Homo sapiens; identical to SEQ ID NO: 5

SEQ ID NO: 5241 - DNA, 784 bp, Homo sapiens; identical to SEQ ID NO: 6

SEQ ID NO: 5242 - DNA, 754 bp, Homo sapiens; identical to SEQ ID NO: 7
  misc_feature (139)..(142): n is a, c, g, or t

SEQ ID NO: 5243 - DNA, 914 bp, Homo sapiens; identical to SEQ ID NO: 8

SEQ ID NO: 5244 - DNA, 851 bp, Homo sapiens; identical to SEQ ID NO: 9
  misc_feature (824)..(824): n is a, c, g, or t

SEQ ID NO: 5245 - DNA, 749 bp, Homo sapiens
cacgactgcccaaatatggtgtgaagttggctgacaattatgctgcagcatattgtactggcctgctgctggcccgcaggcttctcatasgttttggcatggacaagatctatgaagccaagtggaggtgactggtggatgaatacaatgtggaaaagcattgatggtcarccagggtgccttcacctgctatttggatgcaggccttgcccagaactaccactgggcaataaagtttttggtgccctgaaaggggagctgtggatggaggcttgtctatccctcacagtaccaacggattccctggttatgattctgaaagcaaggaatttaatgcagaagtacatcggaagcacatcatgggccagaatgttgcagattacatgcgctacttaatggaagaagatgaagatgcttacaagaaacagttctctcaatacataaagaacagcgtaactccagacatgatggaggagatgtataagaaagctcatgctgctatacgagagaatccagtctatgaaaagaagcccaagaaagaagttaaaaagaagaggtggaaccgtcccaaaatgtcccttgctcagaagaaggatcgggtagctcaaaagaaggcaagcttcctcagagctcaggagcgggctgctgagagctaaacccagcaattttctatgattttttcaagatatagataataaacttatgaacagcaamwaaaaaaaaaaaaaaaaaaaaaaaaaaaaaaaaaa

SEQ ID NO: 5246 - DNA, 731 bp, Homo sapiens
tacacgtgtgtttcacctgctgcaattgtgaccagcactacggctggacagccatatggagcgggatcatgaaagcccaggcattttcgggaccaactccacccatgggctatatgatggccaaaagcacctggagatcaatccctgaccaccccattgtggagactgctgcggcagaaggctgaggccgacaagaatgataaggcagttaaggacctggtggtgctgctgtttgaaaccgccctgctatcttctggcttttcccttgaggatccccagacccactccaaccgcatctatcgcatgatcaagctaggtctaggtattgatgaagatgaagtggcagcagaggaacccaatgctgcagttcctgatgagatcccccctctcgagggcgatgaggatgcgtctcgcatggaagaagtcgattaggttaggagttcatagttggaaaacttgtgcccttgtatagtgtccccatgggctcccactgcagcctcgagtgcccctgtcccacctggctccccctgctggtgtctagtgtttttttccctctcctgtccttgtgttgaaggcagtaaactaagggtgtcaagccccattccctctctactcttgacagcaggattggatgttgtgtattgtggtttattttattttcttcattttgttctgaaattaaagtatgcaaaataaaraawawrmmrwwwwwawamaaaaaaaaaaaaaaa

SEQ ID NO: 5247 - DNA, 732 bp, Homo sapiens; identical to SEQ ID NO: 12

SEQ ID NO: 5248 - DNA, 732 bp, Homo sapiens
agcgcaagggttcaggagttccctttccgattcaagaaagggtgacargacagcacctgkaaatcgrgtcactccccacccgaataytgcgctktctcmgacsggcttaaaaaryggcgmaccatgrgattatatccyrcacctggctyggagggtcctacgcccacggagtctcgctgattkctagyacagcagtctgagatcaaactgcaaggcggcagcgaggctgggggaggggcgcccgwcattgymcrggcttgmttaggtaaacaaagcagcygggaagctcgaactgggyggagcccaccacagctcaaggaggcctgcctgcctctgtaggctccacctctgggggcagggcacagacaaasraaaagacagcagtaacctctgcagacttaartgtccctgtctgacagctttgaagasagcagtggttctcccagcacrcagctggagatctgagaacrggcagactgcctcctcaagtgggtgccctgaccccctgacccccgagcagcctaactgggagrcaccccmcakcaggggcasactgacacctcacacggcagggtaytccaacagacctgcagctgagggtcctgtctgttagaaggaaaactaacaaacagaaaggacatccrcaccraaaacmcatctgtacatcaccatcatcaaagaccaaaagtagataaaaccacaaagatggggaaaaaamaraaaaaaaaaaaa

SEQ ID NO: 5249 - DNA, 757 bp, Homo sapiens
agctttgtattctgtcagtgatctttctgggccttttgagggtggaatttccctggttaaggataaatctgtagcagagcagagtcttaacccaktkcagcagccmcraatttgggcctgagtttacaaacacatcacctgacgtctcttttgcaactcmaaagtggcttcatttgattataactacttaatgtgaaagtaaccsaagaaaagaaataatctgtgtaaaaatgtctgcatctttgtctttacataaattgttcatattaaaaagcttaactgtttcccctttattgaacagtttcctttttgaggttataaaacatggccttttttttccttttagttatttcaggcatgtttgagtgttcttagggatgtgttatagacaagttttaagaaactgttgcaaggaaggtggaatgaattggagatttatttgttcttaaaaaatgaagtggctgggttcagtgattcacgcctgtaattccagcactttgggaggccaaggagggcagattgcttgagcccaagagtttaagaccagcgtgggcatcaaactgagacccccatctgtacaaaaaatttaaaaaattagccaggcatggtggcatgtacctgtagtcccatctacttgggaggctgaggcaggaggatcacctgagctcgggaagtcgaggctacagtgagctgtagtcacaccagcctgggtgacagagtgagamcctgtcgtttaaaaaaaaaaaaaaaaaaaaaa

SEQ ID NO: 5250 - DNA, 719 bp, Homo sapiens; identical to SEQ ID NO: 15

SEQ ID NO: 5251 - DNA, 772 bp, Homo sapiens
gggtatccatctttgccacagactaatggctatgaccttcaggacaaggtttcattctcyggtagatatctagagtagagttgctagtcatatggtaackgtaktgcttraatcttttgagaaaytgctagactgttttcccmagtaatgtgtaagggttccacattttcacatccytgccgatacttgttattgtctgctttttttaaatttaaaatttgtgggtatatactaatagtaggtgtatatatatatacatatatakawacatgkacatatatatggggtacagccataaattattcmaaactaaatctggagatcagttcaccgtctcttctactttctaaggaaaagcmattcttactcatgaatggaaaaatgctctgcagtctctaagtgtgtgtggtggaggaggggaagttgacttgctcctagggagggatgtttaatcacatctaatgtgtcatgaaaattacacacatttttatacagaacaatacatattgactatttcttgtctttctctcctgctagaacatgaacttcatgaggacagagacttgggcttattcaccaccaagtccccagttcctaactccagtcctttggagttagaagcaggttgcccmaagttcatgatgcagaaaaaccattttttccgagatttataggataagtcctgtaattccagattgcttggcgccmatcaggtactcaataaatgtttgttgagtgaaaaaaaaaaaaaaaaaaaaaaaaaaaaaaaaaa

SEQ ID NO: 5252 - DNA, 701 bp, Homo sapiens
tgcctcagcctccctagtagctgagagtacaggcacgtgccaccattcctggctaatttttkgtattttwagtagagacaaggtttcaccatgttagccaggatggttttgatctcctgacgtcatgatctgcccacsctgscctcccaaagtgctggggcatgagccaccgcgcccaggcatgatttctctgttttaaatactctggtggckgccccactgtcatcaagataaaaaccttcwatagtcatatgcaaggactgtgcttgctggtctctctggcttcatgcttcatcaccaactccacaaaaccccaagttccaggcacacttaagtacccacagttccctgaatacgtttgctttctcaccaccatactttgcatagtctgtttctgctgacaggaatattctccctaactctatccttgctctcctagctgttcttcagaattcaattaacacgtcacctgccccaggaaatgtctccaaacccccttgtcagagcaagtgtccccctctacgtcagcgtcacacctaaacacagctttagcaataactcaaccacgctgccctggagtgacctggttaccagtctgggaattccccgaaggcacagattaagtgttttaactccctgaactatacttaataagtacctactagtaagtagatatagtattaaacaaaaaaaaaaaaaaa

SEQ ID NO: 5253 - DNA, 741 bp, Homo sapiens; identical to SEQ ID NO: 18

SEQ ID NO: 5254 - DNA, 733 bp, Homo sapiens
acagtttttggaggtgtaawataaagggagaaatgcaaatttgaatgggataagtatawrtgatattgtagttaattagtgataactttatttttttkktggtgtcmstgatttaaattytaaaggattgatttgctattattttcatgaaatcaraattttttktttactttccaacartaatcatagaaattattctccgacagataggaatatgaaatgaagttgttccctccttttgtgatcgtgacacttctactctttcctgaaagaaatgtttctccccacwaactacttcttatttagatggacatttgagagttaggtaaataacagagattacagcctgtcatcatggatcttataatctaatcaacttcttgtcagatatcttggaatcttaatgcttatagggctgatttgtttaattaaactgttccttcattaactttctgttttaaaggaggctgaccctattcgtatctttttcttggtataaatgtgtttaaaataagtgtagagatatgctaatctaaggcagttgctatccacatgcaagctaaaggtaattaaccttttttgagtggctatctcatttatgaacttacttgatatttttgttcttgatccccctaattctctcctgctcctttttttactggtgtggtttctctggcacagtaggcatgttttctgatctaacatgcataaatcttaagagcgaatttgacaa

SEQ ID NO: 5255 - DNA, 760 bp, Homo sapiens; identical to SEQ ID NO: 20

SEQ ID NO: 5256 - DNA, 870 bp, Homo sapiens; identical to SEQ ID NO: 21
  misc_feature (171)..(171): n is a, c, g, or t

SEQ ID NO: 5257 - DNA, 707 bp, Homo sapiens
gcccacctaagctgactcagggcccaatgtcttctgtggagtctgytcagaawgattctccctcaggatatcctgaactggaagttggcacttagcaggctacctkgattgcttttggctagtcccactcccagatgcccagaggggtagtacaacagctccaagtattcacctamcygcagaggagataaaaacagtcaacctatccaaggttytggattttkactgtcagcccagagtaattttaaagcttctatttaaratatttacagtaggtagatgatgcaaatctctataccagctgttgtaaactgatggctcacagactgcacctggcttgcagatgtgttttatttggcttggatggtattttgttttttaaattttgaattggttgctagcacttaaaatttaagaaatatcggcggggtgcagtggctcacccctgtaatcccagcactttgggaggctgaggcgggtagatcaccagttcaagactagcctggccaagatggtgaaatcctgcctctactaaaaatacaaaaatattagccaggcatggtggcaggcacctgtaatcccagctactcggcaggctgaggcagagaattgcttgaacccgggaggcagaggttgcagtgagtcaagattgcactccagcctgggtgaccgagcgagactccatctcaaaaaaaaaaaaaaaaaaa

SEQ ID NO: 5258 - DNA, 687 bp, Homo sapiens
gctgtgtcccttggtggagagggcgctscsgccctgcgcggtttccagccaggaagctttcgggaagcctggacgtctgctcactggagatgacacgtgcgtggggtgttggcattcttgttatttaacacgggaaggaggtgacttcgcctgtgatggacttccagtgtgagcactggccagagtgaccaggctgaccagcaccagccctgatccagatgcagaggccaggatgtgggcccagccctgtgccaggaggctggctggaataaaggtacagatagaggcctcaccccctctgggaccactggcactcagggtgtttgcagcctcagagcccacctgcccccagggccacagctgcatctcctgccctgctgtcattacagggatgggcaggctggcatgggggcagccgctgcccctgcctgggtgttgctgtgtattcctgccggccaggggccactgccaggaccacgcctcccttttcatatcccgattcttaagttctgctattgtggtattctggtggagaaaaaagaaccgcgtggctgtttttgaactgcctggaacctaagaccctgaattcttttcccccccaaggggaaaatctatatggaaaacatttattttaaaatacaggatgaagtgaattaaaagatttaaatgcaaaaaaaaaaaaaaaaa

SEQ ID NO: 5259 - DNA, 760 bp, Homo sapiens
tagtaggccacaggaggaagactggtggagatgggagagcacaagccatcctctytgtttgtmaagaaaatgttattatgatgttcagtccaaggatcaccgcaatttttgatggatggcaaattttttaacacgtttactactatagctgaatatggagacttaaatgcaatttgattcttcactgaaatttagtttgtkatcaacattgatagacattgtcaatttcatttttgatgtctatcttatcttttttatttattcagaaatacggatgtaaaatcatttgatatagcctaattcacgctcattccacaagagctaaacacttcagctcaactgtcgttttgttttttaakatctgtgtagttgctgattcagttkatattaacctttgcattttattgaaaactatcatagcaaaaccattcctctsttttagatgatagaaactccttgtaaacttatagtgttcttgaagtcagagacaagkacacagawaacattaccctttttcaatactgtaatcaccttcttaaggtgatctctcttgattgaaatagctctctcctaacttagtaatgatgataactcgtggaatatcctgacctgacaaagaaatcagcctttccaagaggcctcagtaagtctgggatttagggatgtataccagactatggcattgtatttttaaattagcatcagatttgcagtaggtaagtctgatcagtttgaattcatgtaaatgaaaaaaaaaaaa

SEQ ID NO: 5260 - DNA, 760 bp, Homo sapiens
aggtgagcaatgcccatagacctgaatgttaacagggaaagatgctcwtattckyacagcaagatcagctgtaagttattaaktgragrmtkatakggwktgrrttmactacsrcttaattaaaagtcacatygagacaccactacatatcaatgagattaaaaagacaatactaagtggtgttgaagatgcacagcaactagagcaaactggtacagccactttggaaaacagtttggcagtttcttctagaattaaatatktaccatataacctattagtttgctcctcactattgtttacccaaaggaaattaagctcatgttctacacagacttgtatatgaatgttcatagctgctttatctataacaggcaaaaattgggaacaacttaaacattcatcagctgaagagtggctaacaaaatgaaatactactcagcaataaaaaggaacagactggccgggttctctggcttatgcctgtaatcccaacactttgggaggctgaggcaggtggattacctgaggtcaggggttcaagaccagcctgaccaacatggcgaaaccccgtctctactaaaaatacaaaaatgagctgggtgtggtggtgcattcctgtaatcctggctaccccagaggctgagggaggagaattgcttgaacctggttggcagaggttgcagtgagctaagatcttgccactgcactccagcctgggcaacagagcaaaactccatctcaataaaaaaaaaaaaaa

SEQ ID NO: 5261 - DNA, 698 bp, Homo sapiens
tacccaaaggtgttgagtgtataaacctccattaagccattaacattkgctttagcccaatgttctctgctctcttcccctgtaagaggtggctccttcctctgccatcctataraactgctacagtgcttttcttctgttgaatgacacagtgacctgtgaaacagaggagaggtttaaagactttccaaggaatttaattgccaagtgctttctgtgagtatagaaattaggaggcactatttcatgactgaccctcaccaaatgcatgcttttcagaccactagtcaagtcatcagcagaaaggaaagtatatagcagtctagaaattctagttcatacttgtaataaaagaacaaccaaaaataggcgattaaattaagtgtatcctgtatgggcccattctaccaacggaattcttaaaagaaatccaattggtttcctctgaaaaatggcagatgattgcccccagataagtggtctgtgaatttacttacactttacaaaaggctgctgattaaacactatataaagaatttacccagaaggttaataaatatggactaaaggataagatcctttgatatgatagcaatagcctggctaaggcacagagggtaaggaagcaactcagcgctagagatgagtgactggccaaatgtcacaagcttcaatattggaaccagtttgcttattta

SEQ ID NO: 5262 - DNA, 905 bp, Homo sapiens; identical to SEQ ID NO: 27
  misc_feature (51)..(51): n is a, c, g, or t
  misc_feature (161)..(161): n is a, c, g, or t
  misc_feature (635)..(635): n is a, c, g, or t
  misc_feature (638)..(638): n is a, c, g, or t
  misc_feature (683)..(683): n is a, c, g, or t
  misc_feature (698)..(698): n is a, c, g, or t
  misc_feature (721)..(721): n is a, c, g, or t
  misc_feature (723)..(723): n is a, c, g, or t
  misc_feature (732)..(732): n is a, c, g, or t
  misc_feature (744)..(744): n is a, c, g, or t
  misc_feature (786)..(786): n is a, c, g, or t

SEQ ID NO: 5263 - DNA, 685 bp, Homo sapiens
agaagtwaaaggaatrwaactagacagcaaaataggaaatgtaagttacatgatgcaaaatccagttgtawacattcaagagaaacacttatatgactgtcaaaggtctaaaattagaccatctgttttrraattttcagttgggctcacaacgttcaggraaaagaacagccactcttatgtaaaaacaaggcaacccagggatccatttttggtcatggttttctttttttttgttttgtttaatatatacattctgaaactatctcattgagggtatagctttttaaaagatttaatttcctaaaggcttgatctgttttcaaactatataggtatgtacataagcccagttataacctatgttattatatttcccaaagaacatgtgatgaatcacaacagaattaagatgcaggtgtatcctgcatggagaagaaaactcaaagggatgtagatgtggagagtataacagagtctgagagaaaagaaggtcaaattcatcattccttctcttccagagaacacttacctatcaattctcaccatcagcaagagaagtcaatagggcaggaaatcacagcaaattcaagagtccagacgggactggagaaactcactaacagagtaaggagctggaaaactgatctgagaattgtgtttctttctacaccaaaaaaaaaaa

SEQ ID NO: 5264 - DNA, 693 bp, Homo sapiens
agattagtcaggcatgkgtcatgcgcctgtggtcccagctattcaggaggctgaggtggkaggatcgttgagcctgagagkcagaagcttgcagtgatcccagatcatggccactgtgctctagcctgggcwatagggcaagactctctctcaaaarrrgaragaaaacwrtchwacacaaawtgggacacawawctawtccmcaycagctwatcmackytgagwgkccygkacygcytggatwagtamcaaagtatwacmyacygacatwattccaaaggagtttacmatctactagaaacaatwaggatttaaaacataagagcatgaacaagaagacaaatagtttggaaaactaccatactaaagttcagagaaagcttcatcaaaggtaaaaattgggctgggactgggcacagtggttcatgcctgtaatcccagcactttgggaggctctcttgaagtcaggagttccacatggagaaactccgtctttactaaaaacacaaaaattagctgggcgtgctggcacacacctgtagtcccagctacttgaaaggctgaggcaggagaatcgcttgaacccaggaggtggaggatgcagtgagtcgagatggtgccactgcattccagcctgggtgacaaagcgagactccatctcaaaataaataaacaaacaaaaaaaaaaaaaaa

SEQ ID NO: 5265 - DNA, 710 bp, Homo sapiens; identical to SEQ ID NO: 30

SEQ ID NO: 5266 - DNA, 688 bp, Homo sapiens; identical to SEQ ID NO: 31

SEQ ID NO: 5267 - DNA, 681 bp, Homo sapiens
acagtctcagcaagraaagaagtggagagtgkgctgtgcggtaagcatccgaataaatcctcygtgaagtatcttatgacctgggcattaagtataccaagttagttgattctttgaagttgcatggctgtacccttccatctacacttttgtgtactattytgaagtcaacctgggtatctggatatcaaaggagaagtcttactcttctaggtcccaagtagcgagataaattccaagaagaactgctgcccattagaattagaaatatcgctaataactactagtatgaatttatattgtcatttactttctctcaagttttaaagcatatccccatgcttaattgtgcagttgctcaaaggcagtatagaagtgagtaagagttacatcagggacaaatatcctaacccaactatttgtaatttaaaacaaaaaamaaagtgacctagaccaacaccatttttttccttggttcaattcaaatgacctgaaatgtattggcaggatccacaaagattttgagttttaaatatatgaaagtcccagatggtttctattggctcgacatttttctatgatttcatttgtgtcagagcagccacctaagagcataactaacactgatttaagttggccccttccaaacgcattgaaaaataatggaataaaaaaaaaaaa

SEQ ID NO: 5268 - DNA, 715 bp, Homo sapiens
atggagcttgcagagcacttctgaaatacacaccacatacggaatggccatattttctgggttgtaaaatactttgaattgtaactccatatattgaatagattttcagtggtgagggaagawacaatacatktagttcatatratccatatgtwcgwrrwagaagtgctggtatattccagacatggaagtcagtaamtatctaggagctaagaggtatataatcatgagacattagtgacttcgtaagcctgttgttaaacggttctawaccagactgggtaagtcgcaccagcratgaatagattaagggtgttgatctccttagcagcttatttcataattgcatcaaggcagggtccattaaactaaggtgagaatgatatggtgcggaattcagaggacwataggtaaaagatgaaaatctttacatttaaaatcttattgagacaagatcttggtcagtgtctactcatacatagaattgcctagaagctaatatttgagtttaccatattactgttggctttctatttttctcatttgttctgtttcttttctgtccttttgtgccttcttgtagattattaattccactcccttgtaacaattaggttgttatacattctttatgcttttagtagtatttcagttatttattgctgtgttcaaaccacccccaaaatataatgacttaaaacaaaaaaaaaaaaaa

SEQ ID NO: 5269 - DNA, 711 bp, Homo sapiens
ctctactaaakrcaaawtasccggtgtgtggtggtgcacaccgtgtaatcccagtatatyctgaaggtggaggcaggagaatcacttgaacctaagaggtagaggttacagtgagccgagttcgttccactacactcaagcctgggggacagagtgagactctgtcataataataataataataataatgagtaataaaatttaagaacaattaggtacaaatggaatcccaatctatctaaatttcatccattattagcctggggtgtggtggctcacgcctgcaatctcagtgctttgggaggccaagttggggggtggattacttgaggtcaggagttcaagaccagcctggccaacatggcaaaactccatctctattaaaaatacaaaaattagcccgtgtggtggtgtgcgtctgcagtcccagctacttgggaggttgacacaggagaatcacttgagcctgggaggcagaggttgcagtgagccaagattgtaccattgtactccagcctgggtgacggagcgagatcttgtttcaaaaaaaatagggcctggcgtggtggctcatgcttgtaatcacggcactttggaaggccaaggtgggtggatcacgaggtcaggagtttgagaccagcctggccaacatggtgaaaccccgtctctactaaaaaaaaaaaaaaaaaaaaaaaaaaaaaaaaaaaaaaa

SEQ ID NO: 5270 - DNA, 696 bp, Homo sapiens; identical to SEQ ID NO: 35

SEQ ID NO: 5271 - DNA, 1007 bp, Homo sapiens; identical to SEQ ID NO: 36

SEQ ID NO: 5272 - DNA, 732 bp, Homo sapiens; identical to SEQ ID NO: 37

SEQ ID NO: 5273 - DNA, 618 bp, Homo sapiens; identical to SEQ ID NO: 38
  misc_feature (8)..(8): n is a, c, g, or t
  misc_feature (86)..(88): n is a, c, g, or t
  misc_feature (142)..(142): n is a, c, g, or t
  misc_feature (176)..(177): n is a, c, g, or t
  misc_feature (199)..(199): n is a, c, g, or t
  misc_feature (205)..(205): n is a, c, g, or t
  misc_feature (229)..(230): n is a, c, g, or t
  misc_feature (240)..(241): n is a, c, g, or t
  misc_feature (267)..(268): n is a, c, g, or t
  misc_feature (270)..(270): n is a, c, g, or t
  misc_feature (298)..(298): n is a, c, g, or t

SEQ ID NO: 5274 - DNA, 1002 bp, Homo sapiens; identical to SEQ ID NO: 39

SEQ ID NO: 5275 - DNA, 731 bp, Homo sapiens; identical to SEQ ID NO: 40

SEQ ID NO: 5276 - DNA, 1173 bp, Homo sapiens; identical to SEQ ID NO: 41

SEQ ID NO: 5277 - DNA, 1143 bp, Homo sapiens; identical to SEQ ID NO: 42

SEQ ID NO: 5278 - DNA, 796 bp, Homo sapiens; identical to SEQ ID NO: 43

SEQ ID NO: 5279 - DNA, 903 bp, Homo sapiens; identical to SEQ ID NO: 44
  misc_feature (775)..(775): n is a, c, g, or t
  misc_feature (786)..(786): n is a, c, g, or t

SEQ ID NO: 5280 - DNA, 623 bp, Homo sapiens
tcttgactcagacaccggctttgcgtcttccacaacatattgaacctgttgatcacttaaaggcaagaagatgaggaagaaggaagcggagcaggtgctgcagaagtttgttccaaacaagtggctgattgagaaggaaggggagttcaccctgcacggccgggccatcctggagatggarcaatacatccgggagacgtaccccgacgcggtgaagatctgcratatctgtcacagcctcctcatccagggtcaaagctgcgaaacctgtgggatcaggatgcacttaccctgcgtggccaagtacttccagtcgaatgctgaaccgcgctgcccccactgcaacgactactggccccacgagatcccawaagtcttcgaccctgagaaggagagggagtctggtgtcttgaaatcgaacaaaaagtccctgcggtccaggcagcattagccatcgtgccctgctgaggggctggctgccttgagtggcctgatcgccacagcccttcttggaagaaaggcgtcygtgtttcaggttccacgcgagtcacctctttcgtcttaatgttcaccgtccacagctttggaataaaccatcctgggaagttaaaaaaaaaaaaaaa

SEQ ID NO: 5281 - DNA, 1119 bp, Homo sapiens; identical to SEQ ID NO: 46

SEQ ID NO: 5282 - DNA, 731 bp, Homo sapiens; identical to SEQ ID NO: 47

SEQ ID NO: 5283 - DNA, 991 bp, Homo sapiens; identical to SEQ ID NO: 48
  misc_feature (111)..(111): n is a, c, g, or t

SEQ ID NO: 5284 - DNA, 991 bp, Homo sapiens; identical to SEQ ID NO: 48
  misc_feature (111)..(111): n is a, c, g, or t

SEQ ID NO: 5285 - DNA, 799 bp, Homo sapiens
aggcaccagaaccaacaagattgagaatttctgagcagtgtgtgccctcgcaggtaccccaactgccagctctgaactgagtccaacacagctggctggacatatttgccgaatttgtcgtgcctacaatcaagaattcaaacccagcactcaatgacaatctggagaagggactcctgaaagccctgaaggttttagacaattacttaacatcccccctcccagaagaagtggatgaaaccmgtgctgwwgatgaaggtgtctctcagaggwagtttttggatggcaacgagctcatcgctggctgwctgcaacctgttgtccmaagttagcacatagtacaggtggtgtgtaagaagtaccggggattcaccatccccgaggccttccggggagtgcatcggtacttgagcaatgcctacgcccgggaagaattcgcttccacctgtccagatgatgtaggagatcgagctcgcctatgagcaagtggcaaaggccctcaaatatagcccctcctgggactccctcaaccccctccattttctccacmaaggccctggtggtttccacmttgctacccmatggacacactccmaaatggccmgtgggcagggaatcctggagcacttgttccgggatggtgtggtggaagaggggatgagggaaagaaatggggggcctgggtcagatttttattgtggggtgggatgagtaggacaacatatttcagtaataaaatacagaataaaaaaaaaaaaaaaaaaaaaaaaaaaaaaaaaaaaaaaaaaaaaaaaaaaaa

SEQ ID NO: 5286 - DNA, 799 bp, Homo sapiens; identical to SEQ ID NO: 5285

SEQ ID NO: 5287 - DNA, 1069 bp, Homo sapiens; identical to SEQ ID NO: 52

SEQ ID NO: 5288 - DNA, 831 bp, Homo sapiens; identical to SEQ ID NO: 53
  misc_feature (72)..(72): n is a, c, g, or t
  misc_feature (129)..(129): n is a, c, g, or t

SEQ ID NO: 5289 - DNA, 741 bp, Homo sapiens
gagacaatattgtcttcctgcgagaatagaasgaggmrctcytactatktagagaasccatcatttggatactacrrawktgtgtaatatacarctcstagcatttatttacaaaaatattatgccacggaaatatatracraracamcttaraaacaagagaaawaaataggracatatccraatatggtcaggatatttggattagccagaaaaagccttatagtaactgtgtaatttgttcaagataatgaatgtagaaaatagtcaaaaataaacaaaaataagaagttttaccagagaatggaaactatttaaggaaagaaaagaatcaagtaatcattctaaagatgaaaaacaaagaatgaaaattaactaaacaggattaacttaacaatagatgttgacacagcaggagataagattaatgttctagggccgggcaccgtggctcacacctgtaatcccagcactttgggagaccaaggcgggaggatcatgaagttcaaggagttcgagaccatcctggctaacatggtgaaaccccatctctactataaatactaaaaaattaatgccaggtgtggtggcgcgcacctgtagtcccagctactcaggaggctgaggtgagagaattgcttgaactccaggagacggaggttgcagtgagcccagattgcgccattgcactccagcctgggtgacagagtgagactctgtctcaaacaaaaaaaaaaaaaa

SEQ ID NO: 5290 - DNA, 771 bp, Homo sapiens
catttgagacagaaattatgtcacaggcaccaaagtggattttttctawgaataccaagataatcacatcactccctcccatcaaactcgttcaaatgccraacaattccttscaggttttaatacaaagttcttcatgatttggaaattatttatattcctagaatcatttctccttaaggtttacctcttactctatgtaaaagccccacctattgcttctctatgagtcttagaaaacaccatgcttattctcctgtctagaactttatataagaaatctctctacttgaatttctcctcctcttctccttcatattgctaactccttaactcaggtgccacttagtccagaaagttctccttgtcctacctccttagttgcccttagttgtccctttagaatcctcattacaataatttgtaattgacaaaatagtgacttctttttgtctcccttagattataagcactgaaaatttggccccttgatactgaattcaacattatcttcttactgctccactgacaagcccagtgactgacatacatagcagatatatgaaaaaaaaaaaaaggaaaagaaaaagggaaaaaagtgactgtaaataagaaattatttttaaatagagataaataaaataaattgaagttttacgctcacaaaataaatcataataattcaagagtatgcaaagagcttggcaggaacacattgaagactaagagtttttaggccaaatcatcgaaaaaaaaaaaaaaaaaaaaaaa

SEQ ID NO: 5291 - DNA, 787 bp, Homo sapiens; identical to SEQ ID NO: 56

SEQ ID NO: 5292 - DNA, 791 bp, Homo sapiens
agtattccggataccccmgcagaactgkkgktctymaggaaasracgtcatratcrgcatcratkgacagtcckkgkyctccgccmakgatgtcagcgacgtcawtaaaagggraagcacsctgaacatggtkgtccgcvggggtwatgmagatatcatgatcmcagtgattcccgaagaaattgacccmtaggcagaggcatgagctggacttcatgtttccctcraagactctcccgtggatgacggatgaggactctgggctgctggaataggacactcwagactkttgactgcchttttgtttgttcagtggagactcsctggcchacagaatccttcttgatagttkgcaggcvaammvwatgtaatgttgcagatccgcaggcmgaagctctgcccttctgtatcctatgtatgcmgtgtgctttttcttgccmgcttgggccmttcttgcttagmcmgtcagcatttgtctcctcctttaactgagtcatcatcttagtccmactaatgcagtcgatacmatgcgtagatagaagaagccccmcgggagccaggatgggactggtcgtgtttgtgcttttctccmagtcagcacccmaaggtcaatgcacagagaccccgggtgggtgagcgctggcttctcmaacggccgaagttgcctcttttaggaatctctttggaattgggagcmcgatgactctgagtttgagctattaaagtacttcttacacawwrmaaaaaaaaaaaaaaaaaaaaaaaaaaaaaaaaaaaaaaaaaaaaaaaaa

SEQ ID NO: 5293 - DNA, 653 bp, Homo sapiens
gcagaagaaaattggctggggccaaagaaagaccttggtctgccgattaaaagagctcatgttattctacacacagatcttgacacatcctactaaattcctgactctgtaagaaaatatttttacaagcttacaggtaggtagaacatagtacttcaggaaaammaaatcagaggcatcagacttctcacccgcgacaatggaagccatagcaatggctctagcaaaatactaagagaaaagtagcaaaccccwracacaacatctgtcacttgtcctgaaaaaaaagtgtatgtatggatactcagaaaatacaccacccacatatgtcatatagaaaaacacctgaaaaagatctctgattgagggacaaatgaattagagacctctggggaaggacaggagagacaagagcagcaagaagtaaaccctgtctgtgcctgaacctgctttctctatagatacacagtttcatgtatctgtatctattccactagatagatactaaagttcaagcactggctgggcacagtggctcatgcctgtaatcctagcactttaggaggccaaggcaggcggatggcttgagttcaggagttcaagaccagcctgggaaacacagtgagacctcatctcaacaaaaaaaaaaaaaa

SEQ ID NO: 5294 - DNA, 754 bp, Homo sapiens
ttcaggtttctttggctcaggwgccagaatctggagtcctggatccttttcgcccatctttccctggcagagacgtaagcataaaaccatgtctttaggaaaggactcgcctaatacaaacatgtgtatgcatgcagtttcaaggcactgaacaggcacctctagtcaacagtccttgttgtctggatgatgtattacttctagattttcagaatcttaactgtctacgttggctgactttagtttgctcacaatgagcgatctggcagtgctctgagaaccaagaacttaatttcttaattacacaaacatgtggatcagaggaaagatgagaaagagaacaagcatacctatctgactccttccagtggtctctgttccctccgtctcctggaccacggctagagttcccagtttggccttttggggcattcatcccatctactttattttcatctgcttgggcagtaatgtaaacaaattaaaggcaagtaaaagtatcaatgtccctctcctaagatttcccttaagctgaagaaaactgtgcccacatgtactgagggaaactaacctcaccccaacccagacttccttcctgaagcccttctttccacatcctctacagcacacaaaaatacaaaaaacaaacaaaatccactaaaaagttccatgtagggatatgccatcatgaaaagcaagctggaaataaagattatgacgctcwrwarwrammwwrrwwaaaaaaaaaaaaaaa

SEQ ID NO: 5295 - DNA, 832 bp, Homo sapiens; identical to SEQ ID NO: 60

SEQ ID NO: 5296 - DNA, 832 bp, Homo sapiens; identical to SEQ ID NO: 60

SEQ ID NO: 5297 - DNA, 809 bp, Homo sapiens
gagaaaaagaaggtgtctatamcgctaaatwaaggggatattgtttgtatttatacytcttggaakccagtgtatattttagaactcagggamcaatggcttgtatttwmgccgtatacactcctttkaagraattccacccccatggtatgkkgggcagccttagatkcctagatttcatcacagcttctatttgtgaaccattagtttgtatccctcttttgacaaccaccttggaaaataatttctctctcatgcaaacctgtcccaccttattgaaggcccactgtagcctggttacaactttaaaacagttctctgtactgaagtagtcatgttactaaactgcacgaatgacactagcaagttaaaacaacgtgaattcttaatgtatgtcggatttaaaattcttttgatccccgatttgttgtgctcagcattgtagtctgtgcaaagcaaagttattagctgagaaaattaagatgtttgagtattctatatttctattctttgatgtgtataaaaattagaattggaattacaattaactgctgaagttactatcagagcaaagtaaacaaaatgtcattgatatgtaaacaaattcaatgccctaatcaaaaaatgtaaatagaatgggatttgaattcacatcatattaattcctaaagagaaagtatgatagaaagaacatgagcatggaaatagcaaaacaacacaggtcaggtatgagtttttgaaaaatcctgatttgaaaatccacttgtttccttaataaagttattttaaccattaaaaaaaaaaaaaaa

SEQ ID NO: 5298 - DNA, 684 bp, Homo sapiens; identical to SEQ ID NO: 63

SEQ ID NO: 5299 - DNA, 807 bp, Homo sapiens; identical to SEQ ID NO: 64

SEQ ID NO: 5300 - DNA, 723 bp, Homo sapiens
ctgctcagcgtcgtgagtactggggattacaggcatgcaccaccacagcacagctaatttggtatctttagttagagatggggttttcaccatgtwggtcagsctgttctcgarctcctgacactcargtgatctgcctgcrttggcctccacaaaagtgctkgtgatttacaggcgtgagccaactgcgcytagccgtcacatttctagacaagcatgaaaggggttcawttttgtcttcttctttgccctgccgtcagcatggtggaaatggctctgcctatgctcatgcttctggtgcccaatgccttgcactgtgccattcaacactatgaagagaaacaagtagccacacctcaaaataatgtggctgtcaactggcctaaataaacctacacaaaccagtacttgccttttgctggaaacattgattatgtgctcctcaacgtagtagaaagcggtatcctgattagtctaacagttgtgttagactttagggccagtattgtcagcatttatttatttatgtacctttgttatgatgggatatttttcatttgaaacttgttcataaaaatgtcaatgacattgatgactgatttgtacatatttttcatatagttttgtttaaaaaataattcatgcaaaatcttgaagtcatttttgctattgaaataaaccttgaattaaaatatttcatcatcwaaaaaaaaaaaaaaaaaa

SEQ ID NO: 5301 - DNA, 1043 bp, Homo sapiens; identical to SEQ ID NO: 66

SEQ ID NO: 5302 - DNA, 729 bp, Homo sapiens; identical to SEQ ID NO: 67

SEQ ID NO: 5303 - DNA, 711 bp, Homo sapiens
gggtttgagtctcacccgcttcttcctaggtgcataaccggtacagtttactktaatyytcacaccgagacttctcctctatgaaatgggctcgtaacagaatttaccttctagcgttatagtaaaaatttattgcctgaagcatagggcctttaaaagtgttagctgttattattagtgtgtgatattgccataattgttccgaatttctccacttttctttttgccattcctggctacttcccagtcataataataatagtaaggtagttctactatcatgcccatttggcagatgaaggaactgaaggtggcagagattggcaaatcacccagggtcacacaattgataatcctgcccatcctttaaagcccagcttcagattggacgcggtggctcatgcctgtaatcctagcactttgggaggctaatgcaggcggatcacctgaggtcaggagttcaagaccagcctggccaacatggcaagaccaccgtctctactagaaatacmaaaattagccaggcttggtggcgcacgcctgtagccctgcctacttggaaagttgaggtggaaggatcacttgaacccgggaggcggaaggttcagtgagctgtgatcacactactgcactccagcctgggtcacagagtgagatgactctgtctccaaaaaaaaaaaaaaaaaaaaaaaaaaaaaaaaaaaaaaaaaa

SEQ ID NO: 5304 - DNA, 932 bp, Homo sapiens; identical to SEQ ID NO: 69

SEQ ID NO: 5305 - DNA, 723 bp, Homo sapiens
  misc_feature (7)..(7): n is a, c, g, or t
gggcttngatgtgatgtctcatgcttttmatgtttkttamacrctttwwtgaggcatawtkttagattccatatgattcactcattgtaagataacagtttggtaagttttagtatattcacagctgggcacaacttcagagcattcatcaccccagaaggtcctttgttcccattgtcactgtcatccccatcccaccctggcccaaaggcaaacccccagtctgctttttagtctttatcattctatgttattattattattattatttattattattactattttgagacagggtcttactctgtcacccaggctggagtgcagtggcatgatcatggctcgctgcagccttaaactcctgggctcaagcgatccccccacctccacctcacaagtagctgggaccacagacacacaccaccacgcctggctaattttttttttttttgtcttttctggtagagatgggggatctccctgtgttgcccaggctggtctgaagctcctggcctcaagccatcctctcacctcagcctcccaaagtgctaggattacagatgtgagctaccatgcctggccctttaattgttttttatactttaaaaggtatatattctttactttattctacatcttaatttatatgtataatatattcttatatatctcacgtgcataatatattctactaaaagctttttttaaaaaaaaaaaaaaaaa

SEQ ID NO: 5306 - DNA, 811 bp, Homo sapiens; identical to SEQ ID NO: 71

SEQ ID NO: 5307 - DNA, 742 bp, Homo sapiens
caaggcataaggccatttatgttcagcagctttcagtgatgtccgtgctggggccaccagcacaaaggagtgtgtacctataakgtcatcggagccttgaaggaagatctaagcactgtctgttgtctttataggaaatttggcccccacatgtaaatgtgcgaaaccgaaactgcctttcattwaggccaaggtcattactgaggaaacagcagacagaattttggcraaatatcaaatattttcaataattcaaccatttgaaaaagaatactgcttgtttcggaatataaatgagagtgagtagtagaaataagraatccaagctagggaccaaagaaaactaagctaaggactctcacagatatgataaatgggcatgcacaaagatgttcatagaagtattattaagaattggaaataacctactatctagcaataatgaatttaaaaagataaactgtggcatatacatattatgaagctattaaagacaatagttttagaaaagagaaataaaactaaagatacagaaaaaacctttgcagatttaagtaaaataataataataaagttatagctatggaaaaatgcatcctcaggaaaatacactaaaaagaaatacaccagaatgttatggttgtgataggacagcagtattatgggcgaaatatgttttctcttttattccgattggtagagaattggatattgtattgatttagaaacaaaaaaaaaaaaa

SEQ ID NO: 5308 - DNA, 1067 bp, Homo sapiens; identical to SEQ ID NO: 73

SEQ ID NO: 5309 - DNA, 882 bp, Homo sapiens; identical to SEQ ID NO: 74
  misc_feature (738)..(738): n is a, c, g, or t
  misc_feature (743)..(743): n is a, c, g, or t
  misc_feature (746)..(746): n is a, c, g, or t
  misc_feature (751)..(751): n is a, c, g, or t

SEQ ID NO: 5310 - DNA, 954 bp, Homo sapiens; identical to SEQ ID NO: 75

SEQ ID NO: 5311 - DNA, 704 bp, Homo sapiens
ctcggcgccgtgccctgtccaaacttgtcggtcccmagagagcaacaccatagatccagacctgamcccytaagcccaactctaggaaatgcacaggctccacttcactcccaggagattcctatggatctatggaagaaaatgaggcagtgaccgaggaatttaaactctggggtgaaatcatttcctcccaattattcttcgtctaatgacagaagatgcaccactaaaaaagtgaccttatgccctctaacctctgagaagatctgagtcacatggcaattctatttgtaacattacaagattatagaggccagttttcccttcctcctcatgtttcgttctcccccatgacatttttagaaagtcacattcatgttattttatcattagctatatgccttaaccctggccttcagtgcagagcctgcttcactcttctgtaaattagctcattcctctgcaggtggaccccaaataatctagcatgtcttccttccacacatagaggcacctgtttgcacacacttaaagctatccgtctaaacagaaaactgtttttgatgtatgtcattctgtgggcagcttttctatgccatgactgctaacataaaaggagatatgagccaagttttgaaaaaaaaaaactattatttcacagaaagtggttatcaaaatagtaaaaataaaaaaaaaaaaaaaaa

SEQ ID NO: 5312 - DNA, 700 bp, Homo sapiens
tgagaattccgaatgacccctacctctgccgtagccaccaccattctactttgtgtctctatgaatttaactactgtcagtaccktatgtaagtggattagcgccaratttgtctttttgcgattggcttagtcagcttagcatcatgtcgttscaggtttcagtcatattgcggcatagtgtcaggattttcktccctkgtagggtwacacttgattgagctctttactgcctascaggccttgtgctatgcgcttcaactagacctsactaatcaccctatgaggtagggagtctcactaactccatttcacagatgaagaaactgaagacaggaatgtttagaaagctgcctgatatggtttagctctgtgtccccacccaraactcatgttgaattgtaattcccagtgttgggggagggacctggtggaaggtgattggatcgtgggggtggatttccccctggctgttctcgtgatagtgagtgagttctcacaagatctgatggtttaaaagcgtgtagcacctccccctgcacgctctctccgtgatctgcaatggtcagctgtgcttgcttccccttcgccttccactatgactgtaagtttcctgaggccttcccagtcatgctacctgtagagcctgcagaaccgtgagtgaattaaacctcttttcttcataaaaaaaaaaaaaaaaa

SEQ ID NO: 5313 - DNA, 756 bp, Homo sapiens; identical to SEQ ID NO: 78
  misc_feature (186)..(186): n is a, c, g, or t

SEQ ID NO: 5314 - DNA, 707 bp, Homo sapiens
aaaggaagggcaartaggcastakacascagagtckraakttctggaagaggtccagactggaaatgtacactttggagratrtcagcccystggggaataggagattagagaaatatgctatgagattgtgkyccctttsccygtagagttakagttttwaccctgggcacagatttgagggccygtctcttggggattataagagaaacgcgwgagtgtggcccaggatcttwatmtatwatgtaaccgaggatmtaccaaakgtcacascaactctaaaaataagagaaagtcacaggccctcttctttcggccccttgcgaaakggctaaccagggacccaagwakgcataccccaccaagaccagaagtaaggaaggacccagtaggaggctggaggtaaaagaaaaataagggcccagcacggtagctcatgcctataatcccagcactttgggaagcgatggatcacaaggttaagagatggagaccatcctggccaacatagtgaaaccctatctctgctaaaaacacaaaaattagctgggcgtggtggcacgcgcctgtagtcccagctactcgggaggccgaggcagaagaatcacttgaaccgaggaggcagaggttgcagtgagccgagatcgcaccactgcacttcagcctggcaacagagcaagacttggtctcaaaaaaaaaaaaaaaaaa

SEQ ID NO: 5315 - DNA, 687 bp, Homo sapiens; identical to SEQ ID NO: 80

SEQ ID NO: 5316 - DNA, 766 bp, Homo sapiens
cctttagaatgagggaaagcacagtgcacacatggagaattttgttgatagatttagtkggsccaagagttgagattgtgccaacggcaatgaactcytgttctgaatagctctgttgtgatggggtcattctgcttggcacagatatgcgcacacctgagcactgtggtcagctcaggtcaaatgtgtggggctggaggatagtgatctactatgtgccagccaccatctgaggtgggaaatccttcctcatgctcacaacttggaaaggtgacatcattcaccccattttacagacattagaagacacaaaatctagagaggttaactagcttatttggtcacacatctaagacgtgatagtgatggaattcaagcctaggctaatcttgttccaaaacttgatctgcctccctgtggaaggaagagtaacactatgttttgaagggactagcacgcttccatcttgcattatttatagtgctttcacttagaaaaagaatcagcttttttggtaaaacaaagagttcagtttcaatgcatggaaactgtaagaagattctggctagaaataaagaaaaagtaatagaactgtttggaaatgaaatatattgttcatccatgcatttaacaaacatttagtcattgttaattgaatatttattatgtgtcagacagtattttggatgattgggataaatcagtgaacaaaacaagatccttattttcaaggagtttaaattctagcagagaaaaaaaaaaaaaa

SEQ ID NO: 5317 - DNA, 705 bp, Homo sapiens
cagcggccatgttctcctgaccggactcgcagattgsccgcttcgaggccgtcgcacacgcagtckttgagcagcgccgccttgggcatagccagcatgtcctcaatgaacggtgcggcatttcgtccgtgcagcgcagcccgttgaagactttgccgcagtaggtcaggtagcggctcagcgccaggttgcagcggctgtcgcggtcgcagcgccgccgggcctcggtgcagcccatgaccccgcccgcgccggggccgcccgcgccgccgccgctcgtccggggcaggcacggctcaatggcgcgcttggtggacttgcagttctcgtcctgcgcgcagtcacagtcctccagggcgggcccgcggcgcgtgtggttgagctgaatgagggccgagatgcagtgactcgggcagcgccagcgcgacgagaaagaggcggccgaggccgggaaagcggcggcggcggccccgggcgcgtcgcccccgccgtgctgcgccagcaccggcgcgcacgcctcggcgtactggttgtaggcgtagctgcactccggctccccctggcactgcagcagcgcctgccagcagatgaggcggcggccgtgcgccagccccgatccccgcggcgccgagcccagcagctgcagcagcgccatcaggcacagccaggcgcccggcactgtccccccgcgggcctcgccgccgc

SEQ ID NO: 5318 - DNA, 682 bp, Homo sapiens
tccggtcacgtcacacacagcacagaggcaagaagcgaaggcaktggcattcwcaggactactktatattmaagtttatkacatttggaaaatstactgtacagggaaawacccattggattaagtagagttgttgccaaaagcaaaagactatcactctttggaaaatattcctgattccagctccagggctccagggtggggccatcaggagctaacggagaacctggccttggatggaggcgtctcagagccagctctgcccaagacacccctcgtcaatttccaggaggaagcagcccctggagacggcgccacaggcaggacgggcgtggtctgcaggaggatctccaggcccctgccgccctccctacagtcctctctgtctgaaggctgagtcccagcattcacttctcacacgggcttctccaacgtggcagcggcccaggcctcagcatggccctgagcgcatggacacaggcacgactgcttgaaagaggcggcggccccacggcagcctggactggccagcctgccaacagaccaccagaaacggggccaccagacagatagtccataccctgttgcacacatgagcgacaaactcaagagacaacacacaaactaagcctacattttggcttccagatttggttctcctagtttaaaaaaaaaaaaaaaa

SEQ ID NO: 5319 - DNA, 694 bp, Homo sapiens
aggctgtagaaatctggtgtactytgkgctaagaatckgtctttctgtgttctgtaatggagagagaggtatcacaggatagaatgtgggtatagggcccctataatcctgcttttcaagtcagtttggcaarttggtcagttacaaactttgctatgggtccctgaaacamaatactgtatttataaaatttgctctgtcttgttttggtgttttaagagcttaaccttatgaccatgtggggatacattcttttggtttccaccacccagaggacaggaattttgggagttcatgtcatagttagccctaaaratttttctgtgagcagttaaaagccttgcaagctagaaattggcttctctaggctcttctaggaaaagccaatagaaactgctcaatgctgtagagctcagcagctaaggctttatctttcgacagtggtggcctgggttcaatagttggcttctggaatgattgctttctggtttgttaattgtgtaactttgccatttattgaggttttttttttcccctcatagatagcttctgatttcctctcttgaattttcctttctcagaactaccttgtgcagattctaaatcttgtaaaaaaaaaaaaaaaagggcgttttgaaataaaataaggaattttattctcaaaaaaaaaaaaaaaaaaaaaaaaaaaaaaaaa

SEQ ID NO: 5320 - DNA, 705 bp, Homo sapiens
tggaaagaaactggtggtgatcaaaggttacagcagaataaaatatactgggacacgraaytgtgacatgtatktcccccaccagtcaggactctatgttcaatatttttatttcattatgcttacaaaagcaaatgaatgtccctttgtatttccttaagaatgaaaagatgaatgtttctttctttgcaagttccatggaagctaagaaccttaatactataaacattttaatgcttgataatggttctgtcttcaaaatgcaaaacgttttattctgacaaataaaaactctaaaaaaatgaatgcatgcttcttttttgttacatacaaatgggcttatattgcgccmatctgttcactccatcaaagtctttgagggttcatttgaaagattacattttctaactaagcataccttataaatttgcattatatgtccactaacagatgtatatatgtcctctgttgtatgtttaagatgttgcatggacttaacaatgcaaaacattatattactgcctttctaatgaaacaaattgaagcctcagatgtcttttaatcttctgaaggtgatttaaaaaaaaggtaaccatgtatgtaaacagatgtggatttcacaaaacactcctataaaaaaaatacctagcacagtagcatgcacacagtgtgcaatttcgtggaaaaaggaaaaaaaaaaaaaaa

SEQ ID NO: 5321 - DNA, 974 bp, Homo sapiens; identical to SEQ ID NO: 86
  misc_feature (788)..(800): n is a, c, g, or t
  misc_feature (802)..(804): n is a, c, g, or t
  misc_feature (806)..(806): n is a, c, g, or t
  misc_feature (808)..(808): n is a, c, g, or t
  misc_feature (810)..(810): n is a, c, g, or t
  misc_feature (819)..(821): n is a, c, g, or t
  misc_feature (842)..(842): n is a, c, g, or t
  misc_feature (845)..(845): n is a, c, g, or t
  misc_feature (860)..(860): n is a, c, g, or t
  misc_feature (878)..(878): n is a, c, g, or t
  misc_feature (930)..(930): n is a, c, g, or t

SEQ ID NO: 5322 - DNA, 865 bp, Homo sapiens; identical to SEQ ID NO: 87

SEQ ID NO: 5323 - DNA, 702 bp, Homo sapiens
  misc_feature (13)..(13): n is a, c, g, or t
  misc_feature (72)..(72): n is a, c, g, or t
ccgtctaaagcancgggaagaggctgtgcctgttgagtctcctgtgcagaagtttgagggtggaaaggcctngaggggtgaagtgaaataggaccctcccaccatsccctkytgctgtaacctctgagggakctgktctgaaatgggcwaaattgcaggtkttttygttccagtatcacgagaccagctctscartcakgggattkgggtasccccaggaggcagcsttccctkttgccttgaagtcacccatcttccaggtaagcagtttattctgagccccgggggtakacagtcctcagtgaggkgtttttggggaktttggggtcaagagaggcataggtaggttccacagttactcttcccacaagttcccttaagtcttgccctagctgtgctctgccaccttccagactcactcccctctgcaaatacctgcatttcttacccctggtgagaaaagcacaagcggtgtaggctccaatgctgctttcccaggagggtgaagatggtgctgtgctgaggaaaggggatgcagagccctgcccagcaccaccacctcctatgctcctggatccctaggctctgttccatgagcctgttgcaggttttggtactttagaaatgtaactttttgctcttataattttattttattaaattaaattactgcaaaaaaaaaaaaaaaaaaaaaaaaaaaaa

SEQ ID NO: 5324 - DNA, 717 bp, Homo sapiens; identical to SEQ ID NO: 89

SEQ ID NO: 5325 - DNA, 582 bp, Homo sapiens
ctctctatgctcatgactggtcaggctccctttctcttcttcccatggtccttcctgttaggtctggtttttttcatccatctgctttggttggctggcagctgtatgatgtccctgtcttgtgggagatgcgtagggggtcataaggatagacttgaagcacagagggctagggagttggggtacatttctctgagcagtcagggtgggaagataagtaatgcaagatgtggtactgaatgtgcctaatggagaagacccacgtgctatggggatgagtgtgcttctgggtcctgttcctaccccatttgtggtcacagccatgaagtcaccgggatgaacctatccttccagtggctcgctccctgtagctctgcctccctctccatatctccttcccctacacctccctccccacacctccctactcccctgggcatcttctggcttgactggatggaaggagacttaggaacctammarwwrrmmawratgtcttttcttctttttcttttttttaacaaaacagacaaaaccaaaaaatgtccaaaaaaaaaaaaaaaaaaaaaaaaaaaaaaaaaa

SEQ ID NO: 5326 - DNA, 582 bp, Homo sapiens; identical to SEQ ID NO: 5325

SEQ ID NO: 5327 - DNA, 702 bp, Homo sapiens
atgtggtgggccctctaatccgagctaccagggaggctgaatcaggagaatcgcttgaacccaggagcaagaggtttagtggaccaacattgcgccacctgcacttccagcctgggcaacagaacaagactccatctcgtttttgtgtttaaaaaattttgaggaatcctccatgctgttttctacagcagcataccatgttacagttcccaccctgtaacacttttgtttatgttttcttgactatactgagctggctcaaatcccgatgcaatcttaaagaggagtgaagtgggtgatggaggacatctttgcttcattccttatcttaaagggactgctttctatgttcctccttaactatacttgctagattttttttttctagatgtcctttttcaaattaaaaaaatttccttctaaaaatatgctaagactttttaaatgtcatatgttatatggatgtttaattctatttttttctttactaagttttccttttaaatctgttactaaggtgaattttattaataacaattctaatagtcaaattgctggaataaacccaacttgatcatgatgtatcatcttttatttttcattgctggatctggtttggtaatatttgttcagaatttttgcatccatgttcataaagtgagattgwattggcccaaaaaaaaaaaaaaaaaaaaaaaaaaa

SEQ ID NO: 5328 - DNA, 898 bp, Homo sapiens; identical to SEQ ID NO: 93

SEQ ID NO: 5329 - DNA, 712 bp, Homo sapiens; identical to SEQ ID NO: 94

SEQ ID NO: 5330 - DNA, 760 bp, Homo sapiens; identical to SEQ ID NO: 95

SEQ ID NO: 5331 - DNA, 704 bp, Homo sapiens
atgggagaatcttgctaarcgagtcctccagacctkaccatcataggktcccamccsttaaataatgkttysctggactttatcaaatggtccagatgatagacaggttgaacaacttattctatggcccctktcsctgggcacacaacctggcactacctccagaagctcacctctctagtgtaaccagtcacagtgggtcctcaaggactccatttcatcttaaatgcatatcagaatttcttcccattgcgggcaggaaggtaaagcctaagtccctcaaaacattaagaacattagaatatgtatcatcataacttttttaaagtgttggaaagtagtatctcaacaatctggatcacagaaatcctttcctagagcatgactcaagtgcctgaagccctagagttttagaaatactttacactaaagatagcagaaacatcccttctatctccagctgtgaggctagtcccagaagctattgattaaatacatcacagcattgagcacacagcaacttctcagtcaaaaatacttcacctaagatgaataatcagcttaataattaccatcagagcatcagcctagtccttctctgcttaaataaatgcaaaagaaactgcaagtgccataggcagaggggtataggaaggtttccagagggggaaaagagcccatggaaaaaaaaaaaaaaaaaaaaa

SEQ ID NO: 5332 - DNA, 736 bp, Homo sapiens; identical to SEQ ID NO: 97

SEQ ID NO: 5333 - DNA, 1145 bp, Homo sapiens; identical to SEQ ID NO: 98
  misc_feature (1113)..(1113): n is a, c, g, or t

SEQ ID NO: 5334 - DNA, 847 bp, Homo sapiens; identical to SEQ ID NO: 99

SEQ ID NO: 5335 - DNA, 726 bp, Homo sapiens
aacgtgtgcctaacttcctgtgacgatcatttgctgacagaatgatggatgtctaaaatattgcacaaagtactctraagaaaggtctgttaggaccagaagcagagacaccacttttcaaaggacttcttggtttcaagcataacctaagacagggaattgggagccatcatatgtcacagtgttcagaattcaagcatatttaagggcattttctttgattctcaaagttcagcattcattttgaattgagaagcctatacatttagctgacaaagtgcttatagaatttckkrmcarctgraccaktcaaaaggatttttttkgtttaaaactggatttcaatgtaagcaaatgaagamawaaatatagatttcatttccatagcttctwrtccctgtattgaggtaataaattgttttactgacaatttttcctttttctacactaaaacaatatgtgatatatttcccctcttgaagaggcaattcattaaactctcaaattttctatagaatcaagatagaacctttagatactccaactcaccaaaatgtaaaaaaactaacaaaaatatttggtcttcaataatgctaaatatctacatttttagaatttatcaacatttaactagataattgggcatgtcttaattatgcatgtacttatccatactaataaaattgacatgctagtgcataaaaaaaataaaaaaaaaaaaaaaaa

SEQ ID NO: 5336 - DNA, 760 bp, Homo sapiens
ccagccctgcgttaacagagggggagaacagatagtaactctgttgacattcctttatgatctggcacttctccccagctccttyccctctgcccccccacccctactcctcaacagttctgggtttgccctgacttctctacggctgctggcttcttcccgaagagatataggagccatgtaagcacgcagtgggtgaactgcttaatttcactacatgttgatgtacttgtcttccgtcttgtaggtcttttctatataactttatgccacccttaaatgaatcattgggtatacctgtcatgttggatcctgtaatcacagttttccctgctcacctttttgtctaagatctattgagaaagggaaatatgggaaggagaaccatttgatcagaatacaaccaatagtctttaagcattgttaaagtatgaaactgaaatacattcaaaacacttaatccttgaggcttgtgatctgagtaattagcaggtatgatgctgggactggaaaatagaaagtaataactaaagggttaatgtgcaacgttattttttggccttgttcatgattttatgttttcagtgtcctgtgtacatatagaattgttaaagttgtcatttccaatatttatattagaaaaattatttagatactttataattttaaccggcatttttaataatgacacttgcatttattgtattgtaataaatttcacttttaactttaaaarwwwaamwwwaaaaaaaaaaaaaaa

SEQ ID NO: 5337 - DNA, 664 bp, Homo sapiens; identical to SEQ ID NO: 102

SEQ ID NO: 5338 - DNA, 697 bp, Homo sapiens
gaactaaagtccctaaggaggaaaagaccttgacatattcctgagatgtgattctktkattacttgctttttgcaaagctaattatcaaatgatttgattaaacctagacgcattaggaaatgcaagttttacctraaacttgcagaaatttaaacacatgttccatttacttactaacgaacagacctgatttttatttaaaaacacaatttagctttgccaacagaagagtaaaggaaaccataacttataaatttgtaatgtgttcctccttgttggagacattagccagtgtttagttttagaccaacttatacaaacagagtattgatttgtacacattctggagacttgctatatcatggtttgctatggcacagactcagcttagcatggggacattttgaacttcattcaaagttgagtagttactggaacctttgacattgccttgtaatgaggtacttccaaaaaaagacccctaacaatggcataatagtgaggtctctctgtgcatatacataatatatatgcaggataaatgtgtgcaccaatcaaatctaaaattttatgtgactgtcaaatgaatattatttgggttaagatttttcatttctgatttggatagaaaattgctattaatcttgtattaaaatagtttttaaaaawmwaaaaaaaaaaaaaaaaaaaaaaaaa

SEQ ID NO: 5339 - DNA, 727 bp, Homo sapiens
gcagcacagggcacggctggagcccaccacggactgctgtggcgcgcgggaagctccacgttctgctcttcaaggaggagggtgaagtcccagccagcgctttccagaaggcaccagagcccttgggcccggcggaccagtccgagctgggcccagagcagctggaggccgaagttggagagagctcggacgaggagccggtggagtccagggcccagcggctgcggcgcaccggattgcagaaggtacagagcctccgaagggccctttcgggccggaaaggccctgcagcgccaccgcccaccccggtcaagccgcctcgccttgggcctggccggagcgcagaagcccagccggaagcccagcctgcgctggagcccacgctggagccagagcctccgcaggacaccgaggwagatcccgggatgacctggggctgccgaagaagtctctgctccaaatggagagtgtagcctgagggctggtgttgcctgcctcccctgtgcttgtgccttgtcccaaaataaatcctttcagaatgtagcactcacgccctaataaggagcgaatcctacatccaccmaggcgggcgctctggccctcccttccttaagcccagtcctgtgtcctctgaaagaggtgcagtcactcacacctgcttgcgctcaccatcaataaaagtaatttcacccgaaaaaaaaaaaaaaaaaaaaaaaaaaaaaaaaaa

SEQ ID NO: 5340 - DNA, 727 bp, Homo sapiens; identical to SEQ ID NO: 5339

SEQ ID NO: 5341 - DNA, 1400 bp, Homo sapiens
  misc_feature (337)..(337): n is a, c, g, or t
  misc_feature (347)..(347): n is a, c, g, or t
ccatagggactttccattgacgtcaatgggtggagtatttacggtaaactgcccacttggcagtacatcaagtgtatcatatgccaagtacgccccctattgacgtcaatcgacggtaaatggcccgcctggcattatgcccagtacatgaccttatgggactttcctacttggcagtacatctacgtattagtcatcgctattaccatkgtmgatgcggttttgscakkacatcaatgggcgtkgawarcgktttgactcaccggggatttccaagtctccaccccmwtgacgtcaatgkgagtttgttttgkcaccaaatcwacgggmctttccnaratgtcgtnacdactccgccccattgacgcwwatggkcggtaggcgtgtwckgtkggaggtctatatawgcagagctcgtttagtgaaccgtcagrtcgsctggagacgccatccacgctgttttgacctccatagragacaccgggwccgatccagcctccggactctagcctagkccgcgggacggataacdatttcacacaggaaacagctatgaccattaggcctatttaggtgacactatagaacaagtttgtacawaaaagcaggctggtaccggtccggaattcccgggatccvaghrdhcgyggwaatthmrrctccmatascsyawawwwaarwwdmwrmhdttwrwawgctygtakktggatcttgggagcgggcgggcggtccgcckcgaggmgagccaccgcccgtccccgccccttgcctctcggcgccccctcgatgctcttagctgagtgtcccgcggggcccgaagcgtttactttkwmwwmwttwkrktsttcaargymggcccgagccgcctggataccgcagctaggaataatggaataggaccgcggttctattttgttggttttcggaactgaggccatgattaagagggacggccgggggcattcgtattgcgccgctagaggtgaaattcttggaccggcgcaagacggaccagagcgaaagcatttgccaagaatgttttcattaatcaagaacgaaagtcggaggttcgaagacgatcagataccgtcgtagttccgaccataaacgatgccgaccggcgatgcggcggcgttattcccatgacccgccgggcagcttccgggaaaccaagtctttgggttccggggggagtatggttgcagagctgaaacttaaaggaattgacggaagcgcactcctcccctgcccaagcctactgcctcccgctgccgccagtaccccctccagccccacacctgggcctccccctgccactcccctcccttgctcccctctgtccccagggatcaacagaagcagccgtgggcaaaatacgatttcatttaacaaaaaaaaaa

SEQ ID NO: 5342 - DNA, 1069 bp, Homo sapiens; identical to SEQ ID NO: 107
  misc_feature (791)..(792): n is a, c, g, or t
  misc_feature (871)..(871): n is a, c, g, or t
  misc_feature (876)..(876): n is a, c, g, or t

SEQ ID NO: 5343 - DNA, 744 bp, Homo sapiens; identical to SEQ ID NO: 108
  misc_feature (46)..(46): n is a, c, g, or t

SEQ ID NO: 5344 - DNA, 739 bp, Homo sapiens
  misc_feature (88)..(88): n is a, c, g, or t
gcgagagccacgcccccagccagtggagcacagctggaggctcagcgtgcagagccgacggctgcggcacggtggctgagctggaggntcagcagcttcagaggtgacccccacckgtgagaaggaggggctgggccaggkccaktcgctggaacagctggaagtctctggtgcawwccaaggaycatggagattcagaccctgatagagtcagatctgtgggggccccgtcgaggccctggaggctgctcgatgctgtgaggagactcagcagaaggtgcaggacctggagacccgcaatgtcggagttggagcaccatgctgcgggcgatggagcgcagcctggaggaggcacgggcagagcgggagcgggcgcgggctgaggtgggccgggcagcgcagctgctggacgtcaggctgtttgatgctgagtgagctgcgtgagggcctggcccgcctggctgaggctgcgccctgagccggggctggttttctatgaacgattccggcctgggatgcgggccaggctgcaggcggcatagttgggcccattcgtcctggaaagggactggggggtcccaacttagccctgggtgggccgggccgggctgggctggggtgggccccagtcggctctggttgttggcagctttggggctgtttttgagcttctcattgtgtagaatttctagatcccccgattacatttctaagcgtgaaaaaaaaaaaaaaaaaaaaa

SEQ ID NO: 5345 - DNA, 739 bp, Homo sapiens; identical to SEQ ID NO: 5344
  misc_feature (88)..(88): n is a, c, g, or t

SEQ ID NO: 5346 - DNA, 736 bp, Homo sapiens
agacaactgctccccgatataaatggactagctacctggacataatatmcctgtgaggcatccttaaggacaaaatgccagctggtatttgggtgaatgttgttgctctgtgcctgttgaatgtccatgctacaagaagttatgagccttgttctaagtacagatgaaccttgtatttgtgtaatctcccaagggagagctatggtttacattcaattttttggtctttctgctatgaaacgtgtttattttgcctctgtcaatgtgtttgcaaccttaagtaaggaaagggaaaaaaaaaatagccctctgaactctgatcttttgccgcttctgtagattttgattgtgaagttgggagtgaggacattcaaaagcccatggtgaatgcatatgcctttagaatattgtgcctgttttaaaatgtttgagcttttaaaatactttgttaaaacatgaatccatttttgtaattgtataaatactcataactaattttgaatgctactgattgtgtaactgaatttttgtatccaaaaatacattcttgagtactacttttcctaccttgaaaatctatttcatttactaaatattgttttctttatgctaacttaactttaaaaggaatgttgccaagctgtctctcctcccccatcacaattgttagttttttttgctttctttcttcaataaatgatagcattatgatctttaaaaaaaaaaaaaaaaaaaa

SEQ ID NO: 5347 - DNA, 704 bp, Homo sapiens; identical to SEQ ID NO: 112

SEQ ID NO: 5348 - DNA, 940 bp, Homo sapiens; identical to SEQ ID NO: 113

SEQ ID NO: 5349 - DNA, 681 bp, Homo sapiens
aaaagcacggacctttatgaggctctcgctgtatgttatttaaggactataaagagtttgatttaaaattatgyagggcccctatgtgggattttttaaaaagcaaactggtgtgtattctcatgtggtttgcacagcccagcctcacagcactattgtaaaccctgctctttctgtctcgctagacagattttttwgtttgttttcttttttctggtttgtttttttgttgttgttgttgttgttwtacagctgaaaccaaccagcaagcccttgatgaccaagaggcgtttctttcaaagctatagggcacaaacaattgaccatagatgactccgtttgcattcttctgcagaattagtttccttcagggacagattttccaacctaagaaactacctaccgtgtgtattctcttgacggggagagatgaacccttcagctgctaagatccaagaaaacgcctcactgccttaaccttaactgttcttcctggcgctaaaaagagctgtattttttaaagtgctggggcaaacaaagcaaccccaaaagagttgatgtgtgttttaaaagaaaaaacccaatgaggacaattggagatttttatgcagaaactaaataatccttaataaataaatctctattttggaatcaaaaaaaaaaaaaaaaaaaaaaaaaaaa

SEQ ID NO: 5350 - DNA, 683 bp, Homo sapiens
cgtcaaagtcaacctagattggctccgtgamccgagtctcttcagscgygcaagctggcccaggccaatgkttkgggcstcatggtggtctcatcgtctcggggggagacctgaagataccttcatcgctgaccctgsttgtgggcctgtgcactgggcagatcaagactggtgccccttgcccgatcctgagcgcttggccaagtaacaaccaagctctctcagaattgaagaggaagctggggcagcaaaggctaagtttgccggcagggaacttcagaaaaccccttggccaagtaagcttgtggggcaggcaagcccttcgggtcacctgttggctacacagacccctcccctcgtgtcagctcaggcagctcgaggcccccgaccaacacttgcaggggtccctgctagttagcgccccaccgccgtggagttcgtaccgcttccttagaacttctacagaagccaagctccctggagccctgttggcagctctagctttgcagtcgtgtaattggcccaagtcattgtttttctcgcctcactttccaccaagtgtctagagtcatgtgagcctcgtgtcatctccggggtggccacaggctagatccccggtggttttgtgctcaaaataaaaagcctcagtgacccatgagaawaaaaaaaaaaaaaaaaaaaaa

SEQ ID NO: 5351 - DNA, 1001 bp, Homo sapiens; identical to SEQ ID NO: 116
  misc_feature (55)..(55): n is a, c, g, or t

SEQ ID NO: 5352 - DNA, 1031 bp, Homo sapiens; identical to SEQ ID NO: 117
  misc_feature (61)..(61): n is a, c, g, or t
  misc_feature (181)..(181): n is a, c, g, or t
  misc_feature (778)..(785): n is a, c, g, or t
  misc_feature (788)..(788): n is a, c, g, or t
  misc_feature (791)..(792): n is a, c, g, or t
  misc_feature (795)..(797): n is a, c, g, or t
  misc_feature (802)..(802): n is a, c, g, or t

SEQ ID NO: 5353 - DNA, 934 bp, Homo sapiens; identical to SEQ ID NO: 118

SEQ ID NO: 5354 - DNA, 682 bp, Homo sapiens
taatttttaagattacmatgtaatccccttctcaataagttkaatcagctaaccctaagctagaggtcaaatctacttcctctaatatcaaacgaaawkttaaagttttccaaatattaagttcaatattaattgaatattcaatgaattcatttaatgttagattaattcattgaatattaattcaatgaatgactaattaatagtattttaacaagattttggtatatttaacaacattttggtaataaagacaataatttgagagtgtgtggaagtccccctaatagaagccaactatctaatcaatgccaaaagtgtgaacaaaatagagaaaggaagcagtgaaaaagaatgcaactttttcttaccattcaaagtacaggatcacagcataaaagaatcataagataaaacatcaaactacccagcaacctgagaagcacagagtgttaaagcctccaccgtgtggagaaactaaattagggtaactagctattgagtatattgagtaccttcaaagcactcaactgacaggttttacagactggaaattataatacttatgacatttctaccttttatataaccaataatctaccatagaatgtagtatttttaaagctattaacaagcaatatattaaaataataatgtattataaaaaaaaaaaaaaaaaaaa

SEQ ID NO: 5355 - DNA, 781 bp, Homo sapiens
caaagatcgaacaggttagacggtccctgagagtcagaggcctcttggtgctgggactccagaggccactgtgrarggtcacsgagccccagcagaaggtgggccagycaagsccattcttagtccctgggttggggagtcagggagctagggcagggaccaaatgaacagaaagtctcagcycaggatggggcttcttcaacagggcmcctgccctcctgaagcctcagtccttcaccttgccaggtgccgtttctcttccgtgaaggccactgcaccaggtccccagtgcgccccctagtggccatagcctggttaaagttccccagtgcctccttgtgcatagaccttcttctcccacccccttctgcccctgggtccccggccatccagcggggctgccagagaaccccagacctgcccttacagtagtgtagcgccccctccctctttcggctggtgtagaatagccagtagtgtagtgcggtgtgcttttacgtgatggcgggtgggcagcgggcggcgggctccgcgcagccgtctgtccttgatctgcccgcggcggcccgtgttgtgttttgtgctgtgtccacgcgctaaggcgaccccctcccccgtactgacttctcctataagcgcttctcttcgcatagtcacgtagctcccaccccaccctcttcctgtgtctcacgcaagttttatactctaatatttatatggctttttttcttcgacaaaaaaataataaaacgtttcttctgaaaaaaaaaaaaaaaaaaaa

SEQ ID NO: 5356 - DNA, 1400 bp, Homo sapiens
ccatagaagacaccgggaccgatccagcctccggactctagcctaggccgcgggacggataacaatttcacacaggaaacagctatgaccattaggcctatttaggtgacactatagaacaagtttgtacaaaaaagcaggctggtaccggtccggaattcccgggatcrmrarmrrmmmctgaaaggactgaataatttggctaagtkgggatkraktttcaacagcatctctgctgttgacaatggctctctggccaacacgcctcattctgagggagctttcacttgggacaacaacaagcttaccagagtacctggtggkctggcagagcataagtacatscaggtygtctaccktcatmacvacaatatctctgtagktwggatcaagtgacttctgcccacstggacacaacaccaaaaaggcttcttattcgggtgtgagtcttttcagcaacccggtccagtactgggagatacagccatccaccttcagatgtgtctacgtgcgctctgccattcaactcggaaactataagtaattctcaagaaagccctcatttttataacctggcaaaatcttgttaatgtcattgctaaaaaawaaawaaaagctagatactggaaacctaactgcaatgtggatgttttacccacatgacttattatgcataaagccaaatttccagtttaagtaattgcctacaataaaaagaaattttgcctsccawwwwmaraawmawmwwttgaasctttctgktgatgttaactgagctactagagatattcttatktcactaaatgtmaaatttggagtaaatatatatgtcmatatttagtaaagcttttcttttttaatttcccrggawawawtawawagagtatgagtcttctgtaawwmrmwwrarmmrwwagctcactttgagataaagtccaatgcccaacactagctctgtatttaatccccctccattactggtaaagcctcatttgaatgtgtgaattccaataccggctatgttaaatttttactaatgtccattattttgaaaaaataaattttaaaataccattccaaattactattgtataccagcttaattgttaatattccctaaacaccattttatgaagggagaagacacttggtttgttgaccataaccgtacatcttttcaagttctcagctatttcttctacctctccctatcttacatttgagtatggtgaacttatgtcatctatgttgagatgtaagcttataaagcaccaagcatacatttcctgactggtttagagaactgatgtttcaatttacccctctgctaaataaatattaaaactatcatgtgaaaaaaaaaaaaaaaaaaaaaaaaaaaaaaaaaaaaaaaaaaaaaa

SEQ ID NO: 5357 - DNA, 791 bp, Homo sapiens; identical to SEQ ID NO: 122

SEQ ID NO: 5358 - DNA, 1186 bp, Homo sapiens; identical to SEQ ID NO: 123

SEQ ID NO: 5359 - DNA, 882 bp, Homo sapiens
gcgcaaggatgcactattggatgcgtatcaaaagtatactgtgatttctctagctggcgaaacctgtatccgggccctacctggaaacatcccagccaagaactggtataggagctccaaggacaagaacacgtctggctaggagaaactatcaatgctkgcagccagttkgaawawaatgtagaaggagtgacttccaargraatggctacccractkgcyttcawgcgcykgctgsccaactatgcctctcagwacatcacctaccactgcaagaacagcattgcatacatggatgaggagactggcaacctgaaaaaggctgtcattctacagggctctaatgatgttgaacttgttgctgagggcaacagcaggttcacttacactgttcttgtagatggctgctctaaaaagacaaatgaatggggaaagacaatcattgaatacaaaacaaataagccatcacgcctgcccttccttgatattgcacctttggacatcggtggtgctgaccaggaattctttgtggacattggcccagtctgtttcaaataaatgaactcaatctaaattaaaaaagaaagaaatttgaaaaaamwwwmwmwwtgccatttcttcttcttcttttttaactgaaagctgaatccttccatttcttctgcacatctacttgcttaaattgtgggcaaaagagaaaaagaaggattgatcagagcattgtgcaatacagtttcattaactccttcccccgctcccccaaaaatttgaatttttttttcaacactcttacacctgttatggaaaatgtcaacctttgtaagaaaaccaaaataaaaattgaaaaataaaaaccataaamawwwrmaaaaaaaaaaaaaa

SEQ ID NO: 5360 - DNA, 882 bp, Homo sapiens; identical to SEQ ID NO: 5359

SEQ ID NO: 5361 - DNA, 618 bp, Homo sapiens
ggagtcccagaaatgcccagtaatcacctcaggcacgagcctggcactgccacgtcagcccccagcatgaccaaacccaggtttctcttgcttggggctgagaactgtcagatttttctcatcaaaaatgttttccaaggaatcagtggattacagtttttctgcattgaaaatgcactttaaaaaataaattaaagctccagactgtttaaaatatacagagggagcaggggaaagttaagcatgtgctagtgtctgaacccagttcagtttatctccagttgaaacgatatacactatattatgtataaatgtatacacacttcctatatgtatccacatatatatagtgtatatattatacatgtataggtgtgtatatgtgcatatatacacacatgcacataacaaaatcagatgctcattacaaatccagatgctcattacaaaaccagatgctacacaaacagcagcagaggaaacaaggttggactcttgcaacagatcacaaaaaataaaaacagctacttgcagtgactttggtcatttctgtatgttcataaagaatggattgtaacaaggaaaaaaaggaacagtgttagtaaaaaaaaaaaaaaa

SEQ ID NO: 5362 - DNA, 702 bp, Homo sapiens; identical to SEQ ID NO: 127

SEQ ID NO: 5363 - DNA, 713 bp, Homo sapiens
accgcttcactgcaaagagactggttgtcgggacattccactggtttctgtctatgtctaccctgagctgtacccatctgaacccaggcccaggtttctctggaaagctccacaacactggacttgggctctgtgcagactgccaggcagaaggggacatcctgggctgtcccatggtgttggctccttgcagtgacagccggcagcaacagtacctgcagcacaccagcaggaaggagattcactttggcagcccacagcacctgtgctttgytgtcaggcaggakcagktgattcttcagamytgcmcggaggaaggcctgkccatccagccagcagcwctgggacttccaggagaatgggatgattgtccacattctttctgggaaatgcatggaagctgtggtgcaagaawacaataaagatttgtacctgcgtccgtgtgatggaaaagcccgccagcagtggcgatttgaccagataaatgctgtggatgaacgatgaatgtcaatgtcagaaggwaaagagaattttggccatcaaaatccagctccaagtgaacttaaagagcttatatatttcatgaagctgatccttttgtgtgtgtgctcctggtgttaggagagaaaaaagctctatgaaagaatataggaagtttctccttttcacaccttatttcattgactgctggctgctttaaaaaaaaaaaaaaa

SEQ ID NO: 5364 - DNA, 1071 bp, Homo sapiens; identical to SEQ ID NO: 129

SEQ ID NO: 5365 - DNA, 1071 bp, Homo sapiens; identical to SEQ ID NO: 129

SEQ ID NO: 5366 - DNA, 761 bp, Homo sapiens; identical to SEQ ID NO: 131

SEQ ID NO: 5367 - DNA, 708 bp, Homo sapiens
gaaatactgagaggctgtagctcgacctagtttctgtgaagaattttgtcaagtgatccctctcggaccctgagcctctttatttggattttgtgccttgagcaccaagagaatatgcactctgggttgcctggacagctgggktgktkattcacaggaagggtccaagccatcactatacctgactcaagtcctggtataagagtctcccagaggacttcctggagctgctcagccttcagcctgagatgcgggatattcgtccccaaggagcgagtgakggtacagtctcgccttctttgcaggaaaaatgctggcagktggtgcaagtcaaggacatctatgcatagaattctgagcagcagctggaccctcaacttcttcagaagacgagaaccctgcctggcaccgctggcaggcatctggcctgacaccgctctggaggcctcccacaagcagcaaccaagccagaaaaagttgagaccagacccgttgtccctaaagatggggcccagaatgttggggtgaagctgtaggaacagggtgaaagctggtggtgtgagcaaagagaccagctatggggtggtcaggggattccgggaggtgcatgggtatgttgcagaccccccsaggacaagggtggctgtggaagaatggcaaataaacacaaggcaaagtctcaaaaaaaaaaaaaaaaaaaaaaaaaaa

SEQ ID NO: 5368 - DNA, 759 bp, Homo sapiens
ctggacttcattctgacgtatgttagtctcttaatttcccgwawatttcgtgytatcagtgtaagtcttakacatatttcatwagattattcstatgtgttcgatttgctatagtaaatagtattctttttaaaatgttgtcttttgtttgttgctattatatatatatattttttgagacagggtcttactttgtcacccaggctggagtacagtggcatgatctcagctcactgtaacctctgcctcccaggttcaaacaattctcatgcctcagcctcccaggtagctgggattacagacgtggaccaccacgcccmgctaatttttgtgtctttagtggagacagggtttcaccatgttggccaggctggtctcmaactcccgacttgaggtgatccmcctacctcggtytcccaaagtgctgggattacaggtgtgagccacggtgattggccatataattgatttttgtatattcaccctttgtctagtgatcttgtaaactcagcaaagtatatctgtggaaggcatttggtagatatcctttattagtttaagaaaattatcttctattctgtttttctacacttttgtttaaaaccatgaatgtgtgctgacttttattaaagacttttccatctcttaagatgtccaaccctgttttgactcagctctaggacccaattctatagccctttcctggtcttggctttatccccacaatcacaaaaactccatgaacaaaaaaaaaaaaaa

SEQ ID NO: 5369 - DNA, 745 bp, Homo sapiens
cggccgctcgcgatctaatgagttttaattaacgctawgttctataagattaatkacataatgtttgggaaaatgtctagaaaattagtctgagaggaaaggccccaagcaatgatctccttccctcatctcacagggtggggttgtcagttatctcatattggtggaaatttcccatatkktcaatgccttgttccatktgacrataatgtggatgaaaaatggcctcaatattggagcgccagttcagttgtcscctgattattattactccagtgcttcatagtcctccagctaaatttcagtaaacctgtcctaaggggatttacccacatgaaaaggataggagagtgaattacacgctggttctcctcttatataaccmatatatgaggagaccgaagggcaccgagttatwatccccmaagagatgggagtatatccacattkggtttgagccaaktcttttctgttkgaccaaaggacctwaccctttttkgattaccgttttgttctgagctatttagatttgtattcaggcaaagcagacctgtgcatgtgctatgcctaggtggtgcaaaaattactctatttagtattttgtgatttgtttttcatacttaagtcatatggatcagggagaaaaaaactatcatgattttcttcattctcctgtctgtataggatatagcaataattttgattgttgacaataaaatgtgattcactaaaaaaaaaaaaaaaa

SEQ ID NO: 5370 - DNA, 741 bp, Homo sapiens
ttcacccgtagtagatcagactcatctyttttctgcctaatagtgttccattwakgakgcaccacatgtgtttttccgttcatctgttgagggacattttgagttgctaatgtgaataatgctgctataaatatgggtccacaaatatttatttcaagaccctgctttcaattcttgttggtatatatccagcagtggaattactggatcatgtggcaattctatttctaattttttgaggaaccaccatacagttttccacagcagctgcaccattttacatttccacaaacagtgcacaaggatttcaacttttgttcatcctagccagcacttgttatttcctgtttcttgtttaatagtagtcatcctaatatgtgtgggatggaatctcattgtggttttgatttgcactcccctgatgatcagtgatattgagcatcttttcatgtgcttattggccatttatatatcttctttggagaaatgtctattcaactccttttgcccatttttgaatcaggtttttttgttgttgttgctgctgttgagtgtttggagttctctatataaactggatactaatcccttataagatacatgatttgggctggatgtgggggctcatgccagtaatcccagcactttgggagactgaggcaagaggattacttgagcccaggagtttgagatcagcctggacaacatagcaagamcctgtctttacaaaaaaaaaaaaaa

SEQ ID NO: 5371 - DNA, 711 bp, Homo sapiens
agggaaccaactattcctaraagtccaaaatacagatgctggtgaggtttgtaagaaaagagaacacttatacactgttaatgggaagtataaattagttcaaccacttgtgaaaagtagtatggcmattcctcaaagagctaaaagcagaactaccactttggcctaacmatcccattactgggtatacacctagagaaatataaatcattctaccataaagatacatgcacgtgaatgttcattgcagcactagtcacmatagcaaaggcatggaaccaacgtaaatgcccatcaatgacagattggacaaagaaaatgtggtacatatacacccttggaatactatgcagccataaaaaagaatgagatcattccttttacaggcacgtggatggagctggaggccatcagccttagcaaactaacacaggaacagaaagccaaataccacatgttctcctaagtgggagctaaatgacaaggactcatggacgcaaagaagggtacgacagacactggggtctacttgagggtgggaggagggagaggagcagaaaaaataaccmttgggtactaggcttagtacttgggtgacaaaataatctgtacaacaaattcctgtgacacaagtttacctagaccaaaagcctgcatttgtacctcccaacctaaagtaaaaaaaaaaaaaaaaaaaaaaaaaaaaaaaaa

SEQ ID NO: 5372 - DNA, 710 bp, Homo sapiens; identical to SEQ ID NO: 137

SEQ ID NO: 5373 - DNA, 748 bp, Homo sapiens
aagatatggtatagatgaagttagaccattagccccaagatgcgtgtatctctcagacaacscggtgtagatccatatttcggaggtcttctaatgtctggaaagcaactggcatctacaatagaatcacacttagaactggttagaggactccctcacttttgttgtccatgtggttcccttccgtggaccasccgtaataaagagccaaggtagtgatggtggccacgtgcctcgttgctatttttaaagtaatattcagatgtggttttaaatttagattatgtattccttttgaaacataagaaaaacatttaaacctatgctgaaaatacgataaaagaaaaacaactccaatatgctaaaagttaaatatggtatttaagaaaatagtcatgtatgcaattgagaaagtctataatttattttacagaaaagctggaagattatgactagatatggaaatattttttctgaatttttttttatatttcctccgacttacctctttttgaaaagagagttttgtattaaatgaaccatcatgatattggctgaaaagttctacattctattattgtattgtaagcacacatgtaattgatgattttcattaagagtttcagattaactttgaaaaatattccacatggtaatcttataaattctgtttaattacatctgtaaatattatgtgtgtgatagtattcaataaagtaaaatcaaattgtcamaaaaaaaaaaaaaa

SEQ ID NO: 5374 - DNA, 732 bp, Homo sapiens
gcatattactgcggtgaccycgatgtctatctacctaggggaacactagtatatcttgctgctgaakttatgycttgggrwgactwratgtktccatgactttatgttgawwmatgtacctagtattttcagctagagaactcactgagtagaktttcaccmgtgaaagttcaagtktactcatgmagtattacaccatawkatgattaaacttaactctttacatattmagatgttatagatacataagtcaactcttctccttgaagatcttgcacaaagaactttcatttgttgggatggcattagaggaatcaaacataccaggatggcttgkcaaagggagataccgatacatcttctgcatacgtractgcatttgatagtcatttcaatgctcmactattctacgaatcgsgraaccrkaatccatgaatccmatgmctctattsgyygakktccaactcccatcagyctggaccaaacaratgaggktwaktgatctcatattcagaamatactctcattamawacatgtaattttaaagtgmasccttcttactctctccatataatttctatagagaaatctagcatatacacacacaccmcmcaccmcmcmcmcacmcacmcacacaccttacacgaatggtaatgaaatgaaaataaataatcctctacattagcggtaggtatagagagctgtcacaacttcctaactcatctctcacc

SEQ ID NO: 5375 - DNA, 656 bp, Homo sapiens
tttgacggtgtgacctcagggtcaatgaactcctcgagcctccacatgtcataaaatgggaactgtaaatcagcyycagggggtggagaggaagagttgtttagtcaaagctactatgtgcccagtgktgaggaaggctstggagatatcactgtaagcaacascaggcacggcgcctgcactggtggggcatacagcctaatgacaaagatggatgttaagcaactcatcctgtaagtaaacgtktcattacawaccgcaataaactgtaagaataaaawgcaccagacattggaaagtgtttaacaggaggccttgacctagtataggaaaaagaggtgccagcagtcttcctggaggaagtgacaagtgagcagaattctgataaagggaggggggcacccactgtgtctgagggcgaaggggccagggagcattctgggagagcaagggacacatgcagcggcttctggatggactgagataaggccacagaatgcggcctagcaaggcaagaaagcagcaggcgggggtggggtcccagagggcactgccaacctcacaggaggtggtgatgagcttcccagggctggcttagcagccaccagaatgacagcacccagcattccccctcaaacctaaaaaaaaaaaaaaaa

SEQ ID NO: 5376 - DNA, 1141 bp, Homo sapiens; identical to SEQ ID NO: 141

SEQ ID NO: 5377 - DNA, 725 bp, Homo sapiens
aacccaatgtgatatcacagctatgtgtagtactgagcacttgttataggaacatatgaaaacacctagatgtttaatatcatttcatgtaagtaatgttacatgttaaagtctaaaaagtcacatatgagtagtggctctcccaactattaatgagtttcwattttytgccagatattgtacaagctactttctgctggacmctgcactagactactcttttgcaaggtaracccccatcctrtgagttcrwatagacatttagaagattgtataatcatgtataatgtatttggacatratacatrtaagttctgatcacatgtaatactamaagttataatgattggcwaaatgatggagcaaggattcttaattaggaagatcatatgtccgaaatctttgactctttcaactacccagtattagtataggatcccwwatatgaagtagtaacaagaattagcttggtttattctccttacttgaactcacttgaatatawataccactgtaaacttcacatacagtttcttgactagctttagtcgtggtttatcttcacaagaaagaatcattaacttttggtacgagaagaagttaacatttcaagactacagaacataggcttcactcatcctactttgaaataaaatggggttttataaaagacgaggtatttctgtttgttgaacagaaggcagcacagggtgtatgtagaataa

SEQ ID NO: 5378 - DNA, 672 bp, Homo sapiens; identical to SEQ ID NO: 143

SEQ ID NO: 5379 - DNA, 992 bp, Homo sapiens; identical to SEQ ID NO: 144

SEQ ID NO: 5380 - DNA, 656 bp, Homo sapiens
ctatataaccgagtctcgtttagtgaacccgtcagatcgcctggagaccccatccccgctgttttgacctcccatagaagacacccgggaccgatccagccctccggactttagccctaggcccgccgggaccggataacacatttcaccacccggaaacacgctatgaccccttaggcctatttaggtgacccctatagaacccagtttgtacccaaaaagcccggctggtacccggtccggaatttcccgggattcgagtgtggtggccactgtgccccgtaaaccccagctactcgggagactgagaccacggagaatcgcttgaacccccggaggcccgaggctccacgtgagcccgagattgcccccctgctttccggcctgggccacccagagtgaaactccgtctccaaaaaaaaaaaaaaaaaaaaaaaaagaaaagaaaaagaaaaaaaaaatagccagccctggtggcatgctcctgtggttcccmgctactckggaggctgaggyrggagmatsrcwtgarccygggaggtsgagsttgcagtgagccawgatyrygcymytgcactcccgcctgggcgacagagygagactcctktctccaaaaaaaaaaaaaaaaaaaaaaaaaaaaaaaaaaaaaaaaaaaa

SEQ ID NO: 5381 - DNA, 988 bp, Homo sapiens; identical to SEQ ID NO: 146

SEQ ID NO: 5382 - DNA, 712 bp, Homo sapiens
gatccattttccgatcagtccatccccccggggccagcatcagggacagctttgctaccaggtctgttgagggttctactggccagttggtgactctgtgactggccaggtttcaggacaggaaggagttttgtgagctcctctcatggtttgggcaaaagtttagggagggacagatgtgaggtcaatggtgtctgttagagttatgtggcccatcaaccatttacactttagtatgaatgagctgcttaactctttccacagacttttttttttttttttttttttttttgaggcagagtcttgttctgtcccctaggctggagtgcagtggtgcaatctcagcttactgcaacctccacctcctgggtycaagcaattctcctgttgtagcctcccaagtagcagggacctataaggccacctacccaccacatcccaggctaatttttgtattttagtagagatggggtttcaccatgttggccaggctggtcgcaaacccctctgcctcagcctccccaagtgctgggattacaggcataagccacacgctgggccatccacagacctttaacggggagaagagagaacaatatagagcccacatttgggtgctgggcaacagggaggtaccttccttcagacgccaagcacttatgaggcacctactgagatccaggtgctaaaggcattgctataaaaaaaaaaa

SEQ ID NO: 5383 - DNA, 749 bp, Homo sapiens
taccgtttattattgcatacctttatgggattctacctgtacgctcagttcgtcgtcgtaagtcattcagggtgatttagaaaccgaatatcagttccgaaaagcactctcggattcctttaccgaatccaacttatgttgtaaactggcaaggtaatgtcattagtcataatagtgcttttgaacattatttcactgcggattactacaaaaatgcaatgttaccattagaaaacagtgactcaccctttaaagatgttttttctaatgcgcatgaagtcacagcagaaacgaaagaaaatcgaacatatacacacaggtatttgaaattgataatggcatcgagaaaagatgcattaatcactggcatacattatgcaatcttcctgcaagtgacaatgcagtatatatttgtggttggcaagatattactgaaacgcgtgatctaattaatgcactcgaggtagaaaaaaataaagcgataaaggctaccgtagcaaaaagtcagtttctggcaacgatgagtcacgaaataagaacaccrataagctctattatgggcttcctggaacttctgtcgggttctggtcttagcaaggagcaatcgggtggaggcgatttcacttgcctacgccaccggacaatcactcctcggcttaattggtgaaatccttgatgtcgacaaaattgaatcgggtaactatcaacttcaaccacaatgggtcgatgaagaagaaaaaaaaaaaaaa

SEQ ID NO: 5384 - DNA, 765 bp, Homo sapiens
ctccgccmaagagacgtcacccgctttgtgaaatgccccgckatatcaggttgcmrcgkcagagagccatcctctataassggctgaarktgcctcctgcgattaaccakttcaccmrggbcctggaccgccaaacagctactcagctgctwwakytggcccacaagtacagaccagagacaaagcaagagaagaagcagagactgttggcccgggccgagaagaaggctgctggcaaaggggacgtcccwacgaagagaccacctgtccttcgagcaggagttaacaccgtcaccaccttggtggagaacaagaaagctcagctggtggtgattgcacacgacgtggatcccatcgagctggttgtcttcttgcctgccctgtgtcgtaaaatgggggtcccttactgcattatcaagggaaaggcaagactgggacgtctagtccacaggaagacctgcaccactgtcgccttcacacaggtgaactcggaagacmaaggcgctttggctaagctggtggaagctatcaggaccaattacaatgacagatacgatgagatccgccgtcactggggtggcaatgtcctgggtcctaagtctgtggctcgtatcgccaagctcgaaaaggcmargkctaaagaacttgccactaaactgggttaaatgtacactgttgagttttctgtacataaaaataattgaaataatacaaattttccttcmaaaaaaaaaaaaaaaaaaaaaaaaaaaaaaaaaaaaaaaa

SEQ ID NO: 5385 - DNA, 688 bp, Homo sapiens
agtgccatctgtcaccagcagcaggcttttctcgtyagcaaaacggcgctgacaccmaggccttaaaaactggactgtggctcaggcgcggtctccgcgatttttcagagtggaaaaacgctctgagacgtttgccatgagggctgttccgggcccacctgcggccatcttaagttcggggggaaataagagggtgggggcacggaattcgaagacccagcagcgaacacaagtcccggaggcacagaaagggcaaccattctaaatccttggtaagggctccgtgcagtagttaaccccccaaatccgactaaggagagcaggacggcggaacccgggtgccctaatcaaatatgggcaccaaggtaagccggcgcgatcacgtgacatgcaccgcgcgcccgcgtccgcgctctcctccacgcctcggctcccgaggtctctatggcgcccgcgcccctcccccagccgagctccagcacttactccggggggtagagccgcagctcctcgatttctcctaggaaggaaaaaagcgtccgcatctgctcgctggtcaccgccgacgacagattcgtcacctgaatcaccgacgtgggggtgaggccgaagcctaagcccaaaccgaagccgccgccgctgttcatcccgatcccgctgccgttgccttcccgctccccaacgtcta

SEQ ID NO: 5386 - DNA, 1316 bp, Homo sapiens; identical to SEQ ID NO: 151
  misc_feature (184)..(184): n is a, c, g, or t
  misc_feature (204)..(204): n is a, c, g, or t
  misc_feature (231)..(231): n is a, c, g, or t
  misc_feature (322)..(322): n is a, c, g, or t
  misc_feature (354)..(354): n is a, c, g, or t
  misc_feature (368)..(368): n is a, c, g, or t
  misc_feature (565)..(565): n is a, c, g, or t

SEQ ID NO: 5387 - DNA, 902 bp, Homo sapiens; identical to SEQ ID NO: 152

SEQ ID NO: 5388 - DNA, 941 bp, Homo sapiens; identical to SEQ ID NO: 153
  misc_feature (195)..(195): n is a, c, g, or t

SEQ ID NO: 5389 - DNA, 749 bp, Homo sapiens
actattgggcgcctgctgttgtccagcccgcatgatggacagacagacttcgggaggactggaggacaatgcccatgttttgggaacatctctggagagttctgctgggcaatgaggccctgcacagcctgacacaggcaggtgactactccatgcgcgtggacctgcgggctggggacgaggctgtgttcgcccagtacgactccttccacgtagactcggctgcggagtactaccgcctccacttggagggctaccacggcaccgcaggggactccatgagctaccacagcggcagtgtcttctctgcccgtgatcgggaccccaacagcttgctcatctcctgcgctgtctcctaccgaggggcctggtggtacaggaactgccactacgccaacctcaacgggctctacgggagcacagtggaccatcagggagtgagctggtaccactggaagggcttcgagttctcggtgcccttcacggaaatgaagctgagaccaagaaactttcgctccccagcggggggaggctgagctgctgcccacctctctcgcaccccagtatgactgccgagcactgaggggtcgccccgagagaagagccagggtccttcaccacccagccgctggaggaagccttctctgccagcgatctcgcagcactgtgtttacaggggggaggggaggggttcgtacgggagcaataaaggagaaactgaggtacccggaaaaaaaaaaaaaaaaaaa

SEQ ID NO: 5390 - DNA, 729 bp, Homo sapiens
cctattggattcccttctcaatgtcctgggagcgagcttcagcggctccggagctcgggcgggtgaggtccccttggggaaccctttcctggccatcgagatcggggkctgccgtctgtggkcaggaggacccgaggggcagccaggaaaggcgatctcttcacttgtgaaaagttgcccgggtgcagcgccttttccgttctaccatgggaaaatgcaggctgggcccttggtggtgagcctgcggggctctggtgctgtgccccgacccccaccaccaccagaatgcagttccagcttaggaagccacataacaagccacccaggaggaacaracaccgccagcgtggattttccaaatttgccctggaaagtaagtctcgctcttgccaaagaaaagtctggcttggagagtctctggagcccaggatgccagcatgtgccaatgactgtcaccttcatctcttcaraagraaagccatagccgaggactgtcccgcgacccccgtggactgcgtctaggtcatgtgattctgttttcatttctcatcccatccaatttgtccttttctcctgtcattttcttcctctgtggtcccttcaaagttgttataatttgtactgaacttcaaaatgtgtcccgttctccccagaccactctagccacagtatattgcaataaaattacttcttatatttgcaraaaaaaaaaaaaaaaaaaaaaaaaaa

SEQ ID NO: 5391 - DNA, 746 bp, Homo sapiens
gcatggcattttgcctgatagtgggtgaatcatgttctkagaaggaataccatggggwattggctgctaaaccargttktctattggcccatgttacattagagaggactattagacaaccaagtggagrtgtcaagtgaacgattaaatgtcagaatcgaactcagagaagaggtcctctcttggaactggagatactaatttaggggtagtgttagtgttcatttgcctgttggcactctgattcatttcctgctctttcatgctctactctgtatggcttgaggatgaggtgctaccaggagagtggggtgtgcaaggttgacccacacaaactacatctcccaagcttccttgccmactggcctctgggaaagtttggccaatggaagacactggcaaaagaccgcagtcagtaggagaggaaaagccagagtactttcccctgtctttgctctgggcaacatctctagcatgaatgcacttcctctgtagttaagtcaccaccaggcaagccctcctgcatggccctagctcccactattcctaaactcttataactccactttcctccttggtttctctactcctagggaggcatcaacttcctgatgttggtattctctgagttatttccctgtctccagtttgcccttacaactttgtcaacatctttgcaactgactggtattaaattctctctattgcmaaaaaaaaaaaaaaaaaaaaaaaaaaaaaaaaaaaaa

SEQ ID NO: 5392 - DNA, 955 bp, Homo sapiens; identical to SEQ ID NO: 157
  misc_feature (576)..(577): n is a, c, g, or t

SEQ ID NO: 5393 - DNA, 1011 bp, Homo sapiens; identical to SEQ ID NO: 158

SEQ ID NO: 5394 - DNA, 989 bp, Homo sapiens; identical to SEQ ID NO: 159
  misc_feature (696)..(697): n is a, c, g, or t

SEQ ID NO: 5395 - DNA, 970 bp, Homo sapiens; identical to SEQ ID NO: 160

SEQ ID NO: 5396 - DNA, 764 bp, Homo sapiens; identical to SEQ ID NO: 161
  misc_feature (627)..(627): n is a, c, g, or t
  misc_feature (641)..(642): n is a, c, g, or t
  misc_feature (645)..(645): n is a, c, g, or t

SEQ ID NO: 5397 - DNA, 876 bp, Homo sapiens; identical to SEQ ID NO: 162

SEQ ID NO: 5398 - DNA, 765 bp, Homo sapiens; identical to SEQ ID NO: 163

SEQ ID NO: 5399 - DNA, 689 bp, Homo sapiens
acacacgatgttgttcaagkatggttytgggactagaggctcagtgttgggagagatccctgcagwacccaccaaccagaacgtggtttgcctgaggctgtaactgagagaaagattctggggctgtcttatgaaaatatagacattctcacataagcccagttcatcaccatttcctcctttacctttcagtgcagtttcttttcacattaggctgttggttcaaacttttgggagcacggactgtcagttctctgggaagtggtcagcgcatcctgcagggcttctcctcctctgtcttttggagaaccagggctcttctcaggggctctagggactgccaggctgtttcagccaggaaggccaaaatcaagagtgagatgtagaaagttgtaaaatagaaaaagtggagttggtgaatcggttgttctttcctcacatttggatgattgtcataaggtttttagcatgttcctccttttcttcaccctcccctttkttcttctattaatcaagagaaacttcaaagttaatgggatggtcggatctcacaggctgagaactcgttcacctccaagcatttcatgaaaaagctgcttcttattaatcatacaaactctcaccatgatgtgaagagtttcacaaatctttccaaaataaaaagtaatgacttaaaaaaaaaaaaaaaa

SEQ ID NO: 5400 - DNA, 689 bp, Homo sapiens; identical to SEQ ID NO: 5399

SEQ ID NO: 5401 - DNA, 739 bp, Homo sapiens
acctatactgccaattggctgggagaagatttgccaatggtgctttggatactcggatggagtgaagggttttcaattcaatacgcgggatagccccaaatgttaccaaattaacagacrwaacagtcawtggatgcagcggttttcatggagactgtcttacgctgacaaagattattgaagcaagactaaagatgtataagcattccaataataaggccatgactacgggggcaaattgctgcaayagctgtctacaatcctgtattcaaggcgcttctttccatactatgtttacaacatcatcggtggacttgatgaagaaggaaagggggctgtatacagcttkgatccagtagggtcttaccagagagactccttcaaggctggaggctcagcaagtgccatgctacagcccctgcttgacaaccaggttggttttaagaacatgcagaatgtggagcatgttccgctgtccttggacagagccatgcggctggtgaaagatgtcttcatttctgcggctgagagagatgtgtacactggggacgcactccggatctgcatagtgaccaaagagggcatcagggaggaaactgtttccttaaggaaggactgatctgtgtgctcttatcaccaatcagttcagacctggttgattttgtactttggaactgtaccttggatggttttgtttattaaaagagaaacctgaagtaaaaaaaaaaaaaaaaaaaaa

SEQ ID NO: 5402 - DNA, 739 bp, Homo sapiens; identical to SEQ ID NO: 5401

SEQ ID NO: 5403 - DNA, 751 bp, Homo sapiens
taaaagttgcagagacccactgaaragagacacaccacggaagagaagggtttcacgggaagagaaaccagaagtscccaggctgagcggaaggaggagaaaaaggcggctgccctgctcctgaggaggagatggatgaatgtgagcaggcgctggctgctgagcccaaggccaaggaccccttcgctcacctgcccaagagtacctttgtgttggatgaatttaagcgcaagtactccaatgaggacacactctctgtggcactgccatatttctgggagcactttgataaggacggctggtccctgtggtactcagagtatcgcttccctgaagaactcactcagaccttcatgakctkcaatcwcatcwckggaatgttccagcgactggacaagctgaggaagaatgccttcgccagtgtcatccyttttggaaccaacaatagcagctccatttctggagtctgggtcttccgaggccaggagcttgcctttccgctgagtccagattggcaggtggactacgagtcatacacatggcggaaactggatcctggcagcgaggagacccagacgctggttcgagagtacttttcctgggagggggccttccagcatgtgggcaaagccttcaatcagggcaagatcttcaagtgaacatctcttgccatcacctagctgcctgcacctgcccttcagggagatgggggtcattaaaggaaactgaacattgaaaaaaaaaaaaaaaa

SEQ ID NO: 5404 - DNA, 827 bp, Homo sapiens; identical to SEQ ID NO: 169

SEQ ID NO: 5405 - DNA, 733 bp, Homo sapiens
catttacccgttttccaaagagggtttaggaaaagcacctgtccctgcgggggagkttkcggttctgccacagagaggcctttgttgtacttggatcaccagggattgtgcttttcctggcctcaagagccagcagagtccactccattgtgcatcaagagacaggtctctgactctcctttttaacatcagtctgtctcacccctacggaatcagagaatcctcaaagatcctctggttctagaagagaagagaactagaatggcctgttcctctgttgccaggtttccacaccatcagattccaaagaagtttccagaactcccttaacctctcattttaatgtcaaattatcctttccatgaagacagtcttacttagatctgatgtaaacccttcatgctaaaaatctagccccaatctcagctctcttttcatgtgtggcagaatagtaggtcatctcctctgaggagaccacctcaaatgcctgtgacacagccatgtcttgggcttgcagtcaccttgggcctcctggcttgaccacttgtgagctgtgatgttaggcagattactcaacctctcagtgattccatttctcgtctgtaaaatgggaacaataattgggcttatacatgaatttgttttgaggattaaaaatagataaaaggcttagcccagttgcctagttcatcataaatgcctatcaaattttagcttaaaaaaaaaaaaaaaa

SEQ ID NO: 5406 - DNA, 681 bp, Homo sapiens
attctgataaattggggagaactttggttgtggcatgacatctgggtcatctgtcctccatgtttctgtttggtatctctccttcctttctctgtcagccacagcttctctattaaattcttttgatggcgagaaccaaggagtaggagtgaaacatctatgatggatgtttatcacagtgctgtttgtaatagtgcacactgcaaatattacaccaagggacgtaggtaaattatggttacatcgatttcatgtaatcatgataatacataagaatatttgttaaaatgaaaagtggtttctaatacttaagcggaaaaaaacaaattacaaagaacactgatacaatatgatgaacccaagagtctttattatgccttttattggttttgctttctgtaatgaacatgtataattcttccaatgagaaaaaagttttaaaaaataaaatgagaaattgtggtcctaaggaaagatcccatagagccataaaaaggagtctacaattaaaaaaaaaacaatttgaataattcctaccaacaaggtttcatacttacagtgggttctatgttgagttcttttctctctctgtctccttgatcaaaaaattcagttgctacaagttctgctatctgaaataaataacagactcagttttgacaaaaaaaaaaaaaaaaaaaa

SEQ ID NO: 5407 - DNA, 725 bp, Homo sapiens; identical to SEQ ID NO: 172

SEQ ID NO: 5408 - DNA, 671 bp, Homo sapiens
  misc_feature (77)..(77): n is a, c, g, or t
ccaggcaccttcggacccgctgccctgtgggagcacctgcttcaggaagctccctccctccctctgcctcccttccncaggacaccaagagcgccctctcctgagcccctggcagaccgactgcaggtagcaggattgcaggaccctctgcctggcctggcgtttcaggagagaggggaagtggggcctgtgctctgggaggcgtgrtcatccgagacaggagtccaggggagagaggagggsacaaaacggcsyctgtctgggggagstcgaatgagcctgtkctggcatccgcgggccccacgtcttttgcccaatctctctccagccacaggcaagcgccagcggtctccgggctgttgcgtctctaagggtttctgtgattggatggaaccagagcctgtctggggaggagactggaagtttctgcattccttcaacagaacactttaatgaagtactctatatatatatataaatatatatataaatatatatatatacttctatttgtgggtactttaggaaaatgccctttggtcactgtaaatatgaattgtgaccccatcccttcccgcatgagcccagtgagtcccagcagctatcagcctccctgaacgattaaacagctcctcccagcaaaaaaaaaaaaaaaaaaaaaaaaaaaaaaa

SEQ ID NO: 5409 - DNA, 1101 bp, Homo sapiens; identical to SEQ ID NO: 174

SEQ ID NO: 5410 - DNA, 712 bp, Homo sapiens
cataaagaactagatgtataatawtttcagtttktttktaaattagtaactattaatwgagtagcacaaatkaattggggtgcktkttctggaccagatatctgtgctactactgtgctaggtcctttgtttttttagacatggggtctcactgctgttgccgaggctgaagtgcagtggtcacagtcacagctcaccacagcctcgaacttctggcctcaagcaatcctcttgcctcagcctcctgagtcgctgggattacaggcatgagcaccgcaatttacagaaattgtcactttcatgatttccaacaaaacaacgagcaagttactcgttgttttacaaatgggaaaagttaaacctgttgagatttgcttcctgaagtcatgcacctgtttacatggacaaggctaggaatcaaacttgggtttgtctaactccagagtccttcctagtaattaacctccggtgctctgaactgccatgcaaaagaatgtgaacttcattctgaagggaatgggaaggtcgtggaaaatttttaagcatgaaagtgacaggctcaaaacagcaacaccaaccaaccaaccaaccaacaaaaaaccctcagtttttaaaagatagctcttggccgggcgcggtggctcacgcctgtaatcccaacgctttgggaggccgaggcgggcggatcacaaaatacaaaaaaaaaaaaaaa

SEQ ID NO: 5411 - DNA, 765 bp, Homo sapiens
gataacgtaccaagaagtcggatcgttcggtaaatwcggracccgctatgggcctcccctccggaaatggtgragaaattgaatcagccagcacgccaagtacactgctctktctgtggcaaaaccaagatgaagagacgagctgtggggatctggcactgtggtcccagctactttggaggctcaggcacaggaatcgcttgaacctacgaggcgggggttgcagtgagccaggatcgtgccactgcactttatttagccaggacaacactctgtctccaaaaaaaagtttctgaaggtaaaagatatactaaaggatatacatatactgcctgcttctatgatgtttcatttgacctacaccatcagcatcttcaggaaacagtatgaaactaatttcacattaaatgttgcaaacgtctgcaattctccagtttttagtttgcacgtaaggattcgtaggattgatttcagattgacagatggttgtagtaacaaaaaaatgaattgccttggagaattcgagttattttaggcctgcctttgacacttttatgcacttaattcactgccaatttagtctaactcctcaaccatctgtggtatggacttctcagtcctcctaattggtatgtcttttatctatcccagagtcagtagtcctttaaggatgcaaatttaattcgataagaatgtggatttacttcatctttaggacagagtaaaaacctttatttcacttggtctgaaaaaaaaaaaaaaaaa

SEQ ID NO: 5412 - DNA, 790 bp, Homo sapiens
cccagcatsccwakaakttggaycagactccaawgcactkcggctcgctggagacactaaggggcaccraacctctgagttttacttwaagrttcgctgtatgtttgccttgsacaaaaaggctacctaccacgtgctatccagtaatatacttaaataagccmatacttagatctactgtaaggcagatgctaattataaggcattaagtaagcaaatagtgccctcagctactgcagaagaaaagtcccactgaggaaaagaaagtcttgtgatttttaaaggcaagttttcaagtgctctcatagttctatcctctaattccattaaatccatactaggagcgtcagtgagggttttcatagcttttggaaatactttggtctctgaactgtaattagcmagaagtaaaaacagaaacgtcaaacgtcaaatgtttgctttgttacctggaggactaaatgtagatgtctttagtatactttgtatgttcttaatattggaagataattttgtgaatctgtagattttattttttcagtcttaccttacaaatttcttttctatgaataatagaggaacttacggcactctgccatttgttaatgaaaggaagtgcagaggatttagaaaagtacatgatccccagaccacaacaaaccaaaacataaactcatgtctgtgtcccatggtcatagtcaaagattttgtactgctaaaattaccaaataatttaaataaagtggatttgaacacmaaaaaaaaaaaaaaaaaaaaaaaaaaaaaaaaa

SEQ ID NO: 5413 - DNA, 716 bp, Homo sapiens
tgagaagggttttccttttaacctatattacatggtgtcagatacatatgtctcamagatttacatcagcctgatattctatgctgataaagkgaatccatgtgacaatggagatatttcctwcagagcagtktaaaataracatattrrataaaattagaattcagagggatctcwaratgatactttaggattgattacataggcactcctttttattttggttgatcctatgtacctatgttatctatctatctatctatctatctatccgtctatcagttaaattggtaaatgcatccattttgaatcctatggtatttgaacagacttgaacagttggaatggtcaagttatactttttattttgcacctgcctgaaatatacacagttatatgacagtggcaatgaaaatcaaatttctgttccacagataagaaagtaattacttattattcaactttttaagtggtcaaatgtttatttcttaattggacaactacactaaaagtacttgtttgcttgaaataaatcttgtgcctaattttttctgtgtattggtggctaacttagtcaattccatcttactcttcttcaaaaaacggctttattgagctatcattcacatactatacatttcagccattgaaagttgcagaattcagaggtttttagtatattcacagagatgtgcagccatcaccaaawtctaact

SEQ ID NO: 5414 - DNA, 954 bp, Homo sapiens; identical to SEQ ID NO: 179

SEQ ID NO: 5415 - DNA, 760 bp, Homo sapiens
cgccccagagtgacctccagagtggcaytgtggtgtccttcctggagaagascagagawacacrkgcakgtcagcaygaggggctgccgragcccctcaccctgagatggragccrtcttcccagyccaccatccccatcgtgggcatygttgctggcctggctgtcctrgcwgtcctagykgtcmtmggagctrtgrtsgctrytgtgatgtgtaggaggaagagctcaggtggaaaaggagggagctrctctcaggctgcgtccagcracagtgcccagggctctgatgwgtctctcaymgcttgwaaagcctgagacagctgyctgtgwgggactgagatgcaggatttcttcacwcctcycctttgtgacttcaagagcctctggcatctctttctgcaaaggcayctgaatgtgtctgcgttcctgttagcataatgtgaggaggtggagagacagcccacccyygtgtccacygtgacccctgtycccayrctgacctgtgttycctccccrrtcatctttcytgttccagagargtgggctggatgtctccatctctgtctcaacttyatsgtgyrctgagctgcaacttcttacttccctamtgaarwtaagaayctgaatatamatttgttttctcaaatatttgctatgarrggttgatggattaattaaataagtcaattcctggaakktgagagagcaaataaagacctgagaaccttccaraaaaaaaaaaaaaaaaaaaaaaaaaa

SEQ ID NO: 5416 - DNA, 1294 bp, Homo sapiens; identical to SEQ ID NO: 181

SEQ ID NO: 5417 - DNA, 832 bp, Homo sapiens; identical to SEQ ID NO: 182
  misc_feature (115)..(117): n is a, c, g, or t

SEQ ID NO: 5418 - DNA, 744 bp, Homo sapiens; identical to SEQ ID NO: 183

SEQ ID NO: 5419 - DNA, 739 bp, Homo sapiens
gcatttcacaagagccattattgcaccagccttttaaagaacacsttccagagggcattttagaacactytaagccttaagccaaarggaagagtacctaatggtagaattaaaggggatttcgctaacagatgggagatgggacctttgcataggccattataatccagcttcttcatagccttggaataccctggccactgaaacagaattcctgagaacccttgcctttgaatgtggaatggtgaccagagagtggaaaaatctcatcttcaaatgacagtatttgaaaggatataacacaaatatatcactcttacattgatattcccagcgtaaattggcaaaggcccttgaaagtgcaatttggtaccacactgtgagaaccaaaaaatatttaagccctttgatctagacatcttactattatgaatttattctaagaaaataatcaaaaataarwtaaargctttttgcacmaaaagtacacygtyacatttttwaaaaacaaaaagtgtatgattggattgtttgtaacacaaagaataaatgcttgaggggatggatactccatttaccgtgatgtgaatattacccattgcgtgcctgtatcaagtgtctcagtgtatatttatatacacctactatatacccacaaaaattaaaaataaaatttttttaaagtacaattttaaaaatatattatttctagtagttacagcttggaaaaaaaaaaaaa

SEQ ID NO: 5420 - DNA, 714 bp, Homo sapiens
tcagagatcatctacacacatagaattcgatacctaaatatagtgtcagatctggtttaataatgcatggtactatgcctccgtggtcagagattgtttcwasgtatttgaagggaatatgggccaggtactgaaattatatgctgaaaattatagtatacaattattttgcctattcagctagttttgtaaatgtatactttgatgtccctgatgcttcaaaccttgtcctcttggaatgacatttttggtgttttagatgatactgtcaaattttgccttgaggcaatgcattcgtaacacagatttttattggaactgagcaagcctcttaatttcaaatattcaattaatatataataaagtagtgccaaattttatcagttccagagtgctacttatatagagaggttattgaatgtaagtagtatatgtatgctgagaatttccaacgtatactaactttcttcactactagattccttgcaccccacacaaggcctgcatttagaagattcttaatatatttgtaaaattaagtaaataaactaatgctcgtgtcctcaattctaatatcaataataaaattgacttaaataatatttatttgtcagtgttggtagtggaatttgtaattttcttttgcgcaataaatgatcatgctctcaaaaaaaaaaaaaaaaaaaaaaaaaaaaaaaaaaaaaaaaaaaaaaa

SEQ ID NO: 5421 - DNA, 736 bp, Homo sapiens; identical to SEQ ID NO: 186

SEQ ID NO: 5422 - DNA, 737 bp, Homo sapiens
gttctgcgtcatcagtatctcggcacacaacagctcagcccgcgtcaccggtcaccaggagtgaaaacagctcaggttctcaccacatacagatgcccaatctggtaaacmaaataaacattttttttgaaaaaaaaataaattactagcttcaggtattccttttagtaacacmaaacagactaagacagaaaattagtactaaggagcgcggtgttgctataaagataactgaaattgtggaagcactttagaaatgagtgatgggtagaggttggaagagtttggagagctcagaagataaaaagatgagggaaagtttggaacttcttagagattggttaagtagttgtgaccaaaatactgacagaaatatgggcagaaaaggctatgctaatgaggtctcagacagaaattaggaacttattggaactggagcaaatatccccattgttgcactgtagcaaagaacctggctgcattgttgcactgtagcagagaatttggctgcattatggaaggctaatcttaagagcgatgacctagagtatctggaagaaaaaaattctaagcagcaaagtgctcaagaagtggcattgttacttttaacagcttacactaaattatgtccacaatggaatcacctaaaggaagaatctataattaaaagggacacgagcattaacatttgaaaaatttgcagcctggccatgtggtagtaaaaaaaaaaaaaaaaa

SEQ ID NO: 5423 - DNA, 742 bp, Homo sapiens
ctctgcagccctcttcgtcaagagcagcaaaggatccagttcccatkcyggsccmamacammacagatgttckgccatcttctcatgtatcttaaccccagactctgaaaatggcagcatattctcatttattttagagaaatgcttttgaatacctattgtgtacagggacactgaattgggacacataaaaactgcctccaagaagctggttgactgattagataaaaaagcttccttaaaatatactgctactaataataataacaataataataataaagcaaaaccaccaggaggcataacttattaaagtgctctgagtgattaaaaagcatccatgcaagctgagaaatctcaaaaggctttctgaaggaggtggcaggttaggaagaaattggaaaaaaatgtttggagacagattatggagagctttcaaggcactattaggaagtttaaatgtgtcttttggttcctcacttgtgcccctgaaagtgtactcagagggcaccactggataaacctggttcatctttttataacatcgatattacttacagatttgaaagtgaaaggtttttcattaaagattcttaaaattttgtcatacccacacaaaaataaattccagttaaagaattaaacatggaaataaataaaactatgaagatactagaataaaatataggaaatgagaaagactttatgagcaaaactaagatgccctagagaaaaaaaaaaa

SEQ ID NO: 5424 - DNA, 766 bp, Homo sapiens
tagtggttatgggcaattcaggacagcaccttcttttgagacattagccagtagctcactcttttccaggacagcaattgtggtagatggaagaatcctggacttggctagcccaaagarggaggatgtggttaatcctgtttcacctggtttgtcctaaggccatagctwrraagtaccagctctggctggggtccgtgaagcccaggccaggcagccrratcttgcctgtgctgggcatacraccctctgctgttcacatctctgagctatatcctcattagtgaaggtggcttttgctttatagtttggctggggagcacttaattcttcccatttcmaaaggtaatgttgcctggggcttaacccacctgccctcttgggcaaggttgggacwaagccatctgggcagtcaggggcaaggactgttggaggagagttagcccaagtataggctctgcccagatgccatcacatccctgatactgtgtatgctttgaagcaccttccctgagaagggaagaggggatctttggactasgttcttggctccagacctggaatccacawaagccaaaccagctcatttcaacaaaggagctccgatgtgaggggcaaggctgccccctgccccagggctcttcagaaagcatctgcatgtgaacaccatcatgcctttataaaggatccttattacaggaaaagcatgagtggtggctaacctgaccaataaagttattttatgattgcaaaaaaaaaaaaaaaa

SEQ ID NO: 5425 - DNA, 706 bp, Homo sapiens
agwacatggcattcakkaagraagracatagaacatattcttcatccctkaagtacttttgctagtggctggagagattgacgccaaggttttctatttgggcatcacttcacaatgttcaactattttcattatcagtwwactcactggtggtacatctttctgtctgtacttctatccctgggcagtaaatataatgtgcctcaaaagggctaaccctaaaggggctagattatcttccaatagaggactaagctaagatgtttgcaaaagcagcagcatcctgtggtacccagagcaatacagcaggtatagggaatcctattatgagcccaaaaggacaagatgtaggagtagcacaatgccaatggtgagtgacacagaaatggccagcgcatatacaacagggcaagctgcacctgtaccaacaaatactcagagcactacttgtttcatttgttttacaaggaaaaaaaatatggttaaaagacaactagaaaatgcctttattgaatctgaaaccatgataagagactgaacacataggttttataaaacatgtttctttcctatcttccctgtgataataacaagcaagggaccttaaaacaatttctgaagtataatcagtacatatattgcgatagtgaaaagagcaaaagatttggagccaaatttagcatgaatggtggatctgcttcttact

SEQ ID NO: 5426 - DNA, 739 bp, Homo sapiens
acacaatcgcttttatctgggaatttcagaagtaagtgaaatcagttaagttatcccaatccaagatctccagaagcaacttcacagtttgaacttcgagaaagcaaatttttagtgaaatgatttatttaaacaaatctttgtttgtaaacctcttgggatgaggattgtctacaaaaccataacttgaatttgagactagttggtcttactttgaagcaacacagaastacaatgsttagctgtkttgatgcacaactagatagagatggcacacgttcatcatccagcctawaagaagatgcatgtattcatagttaccgtacattgctgccataccaggcaattatgtagccaccgttagctgtgaatagtataagataattaacaaataagtgttagagaagtggtaattgtaagttctagaaaatattacttgagtgcatttttttgtttttcttaatttgtgggaattgctccattctgaatgaattaattaattttttaacagtaatacccttagtagtaaaaatccaaacaatgctgtaacttatagaataaaaccctccctttccctcccacccttcttgccmagggtaataactttccaaagtttctgcttttactttttcgggccatggttttcatagctctaaataatatgttcagggccctagttcttgatctgccaactttcaacagtgtctcttggctcctctccgttaaaaaaaaaaaaaaa

SEQ ID NO: 5427 - DNA, 752 bp, Homo sapiens
attaataatgatgaagtcaagatgatgtcagcaaaaaagacaatgtaatkgtccytktctcytcacacccatttgttgaagacctaatcctctgtgtcackgtaattggagacaggatcttttaaggaggtaattaaggtttaaatgaggtcataaaggtggagtcstaatccrataatcstrattttttgttgtttaagccaccaagtctctggtaactctgttatggcagcctgagctgcctaatagtcatacaggtggagtaaggaaatctaggggcctgtatatccccagagaccattgamaaatctgtgaaaaaagcaatcaggatgaaacttctcaggaccctggaagataatgaaaggtttacagcaactaagtgaatgctcaaccaggagaaagcacaacatgatagctttgtcggcattttacttttgttccaccccactccttctcagtgggacagtgatcttcagacagaattcttcattctgattgtgggcacctggttctgaagggagaagagcagatattgtttcaatcagagcagaaagtgtttcagcagagcagaatagtgtttgtctgttttgatctgtttgggggttccctgaagaactgacacaaggtgcttaattttgttttacctaatttggagctttctcagggtagagcaagtggttatgctgaagttccttcctcaraactttgaaaagcaagccactatcatctagggcaataaaaaaaaaaaaaaa

SEQ ID NO: 5428 - DNA, 764 bp, Homo sapiens
cttggagccacaatggataatagaaatccaaccaatgaatggtgagattagggagtcacacaagagatgggaggactgaccctgagamktttggcattcatgactgggtgsaagaargcawacttgtcatggtgagaaggcaggacaggccacaaaawtaggaagagaagtgaacggcagagtgagatattatggaagctgkkagatgagagtgttcaattaggggagagaggtaacagcagcwwaactactgagaawaaagtcaagtaagttgaggacagwwwaatatgtgggattagcaacagtaattcacagttttgatgggaacagatgccagatcagtgccctaatattcctgcttgtagttggtgttgagcatattcctgggacctttgattttctatgttctgacactcacagatttcaagacaaacaaatgatagaaggcagaaatctttggacttggtattagaagactttacttcaagtctttgtgcctctgcctaccgtcacatgaccttaggcaaattgttttctctttctctttaagccccagttatgcaactgcaaaggaattgggataaaacaattacttcataaggttattgtaaaaaaaaaaaaaaagtgtgtgtattatctcattgcctgctacatacaaagaacataatcaactgtatatataatgtatatacaattttatctgcattttctaaattctctaaacagcatattattaatcttttaatcaaaaaaaaaaaaaaaaa

SEQ ID NO: 5429 - DNA, 774 bp, Homo sapiens
aaaaaaggggtckccgaagatctgkgrakgaccgamwacgggtgattctgtgcaaacataactgkgtagagtkgcagragagagagraaaaaggtkgtgwatctcactgagggggaacgattgcacacarascctgacactggcacatttacmattttgaggagaaaggaggactgggatactaataatcagctaggaaccctttggaggacagatgctattactttgcctttaaggaggcttgagtggaactgtacagggcctggtactttttactatttaaaggacccaaggtagtgctagagctgtaatgtcagtaatgaaagcaaatgtgtgagctgcttggacctattaaagataagtcatttcaggtgcattgagaataagtgcacatggaaacgtggaactatctcttttttttatccttgctggggatgagtcagagaaagaaggatgtctgaattcctcagataaggttccaaatgcctttcagctaccagtttgcaatattttgtactacaggaaaaatcaacacttggtgtggataaacatgccaaatttagtctgatctgaatgctacaaaagcccccgtgtgcttagccaggtgcctgatatcaagtaggcactcaacaaatgaaagactctgctagctccaacccctgtcttcttgtcattaagaaataaagaaggaaagaaagtacagaagaaatgatgtacgtaaagtacagaagaatggatggaggaagggagagaaagagggcaaaaaaaaaaaaa

SEQ ID NO: 5430 - DNA, 731 bp, Homo sapiens
ttgsggaaktgcgtctctaggatgktaatyytcgcaactgttcrgtractawcmctggggggaggattactatataggattaagtgcattcgattgtkacctcccatatttatggcgtgtgttkamatattgccaataagcgggctacaaagtacattsygkttctctaaaaggctaaggaagagtgtttcactcacagaracagctttgaaataacmttggatgtgatctgatgataatcmaagagatgataattgttttctaactcaggagtcagccaactgtgacccatgacccctatttgtctgaggttctcaagctaacmatggttttcacatttgttaaatgcttgaaaaaaatccaaaggaggatactgttttgtgatacgtgaaaataatatgaaattcaaatttcagtgttcataagtaaaatattattgaaacagcaatgcccattcatttacatactagtttatggcttctttcacagtgtcactgtggaattgtgacagacactgaagggcccacaaagccmaaaatacatgactatctgaccttttacagataaagctgctaactcctgatctaactgatgaaaatttctctccaccccggtttttaggatatcttatttcaaatgcatgcacttaactttcattctgggaagtaaaacmgttggcttctcacccmaaaaaaaaaaaaaaaaaaaaaaaaaaaaaaaaaaaaaaaaaa

SEQ ID NO: 5431 - DNA, 731 bp, Homo sapiens; identical to SEQ ID NO: 5430

SEQ ID NO: 5432 - DNA, 799 bp, Homo sapiens
acttgtctgctgctctggccttctgctgggccttgcagcttcttcttcacccacagactggcctgcgcagccctgacatcccccagactggtctctttttgagatcttttgccagctgaccctgtgtcmcaggaatgggacagtcacagggaagtggcgagggtctcacgtcgtgggcttgctgaccaccttgaacttcggagacggtccagacaggaacaagacccggacattccaggccacagtcctgggaagtcagatgggattgaaaggatcttctgcaggacaactggtccttatcacagccagggtgaccacagaaaggactgcaggaacctgcctatattttagtgctgttccaggaatcctaccctccagccagccacccatatcctgctcagaggagggggctggaaatgccaccctgagccctagaatgggtgaggaatgtgttagtgtctggagccatgaaggccttgtgctgaccaagctgctcacctcggaggagctggctctgtgtggctccaggctgctggtcttgggctccttcctgcttctcttctgtggccttctctgctgtgtcactgctatgtgcttccacccgcgccgggagtcccactggtctagaacccggctctgagggcactggcctagttcccgacttgtttctcaggtgtgaatcaacttcttgggccttggctctgagttggaaaaggttttagaaaaagtgaagagctggaatgtgggggaaaataaaaagcttttttgcccmmaaaaaaaaaaaaaaaaaaaaaaaaaa

SEQ ID NO: 5433 - DNA, 710 bp, Homo sapiens
ctcctgatattgccttagcaatagattagtcagatctgagtaatagtgyyttccagtatctytattgagggaatgatgtctttcaaaactatmwgtttacataaacatagaattkctaaaatgtattcttggctaattcgcccagaatatataaaattgtaaatatattgtraacacaacagcsatatggagcacttaaataccgtatgtgcaccatattggagtacctacaatacactgaaaccattattacaatgatctgaagggagaagatagaccctaatatataatagtagattacctcaattcccccatttcaaccatagaccaattatctacagagaaaatcaatacggaaacattggatttgaattacaccttcgaccmagtagacctaacagaaatataccaaacattccacccgacagcagccaaatacacattgttctgaagtgcacacaaacgttctccaggatagatcacatgttagggcacmaaacaaatcttaacaaccttgagaggactggaatggtatcaaatattttttgcatccccatgcaggaaactagaaatcagtagcmggagacattttttaaaawacacaaatatgtggaaattaaataccatagtcttaaaccaattaatagattacagaaaaatattaccaaaaaaaaaaaaaaaaaaaaaaaaaaaaaaaaaaaaaaaaaaaa

SEQ ID NO: 5434 - DNA, 698 bp, Homo sapiens
gggaatctagagtatatcaaccctcttttagtcaaattagtctctatctattttcccacagctcactatgacctgaacaattaggagaaaaatagcccckgctgacatagtggcttattaaaacrataatctacttcacaaacaattacattttaaagccacatagttccttcccttgagaaatgtctgtaagccaggtggctcaattctgagaagttcctgcactgtgtatcttgtgtccagactgtcagagttctaatccatcttgcaccaaaaaagtaacaattggtggatgtattattataaccgattgctctaaagaaaacaaaatgtgttagtgcacactatgaaattctcaaaatggcagaccctgcactccagatggaaaacagagttcttagagtgacttacatttaaagccaggtattctatattaccaggatggtgccaagaagactgacttccctagattcccaatgggaggacatccctgctcctgacctgcatgttctattttggcagcagcctcactagttggcccatgagcctcccctgcttggaaggtgcttttaaatcaccacatatgtgcacccttcaattagtccccagaccccaggatttcagagttgaaagggccttacttcaatacaagcccctcttttgtagatgagaaaactgaggcttagagaaaaaaaaaa

SEQ ID NO: 5435 - DNA, 729 bp, Homo sapiens
ccwgtgkywcakycytgtawkccccaacattktgggrrggcccaaakagtaggkgtattgyttgagtcycaskgagtttkgatgawcragtcctggggcaacyacmcagtggagacytcatktcttattwwwamacwattaratgtgktggcatgtacctgaagtccwactatctatkgaggctkaggtkggaggatccctcgagcccaggagrtakargtctkcggtaaagctgggatttgcaccmtctgcaattccagcttgggcaacagagggagtacccctattctcwwwwawwkwaaawggawatataagtcacataacatwtaaatgaaccattttagkccgggckcgktggtctgacgtctgtaatcccagcactttgggagtgccgaggcaggtggatcacaaggccaggagttcgagaccatcctggccaacatggtgaaayctctgtgtctactaaaatacwaawwawataaaattatgccgggaatggtggtgcgtgcctgtaatcccagctactcgggaggctgaggcaggggaatcatcttgaatccgggaggtggaggttgcagtgagccgagatcgtgcctctgcactccaggcctggtgacataccaagactctgtctcaaaaaaaaaaaaaaaaaaattaaccatttaatgtgtacaattctgtgacattcaggatgttcaccatgttgggcaaccatcatcactcttgagt

SEQ ID NO: 5436 - DNA, 768 bp, Homo sapiens
tcgaccaaagacccccactaagagtgtctcaaactgagttagacttaacmgaargakatctcactcaggaaccatcatcgkccaaattatccataattgagtttcctaagcagaaaattcaatgcctaacttcaagtttttctttcacctttgcattcactgggaatttttaatggaagccatcttcacctttacggtattaaatggtaaaatatagattttcctacaatgcatattaagtactgtaaaaatttctcttgtatgggtattagcctttaatttgtgcaaacagtagatactaaaaaagaatactaaatgaggaaactccaaagaagcattttctaaaacatgttcaatggaacaccagctccttgagatgttcaaaggatattcctcagatagggtatacattgatcaataagtttatgaaatttgggccaaacaaaattaaacaggtttactgacagaaccagcctgtcagagcctttaaaatgcaaacccaccttgtgaatctctatggtaagacataatattcggtgtttaccatgcatacttaatcataaagctgtcttttcttggaacatcttacagggcttgtgtccccagtacaaactttagaaaatgtagccttaatacccttcacattactccaatctaccactctaatggcttgtctactcttcttcatacatgactagcaaatggtggtgtttatgctttaaaagaacacagatctaaaaaaaaaaaaaaagggcggaaaaaaaaaaa

SEQ ID NO: 5437 - DNA, 789 bp, Homo sapiens; identical to SEQ ID NO: 202

SEQ ID NO: 5438 - DNA, 742 bp, Homo sapiens
gaagtagctgaaactgagatgtctcgkggtkttggaagcttttcakcaaggggagtgaakgtattagtccaacctgaaaggtgcatatttcaggcagatagataggtgtttggcatcttataactgctcactttccttttccttagtaatctgaaagtaattcactgtactgaatagttaatggttcccttaatagactcttgtcccttggaaaaataaaatgaaatgactggggttctattagtaactgaaaaattgtcaacaattaaaactyctaaaacctactcatgagaaaataaagctcttttgtttaggaataataaaagccgacttaatgacttctgaaagaagtaagtgtccctgtaaaggccaggtgaaactgccattctttaacctgttactcggtgtactttactgcggaaagaatccagaaacagaacaggccaggcccaaaggatagaagtgtaggtttcctctggaagcttactgttctgctaaatgacctaaaaattgctagaacactccagataagtcaatttctgctataaaaatcattgcagaaagagattatttttagttgtctttatttaaaaaatgaaacacattagttacaaaaaccgttgctccaaatagataccgtgtatcttacaaatgttttttgcttggttttgagtgtttactgtagaaattttcaatatcataaataaatgattatttctttctcagaaaaaaaaaaaaaaaa

SEQ ID NO: 5439 - DNA, 744 bp, Homo sapiens
tgtggaatactaaggactgaagccactacatacctacacaccagaatgtyctagagscatttcctykktcatataaagggtaaaaatgcggactgatgttagactttggataaatygagaagcattttgaaatttctaggggaatctctgtgatagtaatagagtatcactgggaataggcccccmaaatctggccatamactggctccagwactggccatmaacaaaatccctgcagcactgtgacatrywtgtgatggccatgacacccacmctsaaggttgtgggtktactggmatgagggcaaggaacamcwggcycamccagggcagaaaaccgcywaaaggtsttcmtragccacamacaakagcawgagtgatctgygccwtaaggacatgytcctgcygcagawaamtagccacagcccatctcttcactkkggcccatccctttatttcctgtaaggaatacttttagttaatccacaatctatagaaataatgcttatcactggcttgttgtcaataaatatgtgggtaaatctctgctccaggctctcagctctgaaggctgtgagacccctgatttcccactccacactctatatttctgtgtgtctttaattcctctagcgctgctgggttagggtctccatgaccaagctggtcttggtaagtataaattttaagcttatagagcataaaatatagaaaaataaaaataattaatcaaaaaaaaaaaaaa

SEQ ID NO: 5440 - DNA, 728 bp, Homo sapiens; identical to SEQ ID NO: 205

SEQ ID NO: 5441 - DNA, 724 bp, Homo sapiens
tatacgacattagaaacatgaaacttagatattaacttagtggataagcayakawawagttaarccaatttgatcacttaggattaaagatctkacatattacattagtggcacttaataagttcagtgcatctagaaaataagktgaagtacatagtctggtaataccamaaamcacctaacttaattaccactttctctgtatatgaaatgtttacatatattaccaaagattatagattcttaatattttctcattgatttttatatctcatatattaagaaataactttctatatctgctaaactatattgggagacmattctctgtggtatctcacgtttctgtagaacttgtgagcmaaggcactgtcttttttctagcctatttttctaaggatgcttgcatttaaaacagccatggaagacagagatagtatcccccttggagcaaggacaggtttgcttacagctttcacgggtctgcctcctaaaagaaggacaggtatgtgcattgcccatcataaaagattcaagtttcctaagctcagagttctgtcgtgtgcacacacagatgtcatcttgcttccttaatgtcmccttgtaggaattgcgacttgtcaagctagcacmaaaatgctgatactctgcccmctgctattgctgtaagtaataaataaacctttttctctaaaaaaaaaaaaaaaaaaaaaaaaaaaaaaaa

SEQ ID NO: 5442 - DNA, 743 bp, Homo sapiens; identical to SEQ ID NO: 207

SEQ ID NO: 5443 - DNA, 731 bp, Homo sapiens
tgcagagtacttcctaagccactgtgcctgccttggatttcatagtttctctgtcagtagcatgatccccaccgctatggtctatctatgatcaccgtgctttgtgaaactgtgcatcccccttgtagcctttctcagtgtccgtggcatttttgtgacttcccagcactagaataagttttcctgcccaaatgagtgaggcgcttggtgccctctggactttcccacttcccaacatgggagaattgtgaactttccatcagactgcctccctggccctccccattcttctcctgttggttattctgagtctgacacagacccatgacatgtcttataaagcctccaatggctttatcctacctagatcccttccagcccattttaattagactatgtcattgtgaggccaccagtccattcatttgaattctgtgaatctccaccttgcctatctttgggtagaagctggacagtactgttgccctcttccaatcctcttcccctacatccctggcactggttgttttctgtgaaaacagcagtgaacaggttcagttttgaactggccctgaggaaatgggtcaggagttgtattgrcaagagggaggggtgagagctgttggagaactgagaatgaggttttttttttttttttctttttaactttttttatattagtaataaatgcagtggaaaccagcattttaaaaaaaraaaaaaaaaaaaaa

SEQ ID NO: 5444 - DNA, 821 bp, Homo sapiens; identical to SEQ ID NO: 209

SEQ ID NO: 5445 - DNA, 753 bp, Homo sapiens; identical to SEQ ID NO: 210

SEQ ID NO: 5446 - DNA, 737 bp, Homo sapiens
actaattgtctcacagaaaatgccctttttttttttttaatcaagagatgataccttaccatggwtgaaggacatgctawatgcaacttacttaaggaagagtttctktwaaccctwtacctgcagattgcatgggcataaatttctgccataaatgtagatattttcccaagagttacacacatttctatagtgaaggtattagcaaccgagttgctgtcccctcgagaacctgcaaggccagctcctctcccctttctccctttttctccacacccccaragcaactttctatttagctgtcactagcactcttctttctttttttgagatggagtctcactctgttacccaggctggagtgcagtggcacgatctcggctcactgcaacctccacctcctgagttcaagtgattctcctgcctcaacctccagaatagctggaattacagctactacacccggctagtttttgtatttttagtagagacgtggtttcaccatggtgggcaggctgatttcaaactccttacctcatgtgatccacctgcctcagcctcccaaagtgctgggattataggcatgagccaccgcccccggcctagcattcttctttggaaatcttttcatttgaaacttgcttacataaagttattaaaatacaatgatagatataatacaactcagtgctaccaagtgaaaatatttactttggagaataaaaaaaaaaaaaaaa

SEQ ID NO: 5447 - DNA, 760 bp, Homo sapiens; identical to SEQ ID NO: 212

SEQ ID NO: 5448 - DNA, 725 bp, Homo sapiens; identical to SEQ ID NO: 213

SEQ ID NO: 5449 - DNA, 728 bp, Homo sapiens; identical to SEQ ID NO: 214

SEQ ID NO: 5450 - DNA, 743 bp, Homo sapiens
agcttgtggatwataatcacasggcaaataatgcagttaaaataacaacatgacaatcaggtggaggaaatgtataataaacccaaatgtggctgggtagagtggctcacacctgtaatcccagcactttgggaggccaagccgggcagattacctgaggtcaggagttcgagaccagcttggccaacatggcgaaaccccgtctcttactaaaaatacaaaaattagccaggcttgggggcgcacgcctgtagtcccagctcctcaggagctgagggtaggagaatcacttgaacccaggaggcaaagggtgcagggagttgagccaagatcgcgccattgcaccctagcctgggcaacagagcgagattctgtttcaaaaaacccccaagtgtattataaggcaataattcctatacgaagcaaactaaaatgcagcaatattaaggtataaaaacaaagaggaataattccattgaaccttgattctggaaactttgatccacccagcagtcatgatgttagactcattgaaaagaatgtatttctaatgcatgatgcaatcggtctatagatgtgtcatggaaacttggttgcaacttcaagacaaaataaaaagtaaacatttacatgaaaaatggtggatatggaaggtggagaagagaggagataacagctttatctttcaaaatagagaattgagagatggtaccaaagctgatgaagtaaaaaaaaaaaaaaaa

SEQ ID NO: 5451 - DNA, 765 bp, Homo sapiens
cagcatcacagggacaccctgaaggggtgatatcacctccacgctcaaagtttcaggtctcgcggtttgtcgtagctgttccagkacaattcratggttatycaggttgggtgcaatgtgtaatgatatttctgtacttttgtatcaactcagaatttccagagagctcttcctggctgaaaagatgtccaaggatcatctccggaatggaagaggtgaggcctgttagcttgtgggctgcccaatccatccaacccttggcattgggatcaatgttgatgaggacaagaccttcaacagtgtccgggtggttaagagcatatctcgccaggatgtaggctccagctccaacaccwactccaattattgtagagaaatttaggtactgcaggacgcaagggatcatgtctgcaagctggtccagagatgggtactgatatcccaaagggaacacaggggctccctcttccattccaggggcatccacatgaacccgcacaaagttctgaatgatttcctgcatgtcctcgaactgaaacagtggctggaagcaagatttatagttgagtcccacatcgtggtaggtaaggatcgctgggcgtttgggtttgggggtgccatagacagtgaaagtgacagagccgtatggtgtctccacagagtgagtctkksccksstccaggmgkmttckggcarctrrctymkcctcyktgakctgcrcctcmkgcrkctgtcctggcaacagtggcttctcctctgtgatct

SEQ ID NO: 5452 - DNA, 746 bp, Homo sapiens
tatctttcaagaccaggccctggcagcaaccacaacstctggtctgttctgttgagtggtttcwatccaggcagcattgaagtcaggtggttccggaatggccaggaagagaagactggggtggtgtccacaggcctgatccacaatggagactggaccttccagacccctggtgatgctggaaacagttcctcggagtggagaggtttacacctgccaagtggagcacccaagcgtgacaagccctctcacagtggaatggagtgcacggtctgaatctgcacagagcaagatgctgagtggagtcgggggctttgtgctgggcctgctcttccttggggccgggctgttcatctacttcaggaatcagaaaggacactctggacttcagccaacaggattcctgagctgaagtgcagatgacaatttaaggaagaatcttcttccccagctttgcaggatgaaaagctttcccgcctggctgttattcttccacgagagagggctttctcaggacctagttgctactggttcagcaactgcagaaaatgtcctcccttgtggcttcctcagttcctgcccttggcctgaagtcccagcattgatggcagcgcctcatcttcaacttttgtgctcccctttgcctaaaccctatggcctcctgtgcatctgtactcaccctgtaccacaaacacattacattattaaatgtttctcaaagatggarwwaaaaaaaaaaaaaaaaa

SEQ ID NO: 5453 - DNA, 762 bp, Homo sapiens; identical to SEQ ID NO: 218
  misc_feature (649)..(649): n is a, c, g, or t

SEQ ID NO: 5454 - DNA, 718 bp, Homo sapiens; identical to SEQ ID NO: 219

SEQ ID NO: 5455 - DNA, 1056 bp, Homo sapiens; identical to SEQ ID NO: 220

SEQ ID NO: 5456 - DNA, 752 bp, Homo sapiens; identical to SEQ ID NO: 221
  misc_feature (57)..(57): n is a, c, g, or t

SEQ ID NO: 5457 - DNA, 752 bp, Homo sapiens; identical to SEQ ID NO: 221
  misc_feature (57)..(57): n is a, c, g, or t

SEQ ID NO: 5458 - DNA, 899 bp, Homo sapiens
ataaagtttctgagccctcccaccatttggacctgtgaagtcagttaagctcttttctctataaattacccagtctgggcagttctttatagcagtgtgagaacagactaatacacagacccaaagtgagattaatagaaaggggcatggctgtgctgaatggaactgctcgttacagaagaccagacatctatcagaaaaacctgcccaatgccgtagctaattccaatactaargattracccagcaaagccacaatgtacttccaactcttgkcagttccaaatgaggtcagcatttawkaatggcagcccctwatccctagcaggagcacagcagtaacacagatgaaaggtgcaggtgacagccttcactaaggacacatttactcatctgaatgaacaagcagtgggacccgtttatacccagtcacttgggcttgagaaatagctggattctccccagggaggctgccctcctcccccagttccctgatttaaggttgaagatggctggaatgcaccccacctgtgaagaacagtggacatggcttggggtagagccagaacaagacctcaaaaggacacaggccaaactggagactcggggcagccaggtggaaccagaacaggacataaagtgagcttgtacatccaacagccatgagtaacatcaaaaaggttgtagcctggccaacatggcaaaaccccatctctacaaaaaawamaaaaagtagctgggcgtggtagcatgcacctttaatcccagctacttgggaggctgaggcaggaggatcacttgaacccggggggcagaggttgcagtgagctgagattgtgccactgcactccagccagggagacagaatgagaacctgtctcaaaaaaaaaaaaaaaaaa

SEQ ID NO: 5459 - DNA, 817 bp, Homo sapiens; identical to SEQ ID NO: 224
  misc_feature (191)..(191): n is a, c, g, or t

SEQ ID NO: 5460 - DNA, 786 bp, Homo sapiens; identical to SEQ ID NO: 225

SEQ ID NO: 5461 - DNA, 827 bp, Homo sapiens
tccacggggtttwaycacaaagtacgcmacakgtttttaaagtatgagaacacagttgtcctctcstgttkatccaagcaggaagattywatawcskgatggwagagacagactycagscagccbkggacttgctagcccaaagaaggaggatgtggttaatctgtttcacctggtttgtcctaaggccatagttaraaagtaccagytctggctkgggtccktgaagcccaggccaggcagccaaatcttgcctgtgctgggcatacaaccctctgctttcacatctctgagctakatcctcattagtgaaggtggcttttgctttatagtttggctggggagcacttaattcttcccatttcaaaaggtaatgttgcctggggcttaacccacctgccctttgggcaaggttgggacaaagccatctgggcagtcaggggcaaggactgttggaggagagttagcccaagtataggctctgcccagatgccatcacatccctgatactgtgtatgctttgaagcaccttccctgagaagggaagaggggatctttggactasgttcttggctccagacctggaatccacaaaagccaaaccagctcatttcaacaaaggagctccgatgtgaggggcaaggctgccccctgccccagggctcttcagaaagcatctgcatgtgaacaccatcatgcctttataaaggatccttattacaggaaaagcatgagtggtggctaacctgaccaataaagttattttatgattgcawmwaaaaaaaaaaaaaaaaaaaaaaaaaaaaaaaaaaaaaaaaaaaaaaaaaa

SEQ ID NO: 5462 - DNA, 827 bp, Homo sapiens; identical to SEQ ID NO: 5461

SEQ ID NO: 5463 - DNA, 790 bp, Homo sapiens; identical to SEQ ID NO: 228

SEQ ID NO: 5464 - DNA, 865 bp, Homo sapiens; identical to SEQ ID NO: 229

SEQ ID NO: 5465 - DNA, 725 bp, Homo sapiens; identical to SEQ ID NO: 230

SEQ ID NO: 5466 - DNA, 974 bp, Homo sapiens; identical to SEQ ID NO: 231

SEQ ID NO: 5467 - DNA, 710 bp, Homo sapiens
actgttgccagtgatcaggatctttggcctacctgcaggcccatgggaatttggtgattttccacagaatgatcaagttgacgacaggacaggaagccgcactcagttatggcttctacggctgccmctgtggcgtggktgkcagaggatcccccraggatgcawcggwtcgctkctgtgtcactcatgactgttgctacyawcgtctggagaaacgtggatgtggcaccmaatttctgagctacacagtttagcmactcggggagcagaatcacctgtgcmaaacaggactcctgcagaagtcaactgtgtgagtgtgataaggctgctgccacctgtttttgctagaaacragacgacctacmataaaaagtaccagtactattccaataaacacgtgcagagggagcacccctcgttgctgagtcccctcttgccctggaaaccttccacccagtgctgaatttccctctctcataccctccctccctaccctaaccaagttccttggccatgcagaaagcatccctcacccatcctagaggccaggcaggagcccttctatacccacccagaatgagacatccagcagatttccagccttctactgctctcctccacctcaactccgtgcttaaccaaagaagctgtactccggggggtctcttctgaataaagcaattagcaaatcawraaaaaaaaaaaaaaaa

SEQ ID NO: 5468 - DNA, 710 bp, Homo sapiens; identical to SEQ ID NO: 5467

SEQ ID NO: 5469 - DNA, 1241 bp, Homo sapiens; identical to SEQ ID NO: 234

SEQ ID NO: 5470 - DNA, 841 bp, Homo sapiens; identical to SEQ ID NO: 235

SEQ ID NO: 5471 - DNA, 750 bp, Homo sapiens
aggtatgcctgacagsagatgdwgtwaagaagatttgcatscarcgggttcattwwaatsgatggyaaggtccgractgatatrmcskwymctgctkgattcatggaygtcatcagcattgacmwgacgggagagaatttccgtctgatctatgacmccaagggtcgctttgctgtacatcgtattacacctgaggaggccaagtacmagttgtgcmaagtgagaaagatctttgtgggcacmaaaggaatccctcatctggtgactcatgatgcccgcaccatccgstaccccgatcccctcatcaaggtgaatgataccattcagattgatttrgagactggcaagattactgatttcatcaagttcgacactggtaacctgtgtatggtgactggaggtgctaacctaggaagaattggtgtgatcacchacagagagaggcamccctggatcttttgacgtggttcacgtgaaagatgccmrtggcawcagctttgccactcgacyttccaacatttttgttattggcaagggcaacmraccatggatttctcttccccgaggaaagggtatccgcctcaccattgctgaagagagagacmraagactggcggccmwacagagcmgtgggtgaaatgggtccctgggtgacatgtcagatctttgtacgtaattaaaaatattgtggcmggattaawarmmaaaaaaaaaaaaaaaawaaaaawaaaaawaawaaaaaaaaaaaaa

SEQ ID NO: 5472 - DNA, 829 bp, Homo sapiens; identical to SEQ ID NO: 237

SEQ ID NO: 5473 - DNA, 785 bp, Homo sapiens
gtaagtcactccatcttcggccgcttggcccgcgtgcagccaaaatctcaggaagscaggacacagggacacgttccctggaagacasccagctgtttaatttcctaaagtgatgctctttctggggatscaggcattagttcttagtgaaackgtattattgaktaarcmcaatgcccatttaagccttwagttaramartwrraragmcccggttacttggtagaccsktttgagctgctgagaaggaccyktcacttatgttccttctagagtaaccscccatttggatacmcmgccccagawaaagrrggcctgcttccaagttttcscsggttartgtkaagarttaacctaggawyccamcaacckggccttccwagttcacctgktcccttccrccartcaatcksacatctccagccagagaatggataaaatascmaaccagttctgggkttttgtatcaatctctgactgcaaccacttgggaaagactggcttagctgaagttctaaccttcctacctttcaatgcccagaaagaaaaagccaagtgagtctgtgccaacctctcctacacagagcctctgtttgccaccytgckttatattgctaccctgctmacttccctccaaagaccgggaatwamctttggagaaaataaggtgtttgcgattaagctttgttgttgttcctttgaatacagacgttgctaggaaactgccttttattagttcgttttgctgaaatattaaaattcaaatttagaaaaaaaaaaaaaaa

SEQ ID NO: 5474 - DNA, 769 bp, Homo sapiens
gcctgctgatgactttgactgaccctgcccctgctactacgktttgcccmtttggatgctaccactgtactgtcgcgtgccattgctgagctgggcatctatccagctgtggatcctcgtagactccacctctcgtatcactggatccccaamatctgttggcacstgatgcactctatcgactgtttgccccstcggtggtgcaacaaagatgcctcgcagcgagcgtatcwmatcccctcccacggagtgatcwttgccmtccctctgtggtagtagtgagtagatagctctttcttgagaggagagaccacagatttgtgcmccggtgctccccgtcgccrcggaawatcacgmgctgttcttctgtgttctcgascctattcacrgkttckctagagktctctacmcrgktacattatggggaagcctggtacccctctgaagragacccwtcmaaggattttcccascagatttttggccaggtggaatatgacccatctccccagaaccagsccttctatatggtgggacccaattgaagaagctgtggcaaaagctgataagctggctgaagagcattcatcgtgaggggtctttgtcctctgtactgtctctctccttgcccctaacccmaaaagcttcatttttctgtgtaggctgcacaagagccttgattgaagatatattctttctgaacagtatttaaggtttccaataaaatgtacacccctcaraaaaaaaaaaaaaaaaaaaaaaaaaaaaaa

SEQ ID NO: 5475 - DNA, 769 bp, Homo sapiens; identical to SEQ ID NO: 5474

SEQ ID NO: 5476 - DNA, 773 bp, Homo sapiens
cactgaggccgtgaccagagaagaggatgatggragtgaatcagaaagaggagtattcagcactctgcytscgytcgcacygtcctcgtcstgaaaaccaagctttgatttagattgagtaagagtttacccagaatgtcagaattcctgttccctktagcacggtttaaagttctgtgtatttaattgtaaactgtactagtctgtgtgggactgtacacactttatttacttcgttttggttaagttggcttctgtttctagttgaggagtttcctaaaagttcataacagtgccattgtctttatatgaacatagactagagaaaccgtcctctttttccatcataattctaatctaacaatggaagatttgcccatttacacttttgagactttttggtggatgtaaataaccccattctttgcttgaacacagtattttcccaatagcactttcattgccagtgtctttctttggtgcctttcctgttcagcattcttagcctgtggcartaaagagaaactttgtgctacatgacgacaaagctgctaaatctcctatttttttaaaatcactaacattatattgcaatgaaggaaataaaaaagtctctatttaaattcttttttaaattttcttcagttggtgtgtttttgggatgtcttatttttagatggttacactgttagaacactattttcagaatctgaatgtaatttgtgtaataaagtgttttcagagcattaaaaaaaaaaaaaaaaaaaaaaaaa

SEQ ID NO: 5477 - DNA, 773 bp, Homo sapiens; identical to SEQ ID NO: 5476

SEQ ID NO: 5478 - DNA, 888 bp, Homo sapiens
gcccctcaccmmccskgaagatccccagkkgggcgagggaatagtcagagggatcacaatctttcagcttaacttattctactccgatgatcgkctgaatgtaacagaggaactaacgtccaacgacaagacgaggattctcaacgtccagtccaggctcacagacgccaaacgcattaactggcgaacagtgctgagtggcggcagcctytacatcgagatcccggscggcgcgctgcccgaggggascaaggacagctttgcagttctcctggagttcgctgaggagcagctgcgagccgaccatgtcttcatttgcttccacaagaaccgcgaggacagakccgccttgctccgaaccttcagctttttgggctttgagattgtgagaccggggcatccccttgtccccaagagacccgacgctkgcttcawggcctamacgttcgagagagagtcttcgggagaggaggaggagtagggccgcctcggggctgggcatccggcccctggggccaccccttgtcagccgggtgggtaggaaccgtagactcgctcatctcgcctgggtttgtccgcatgttgtaatcgtgcaaataaacgctcactccgaattagcggtgtatttcttgaagtttaatattgtgtttgtgatactgaagtatttgctttaattctaaataaaaatttatattttamwwwwwwawwrmwrrtttaagatgattcagattatccttgtactttgaggagaagtttcttatttggagtcttttggaaacagtcttagtcttttaacttggaaagatgaggtattaatcccctccattgctctccaaagccaataaagtgatacacccgaaaaaaaaaaaaaaaaaaaaaaaaaaaaaa

SEQ ID NO: 5479 - DNA, 888 bp, Homo sapiens; identical to SEQ ID NO: 5478

SEQ ID NO: 5480 - DNA, 785 bp, Homo sapiens; identical to SEQ ID NO: 245

SEQ ID NO: 5481 - DNA, 731 bp, Homo sapiens; identical to SEQ ID NO: 246

SEQ ID NO: 5482 - DNA, 775 bp, Homo sapiens
  misc_feature (181)..(181): n is a, c, g, or t
  misc_feature (245)..(245): n is a, c, g, or t
  misc_feature (247)..(247): n is a, c, g, or t
  misc_feature (253)..(253): n is a, c, g, or t
gagaaaaggaaacttgcgcggagargatgagacgakgatgatgaagaggatgatgakgaagatgatgatgatgakgattttgatgatgrggaakctgaaagaaaaagcgccagtgaagrwatctatacgagatactccagccaaawakgcacaaaagtcaaatcagaakggdawagactynrraccatcatcrrcmccmagatcadaaggacragaatcyttcaagawacaggrwhwwactcctnrnacaccnramggacctagttctgtagmagacattmaagcmrwmatgcwagcwagtatagawaaaggtggttctcttcccwaagtggaagccawattcatcwattatgtgaagaattgcttccggatgactgaccwagaggctattcaagatctctggcagtggaggaagtctctttaagaawatagtttamacdatttgttaaaawattttccgtcttatttcatttctgtaacagttgatatctggctgtcctttttataatgcagagtgagaactttccctaccgtgtttgataaatgttgtccaggttctattgccaagaatgtgttgtccaaaatgcctgtttagtttttaaagatggaactccaccctttgcttggttttaagtatgtatggaatgttatgataggacatagtagtagcggtggtcagacatggaaatggtggggagacaaaaatatacatgtgaaataaaactcagtattttaataaarwarmamrrwwwmwawwraaaaaaaaaaaaaaaaa

SEQ ID NO: 5483 - DNA, 716 bp, Homo sapiens
ccgtgcagttgatggaaaggttccactttcccagaawttggaactcttacttaccagcagaattcagctaccccggttctaggtcccaattctactgcaaatagtatcatggcatcttatcagcaacagaagacttcggttcctgttcttgatgctgagctttttataccaccaaagatcaacagaagaacccagtggaagctgagcctgctagactgagtgactgcagttaggagggatccgacagagaagaccatttccactcattcctgttgtcctaccaccccttgctctttgagggctggctattgagaactggaaagagtaaaatgataacttaccttagcattgccaagaacttcagcagacaacaagcaattctatttattttatgttgtgtatacatcttgatcattagcaagacattaagctttaaccattatggcaccattttgtgagaatgattgttctttcacttgggctgtttgagagcataattatggtaatcatgagattaatgtttcatgatttctacctccaaagtgtgaagacaagtaaaacaatgtttctaaattgtcttattttgttggcggagaagattacaatggctattagtgctacatttggtcaaatgtaatcacttaaatagcttcttgtcaccttaaactaaagcagaataaaaagtatcctttgaaattataaaaaaaaaaaaaaaa

SEQ ID NO: 5484 - DNA, 769 bp, Homo sapiens
gggaagaacmatktwaagcgaagktcatttycagrgatgggttyctaaattctggccagaggaasacccswkktycasccrcatyytaaargrscacmgtttatgtgktkcggaattaamsttccccatcctgcagattatgtggaaatacccwagatwatagtgcatagctcctttcagcctctagccttcactcctgggctccaaaagctatcccmgttgcctgtttttcaaatgaggttcaaggtgctgctttgcatgcctgccaacccatggaagttgtttctkacttcttktctctcttatttattaaccmtggtctgagagttgtttttgttctatgtaacmgtattgccacmaaactataggcaaatcgtgtttgcagggagatttctgatgcctctgtgggtgtgtgtaagttaaagtggccacatttaagaaggccmagctttgtagtggttgcacagtcacactgatatgctgatttgctctttctcattgtatgtctatgctttgtcatcagtgctatagtaaattacmaagaaataggtagattgtatgaacatacccacaaatgcctatgatttaggttaccmatgtattctttctcatttggggttttgcttctgtctgtctgtttattggaaacttgtacttcaagtagggggaatcstaattctaataactccttagctaagttttattattcaggcaataaacatgttttcatgtaaaaaaaaaaaaaaaaaaaaaaaaaaaaaaaaaaaaa

SEQ ID NO: 5485 - DNA, 851 bp, Homo sapiens; identical to SEQ ID NO: 250
  misc_feature (678)..(678): n is a, c, g, or t

SEQ ID NO: 5486 - DNA, 734 bp, Homo sapiens
cccggatttacttgccattcccctgttttcatctagaggatcctcggattcagcccttcattgctaagacaccttgtcactgaggttcttaccagctcagccaatctccactctgctatagcagaagcataatgtttgctttagaaaagatttcttgacctatgccttttcttagaaagtttgatagattagttagaacttcagatcatcagatcagtctcaaatgggtttcttggaattttatatttgacaatatttatactataccaaactcatttgcagttcttaggtttgttggttaaaacatttttttaaagcagtaagtttatagaaaatgttttcatttaatggaaggctggggaatgtccagcatcaacccctatggcatgcattcccagtggccttctcatctgggcctggaacctttggttcagggcttaggggagaacaggccacatggcaacagccacacagtcattgccttcaacacagagccacgtgtccccaaacagcaatagtcatgcccttgtccaggctgggatctaattgayacaataggtcgttgactccctcctagtagagctatctaggtttgtctggaaagtttccgaccctggcttataggcaccacacctcatgtactcctcatggcttggatctctgtattcagcctttgttcagtccaataaactttgagtagatgatctcaaaaaaaaaaaaaaaaaaaaaaaaaa

SEQ ID NO: 5487 - DNA, 703 bp, Homo sapiens
aggtgctgcagactgatttggttgacagaactcccagcccaggaaagttccatgaccatgactgtcgcagaaggaatttcccactaaagtcagtccattttcaagttttggtcttcagagacaaaagtacgtcccagccacctgattttgatggtgaggtaactctaagttgaattcaggctagtgttgcagtatagctttggcatgttcatgaktgagcacccagwatgtgttgaaccaacccccacccctaactactgactatgactgcagtgggtttttatggggaaawaaagtgtgaawagcawwaagaaaggaacagagattttttatcacctttattgtaagacagtccaatttatgaattgagtataaacacatacaatagtaacaagagaattcctaagakaaacgcaaatgccttgagtttcacggcacttcawgttcaaccagtttgctgtaatgccagaggcagcctgtgaatcatttctcatgccctgtttttttttttttcttttcctataatgttctgggtttaaaagccatcttttccacattttctgtaaataatggataatcattattaaaagaattttatttttagtgctgttttaacaatgtagatagatcataaatgtacttgctgaattcaatcatttttaacaagccaataaagtttgataattcaaaaaaaaaaaaaaaa

SEQ ID NO: 5488 - DNA, 763 bp, Homo sapiens; identical to SEQ ID NO: 253

SEQ ID NO: 5489 - DNA, 774 bp, Homo sapiens; identical to SEQ ID NO: 254

SEQ ID NO: 5490 - DNA, 764 bp, Homo sapiens
tctctattaataacagcatcaagtcattttcccmagaatggagctaaccrtacctttccacatgtcagcttagaatcttcccctaaagatgctaatctcctttggsctgtctcagaacacagtatccttcarataagaaaaactgagtgggaagtgcagtgttkyswrrsrtwsstwkcatmackrcgtattcattgtctacctgctaagtcaagggttcactgcatttctccttcctcagaatacactctggacctgtgctgtctaatatggtagccactaacmaaatgtggccattttgatggaaatccattaaaatcaaagaaaatttaaaactcaattcctcaattgggctggccacatttcaaatgctcackacccacctgtggctagggtctacttctactgtattggcgagcatggatatagaacatttcatcacagttctgttggaccmatctagatagattcattatcccatctagagaagagactttagtcactgtcttcttgcttcagacccatctatatttaaaacaaatttccctaaatcctgagactgagayggagctacaaattctcagatggcgaccgtgtaaatggtattagcggctgaagaaaaaaaatttttcaagacctctgttttttaactgaactttatcattggcattgtgggtctttgaagttgctgggataaattaatataattaaataaaagactgaatttaawwrmmaaaaaaaaaaaaaaaaaaaaaaaaaaaaaa

SEQ ID NO: 5491 - DNA, 764 bp, Homo sapiens; identical to SEQ ID NO: 5490

SEQ ID NO: 5492 - DNA, 762 bp, Homo sapiens
cggccatcccctccgatytactwgscgcggmsgatacatttcacmcrsraacagctatgccattagcctattwrgtgacmctatagaacaagtttgwacaaaagcagctggtaccggtccggaattcccgggatcacaactgtgttcactagcaacctcaaacagacaccrtggtgcacctgactcctgaggagaagtctgccgttactgccctgtggggcaaggtgaacgtggatgaagttgktggtgaggccctgggcagkctgctggtggtctacccttggacccagaggttctttgagtcctttggggatctgtccactcctgatgctgttatgggcwaccctaaggtgaaggctcatggcaagaaagtgctcggtgcctttagtgatggcctggctcacctggacaacctcaagggcacctttgccacactgagtgagctgcactgtgacaagctgcacgtggatcctgagaacttcaggctcctgggcaacgtgctggtctgtgtgctggcccatcactttggcaaagaattcaccccaccagtgcaggctgcctatcagaaagtggtggctggtgtggctaatgccctggcccacagtatcactaagctcgctttcttgctgtccaatttctattaaaggttcctttgttccctaagtccaactactaaactgggggatattatgaagggccttgagcatctggattctgcctaataaaaaacatttattttcattgcaaaaaaaaaaaaaaaaa

SEQ ID NO: 5493 - DNA, 762 bp, Homo sapiens; identical to SEQ ID NO: 5492

SEQ ID NO: 5494 - DNA, 725 bp, Homo sapiens; identical to SEQ ID NO: 259

SEQ ID NO: 5495 - DNA, 725 bp, Homo sapiens; identical to SEQ ID NO: 259

SEQ ID NO: 5496 - DNA, 967 bp, Homo sapiens; identical to SEQ ID NO: 261

SEQ ID NO: 5497 - DNA, 749 bp, Homo sapiens; identical to SEQ ID NO: 262

SEQ ID NO: 5498 - DNA, 775 bp, Homo sapiens
ataatcagtgacacccggaaatgaggaccatcactgtatggaatcagaaccagatgacacatgaaagcagctccaagagacccrgkacagggcacwacgacaagaggatctcatcatgaaagtggaaaatctggctctcaagaacagatttcaggctgtactggatgagctcaaacaaaggaagaccgagaaaaggagcaactcagctctttgcaagaggagctagaatcactcctagagaagtaaaaagaactgatatttaatttcagtcttcagactggtcagcattagaaaattcttggctttattgtactgggtattaagaccttgctcttcctagtccttttaatgctgtgtgttctgttaagttctttcatttgtttgtaattttgtttttcagcaaatttatattgttttgctaggtgttcatcctataagaagcaggattgtataggcagaaaaatgattgtaggaaagttgcaggattagcggaatgtatggttcaaccttaattatagcttcattgcaggactttactgtttctccattttctagaagctgctgttgctgctttgtgatgacgtgagatcaataagaagaacctagtctagagacaatgatgctagtttgcatatgttttcctatgcaatagttgttttcccagttattcaaagcagctttctatatgtagagatgcaaattattaagttgtttccaatacaataaataaaagcatctgtttttcamwwwaaaaaaaaaaaaaaaaaaaaaaaaa

SEQ ID NO: 5499 - DNA, 775 bp, Homo sapiens; identical to SEQ ID NO: 5498

SEQ ID NO: 5500 - DNA, 750 bp, Homo sapiens
tacctggaacctctgggaggtctgcagagtaagtgccgcctttgcgtctccgatcggaggcacgaggcctgtggagtaggtccctctggttccgacacggtgcgacacttggcgctccatgcttgcgggtgtccgggaggcctggcctcccccagggccgccacctctgctggttgctctgtgctttcaccttaaagctctgccaagcagaggctcccgtgcaggaagagaagctgtcagcaagcacctcaaatttgccatgctggctggtggaagagtttgtggtagcagaagagtgctctccatgctctaatttccgggctaaaactacccctgagtgtggtcccacaggatatgtagagaaaatcacatgcagctcatctaagagaaatgagttcaaaagctgccgctcagctttgatggaacaacgcttattttggaagttcgaaggggctgtcgtgtgtgtggccctgatcttcgcttgtcttgtcatcattcgtcagcgacaattggacagaaaggctctggaaaaggtccggaagcaaatcgagtccatatagctacattccacccttgtatcctgggtcttagagaccctatctcagacagtgaaagtgaaatggactgatttgcactcttggttctttggagccttgtggtggaatccccttttccccatcttcttctttcagatcattaatgagcagaataaaaagagtaaaatggaaaaaaaaaaaaaaaaaaaaaaaa

SEQ ID NO: 5501 - DNA, 1178 bp, Homo sapiens; identical to SEQ ID NO: 266

SEQ ID NO: 5502 - DNA, 1178 bp, Homo sapiens; identical to SEQ ID NO: 266

SEQ ID NO: 5503 - DNA, 727 bp, Homo sapiens
ccttccatcgggcactaaacaatagtactagaggtaagatctgccaagaatttctctcacttaagcaggatacttactgtaaatataattaggcagacttatttgagtacttgmctaattgtatttaattagaactatgctggatgctgtagacagaagaaataaaatactcaacttggtccctatcttccagcaggttagaggcctttagggaagaaaagcctgtgtgcagggaaagagaacctcaccagaaagtattcaataaaatgccaaagtgatcttacagaacagtgcctgtgacaccggaggggattgttctgtctttgtgagtgaacatacaatgatggggataactggtcctcataccatgcaggtcccatttctgatcaccccactggcaggacaattcacagttcttgagcaaactgagttagggagggtatgctaacgacagaacctatgcaagttcttagaaatattttttgtttgctgaaataaagctcaatcaacacactaccttaaaaaaaagtggagcagtggcatttccatgcctcatgctcaccatcatgaggttaacttcccgccgtcgcctcttgcctgccaggggtttttcgggagcccctctctgttccactctgattccttttgtttctttgctgaccattcactctctgtgtctgttgttggatccaaatacgagtgtttttctttmaaaaaaaaaaaaaaa

SEQ ID NO: 5504 - DNA, 743 bp, Homo sapiens
ggtytgagtraaggagaggatgacagagacagcgccaatgkcgaggatgactcttaagcacatagtgggtttagaratcttatcccattatktctttacctaggcgcttgtctaagatcmaattttktcaccagatcctctcccctagtatcttcagcacatgctcactgttctccccatccttgtccttcccatgttcattaattcatattgccccgcgcctagtcccattttcacttcctttgacgctcctagtagttttgttaagtcttaccctgtaatttttgcttttaattttgatacctctttatgacttaacamtaaaaaggatgtatggtttttatcaactgtctccaaaataatctcttgttatgcagggagtacagttcttttcattcatacataagttcagtagttgcttccctaactgcaaaggcmatctcatttagttgagtagctcttgaaagcagctttgagttagaagtatgtgtgttacaccctcacattagtgtgctgtgtggggcagttcaacacmaatgtaacmatgtatttttgtgaatgagagttggcatgtcaaatgcatcctctagaaaaataattagtgttatagtcttaagatttgttttctaaagttgatactgtgggttatttttgtgaacagcctgatgtttgggaccttttttcctcaaaataaacaagtccttattaaaccaggaawwwrraraaaaaaaaaaaaaaaaaaa

SEQ ID NO: 5505 - DNA, 743 bp, Homo sapiens; identical to SEQ ID NO: 5504

SEQ ID NO: 5506 - DNA, 759 bp, Homo sapiens
gattttttatcactattgtgtaaatgcagttttttagtagctctagaacatttttaagaaggaggggattcccacctcatcccattttttaagtgtaatgcttttttttaagaggtgaawtcatttgctggttgtttattttttggtacaaccrgaaaataktktgggatatkgaattatgggaggctctsrckgtytcgggtgtcagcttaacattccacagatggggggttagtgttttatatcctataatacaaagcatattaaatgggcaatatggagtcagtcctgcatttaatgtcttgaacattgttaaattacttctattaccacgttgttttttagtagaattgtttcctaaagaaaaccactctttgatcatggctctctctgccagaattgtgtgcactctgtaacatctttggttgtggtagtcctgttttcctaataactttgttactgtgctgtgaaagattacagatttgaacatgtagtgtacgtgctattgagttgtgaactggtgggccgtatgtaacagctgaccaacgtgaagatactggtacttgatagcctcttaaggaaaatttgcttccaaattttaagctggaaagtcactggaataactttaaaaaagaattacaatacatggctttttagaatttcgttacgtatgttaagatttgtgtacaaattgaaatgtctgtactgatcctcaaccaataaaatctcagttatgaaaaaaaaaaaaaaaaaaaaaaa

SEQ ID NO: 5507 - DNA, 705 bp, Homo sapiens; identical to SEQ ID NO: 272

SEQ ID NO: 5508 - DNA, 784 bp, Homo sapiens
gccgttttaattattccttgcggaacccctagtgtcttttatggttctcagcgccttataaccggtgctcaataaatattgttcgaaatgamaytattaatgtaaaagaragattaagattttktggtgaaaattatggcttatttaagytatwratttaaaccagagttaatttgaractcttsccaaaactgttcctttctgttttgttaaaatctcratctaaacccctgcctgtacctcaaacagtttttctactgttcgtaaattcctataatataaaaagcgctatacagaactaaagttctccttcctgcctattccattataactccttcagaaaacccttcccagacaagacagttctgctctkttcttggggatttgatgtaagtaaagggcccacacccaaaaggtggtacttacgaaggatattaataaacagagctttaaatttttttgtagctttaaatagcttgttgattgggaacatacacgttagagtcaaacagactcctagctctgccagttgctagccaggtgacctggacaagtcacttagtctctctgagtctctgttttctcatctgagaaatgagggttaaaacctacttcaggccagatgcagtggctcacatctgtaatcccagcactttgggaggccagggtgggaggatcacttgagtccaggaggttaaggctccagaaagctagtatcatgccacggcactctagcctgggcaagaaagcaaggtgctgtctctaacttaaaaaaaaaaaaaaa

SEQ ID NO: 5509 - DNA, 1036 bp, Homo sapiens; identical to SEQ ID NO: 274

SEQ ID NO: 5510 - DNA, 730 bp, Homo sapiens
ccccgtacagggggagcaactgcaccttttggctctgacgtctcaatgccctttatccatctgcctcagacagtgttacaagaatccccacktttmttctgtttcccccaaggaaccacatctcagcaggtcttawctgcctcattttctttcaggaggatctgcacttcatccacagktwataggaaamsttccacaattaktktagaacttaccctactttgcaccataacatgttaaatttgtsgtattccgttatttscctgaatcatggattttggagaaatatttgtttaattgttatcagtagagtttccccatctttggggggttgtgaactacatatatgcatttaaaaacawaatgtgagagaagctacctgatttacctattatatgtgaaaaccagtggaaaaaacacwaaaactagaattttagtcattcttcacaatcacgacttctatgcacgttattttcaaccagtagtgaaaatgcaagtgtatgtaatgtatggttgacccagcattatttaggaatacaaatcttaagtattactttcttcctccaaacaagtttttaaaaaataggataaattttttttctataaaatataaaacatggaaaatagggaatgctgtttttgaggtaatattaataatacacagaattttcattagtgtcgaaggatctaaaaagacaaagtatatcatgggaataaaaaaaaaaaaaaa

SEQ ID NO: 5511 - DNA, 1189 bp, Homo sapiens; identical to SEQ ID NO: 276

SEQ ID NO: 5512 - DNA, 1225 bp, Homo sapiens; identical to SEQ ID NO: 277

SEQ ID NO: 5513 - DNA, 1225 bp, Homo sapiens; identical to SEQ ID NO: 277

SEQ ID NO: 5514 - DNA, 752 bp, Homo sapiens
ataagtccagtaggcacatttgatagaaaggatcaaatggaagaaaaatttaaaattcagcccagaaaacagaatagtgtattaaattagtttaatgtaaaagggatttataagattttttttcctcaagtatagatacctcacttgawaagwaagcacagcatacttaaagtagttctagtacacatgtcctagraaacagttgctaaatgtaggacatcttttgaggaattagtktatgagaaatraaattttacttgtttttactatcctgttagaagtatttgttgtatcctgataatgtttaagccaacatagtagtcttaaattacttttgaatttctaatctgtgaaggcagtaaatgaaatatctgttctgcaactgttgaaacaaataattggctacattgaccataattaaagttaaaattttgccaatgatgtacagttttatggttaaagttgctgtggttggttgcattacatgacacagaaaactgtcctctacctcacgtgaaataaatattttatatggttttactaaaaataagactcatgtatctggtcacctagtttacaaattttgaattatatttattgaaacatgacatactgtgctctgagcttatacctcaattgtattttgtgctgttttccattttcatgccttgtaaataacttgtatagattgtggatcaaatactaaataaaaacttttaatgccaaaaaaaaaaaaaaaaaaaaaaaaaaaa

SEQ ID NO: 5515 - DNA, 802 bp, Homo sapiens
tatcatwwtwkttywwkytwwgatraacagaatattctgtggtgccagtgcacasacctkcccacccatacaacatcmakgttcactgtaacaackgratattcacaataaagcttctgagtaacactktctgattactcatgataaactgacatggctaactgcaagaattaaatcttctatctgagagtaatmatktatgatgactcagtggtgccagagtaaagtttctwraataacattcctctcacttgtaccccactaaaagtattagactacacattacattgaagttwaacacmaawttatcagtgttttagaaacatgagtccggactgtgtaagtaaaagtacaracattatttccaccataaagtatgtattgaaatcaagttgtctctgtgtacagaatacatacttattcccatttttaagcatttgcttctgttttccctacctagaatgtcagatgtttttcagttatctccccatttgtcaaagttgacctcaagataacatttttcattaaagcatctgagatctaagaacacaattattattctaacaatgattattagctcattcacttattttgataactaatgatcacagctattatactactttctcgttattttgtgtgcatgcctcatttccctgacttaaacctcactgagagcgcaaaatgcagctttatactttttactttcaattgcctagcacaatagtgagtacatttgaattgaatatataataaatattgcaaaataaaatccamaaaaaaaaaaaaaaaaaaaaaaaaa

SEQ ID NO: 5516 - DNA, 1330 bp, Homo sapiens; identical to SEQ ID NO: 281
  misc_feature (701)..(701): n is a, c, g, or t
  misc_feature (708)..(708): n is a, c, g, or t
  misc_feature (717)..(717): n is a, c, g, or t
  misc_feature (719)..(720): n is a, c, g, or t
  misc_feature (732)..(732): n is a, c, g, or t
  misc_feature (734)..(734): n is a, c, g, or t
  misc_feature (737)..(737): n is a, c, g, or t
  misc_feature (747)..(747): n is a, c, g, or t
  misc_feature (757)..(757): n is a, c, g, or t
  misc_feature (767)..(767): n is a, c, g, or t
  misc_feature (777)..(777): n is a, c, g, or t
  misc_feature (919)..(919): n is a, c, g, or t
  misc_feature (973)..(973): n is a, c, g, or t
  misc_feature (975)..(975): n is a, c, g, or t

SEQ ID NO: 5517 - DNA, 1030 bp, Homo sapiens; identical to SEQ ID NO: 282

SEQ ID NO: 5518 - DNA, 793 bp, Homo sapiens; identical to SEQ ID NO: 283
  misc_feature (81)..(81): n is a, c, g, or t

SEQ ID NO: 5519 - DNA, 771 bp, Homo sapiens
ctgaaagtaggaattcataggaagaatttcacsartgttgwactagagatatacstagactgcacttgagctktgagaaatgtgtacctattcaccawgtgccaacgtgaagwagctctgcaagtagggwwwatraktgacacacttatagtctactgcccakgtaaggatcagctccggctaagaggccwaagatgggtgacatcggttatgctcgtgccttgtatttgtttctttcttacccacttagcttcctaatttggaggaaaggaggcgtggtaaakgttatatgaagactaatggtttaattagaccatgwamacactgtcataatctctggggtcatcagaatgtccagttttgtctttgggccaagataagggcagtgggatttatgatgtgttgtttatagtctgaaactactctggtgatcaccagggtcagtttctgttaatgatggtttccaactggcctratacattaagtaagactggctgataacatgaccagacagacataaagaccctgttgggaatgacattgaactctcaaagtcaagatttyttacacmaatctatcagctggagaaaatgaaggcagtgtggtatatgtgtgcaaataaggacattatgaagcykaaatatggaatgtctcttggacccccgatgtcatctgtattctctttttcttcttgtactatatcctttgcctgtaaataaaaggtttatttgaaaaaaaaaaaaaaaaaaaaaaaaaaaaaaaaaaaaaaaa

SEQ ID NO: 5520 - DNA, 737 bp, Homo sapiens
taaaaatttggcatatggcattttctaacttaggaagcccacaaggttctgggcccatcatgacattgggtagcattaactgtaagattttgtgcttcccaatcactttttggtttttaagaatttcttgaaactcttatagcctgccttcaattttgatcccttattctttctaattgtcaggtgcacaagattaccttcctgttttagccttctgtcttgtcaccaaccattcttacgttggtggccaagtaacttgggaaaaggccgcatgatctttctggctccaactcagtgtttaaggcacaccctgcttcctttgcttgcatcccacagactatttccctcatcctatttactgcagcaaatctttccttagttgatgagactgtgtttatctccctttaaaaccctacctatcctgaatggtctgtcattgtctgcctttaaaatccttcctctttcttcctcctctattctctaaataatgatggggctaagttataccccaagctcactttacaaaatatttcctcagtactttgcagaaaacacccaamcaaaatgccattttaaaaaaggtgtattttttyttttagaatgtaagctcctcaagagcagggacaatgttttctgtatgttytattgtgcctagtacactgtaaatgctcaataaatattgatgatgggraaaaaaaaaaaaaaaaaaaaaaaaaaaaaaaaaaaaaaaaaaaaaa

SEQ ID NO: 5521 - DNA, 653 bp, Homo sapiens
taaagacttgctgctgatgaagatgatgacgatgatgatgaagaggatgatgatgaagatgatgatgatgatgattttgatgatgaggaagctgaagaaaagcgccagtgaagaaatctatacgagatactccasccaaaaatgcacaaaagtcaaatcagaatggaaaagactymaamccatcatcaacaccaagatcaaaaggacaagaatccttcaagaaacaggaaaaaactcctaaaacaccaaaaggacctagttctgtagaagacattaaagcaaaaatgcaagcaagtatagaaaaagcgcattgaacagtcctgggcactacatgtaaattaagcccaaakatggggagaaaggaaaaggagagacaaatatagtccatactgagtgtcatcaacaatccagactgaagtcttctattttaatctcaatccccttttctgatttgccacccatgcctcttcaggctggaaacaatctcttggttccctaaagcactttcttctgactgctgtgattcagtgaaccttgccctttgctttctattacttgtgcatttgcctcacctgacaatgttttaaatcgcctttgtatctccttagctgctcaataaatatttgaatgcatcaawwaaaaaaaaaaaaaaa

SEQ ID NO: 5522 - DNA, 1059 bp, Homo sapiens; identical to SEQ ID NO: 287
  misc_feature (49)..(49): n is a, c, g, or t

SEQ ID NO: 5523 - DNA, 758 bp, Homo sapiens; identical to SEQ ID NO: 288

SEQ ID NO: 5524 - DNA, 879 bp, Homo sapiens
attcaccgcgacacttccgcctttcttcaggtttttagactaatatacaacttcacctattcatgagtattattgaaacctcratcatwagacatttaaragawtgtttttctaactggaggggctctagtgctaaataatagtactgaaaattgatattatgtttccttktsytatatgaaggaccttatttggcatataaaattttataaaatatgtatytaaagctttttcttattttttgtattaattggtaagtgaaaactctgttaaagatcacaccacratgttttcaagaaacatctgaaaagatragaacraagtaacaaataacttataatacttacttaaattgagcactttttgaaatgccagtctgaaaataattaagatatctctgctttgtatgagtttcttttatgaaacttgataccacgggagtccagtaatattggccacaaaagccagagaaagtaccaagcccagctttgttatcatagccacttcctgccctgcttctgttattctttagtgttttttcagatataaatcggggtccaggaaatcctcaccagaatctggcactgcagccaaaggcgatacttccagagttctagtaggctgctatggaatttctggcatgaaaattcttgacccctcacactttaccccctgtacagcacaggcataccatggagatattacaggatcagttccagaccaccataattaaagtggatatcgcawwaarwrarwmamamaaatttttggtttctcagtgcatataaaagttatgtttacactctttagtagtctattaagtgtataatagctttatgtccaaaaatgtacatgttttattttaaaaatactttattg

SEQ ID NO: 5525 - DNA, 787 bp, Homo sapiens
ggaatggacagaccacgcacgtgatttgtccagcgacactcattcattgaagaagtgtattcactkgagsyttccatwtcactcacgcttcttggcctcacrttgctcatctgtccmatgggaggcttgagccattattgctaaggccccsttccctgatctaacattctgttgtatgatctagrwtttagaacgtcgtatgagatcctacmatggaagaatraaatcacctcattcttcatttcagatctgaacacttagcastgatctagattttttttttttttttaaaccaaaattaagtgttgcttagagtcattcctctacatgggctgtggctgtcagcccatagstttgtcagtttcacatcaaaactgtgggtataaactgttgaaaccaatcacattaaaatatttagctgggcacagtggtgtgcatctgtagtcccagctacttgggaggtctgaggcaggaggatcgcttaagcacaggagttggaatccagcctgagcmacagagcaaaaccccgtctctaaaatacaaataaaatatttgtgtagtttttgattaaaattgactacagcggtcagtataaaatacatgtcgcttttaaggaagtgctctttatgtatctaacagatggaagtttttgcattggtaagagcatttatatatgctttgtttcagggtttatggatttgtattcatatattgtcaaataggtttcatactctaattttactttaagtaaagcttaaacacttggcatammaaaaaaaaaaaaaaa

SEQ ID NO: 5526 - DNA, 787 bp, Homo sapiens; identical to SEQ ID NO: 5525

SEQ ID NO: 5527 - DNA, 760 bp, Homo sapiens; identical to SEQ ID NO: 292

SEQ ID NO: 5528 - DNA, 794 bp, Homo sapiens; identical to SEQ ID NO: 293

SEQ ID NO: 5529 - DNA, 777 bp, Homo sapiens; identical to SEQ ID NO: 294

SEQ ID NO: 5530 - DNA, 656 bp, Homo sapiens
ctagcccctgtctatcaaaagttattagagaggatgaagcattagsytgaagcactacaggaggaatcaccacggcagctctccscccaatttctctcagattttccaacagagactgtttgaatggtttttcaaaaccagagtatcacactttaatgtacatgggccgcaccataatgagatgtgagccttgtgcatgtgggggaggagggagagagatgtactttttaaatcatgttccccctaaacatggctgttaacccactgcatgcagaaacttggatgtcactgcctgacattcacttccagagaggacctatcccaaatgtggaattgactgcctatgccaagtccctggaaaaggagcttcagtattgtggggctcataaaacatgaatcaagcaatccagcctcatgggaagtcctggcacagtttttgtaaagcccttgcacagctggagaaatggcatcattataagctatgagttgaaatgttctgtcaaatgtgtctcacatctacacgtggcttggaggcttttatggggccctgtccaggtagaaaagaaatggtatgtagagcttagatttccctattgtgacagagccatggtgtgtttgtaataataaaaccaaagaaacataaaaaaaaaaaaaaa

SEQ ID NO: 5531 - DNA, 734 bp, Homo sapiens; identical to SEQ ID NO: 296

SEQ ID NO: 5532 - DNA, 801 bp, Homo sapiens
  misc_feature (3)..(3): n is a, c, g, or t
aantccatgctcatggttaggaagaatcaatatcatgaaaatggccatactgcccaaggtaatttatggattcaatgccatccccatcaagctaccaatgactttcttcacagaatcagaagaaackaykttraagktyatatggmaccaaaaaagagcccgcatygccaagwcaatcctaagacmaragaacaaagctrgaggcatcatggctacmkgactgtcaaastataytamaaggctacagtaaccaaaacagcatggtactggtaccraaacagagatatagaycaatggaacagaacagarmcctyagaaataayrccacayatctacaacyayctgatctttgacaaacctgasaaaaayaagmaatgrggaaaggaytccctatttaawaaatggtgctgggaaaactggctaswcatatgtagaaagctraaactggatcccttccttayaccttatacaaaawttaattcaagatggattaaagacttaaaygttagacctaaaaccataaaaaccctagaagaaaacctargsaataccattcaggmcayaggcatgggcaagracttcatrtctaaaacaycaaaagcartggcaacaaaagccaaaattgacaaatgggatctaattaaactaaagagcttctgcacarmaaaaraaamwammawmararwraamaggcaacctacaaaatgggagaaaattttcacgacctactcatctgacaaagggctaatatccagaatctacaatgaactcaaacaaatttacaagaaaaaaaaaaaaaaa

SEQ ID NO: 5533 - DNA, 783 bp, Homo sapiens
ctagtttataactagactaccatgtgaaaatcatgtttttatataaagtgcgccaaattttgagatgcattattcctattactaatgatgtaagtacgaggagtaaatccaagamactttcaactckttgcctttcctggcctttactggagtcccrcaagcatttaaggtacatgttccagwawactgttgaaaagctaaatgtttcccatgatcgctcattcttcttttatgattcatacrttattccttataaagtaagaactttgttttcctcctatcaaggcagctattgtgtattaaatttttcacttagtctgagaaatagcagatagtctcatatttaggaaaactttccaaataaaataaatgttattctctgataaagagctaawamaraaawrwwmaarwwawwwwamwwwmwrrwaawrwmwtcagtaaaatattttctttatctaaatattaacattctaagtctaccaaaaaaagttttaaactcaagcaggccaaaaccaatatgcttataagaaataatgaaaagttcatccatttctgataaagttctctatggcaaagtctttcaaatacgagataactgcaaaatattttccttttatactacagaaatgagaatctcatcaataaattagttcaagcataagatgaaaacagaatattctgtggtgccagtgcacactaccttcccacccatacacatccatgttcactgtaacaaactgaatattcacaataaagcttctgagtaacaaaaaaaaaaaaaaa

SEQ ID NO: 5534 - DNA, 673 bp, Homo sapiens
gtcccttcagcccccgtgcaagttcatggccggtccctcccagacccctgctccactggcccttcgaccagtcctcccttctgttctctgctttccccgtccttcctctctctctctctctctctckckctytytktstgtgtgkgtktgkgtktgtgtgtgtgtgtgtgtgtgtgtgtcttgtgcttcctcagacctttctcgcttctgagcttggtggcctgttccctccatctctccgaacctggcttcgcctgtccctttcactccacaccctctggccttctgccttgagctgggactgctttctgtctgtccggcctgcacccagcccctgcccacmaaaccccagggacagcggtctccccagcctgccctgctcaggccttgcccccmaacctgtactgtcccggaggaggttgggaggtggaggcccagcatcccgcgcagatgacaccatcaaccgccagagtcccagacaccggttttcctagaagcccctcacccccactggcccactggtggctaggtctccccttatccttctggtccagcgcmaggaggggctgcttctgaggtcggtggctgtctttccattaaagaaacacccgtgcaaaaaaaaaaaaaaaaaaaaaaaaaaaaaaaaaaaaaaaaaaaaaaaaaaaaaaaaaaa

SEQ ID NO: 5535 - DNA, 766 bp, Homo sapiens; identical to SEQ ID NO: 300

SEQ ID NO: 5536 - DNA, 869 bp, Homo sapiens; identical to SEQ ID NO: 301
  misc_feature (2)..(3): n is a, c, g, or t

SEQ ID NO: 5537 - DNA, 700 bp, Homo sapiens
tcttcctwtrgraaaaktagckttcttacmatakkgtactctagagttattckgtctagctttgagtcgttcaacctcttcatctgtgaaaagcgttttcagttaaaatacataaaatgtcattgcagatcagcatttatagatgaacagttgctctcagttttaatgatagggaacactaactttgaaccccaattaaatgaactgttatctccctccaaaataattctattcttagtggtaaacttataaaagattatatctaattattagtattagcatatttaacatttcttcaataaaaatttttttgtggaaatttgctttctctcattatgtaagtacgtatattacatcttcaattttgtcacagcacctaaaagatttactacttgactctttacagaataagtttgttggcctcaggtgtaggccgccctaactggggcggaaggatagagaaaagtggattcaagagatattcagcaatagaatggatacaacttggtcattaattaaaagtgatgggtgagagagaacaagttcaggatgcttcttaggtttctgtcttaagcatcttgggtgaattaagacctttatgttgtcctggcaaaaactaggatgatgattttaattagctacattgatttatcagtagtaatgaagaattgtatctcttgtctttaaaaaaaaaaaaaaa

SEQ ID NO: 5538 - DNA, 711 bp, Homo sapiens; identical to SEQ ID NO: 303

SEQ ID NO: 5539 - DNA, 794 bp, Homo sapiens; identical to SEQ ID NO: 304

SEQ ID NO: 5540 - DNA, 716 bp, Homo sapiens
ccatyctcctgsstcatcstccccaagtagctggggactgycaggcgcctgccgcctcgcccagctaattttttcgtatttttaatagagaccggggtttcaccatgtttagccaggatggtctcaatctcctgatctcgtgatctgcccgccttggcctcccaaaatgctgggattacaggtgtgagccaaccacgcccagccttgattctcttgtttctaatagttgcactttatcatattttacaaatgtgtgagtctgctatgggattagaaatttaataagagattttgccacagatagtttgagaagcccagcactgccactcaacaaatgctggtgcattcagatggtgaaatattctgcagctattaaaggagttaaaactgcctccacttacctggaggcccatctgtgacacctttttaggttaaaaggaaaagaaaaacttgcttaggactgaatatgagcggttgcaatttgtaacaatgatgtatatatacatatacattttcatgtatttgtatgaacataaaagtattgaaggatattcatcaaactgctaaaagggttgcttcagagtaacggactcggagaaggcagattaattttctcttaatggaactctgtattgtatcacttgtaaaaataagcatgtgttatctttatgataaaaaagtaaaaacctaaaaaagaaaaaaaaaaaaaaaaaaaa

SEQ ID NO: 5541 - DNA, 1010 bp, Homo sapiens; identical to SEQ ID NO: 306
  misc_feature (98)..(99): n is a, c, g, or t
  misc_feature (283)..(283): n is a, c, g, or t
  misc_feature (294)..(294): n is a, c, g, or t
  misc_feature (355)..(355): n is a, c, g, or t
  misc_feature (359)..(359): n is a, c, g, or t
  misc_feature (361)..(361): n is a, c, g, or t
  misc_feature (397)..(397): n is a, c, g, or t
  misc_feature (456)..(457): n is a, c, g, or t
  misc_feature (499)..(499): n is a, c, g, or t
  misc_feature (556)..(556): n is a, c, g, or t
  misc_feature (667)..(667): n is a, c, g, or t

SEQ ID NO: 5542 - DNA, 792 bp, Homo sapiens; identical to SEQ ID NO: 307

SEQ ID NO: 5543 - DNA, 778 bp, Homo sapiens; identical to SEQ ID NO: 308

SEQ ID NO: 5544 - DNA, 778 bp, Homo sapiens; identical to SEQ ID NO: 308

SEQ ID NO: 5545 - DNA, 773 bp, Homo sapiens; identical to SEQ ID NO: 310

SEQ ID NO: 5546 - DNA, 736 bp, Homo sapiens
ggatgacatcttcccagttccgastactcctaattcccttagggatggaaagagagagagaggtctgccttccctgagcacagtgggagtggtggacaacactcttkggagactgcagtgtgtggtgctgacatggcttctatcacaaccccagcagtgaaaaaacgctgataaactctacagtaagagaatgtaacttgtctccagaaagcttccaacacagctagcattcctagggaacctccccagggtgggtacttggatgaacaagtttcaacttgtagttgacagcgccctgataaggtctgttctcagagcttatctctggtgtgtgctgtgaacagggaaggagcacattctccatgctcctttctctgatgtgaatcttctgatgccgaatgagggtaggcctttggttgaaggctttcccacattcgctgcattcgtaaggcctgtctggtttgtgaactttcaggtgctgcctcagattggacctctgcctgaaggttttcccacattcgctgcactcataaggccgctcgccggtgtgaagtctccggtggttattgaggctggagctttggttaaagaatttcccacattcactgcactggtaaggccgttcaccagtgtgaagtctccgatggctattgaggctggagctctggctaaataacttcccacatkcattgcattcataaggccgctcaccagtgtgaactcgctgatgtttcat

SEQ ID NO: 5547 - DNA, 661 bp, Homo sapiens
ttcgcctttgyctcmgtkccaaagcttgctkccacattatcagcatcttcakgkcawwaccccactctcaataccaattttckgtcttcatcctgtttgcattgctatagaaggaataacctgagactgtgtaatttattactcaaaaagaggtttatgcagctttatggttccacagaatgtgcawacakggcacccatgtctgctcagcttctgataaggtctcaggaagctyacaatcatgatggaaggtgaaaagggagcaagtatgtcacacttcataaaagagcaagagagaagggggagatcccagataattttaaacaaccagatcttgcgtgaactcatcgatgagaactctctcattaccatgaggacagcaccaagtgattcatgaggaatccacccccagtgacccaaacaccttccacaaagccctacccgcaacattggtgatcacatttcaacatgagttttggaggggacaaaacgtttaaactatatcacaaccttaacaaaattttaagaaattaaaaccagctatttgtaaataattatcattataaccaaatgaaatttacctgaaactatatcattgatttaaaatctaaaatcaatcattacattcaccacattatcagaataagtaaaaaaaaaaaaa

SEQ ID NO: 5548 - DNA, 738 bp, Homo sapiens
tagttcgtgagtgatggggtgtattaattttccggggctaccataacaaatgaccacgacagcttatgtttggtttaaaaacaggtggratttaattctctttatggttccggaggccagagtccaaaatcaaggtgtcagcaggtccgcgctccctctgctgattctagggaactatccttccttgcctcttctagcttttgggagtgccctgtgttccttggccagggtggcatcactcccgtctctgcctttgtcttcacaagaccttattctctgtgtcttggatctccctcttcttcctcttacaaggaccccagtcgctgggtgcagagccctccctaaacccaggataaccttatctcaagatccttaatctcattacatctgcaaagatccaactttaaataagatcacattcacaggcgttaggggttaggacttagacatatcttttttggggagggcacaaatcaacccactgcagtgggtagtaataacatgtattgaatagtgctttgtgtctggcaattttcatgtgtcattgcatttaattcccataccaaccttgagacatagatctgatttctccctcacttctatgggcatggaaaccaaggctcaaagaagcgataaaacttgctgaagttcacagcacttgttagtgcaactcctaaattccaatccagctctctccactatacagggtccaccctttatcataaaaaaaaaaaaaaa

SEQ ID NO: 5549 - DNA, 756 bp, Homo sapiens
atgaggtgaaagcattctgagcatataaaggaaacgcctagatccttagatgaatcgttggtagaaatagggacagtaagacactttggaagaggagtcmaaagakactgcaagtgtagagaaggcttctgtagtcttagtggtacctgtgtctttacwaacataatgttggtagawatagcagcattwataatgctcctggtaaggtcccagaaagawacwatgwacatattattggatagcagtggaaatgcaatcctcattatawagttgtagaaaatgtggctgwatagctgcattactattgtgaagaaggaagaacttgtaagtgacaaacttggctacttagtggaggaggtttccaagcwaagtatataaggtgtggtctgtttctccttgctgcttataataaattgtgagaagaaagagataaattaaagaaggaaccattaacaaaaagggaagcagcacttaatgatttggaaaattctcatcctatccatattacwaaagatgctgaagcatgctctggagacaacatcaaggatacagcaggacaaccttctagcggggaggtgaggcgtgtctgctcaaggatccaatcaaccatcatggcagcagtcaggaatagtgattcattatctgggaagaaccagtggacaattcccttgtctgctggtgtggtttcccttgacatacgtgaaacacacaaggattttaataatgttatacaaaawaaaaaaaaaaaaaaaaaaa

SEQ ID NO: 5550 - DNA, 986 bp, Homo sapiens; identical to SEQ ID NO: 315

SEQ ID NO: 5551 - DNA, 741 bp, Homo sapiens
ggggtaaacccattcccttctccagtttcttggggctgctgccattcttcgccttctcctcttctgcttccctataataaggacccttgtgatgcattaggtccacctggatattccagaataagcctcccatttcaagcttccttaatcacacctgcaaagtctgttctgccatataaagtgacatgcacaggctccagatattagggcctggacatctttgggggccatttaaaaaaaaaagaccttctaccacattctccaggtagcaagctttttgatgatgctgtacgtatttttttctttgggtgttttgagctgcttccatatctttcatcttagaacagamgmcmagccagmcaatactagacccctcagttaacttaccgggaggctcagttcccgtagggaacttctaccttcagggactcagcaggctcagcagtgttgactgccgggctatcgccaccacagctggatgggagagaagatgaggcctgtccccttccctctcctcctgttctcccgttgccctgcacaggcacccacattgcaaccctacctgtgggctttggcaggtgattctcagtttgttcatcttgtgtctgtggtctctctggatcttcccctgccgcaagatcttctcctacccaaaaccattcccattctccctcttctataactgtaccacttttgtgttttcttgttcaaggatggtgatagtttaaaaaaaaaaaaaaa

SEQ ID NO: 5552 - DNA, 713 bp, Homo sapiens; identical to SEQ ID NO: 317

SEQ ID NO: 5553 - DNA, 968 bp, Homo sapiens; identical to SEQ ID NO: 318

SEQ ID NO: 5554 - DNA, 1065 bp, Homo sapiens; identical to SEQ ID NO: 319

SEQ ID NO: 5555 - DNA, 1324 bp, Homo sapiens; identical to SEQ ID NO: 320

SEQ ID NO: 5556 - DNA, 678 bp, Homo sapiens
ctgagaaattggcccagttccattaatgtaattagcattcctgttgtttccttcaccttggagaaaaraaaagaaactctctcttacttactgggaacacacatcatgccaagttgtagcwacagagsyagcacaaggctgaaagcaggaggcagagggggatcttgacacacaatgatgagttcacctacatgggggctcaggtggcagacacagaggtgtcagtcttggcttttaaaagtawaagttggcttcccaatgtagagttaaacagatggcagagtgccttctgaagtgagggtttagagaacatggggagatggttatctgcctcaatttgaaactgacctgccatgagattcccaaggaagagacttgaatatcctagagcagttaactacaaractaaaagtttgccccctcagtatggttcttcgctgtaaaagaattgcaaaacaaagaaaaactaccacgtgtgtattttccgctagaatttcstggctagaaataagattatttagtacccaacaagtagaaaagaatatgagttcagaagaaagactagggtttagtatcagacatactttttgattattcatatttcatamaatcttattttcttgacttataacaaaaatcatacaactgttttattattaacgtaaaaaaaaaaaaaaa

SEQ ID NO: 5557 - DNA, 530 bp, Homo sapiens
aagatttcatcatcggatgcaaaaacgattccgaaacataatatcaattttatcttcagcttctgttattaattcttatgacgaaaatgacatccgtcattccaaacctctgctagttcagatggattgcaattataatggatatgttgcgggtattccaaattctcttgtgactctcagcgtatgttcaggactcaggggaacaatgcagctgaaaaacatctcatatggaattgaaccgatggaggctgtatcaggatttatacacaagatttatgaagaaaaatatgctgacactaatattctcttagaagaaaatgacacttatacttggtttaattcagagtatcaagtcagaaaaagttcagaaaaaactgactttattaagttattccctcgatatattgaaatgcatattgttgtggacaaaaatttggagtgtcagcagctatagtgaagtttcaagaagggggaatgctgtcgggactgagcaggcaatggcctaaaaacaataaaaagccctactaaaa

SEQ ID NO: 5558 - DNA, 492 bp, Homo sapiens
  misc_feature (43)..(43): n is a, c, g, or t
cacaacagaaggaactgccattgccatataggctgggatcctncactgtgcctaagaagaggtgctggtgggagtgtcaacagcgggccacctccaaaaagaacacgttccgtcaaacaaagccagcaatcagtgatgtatctgagagtggtctttggtcgtatttacgccttcataattgcactgctctttgggacagccaaaaatgtgcgaactatcaggaccaccaccgttaaggaagggacagttactaaccctgaataacactaattcagcctcccgatccctgtaaagatacagagaatataacagcaaaatctatgaaacaggatcaggggaagggatggcaaagctcaagtccacatttcttgaagtccacaggaagcacagggtcctgtttcacatcacagggaaacgggaggcattggcttctgtcccaggttcttgtaggtcgctgatgctcactctgaaataaatcttcaaaaacaaaaa

SEQ ID NO: 5559 - DNA, 600 bp, Homo sapiens
attgttacttgcctttaagtgcctctctttcagctcatgtggacaagaaaataatccctatcctgttgtttaaaagtgggtatacacacatttttgtgatttttagacttttttgcctgattttcacacagttttgactttaattttcttctttattagaagatatgggtaactttagaacctctgagttcaaggaaggatctaagcaatgaggccagaggagtgagatgtcctatggtaaccaagcataccatttctttgtcaagtgggcttttgtttatggctgcttaggggcttaaaagctccatggactggtgaggattatcatttgaatggaatttccccaattcaagaaccttactattatcctccaatcagttctacactgttggggaaaatcccctggaccttatataacatactttgtaaccatgcagttagttactcttacactcttgtcattataaatgcttgatcaatagttgatagactagctcttgatcagagtacccttgtatggagagaaggaaaaaatgccatacatttcacttgattctgtgaaccataatgcttaggacagtagtggtttgggtttgattt

SEQ ID NO: 5560 - DNA, 1400 bp, Homo sapiens
gctccctgggactgcagtacaatgctagtcaggagtgggacctgaggcgagctgcggttctctgcggctcaccatgtctatcgaggctcgggcagcagggccctagtagcagccatacaggagctggggaagggggcctctggggctgaccaggcgacaggtaggggcgaggggagctgagtctccgaagccttgcttttcacatgcaagggacagggttacatccccaaggtgagggggtggagtctggtctgctccactaaccagggtctcctcctcctcttccttcatcgcttctcctggagtgtgcgcctaataaggccatccttatgccttgcaaagcaccctcaaaagctgcaccacagcctggagaataaaatatcctcagccctgatgcctccccattatgtaacacccaaccgctctcacctacaccctgaggtctattcactgcatcccagtgatactaagtggaggccactgccttctgacatctggctcaaaagcccagtgtctgtttccatttatttccctggaatttcatttaaaattggtatagagaaaaaaaggatgtgacagaagcagagatgaccagaaagcacaggggcagggttctgactggcgtgtgggagaccctgtggccggcacccacctccacacgaggactaagctcttattttttaatcttgcccaaattcctacctaaggggtctagggagtcgcgccttacaaatcataaattttcatcagatgggttttataagaccctgtatatcatgacttatttttaatctgactatggcataacattacaagacgaggcaaaaatattgaacccccaaatatatttcctggccctaccttgaactggccctgcagagtctcttgtgaggagaatccacatcctataaagaagcccctttcccctttgttttccttcctttctttccagtccaggagatcatcaactaagagccaggcaccccttttaagtcgataagaaacagtttacaacctgctctctctctctctgaagtctgctgagagcttcccctgcacaataaaacttggcctccacgatcctttatcttaacctgaacattcctttccattgatcccaggtcttcagctgagctgaaccaattgtcaaccagaaaatgtttgaatttacctacagcctggaagcacccacccccgctgcttcgagttgtcctgcctttctgaactcaaccaatgtatttcttaaatgtatttgattgatgcctcagtcctccctaaaatgtataaaaccaagctgtacctcgaccaccttgggcacatgttcccaggccctcctgaggtctgtgtcacgggccatggccgctcatatttggctcagaataaatctcttcaaaaacccc

SEQ ID NO: 5561 - DNA, 501 bp, Homo sapiens; identical to SEQ ID NO: 326
  misc_feature (14)..(14): n is a, c, g, or t
  misc_feature (17)..(17): n is a, c, g, or t
  misc_feature (24)..(24): n is a, c, g, or t
  misc_feature (29)..(29): n is a, c, g, or t
  misc_feature (40)..(40): n is a, c, g, or t

SEQ ID NO: 5562 - DNA, 1400 bp, Homo sapiens
tctgaagacttttgcccaagctcgagcctacatcttcatcgatgaagcacacattacccaagccctcatatggctctcccagaggcagaaggacaatggctgtttcaggagctctgggtcactgctcaacaatgccataaagggaggagtagaagatgaagtgaccctctccgcctatatcaccatcgcccttctggagattcctctcacagtcactcaccctgttgtccgcaatgccctgttttgcctggagtcagcctggaagacagcacaagaaggggaccatggcagccatgtatataccaaagcactgctggcctatgcttttgccctggcaggtaaccaggacaagaggaaggaagtactcaagtcacttaatgaggaagctgtgaagaaagacaactctgtccattgggagcgccctcagaaacccaaggcaccagtggggcatttttacgaaccccaggctccctctgctgaggtggagatgacatcctatgtgctcctcgcttatctcacggcccagccagccccaacctcggaggacctgacctctgcaaccaacatcgtgaagtggatcacgaagcagcagaatgcccagggcggtttctcctccacccaggacacagtggtggctctccatgctctgtccaaatatggagccgccacatttaccaggactgggaaggctgcacaggtgactatccagtcttcagggacattttccagcaaattccaagtggacaacaacaatcgcctgttactgcagcaggtctcattgccagagctgcctggggaatacagcatgaaagtgacaggagaaggatgtgtctacctccagacctccttgaaatacaatattctcccagaaaaggaagagttcccctttgctttaggagtgcagactctgcctcaaacttgtgatgaacccaaagcccacaccagcttccaaatctccctaagtgtcagttacacagggagccgctctgcctccaacatggcgatcgttgatgtgaagatggtctctggcttcattcccctgaagccaacagtgaaaatgcttgaaagatctaaccatgtgagccggacagaagtcagcagcaaccatgtcttgatttaccttgataaggtgtcaaatcagacactgagcttgttcttcacggttctgcaagatgtcccagtaagagatctcaaaccagccatagtgaaagtctatgattactacgagacggatgagtttgcaatcgctgagtacaatgctccttgcagcaaagatcttggaaatgcttgaagaccacaaggctgaaaagtgctttgctggagtcctgttctctgagctccacagaagacacgtgtttttgtatctttaaagacttgatgaataaacactttttctggtc

SEQ ID NO: 5563 - DNA, 600 bp, Homo sapiens
ggggaatggagaggtgggcaggggttccagcttccctttgattttttgctgcagactcatcctttttaaatgagacttgttttcccctctctttgagtcaagtcaaatatgtagattgcctttggcaattcttcttctcaagcactgacactcattaccgtctgtgattgccatttcttcccaaggccagtctgaacctgaggttgctttatcctaaaagttttaacctcaggttccaaattcagtaaattttggaaacagtacagctatttctcatcaattctctatcatgttgaagtcaaatttggattttccaccaaattctgaatttgtagacatacttgtacgctcacttgcccccagatgcctcctctgtcctcattcttctctcccacacaagcagtctttttctacagccagtaaggcagctctgtcrtggtagcagatggtcccattattctagggtcttactctttgtatgatgaaaagaatgtgttatgaatcggtgctgtcagccctgctgtcagaccttcttccacagcaaatgagatgtatgcccaaagcggtagaattaaagaagagtaaaatggctgttgaagc

SEQ ID NO: 5564 - DNA, 1400 bp, Homo sapiens
tccataaagaaacagaagatgatcgtggtcatgacactattggcatggttgtaatccataagacaggacatattgctgctggtacatctacaaatggtataaaattcaaaatacatggccgtgtaggagactcaccaatacctggagctggagcctatgctgacgatactgcaggggcagccgcagccactgggaatggtgatatattgatgcgcttcctgccaagctaccaagctgtagaatacatgagaagaggagaagatccaaccatagcttgccaaaaagtgatttcaagaatccagaagcattttccagaattctttggggctgttatatgtgccaatgtgactggaagttacggtgctgcttgcaataaactttcaacatttactcagtttagtttcatggtttataattccgaaaaaaatcagccaactgaggaaaaagtggactgcatctaatccatctttactgtcaacatctgtatttaaagaagaaagaaacaaaggctgaaaaggctgctcactctcatcatctagtgttcctcatgtgttctaaagtctttttgtaaaataaacacaaaaataaatttatgttgaattggcactttctatatctgaaattgtattatctatttttatttaacctttcttatattatctgaagatgaatatgtatgtggctgtattttgtatatatttaagttttaagtgacacttggatttctgatcagtgttgcaaaaaattgctactttgagatttatttccacagtgatatattaaacccaaaaggaatcatcatatttggatgcttaaaatagagtatacaagttttttagacccaaagaaaaaaacatgcagagtctcagcatgatcagtcctgattgaatttcattatgtcacagtgatgcatgtcttagcactgattattggttttacttaatatcccctaaaaacttgaggaaggaagatgatagaacatgagatactctttgttttgtacatactagaaaatacagctatctcctgatgagcaattgtgttgattttctttgcttttttcctcttatggagctctcagtgtgtgaaagttctaaagccacaagaatcaatgatgttttagctgctaatatttagtattgatcgtttcttttaaaaatgatttggggaacttgatctgtactgtaattttactaattccttgtgcagaggtgggtatggcaattagaagtcaagaaatgggttgtttagcttggtttgtttccctaacttctgattaactctctgtatgacaactctacagaagttgtgcgcgtgctttctcagcagcatttttccttcaaaatcatctttttaatcaacagtcattaataaatgtacatgtacgatattcaaacttt

SEQ ID NO: 5565 - DNA, 1400 bp, Homo sapiens
cagccgtttgtgcagggcctggctctctatacccctgtggtcctcccacgctctctggacttcacagaactggatgttgctgctgagaagattgacaggttcatgcaggctgtgacaggatggaagactggctgctccctgatgggagccagtgtggacagcaccctggctttcaacacctacgtccacttccaagggaagatgaagggcttctccctgctggccgagccccaggagttctgggtggacaacagcacctcagtgtctgttcccatgctctctggcatgggcaccttccagcactggagtgacatccaggacaacttctcggtgactcaagtgcccttcactgagagcgcctgcctgctgctgatccagcctcactatgcctctgacctggacaaggtggagggtctcactttccagcaaaactccctcaactggatgaagaaactgtctccccggaccatccacctgaccatgccccaactggtgctgcaaggatcttatgacctgcaggacctgctcgcccaggctgagctgcccgccattctgcacaccgagctgaacctgcaaaaattgagcaatgaccgcatcagggtgggggaggtgctgaacagcattttttttgagcttgaagcggatgagagagagcccacagagtctacccaacagcttaacaagcctgaggtcttggaggtgaccctgaaccgcccattcctgtttgctgtgtatgatcaaagcgccactgccctgcacttcctgggccgcgtggccaacccgctgagcacagcatgaggccagggccccagaacacagtgcctggcaaggcctctgcccctggcctttgaggcaaaggccagcagcagataacaaccccggacaaatcagcgatgtgtcacccccagtctcccaccttttcttctaatgagtcgactttgagctggaaagcagccgtttctccttggtctaagtgtgctgcatggagtgagcagtagaagcctgcagcggcacaaatgcacctcccagtttgctgggtttattttagagaatgggggtggggaggcaagaaccagtgtttagcgcgggactactgttccaaaaagaattccaaccgaccagcttgtttgtgaaacaaaaaagtgttcccttttcaagttgagaacaaaaattgggttttaaaattaaagtatacatttttgcattgccttcggtttgtatttagtgtcttgaatgtaagaacatgacctccgtgtagtgtctgtaataccttagttttttccacagatgcttgtgatttttgaacaatacgtgaaagatgcaagcacctgaatttctgtttgaatgcggaacaatagctggttatttctcccttgtgttagtaataaacgtcttgccac

SEQ ID NO: 5566 - DNA, 1400 bp, Homo sapiens
gtccctggccaaagatttatttctcttgacaaccaagggcctccgtctggatttccaaggaagaatttcctctgaagcaccggaacttgctactaccagcaccatgccctaccaatatccagcactgaccccggagcagaagaaggagctgtctgacatcgctcaccgcatcgtggcacctggcaagggcatcctggctgcagatgagtccactgggagcattgccaagcggctgcagtccattggcaccgagaacaccgaggagaaccggcgcttctaccgccagctgctgctgacagctgacgaccgcgtgaacccctgcattgggggtgtcatcctcttccatgagacactctaccagaaggcggatgatgggcgtcccttcccccaagttatcaaatccaagggcggtgttgtgggcatcaaggtagacaagggcgtggtccccctggcagggacaaatggcgagactaccacccaagggttggatgggctgtctgagcgctgtgcccagtacaagaaggacggagctgacttcgccaagtggcgttgtgtgctgaagattggggaacacaccccctcagccctcgccatcatggaaaatgccaatgttctggcccgttatgccagtatctgccagcagaatggcattgtgcccatcgtggagcctgagatcctccctgatggggaccatgacttgaagcgctgccagtatgtgaccgagaaggtgctggctgctgtctacaaggctctgagtgaccaccacatctacctggaaggcaccttgctgaagcccaacatggtcaccccaggccatgcttgcactcagaagttttctcatgaggagattgccatggcgaccgtcacagcgctgcgccgcacagtgccccccgctgtcactgggatcaccttcctgtctggaggccagagtgaggaggaggcgtccatcaacctcaatgccattaacaagtgccccctgctgaagccctgggccctgaccttctcctacggccgagccctgcaggcctctgccctgaaggcctggggcgggaagaaggagaacctgaaggctgcgcaggaggagtatgtcaagcgagccctggccaacagccttgcctgtcaaggaaagtacactccgagcggtcaggctggggctgctgccagcgagtccctcttcgtctctaaccacgcctattaagcggaggtgttcccaggctgcccccaacaactccaggccctgccccctcccactcttgaagaggaggccgcctcctcggggctccaggctggcttgcccgcgctctttcttccctcgtgacagtggtgtgtggtgtcgtctgtgaatgctaagtccatcaccctttccggcacactgccaaataaacagctatttaaggggg

SEQ ID NO: 5567 - DNA, 600 bp, Homo sapiens
gtgcgcaaaatcaaacaaggcctgggcttgaaatttgctgagctggtgtataccggtttacggcctagccctgagtgtgaatttgtccgccactgcatcgccaagtcccaggagcgagtggaagggaaagtgcaggtgtccgtcctcaagggccaggtgtacatcctcggccgggagtccccactgtctctctacaatgaggagctggtgagcatgaacgtgcagggtgattatgagccaactgatgccaccgggttcatcaacatcaattccctcaggctgaaggaatatcatcgtctccagagcaaggtcactgccaaatagacccgtgtacaatgaggagctggggcctcctcaatttgcagatcccccaagtacaggcgctaattgttgtgataatttgtaattgtgacttgttctccccggctggcagcgtagtggggctgccaggccccagctttgttccctggtccccctgaagcctgcaaacgttgtcatcgaagggaagggtggggggcagctgcggtggggagctataaaaatgacaattaaaagagacactagtcttttatttctaaaaaaaaaaaaaaaaaaaaaaaa

SEQ ID NO: 5568 - DNA, 600 bp, Homo sapiens
atttgctcatacagcaggccatagaccccaaaaatctcagccgacttttcccaggatggaaagcttgggtgtgatcttcagtatatgaattaccctttcattcagcctttagaaattatattttagcctttatttttaacctgccaacatactttaagtagggattaatatttaagtgaactattgtgggtttttttgaatgttggttttaatacttgatttaatcaccactcaaaaatgttttgatggtcttaaggaacatctctgctttcactctttagaaataatggtcattcgggctgggcgcagcggctcacgcctgtaatcccagcactttgggaggccgaggtgagcggatcacaaggtcaggagttcgagaccagcctggccaagagaccagcctggccagtatggtgaaaccctgtctctactaaaaatacaaaaattagccgagcatggtggcgggcacctgtagtcccagctactcgagaggctgaggcaggagaatctcttgaacctgggaggtgaaggttgctgtgggccaaaatcatgccattgcactccagcctgggtgacaagagcgaaactccatctcaaaaa

SEQ ID NO: 5569 - DNA, 600 bp, Homo sapiens
aaatgtatgttaagagaattttttctattacttatggatcatgctttaaaatgatttttcttgatatttattttactccattttgtttttttctctgggtgaggcatctggttactggttattttaaaaagaataaagacattcctggaatcactccttttgggtttttgtttgttttgtttcttttctacatttttaagtattattttacaaaatagaaaaaatatagattcatgccaaattattacctatttttacactaactttctgcagtccctccatctggtatgagtaaccagatagagcacaagcatgagttcttgttcttcagttaaaagagcttctttcacagtgttgataacaaatgccttttgtagccaaaaccaggcgtctcaaccttacgtttttagttaaagaaatgtttagctaaacgctgttgaacattgattgtttggtaccgaaaacagcagtggacgatgttgtgcaatatccatctactgtagttaagatattcagtagtttgtttttcataagcatgtaattgatcatatttctgccaaggatgtgccttcaactttataattatagtgttgtaaaata

SEQ ID NO: 5570 - DNA, 1400 bp, Homo sapiens
caacacaaatgtcgtgttcagcaataatggaacccttgttgaccgctaccgtaaacacaacctctactttgaggcagcattcgatgttcctcttaaagtggatctcatcacctttgataccccctttgctggcaggtttggcatcttcacatgctttgatatattgttctttgaccctgccatcagagtcctcagagactacaaggtgaagcatgttgtgtacccaactgcctggatgaaccagctcccactcttggcagcaattgagattcagaaagcttttgctgttgcctttggcatcaacgttctggcagctaatgtccaccacccagttctggggatgacaggaagtggcatacacacccctctggagtccttttggtaccatgacatggaaaatcccaaaagtcaccttataattgcccaggtggccaaaaatccagtgggtctcattggtgcagagaatgcaacaggtgaaacggacccatcccatagtaagtttttaaaaattttgtcaggcgatccgtactgtgagaaggatgctcaggaagtccactgtgatgaggccaccaagtggaacgtgaatgctcctcccacatttcactctgagatgatgtatgacaatttcaccctggtccctgtctggggaaaggaaggctatctccacgtctgttccaatggcctctgctgttatttactttacgagaggcccaccttatccaaagagctgtatgccctgggggtctttgatgggcttcacacagtacatggcacttactacatccaagtgtgtgccctggtcaggtgtgggggtcttggcttcgacacctgcggacaggaaatcacagaggccacggggatatttgagtttcacctgtggggcaacttcagtacttcctatatctttcctttgtttctgacctcagggatgaccctagaagtccctgaccagcttggctgggagaatgaccactatttcctgaggaaaagtaggctgtcctctgggctggtgacggcggctctctatgggcgcttgtatgagagggactaggaaaagtgtgtggtctgtggggcggactctggccatcatgttgacagccttgcacttccacaggctacaagccctgggaccatctttctgccttaagggcaggagcccacttctgtggcaccagattccaccctgggaactgtggaaaaagtaggagaggcagattccctcagtgtcttcctcttaaacctcaatcatcgagacattagggggtattttctgttcacatttatctttttcaagccacatcttcctctaacaaatctctcagtatgcgattggtctcaagctaaaacaaaaataaatgtcagtttatattttacacatccaaaaaaaaaaaaaaaaaaaa

SEQ ID NO: 5571 - DNA, 1400 bp, Homo sapiens
gtattacctggctgagaagcaccttttcagcaccatccctgagctcattaactaccatcagcacaactctgcaggactcatatccaggctcaaatatccagtgtctcaacaaaacaagaatgcaccttccactgcaggcctgggatacggatcatgggaaattgatccaaaggacctgaccttcttgaaggagctggggactggacaatttggggtagtgaagtatgggaaatggagaggccagtacgacgtggccatcaagatgatcaaagaaggctccatgtctgaagatgaattcattgaagaagccaaagtcatgatgaatctttcccatgagaagctggtgcagttgtatggcgtctgcaccaagcagcgccccatcttcatcatcactgagtacatggccaatggctgcctcctgaactacctgagggagatgcgccaccgcttccagactcagcagctgctagagatgtgcaaggatgtctgtgaagccatggaatacctggagtcaaagcagttccttcaccgagacctggcagctcgaaactgtttggtaaacgatcaaggagttgttaaagtatctgatttcggcctgtccaggtatgtcctggatgatgaatacacaagctcagtaggctccaaatttccagtccggtggtccccaccggaagtcctgatgtatagcaagttcagcagcaaatctgacatttgggcttttggggttttgatgtgggaaatttactccctggggaagatgccatatgagagatttactaacagtgagactgctgaacacattgcccaaggcctacgtctctacaggcctcatctggcttcagagaaggtatataccatcatgtacagttgttggcatgagaaagcagatgagcgtcccactttcaaaattcttctgagcaatattctagatgtcatggatgaagaatcctgagctcgccaataagcttcttggttctacttctcttctccacaagccccaatttcactttctcagaggaaatcccaagcttaggagccctggagcctttgtgctcccactcaatacaaaaaggcccctctctacatctggggatgcacctcttctttgattccctgggatagtggcttctgagcaaaggccaaaaaattattgtgcctgaaatttcccgagagaattaagacagactgaatttgcgatgaaaatattttttaggagggaggatgtaaatagccgcacaaaggggtccaacagctctttgagtaggcatttggtagagcttgggggtgtgtgtgtgggggtggaccgaatttggcaagaatgaaatggtgtcataaagatgggaggggagggtgttttgataaaataaattctagaaagcttaaaaaaaaaaaaaaaaaaa

SEQ ID NO: 5572 - DNA, 1400 bp, Homo sapiens
tgcccaggacctgttactctctgctctgacttggagagtcattcaacagaggccgtgttgggggatgctttggtagatttctccctgaagctctaccacgccttctcagcaatgaagaaggtggagaccaacatggccttttccccattcagcatcgccagcctccttacccaggtcctgctcggggctgggcagaacaccaaaacaaacctggagagcatcctctcttaccccaaggacttcacctgtgtccaccaggccctgaagggcttcacgaccaaaggtgtcacctcagtctctcagatcttccacagcccagacctggccataagggacacctttgtgaatgcctctcggaccctgtacagcagcagccccagagtcctaagcaacaacagtgacgccaacttggagctcatcaacacctgggtggccaagaacaccaacaacaagatcagccggctgctagacagtctgccctccgatacccgccttgtcctcctcaatgctatctacctgagtgccaagtggaagacaacatttgatcccaagaaaaccagaatggaaccctttcacttcaaaaactcagttataaaagtgcccatgatgaatagcaagaagtaccctgtggcccatttcattgaccaaactttgaaagccaaggtggggcagctgcagctctcccacaatctgagtttggtgatcctggtaccccagaacctgaaacatcgtcttgaagacatggaacaggctctcagcccttctgttttcaaggccatcatggagaaactggagatgtccaagttccagcccactctcctaacactaccccgcatcaaagtgacgaccagccaggatatgctctcaatcatggagaaattggaattcttcgatttttcttatgaccttaacctgtgtgggctgacagaggacccagatcttcaggtttctgcgatgcagcaccagacagtgctggaactgacagagactggggtggaggcggctgcagcctccgccatctctgtggcccgcaccctgctggtctttgaagtgcagcagcccttcctcttcgtgctctgggaccagcagcacaagttccctgtcttcatggggcgagtatatgaccccagggcctgagacctgcaggatcaggttagggcgagcgctacctctccagcctcagctctcagttgcagccctgctgctgcctgcctggacttgcccctgccacctcctgcctcaggtgtccgctatccaccaaaagggctcctgagggtctgggcaagggacctgcttctattagcccttctccatggccctgccatgctctccaaaccactttttgcagctttctctagttcaagttcaccagactctataaataaaacctgacagaccat

SEQ ID NO: 5573 - DNA, 1400 bp, Homo sapiens
atcagagagatcctgaacatcaaccagaagaggaatgactatctggacatctatgccatcggggtgggcaagctggatgtggactggagagaactgaatgagctagggtccaagaaggatggtgagaggcatgccttcattctgcaggacacaaaggctctgcaccaggtctttgaacatatgctggatgtctccaagctcacagacaccatctgcggggtggggaacatgtcagcaaacgcctctgaccaggagaggacaccctggcatgtcactattaagcccaagagccaagagacctgccggggggccctcatctccgaccaatgggtcctgacagcagctcattgcttccgcgatggcaacgaccactccctgtggagggtcaatgtgggagaccccaaatcccagtggggcaaagaattccttattgagaaggcggtgatctccccagggtttgatgtctttgccaaaaagaaccagggaatcctggagttctatggtgatgacatagctctgctgaagctggcccagaaagtaaagatgtccacccatgccaggcccatctgccttccctgcacgatggaggccaatctggctctgcggagacctcaaggcagcacctgtagggaccatgagaatgaactgctgaacaaacagagtgttcctgctcattttgtcgccttgaatgggagcaaactgaacattaaccttaagatgggagtggagtggacaagctgtgccgaggttgtctcccaagaaaaaaccatgttccccaacttgacagatgtcagggaggtggtgacagaccagttcctatgcagtgggacccaggaggatgagagtccctgcaagggagaatctgggggagcagttttccttgagcggagattcaggttttttcaggtgggtctggtgagctggggtctttacaacccctgccttggctctgctgacaaaaactcccgcaaaagggcccctcgtagcaaggtcccgccgccacgagactttcacatcaatctcttccgcatgcagccctggctgaggcagcacctgggggatgtcctgaattttttacccctctagccatggccactgagccctctgctgccctgccagaatctgccgcccctccatcttctacctctgaatggccacccttagaccctgtgatccatcctctctcctagctgagtaaatccgggtctctaggatgccagaggcagcgcacacaagctgggaaatcctcagggctcctaccagcaggactgcctcgctgccccacctcccgctccttggcctgtccccagattccttccctggttgacttgactcatgcttgtttcactttcacatggaatttcccagttatgaaattaataaaaatcaatggtttccac

SEQ ID NO: 5574 - DNA, 600 bp, Homo sapiens
gagggcaaaggcaaaacaagccctgataagcaaaagcagtccccacagccacagcctggcagctctgatcaggaaagtgaggaacagcaacaattccggaacattttcaagcagatagcaggagatgacatggagatctgtgcagatgagctcaagaaggtccttaacacagtcgtgaacaaacacaaggacctgaagacacacgggttcacactggagtcctgccgtagcatgattgcgctcatggatacagatggctctggaaagctcaacctgcaggagttccaccacctctggaacaagattaaggcctggcagaaaattttcaaacactatgacacagaccagtccggcaccatcaacagctacgagatgcgaaatgcagtcaacgacgcaggattccacctcaacaaccagctctatgacatcattaccatgcggtacgcagacaaacacatgaacatcgactttgacagtttcatctgctgcttcgttaggctggagggcatgttcagagcttttcatgcatttgacaaggatggagatggtatcatcaagctcaacgttctggagtggctgcagctcaccatgtatgcctga

SEQ ID NO: 5575 - DNA, 1400 bp, Homo sapiens
ccatcccaacctggctccctcccacccaaccaactttccccccaacccggaaacagacaagcaacccaaactgaacccccccaaaagccaaaaaatgggagacaatttcacatggactttggaaaatatttttttcctttgcattcatctctcaaacttagtttttatctttgaccaaccgaacatgaccaaaaaccaaaagtgcattcaaccttaccaaaaaaaaaaaaaaaaaaaaaagaataaataaataagtttttaaaaaaggaagcttggtccacttgcttgaagacccatgcgggggtaagtccctttctgcccgttgggttatgaaaccccaatgctgccctttctgctcctttctccacaccccccttggcctcccctccactccttcccaaatctgtctccccagaagacacaggaaacaatgtattgtctgcccagcaatcaaaggcaatgctcaaacacccaagtggcccccaccctcagcccgctcctgcccgcccagcacccccaggccctggggacctggggttctcagactgccaaagaagccttgccatctggcgctcccatggctcttgcaacatctccccttcgtttttgagggggtcatgccgggggagccaccagcccctcactgggttcggaggagagtcaggaagggccacgacaaagcagaaacatcggatttggggaacgcgtgtcatcccttgtgccgcaggctgggcgggagagactgttctgttctgttccttgtgtaactgtgttgctgaaagactacctcgttcttgtcttgatgtgtcaccggggcaactgcctgggggcggggatgggggcagggtggaagcggctccccatttttataccaaaggtgctacatctatgtgatgggtggggtggggagggaatcactggtgctatagaaattgagatgcccccccaggccagcaaatgttcctttttgttcaaagtctatttttattccttgatattttttctttctttttttttttttttgtggatggggacttgtgaatttttctaaaggtgctatttaacatgggaggagagcgtgtgcgctccagcccagcccgctgctcactttccaccctctctccacctgcctctggcttctcaggcctctgctctccgacctctctcctctgaaaccctcctccacagctgcagcccatcctcccggctccctcctagtctgtcctgcgtcctctgtccccgggtttcagagacaacttcccaaagcacaaagcagtttttccctaggggtgggaggaagcaaaagactctgtacctattttgtatgtgtataataatttgagatgtttttaattattttgattgctggaataaagcatgtggaaatgacccaaacataa

SEQ ID NO: 5576 - DNA, 1400 bp, Homo sapiens
accaaggatgcactatggatgctatcaaagtatactgtgatttctctactggcgaaacctgtatccgggcccaacctgaaaacatcccagccaagaactggtataggagctccaaggacaagaaacacgtctggctaggagaaactatcaatgctggcagccagtttgaatataatgtagaaggagtgacttccaaggaaatggctacccaacttgccttcatgcgcctgctggccaactatgcctctcagaacatcacctaccactgcaagaacagcattgcatacatggatgaggagactggcaacctgaaaaaggctgtcattctacagggctctaatgatgttgaacttgttgctgagggcaacagcaggttcacttacactgttcttgtagatggctgctctaaaaagacaaatgaatggggaaagacaatcattgaatacaaaacaaataagccatcacgcctgcccttccttgatattgcacctttggacatcggtggtgctgaccatgaattctttgtggacattggcccagtctgtttcaaataaatgaactcaatctaaattaaaaaagaaagaaatttgaaaaaactttctctttgccatttcttcttcttcttttttaactgaaagctgaatccttccatttcttctgcacatctacttgcttaaattgtgggcaaaagagaaaaagaaggattgatcagagcattgtgcaatacagtttcattaactccttcccccgctcccccaaaaatttgaatttttttttcaacactcttacacctgttatggaaaatgtcaacctttgtaagaaaaccaaaataaaaattgaaaaataaaaaccataaacatttgcaccacttgtggcttttgaatatcttccacagagggaagtttaaaacccaaacttccaaaggtttaaactacctcaaaacactttcccatgagtgtgatccacattgttaggtgctgacctagacagagatgaactgaggtccttgttttgttttgttcataatacaaaggtgctaattaatagtatttcagatacttgaagaatgttgatggtgctagaagaatttgagaagaaatactcctgtattgagttgtatcgtgtggtgtattttttaaaaaatttgatttagcattcatattttccatcttattcccaattaaaagtatgcagattatttgcccaaagttgtcctcttcttcagattcagcatttgttctttgccagtctcattttcatcttcttccatggttccacagaagctttgtttcttgggcaagcagaaaaattaaattgtacctattttgtatatgtgagatgtttaaataaattgtgaaaaaaatgaaataaagcatgtttggttttccaaaagaacatat

SEQ ID NO: 5577 - DNA, 1400 bp, Homo sapiens
cacgtttggtttggagagtccatggatggtggttttcagtttagctacggcaatcctgaacttcctgaagatgtccttgatgtgcagctggcattccttcgacttctctccagccgagcttcccagaacatcacatatcactgcaaaaatagcattgcatacatggatcaggccagtggaaatgtaaagaaggccctgaagctgatggggtcaaatgaaggtgaattcaaggctgaaggaaatagcaaattcacctacacagttctggaggatggttgcacgaaacacactggggaatggagcaaaacagtctttgaatatcgaacacgcaaggctgtgagactacctattgtagatattgcaccctatgacattggtggtcctgatcaagaatttggtgtggacgttggccctgtttgctttttataaaccaaactctatctgaaatcccaacaaaaaaaatttaactccatatgtgttcctcttgttctaatcttgtcaaccagtgcaagtgaccgacaaaattccagttatttatttccaaaatgtttggaaacagtataatttgacaaagaaaaatgatacttctctttttttgctgttccaccaaatacaattcaaatgctttttgttttatttttttaccaattccaatttcaaaatgtctcaatggtgctataataaataaacttcaacactctttatgataacaacactgtgttatattctttgaatcctagcccatctgcagagcaatgactgtgctcaccagtaaaagataacctttctttctgaaatagtcaaatacgaaattagaaaagccctccctattttaactacctcaactggtcagaaacacagattgtattctatgagtcccagaagatgaaaaaaattttatacgttgataaaacttataaatttcattgattaatctcctggaagattggtttaaaaagaaaagtgtaatgcaagaatttaaagaaatatttttaaagccacaattattttaatattggatatcaactgcttgtaaaggtgctcctcttttttcttgtcattgctggtcaagattactaatatttgggaaggctttaaagacgcatgttatggtgctaatgtactttcacttttaaactctagatcagaattgttgacttgcattcagaacataaatgcacaaaatctgtacatgtctcccatcagaaagattcattggcatgccacagggattctcctccttcatcctgtaaaggtcaacaataaaaaccaaattatggggctgcttttgtcacactagcatagagaatgtgttgaaatttaactttgtaagcttgtatgtggttgttgatcttttttttccttacagacacccataataaaatatcatattaaaattc

SEQ ID NO: 5578 - DNA, 600 bp, Homo sapiens
tctgtggaggagtaccaggaccctgaagctccttgggatagtgatgacccctgttccctgccactggatgagggctcctgcactgcctacaccctgcgctggtaccatcgggctgtgacaggcagcacagaggcctgtcacccttttgtctatggtggctgtggagggaatgccaaccgttttgggacccgtgaggcctgcgagcgccgctgcccaccccgggtggtccagagccaggggacaggtactgcccaggactgaggcccagataatgagctgagattcagcatcccctggaggagtcggggtctcagcagaaccccactgtccctccccttggtgctagaggcttgtgtgcacgtgagcgtgcgagtgcacgtccgttatttcagtgacttggtcccgtgggtctagccttcccccctgtggacaaacccccattgtggctcctgccaccctggcagatgactcactgtgggggggtggctgtgggcagtgagcggatgtgactggcgtctgacccgccccttgacccaagcctgtgatgacatggtgctgattctggggggcattaaagctgctgttttaaaaggcaaaaaa

SEQ ID NO: 5579 - DNA, 1400 bp, Homo sapiens
acggacgaggacaagtggggcgatgcgtgcgacaactgccggtcccagaagaacgacgaccaaaaggacacagaccaggacggccggggcgatgcgtgcgacgacgacatcgacggcgaccggatccgcaaccaggccgacaactgccctagggtacccaactcagaccagaaggacagtgatggcgatggtataggggatgcctgtgacaactgtccccagaagagcaacccggatcaggcggatgtggaccacgactttgtgggagatgcttgtgacagcgatcaagaccaggatggagacggacatcaggactctcgggacaactgtcccacggtgcctaacagtgcccaggaggactcagaccacgatggccagggtgatgcctgcgacgacgacgacgacaatgacggagtccctgacagtcgggacaactgccgcctggtgcctaaccccggccaggaggacgcggacagggacggcgtgggcgacgtgtgccaggacgactttgatgcagacaaggtggtagacaagatcgacgtgtgtccggagaacgctgaagtcacgctcaccgacttcagggccttccagacagtcgtgctggacccggagggtgacgcgcagattgaccccaactgggtggtgctcaaccagggaagggagatcgtgcagacaatgaacagcgacccaggcctggctgtgggttacactgccttcaatggcgtggacttcgagggcacgttccatgtgaacacggtcacggatgacgactatgcgggcttcatctttggctaccaggacagctccagcttctacgtggtcatgtggaagcagatggagcaaacgtattggcaggcgaaccccttccgtgctgtggccgagcctggcatccaactcaaggctgtgaagtcttccacaggccccggggaacagctgcggaacgctctgtggcatacaggagacacagagtcccaggtgcggctgctgtggaaggacccgcgaaacgtgggttggaaggacaagaagtcctatcgttggttcctgcagcaccggccccaagtgggctacatcagggtgcgattctatgagggccctgagctggtggccgacagcaacgtggtcttggacacaaccatgcggggtggccgcctgggggtcttctgcttctcccaggagaacatcatctgggccaacctgcgttaccgctgcaatgacaccatcccagaggactatgagacccatcagctgcggcaagcctagggaccagggtgaggacccgccggatgacagccaccctcaccgcggctggatgggggctctgcacccagcccaaggggtggccgtcctgagggggaagtgagaagggctcagagaggacaaaataaagtgtgtgtgcaggg

SEQ ID NO: 5580 - DNA, 600 bp, Homo sapiens
ttcaatcccagaaggaagctggaatttgcccttctgtttctagtttttgatgagaatgaatcttggtacttagatgacaacatcaaaacatactctgatcaccccgagaaagtaaacaaagatgatgaggaattcatagaaagcaataaaatgcatgctattaatggaagaatgtttggaaacctacaaggcctcacaatgcacgtgggagatgaagtcaactggtatctgatgggaatgggcaatgaaatagacttacacactgtacattttcacggccatagcttccaatacaagcacaggggagtttatagttctgatgtctttgacattttccctggaacataccaaaccctagaaatgtttccaagaacacctggaatttggttactccactgccatgtgaccgaccacattcatgctggaatggaaaccacttacaccgttctacaaaatgaagacaccaaatctggctgaatgaaataaattggtgataagtggaaaaaagagaaaaaccaatgattcataacaatgtatgtgaaagtgtaaaatagaatgttactttggaatgactataaacattaaaagagactggagcat

SEQ ID NO: 5581 - DNA, 818 bp, Homo sapiens; identical to SEQ ID NO: 346

SEQ ID NO: 5582 - DNA, 600 bp, Homo sapiens
agtcccctcgccagattccctccgtcgccgccaagatgatgtgcggggcgccctccgccacgcagccggccaccgccgagacccagcacatcgccgaccaggtgaggtcccagcttgaagagaaagaaaacaagaagttccctgtgtttaaggccgtgtcattcaagagccaggtggtcgcggggacaaactacttcatcaaggtgcacgtcggcgacgaggacttcgtacacctgcgagtgttccaatctctccctcatgaaaacaagcccttgaccttatctaactaccagaccaacaaagccaagcatgatgagctgacctatttctgatcctgactttggacaaggcccttcagccagaagactgacaaagtcatcctccgtctaccagagcgtgcacttgtgatcctaaaataagcttcatctccgggctgtgccccttggggtggaaggggcaggattctgcagctgcttttgcatttctcttcctaaatttcattgtgttgatttctttccttcccaataggtgatcttaattactttcagaatattttcaaaatagatatatttttaaaatccttaaaaaaaaaaaaaaaaa

SEQ ID NO: 5583 - DNA, 1400 bp, Homo sapiens
tattaagctttttggaatctttgtaccaaaattttaaaaaagggagtttttgatagttgtgtgtatgtgtgtgtggggtggggggatggtaagagaaaagagagaaacactgaaaagaaggaaagatggttaaacattttcccactcattctgaattaattaatttggagcacaaaattcaaagcatggacatttagaagaaagatgtttggcgtagcagagttaaatctcaaataggctattaaaaaagtctacaacatagcagatctgttttgtggtttggaatattaaaaaacttcatgtaattttattttaaaatttcatagctgtacttcttgaatataaaaaatcatgccagtatttttaaaggcattagagtcaactacacaaagcaggcttgcccagtacatttaaattttttggcacttgccattccaaaatattatgccccaccaaggctgagacagtgaatttgggctgctgtagcctatttttttagattgagaaatgtgtagctgcaaaaataatcatgaaccaatctggatgcctcattatgtcaaccaggtccagatgtgctataatctgtttttacgtatgtaggcccagtcgtcatcagatgcttgcggcaaaagaaagctgtgtttatatggaagaaagtaaggtgcttggagtttacctggcttatttaatatgcttataacctagttaaagaaaggaaaagaaaacaaaaaacgaatgaaaataactgaatttggaggctggagtaatcagattactgctttaatcagaaaccctcattgtgtttctaccggagagagaatgtatttgctgacaaccattaaagtcagaagttttactccaggttattgcaataaagtataatgtttattaaatgcttcatttgtatgtcaaagctttgactctataagcaaattgcttttttccaaaacaaaaagatgtctcaggtttgttttgtgaattttctaaaagctttcatgtcccagaacttagcctttacctgtgaagtgttactacagccttaatattttcctagtagatctatattagatcaaatagttgcatagcagtatatgttaatttgtgtgtttttagctgtgacacaactgtgtgattaaaaggtatactttagtagacatttataactcaaggataccttcttatttaatcttttcttatttttgtactttatcatgaatgcttttagtgtgtgcataatagctacagtgcatagttgtagacaaagtacattctggggaaacaacatttatatgtagcctttactgtttgatataccaaattaaaaaaaaattgtatctcattacttatactgggacaccattaccaaaataataaaaatcactttcataatcttgaaaaaa

SEQ ID NO: 5584 - DNA, 1400 bp, Homo sapiens
gcagaaaggatcacagatgtggctttggatttctggaggagtggaaagcagagggaagacatcaagctcaaagacattgaacacgcgttgtctgtgtcggttttcaataacaagaacagtggcttctggcacagcagcttaattgaccggaacctcattgattattttgttcccttcctccccctggaatacaaacacctaaaaatgtgtatccgagtggaaatgcagtcccgaggctatgaaattgatgaagacattgtaagcagagtggctgaggagatgacatttttccccaaagaggagagagttttctcagataaaggctgcaaaacggtgttcaccaagttagattattactacgatgattgacagtcatgattggcagccggagtcactgcctggagttggaaaagaaacaacactcagtccttccacacttccacccccagctcctttccctggaagaggaatccagtgaatgttcctgtttgatgtgacaggaattctccctggcattgtttccaccccctggtgcctgcaggccacccagggaccacgggcgaggacgtgaagcctcccgaacacgcacagaaggaaggagccagctcccagcccactcatcgcagggctcatgattttttacaaattatgttttaattccaagtgtttctgtttcaaggaaggatgaataagttttattgaaaatgtggtaactttatttaaaatgatttttaacattatgagagactgctcagattctaagttgttggccttgtgtgtgtgtttttttttaagttctcatcattattacatagactgtgaagtatctttactggaaatgagcccaagcacacatgcatggcatttgttcctgaacaggagggcatccctggggatgtggctggagcatgagccagctctgtcccaggatggtcccagcggatgctgccaggggcagtgaagtgtttaggtgaaggacaagtaggtaagaggacgccttcaggcaccacagataagcctgaaacagcctctccaagggttttcaccttagcaacaatgggagctgtgggagtgattttggccacactgtcaacatttgttagaaccagtcttttgaaagaaaagtatttccaacttgtcacttgccagtcactccgttttgcaaaaggtggcccttcactgtccattccaaatagcccacacgtgctctctgctggattctaaattatgtgaattttgccatattaaatcttcctcatttatactattatttgttacgttcaatcagaatccccgaaacctcctataaagcttagctgccccttctgaggatgctgagaacggtgtctttctttataaatgcaaatggctaccgttttacaataaaattttgcatgtgc

SEQ ID NO: 5585 - DNA, 600 bp, Homo sapiens
tgccctctccgagctggtaggcattccagctcctccgtgcttcctcagttacacaaaggacctcagctgcttctcccacttggccaagcagggaggaagaagcttaggcagggctctctttccttcttgccttcagatgttctctcccaggggctggcttcaggagggagcatagaaggcaggtgagcaaccagttggctaggggagcagggggcccaccagagctgtggagaggggaccctaagactcctcggcctggctcctacccaccgcccttgccgaaccaggagctgctcactacctcctcagggatggccgttggccacgtcttccttctgcctgagcttcccccccaccacaggccctttcctcaggcaaggtctggcctcaggtgggccgcaggcgggaaaagcagcccttggccagaagtcaagcccagccacgtggagcctagagtgagggcctgaggtctggctgcttgcccccatgctggcgccaacaacttctccatcctttctgcctctcaacatcacttgaatcctagggcctgggttttcatgtttttgaaacagaaccataaagcatatgtgttggcttgtt

SEQ ID NO: 5586 - DNA, 600 bp, Homo sapiens
cactacaacggtgtccttgctgccaagctctggaggaagaagctgcacctcacgctcagtgccaacctggaaaagataataaccatcggcctgttcttctccaattttgagcgaaacccacccgagaacaccttccttagactcaccgccatggcaacacactctgaatccaaccttagctgctttgctcaggaagacattgccatttgtagaccacaccttgccatcaagatgccagagaaagcagagcagtatcaacccctcacagcctcagtcagcctccagaactccctagatgcccccatggaggactgtgtgatctccatcctgggaagggggctcattcacagagagaggagctacagattccgttcagtgtggcctgaaaacaccatgtgtgccaagttccagttcacgccaacacatgtggggctccagagactcactgtggaagtggactgcaacatgttccagaacctaaccaactataaaagcgtcaccgtggtagcccctgaactatcagcttaaacttccagctctatcaccactctcctgccaacccttgttctacaatctaaaccaaacatgtgctaggaagag

SEQ ID NO: 5587 - DNA, 1400 bp, Homo sapiens
gtcctgggaggccgagcgagtcatggagtggctcaagacccaggagtggggcctcatgatcctggatgaagtgcacaccataccagccaagatgttccgaagggtgctcaccatcgtgcaggcccactgtaagctgggtttgactgcgaccctcgtccgcgaagatgacaaaattgtggatttaaattttctgattgggcctaagctctacgaagccaactggatggagctgcagaataatggctacatcgccaaagtccagtgtgctgaggtctggtgccctatgtctcctgaattttaccgggaatatgtggcaatcaaaaccaagaaacgaatcttgctgtacaccatgaaccccaacaaatttagagcttgccagtttctgatcaagtttcatgaaaggaggaatgacaagattattgtctttgctgacaatgtgtttgccctaaaggaatatgccattcgactgaacaaaccctatatctacggacctacgtctcagggggaaaggatgcaaattctccagaatttcaagcacaaccccaaaattaacaccatcttcatatccaaggtaggtgacacttcgtttgatctgccggaagcaaatgtcctcattcagatctcatcccatggtggctccaggcgtcaggaagcccaaaggctagggcgggtgcttcgagctaaaaaagggatggttgcagaagagtacaatgcctttttctactcactggtatcccaggacacacaggaaatggcttactcaaccaagcggcagagattcttggtagatcaaggttatagcttcaaggtgatcacgaaactcgctggcatggaggaggaagacttggcgttttcgacaaaagaagagcaacagcagctcttacagaaagtcctggcagccactgacctggatgccgaggaggaggtggtggctggggaatttggctccagatccagccaggcatctcggcgctttggcaccatgagttctatgtctggggccgacgacactgtgtacatggagtaccactcatcgcggagcaaggcgcccagcaaacatgtacacccgctcttcaagcgctttaggaaatgatgcttaggcagggtacttcgttcaagaccggcgcttggcacccttgttggaaagggattttcagcataacattttccttccacctctttgaccttccctccagcgttggccaaattgtgctgaggaagatgcatcaagggcttggctgtgccttcataggtcatctagggttttataaaggaggaggagacaatattttttcaaactttttggggagtggggtcatttctgtatataaaaaatgttaatatttaaggtgtatttatgttaccgttctgaataaacagaatggaccattgaaccagta

SEQ ID NO: 5588 - DNA, 600 bp, Homo sapiens
ccttgttgaaactggaaaccacagtgaattacacagattctcaacgacccatatgcctgccttccaaaggagatagaaatgtaatatacactgattgctgggtgactggatgggggtacagaaaactaagagacaaaatacaaaatactctccagaaagccaagatacccttagtgaccaacgaagagtgccagaagagatacagaggacataaaataacccataagatgatctgtgccggctacagggaaggagggaaggacgcttgcaagggagattcgggaggccctctgtcctgcaaacacaatgaggtctggcatctggtaggcatcacgagctggggcgaaggctgtgctcaaagggagcggccaggtgtttacaccaacgtggtcgagtacgtggactggattctggagaaaactcaagcagtgtgaatgggttcccaggggccattggagtccctgaaggacccaggatttgctgggagagggtgttgagttcactgtgccagcatgcttcctccacagtaacacgctgaaggggcttggtgtttgtaagaaaatgctagaagaaaacaaactgtcacaagttgttatgtcc

SEQ ID NO: 5589 - DNA, 1400 bp, Homo sapiens
ggagatcccacatatttcaaaaacatacttttccaaacccaggctattcggcaaggaagttagtttttaatctctccaccttccaaagagtgctaagcattagctttaattaagctctcatagctcataagagtaacagtcatcatttatcatcacaaatggctacatctccaaatatcagtgggctctcttaccagggagatttgctcaatacctggcctcatttaaaacaagacttcagattccccactcagccttttgggaataatagcacatgatttgggctctagaattccagtcccctttctcggggtcaggttctaccctccatgtgagaatatttttcccaggactagagcacaacataatttttatttttggcaaagccagaaaaagatctttcattttgcacctgcagccaagcaaatgcctgccaaattttagatttaccttgttagaagaggtggccccatattaacaaattgcatttgtgggaaacttaaccacctacaaggagataagaaagcaggtgcaacactcaagtctattgaataatgtagttttgtgatgcattttatagaatgtgtcacactgtggcctgatcagcaggagccaatatcccttactttaaccctttctgggatgcaatactaggaagtaaagtgaagaatttatctctttagttagtgattatatttcacccatctctcaggaatcatctcctttgcagaatgatgcaggttcaggtcccctttcagagatataataagcccaacaagttgaagaagctggcggatctagtgaccagatatatagaaggactgcagccactgattctctcttgtccttcacatcaccattttgagacctcagcttggcactcaggtgctgaagggtaatatggactcagccttgcaaatagccagtgctagttctgacccaaccacagaggatgctgacatcatttgtattatgttccaaggctactacagagaaggctgcctgctatgtatttgcaaggctgatttatggtcagaatttccctctgatatgtctagggtgtgatttaggtcagtagactgtgattcttagcaaaaaatgaacagtgataagtatactgggggcaaaatcagaatggaatgctctggtctatataaccacatttctgagcctttgagactgttcctgagccttcagcactaacctatgagggtgagctggtcccctctatatatacatcatacttaactttactaagtaatctcacagcatttgccaagtctcccaatatccaattttaaaatgaaatgcattttgctagacagttaaactggcttaacttagtatattattattaattacaatgtaatagaagcttaaaataaagttaaactgattat

SEQ ID NO: 5590 - DNA, 1400 bp, Homo sapiens
cgccattaatgggatgatctacagcttgcctggcctgaaaatgtatgagcaagagtgggtgaggttacacctgctgaacataggcggctcccaagacattcacgtggttcactttcacggccagaccttgctggaaaatggcaataaacagcaccagttaggggtctggccccttctgcctggttcatttaaaactcttgaaatgaaggcatcaaaacctggctggtggctcctaaacacagaggttggagaaaaccagagagcagggatgcaaacgccatttcttatcatggacagagactgtaggatgccaatgggactaagcactggtatcatatctgattcacagatcaaggcttcagagtttctgggttactgggagcccagattagcaagattaaacaatggtggatcttataatgcttggagtgtagaaaaacttgcagcagaatttgcctctaaaccttggatccaggtggacatgcaaaaggaagtcataatcacagggatccagacccaaggtgccaaacactacctgaagtcctgctataccacagagttctatgtagcttacagttccaaccagatcaactggcagatcttcaaagggaacagcacaaggaatgtgatgtattttaatggcaattcagatgcctctacaataaaagagaatcagtttgacccacctattgtggctagatatattaggatctctccaactcgagcctataacagacctacccttcgattggaactgcaaggttgtgaggtaaatggatgttccacacccctgggtatggaaaatggaaagatagaaaacaagcaaatcacagcttcttcgtttaagaaatcttggtggggagattactgggaacccttccgtgcccgtctgaatgcccagggacgtgtgaatgcctggcaagccaaggcaaacaacaataagcagtggctagaaattgatctactcaagatcaagaagataacggcaattataacacagggctgcaagtctctgtcctctgaaatgtatgtaaagagctataccatccactacagtgagcagggagtggaatggaaaccatacaggctgaaatcctccatggtggacaagatttttgaaggaaatactaataccaaaggacatgtgaagaactttttcaaccccccaatcatttccaggtttatccgtgtcattcctaaaacatggaatcaaagtattgcacttcgcctggaactctttggctgtgatatttactagaattgaacattcaaaaacccctggaagagactctttaagacctcaaaccatttagaatgggcaatgtattttacgctgtgttaaatgttaacagttttccactatttctctttcttttctattagtgaataaaattttatac

SEQ ID NO: 5591 - DNA, 1400 bp, Homo sapiens
gctggggccagctgctggaccgtggcgccacggccctggagctcatggtgctcaacgtgccccggctgatgacccaggactgcctgcagcagtcacggaaggtgggagactccccaaatatcacggagtacatgttctgtgccggctactcggatggcagcaaggactcctgcaagggggacagtggaggcccacatgccacccactaccggggcacgtggtacctgacgggcatcgtcagctggggccagggctgcgcaaccgtgggccactttggggtgtacaccagggtctcccagtacatcgagtggctgcaaaagctcatgcgctcagagccacgcccaggagtcctcctgcgagccccatttccctagcccagcagccctggcctgtggagagaaagccaaggctgcgtcgaactgtcctggcaccaaatcccatatattcttctgcagttaatggggtagaggagggcatgggagggagggagaggtggggagggagacagagacagaaacagagagagacagagacagagagagactgagggagagactctgaggacatggagagagactcaaagagactccaagattcaaagagactaatagagacacagagatggaatagaaaagatgagaggcagaggcagacaggcgctggacagaggggcaggggagtgccaaggttgtcctggaggcagacagcccagctgagcctccttacctcccttcagccaagccccacctgcacgtgatctgctggccctcaggctgctgctctgccttcattgctggagacagtagaggcatgaacacacatggatgcacacacacacacgccaatgcacacacacagagatatgcacacacacggatgcacacacagatggtcacacagagatacgcaaacacaccgatgcacacgcacatagagatatgcacacacagatgcacacacagatatacacatggatgcacgcacatgccaatgcacgcacacatcagtgcacacggatgcacagagatatgcacacaccgatgtgcgcacacacagatatgcacacacatggatgagcacacacacaccaagtgcgcacacacaccgatgtacacacacagatgcacacacagatgcacacacaccgatgctgactccatgtgtgctgtcctctgaaggcggttgtttagctctcacttttctggttcttatccattatcatcttcacttcagacaattcagaagcatcaccatgcatggtggcgaatgcccccaaactctcccccaaatgtatttctcccttcgctgggtgccgggctgcacagactattccccacctgcttcccagcttcacaataaacggctgcgtctcctccgcacacctgtggtgcctgccaccc

SEQ ID NO: 5592 - DNA, 1400 bp, Homo sapiens
agctcacttaatgaaagatggatttccaaggttaattcattggaattgaaaattaacagggcctctcactaactaatcactttcccatcttttgttagatttgaatatatacattctatgatcattgctttttctctttacaggggagaatttcatattttacctgagcaaattgattagaaaatggaaccactagaggaatataatgtgttaggaaattacagtcatttctaagggcccagcccttgacaaaattgtgaagttaaattctccactctgtccatcagatactatggttctccactatggcaactaactcactcaattttccctccttagcagcattccatcttcccgatcttctttgcttctccaaccaaaacatcaatgtttattagttctgtatacagtacaggatctttggtctactctatcacaaggccagtaccacactcatgaagaaagaacacaggagtagctgagaggctaaaactcatcaaaaacactactccttttcctctaccctattcctcaatcttttaccttttccaaatcccaatccccaaatcagtttttctctttcttactccctctctcccttttaccctccatggtcgttaaaggagagatggggagcatcattctgttatacttctgtacacagttatacatgtctatcaaacccagacttgcttccatagtggagacttgcttttcagaacatagggatgaagtaaggtgcctgaaaagtttgggggaaaagtttctttcagagagttaagttattttatatatataatatatatataaaatatataatatacaatataaatatatagtgtgtgtgtgtatgcgtgtgtgtagacacacacgcatacacacatataatggaagcaataagccattctaagagcttgtatggttatggaggtctgactaggcatgatttcacgaaggcaagattggcatatcattgtaactaaaaaagctgacattgacccagacatattgtactctttctaaaaataataataataatgctaacagaaagaagagaaccgttcgtttgcaatctacagctagtagagactttgaggaagaattcaacagtgtgtcttcagcagtgttcagagccaagcaagaagttgaagttgcctagaccagaggacataagtatcatgtctcctttaactagcataccccgaagtggagaagggtgcagcaggctcaaaggcataagtcattccaatcagccaactaagttgtccttttctggtttcgtgttcaccatggaacattttgattatagttaatccttctatcttgaatcttctagagagttgctgaccaactgacgtatgtttccctttgtgaattaataaactggtgttctggttcat

SEQ ID NO: 5593 - DNA, 878 bp, Homo sapiens; identical to SEQ ID NO: 358

SEQ ID NO: 5594 - DNA, 1295 bp, Homo sapiens; identical to SEQ ID NO: 359

SEQ ID NO: 5595 - DNA, 1400 bp, Homo sapiens
gccatgatcaggcattggttggggataagtcgctggcattttggttgatggatgccgaaatgtatacaaacatgagtgtcctgactccttttactccagttattgatcgtggaatacagcttcataaaatgattcgactcattacgcatgggcttggtggagaaggctatctcaatttcatgggtaatgaatttgggcatcctgaatggttagacttcccaagaaaaggaaataatgagagttaccattatgccaggcggcagtttcatttaactgacgacgaccttcttcgctacaagttcctaaataattttgacagggatatgaatagattggaagaaagatatggttggcttgcagctccacaggcctacgtgagtgaaaaacatgaaggcaataagatcattgcttttgaaagagcaggtcttcttttcattttcaacttccatccaagcaagagctacactgactaccgagttggaacagcattgccagggaaattcaaaattgtgctagattcagatgcagcggaatatggagggcatcagagactggaccacagcactgactttttttctgaggcttttgaacataatgggcgtccctattctcttttggtgtacattccaagcagagtggccctcatccttcagaatgtggatctgccgaattgaagaggcctgatttcagctccaccagatgcagatttgtgttttgttttcttgttatcactgtcacacagcttataacatgtatgcttttcagaatacagttgtctagccaagccatcaagtgtctgaaattcaatattggtttatgcaaatacagcaaacttttatttaagtagataggagaatatgtttaaaatattaggaatcctagaccatattttcaagtcatcttagcagctaggattctcaaatggaagtgttatatataatatgttaaaaacattttgctttcctggctaattatttgatccttttaaatccaaatttgaatcatttgtcatgtatgattatttctgttaaatgtacacagtatttaagatggatatttggtggctctatttgttctgatatcttttggtctaaattatgaggtaccaagattgtttctttgtttctttttttcaaattgtgtttagaaatactgtaataaatatgcagtagtgatataaagaattatatccaaggtaatataaaagccattacgtatgaactcatccgtgtctcattttgtgttttattttgtgatctcttgtccactaagtatcttgttaaatgccagtatctcagtctttctgaagccctgaaatggtaattgtagcatttcagaaaatgtctttcatttcaatcaataaaaagcttttgtaaaaaaaaaaaaaaaaaaaaaaaaaa

SEQ ID NO: 5596 - DNA, 1400 bp, Homo sapiens
tgaatgagcgggtggtaattgtggctaaatatttttgttttaccaagaaactgaaataattctggccaggaataaatacttcctgaacatcttaggtcttttcaacaagaaaaagacagaggattgtccttaagtccctgctaaaacattccattgttaaaatttgcactttgaaggtaagctttctaggcctgaccctccaggtgtcaatggacttgtgctactatatttttttattcttggtatcagtttaaaattcagacaaggcccacagaataagattttccatgcatttgcaaatacgtatattctttttccatccacttgcacaatatcattaccatcactttttcatcattcctcagctactactcacattcatttaatggtttctgtaaacatttttaagacagttgggatgtcacttaacattttttttttttgagctaaagtcagggaatcaagccatgcttaatatttaacaatcacttatatgtgtgtcgaagagtttgttttgtttgtcatgtattggtacaagcagatacagtataaactcacaaacacagatttgaaaataatgcacatatggtgttcaaatttgaacctttctcatggatttttgtggtgtgggccaatatggtgtttacattatataattcctgctgtggcaagtaaagcacactttttttttctcctaaaatgtttttccctgtgtatcctattatggatactggttttgttaattatgattctttattttctctcctttttttaggatatagcagtaatgctattactgaaatgaatttcctttttctgaaatgtaatcattgatgcttgaatgatagaattttagtactgtaaacaggctttagtcattaatgtgagagacttagaaaaaatgcttagagtggactattaaatgtgcctaaatgaattttgcagtaactggtattcttgggttttcctacttaatacacagtaattcagaacttgtattctattatgagtttagcagtcttttggagtgaccagcaactttgatgtttgcactaagattttatttggaatgcaagagaggttgaaagaggattcagtagtacacatacaactaatttatttgaactatatgttgaagacatctaccagtttctccaaatgccttttttaaaactcatcacagaagattggtgaaaatgctgagtatgacacttttcttcttgcatgcatgtcagctacataaacagttttgtacaatgaaaattactaatttgtttgacattccatgttaaactacggtcatgttcagcttcattgcatgtaatgtagacctagtccatcagatcatgtgttctggagagtgttctttattcaataaagttttaatttagtataaacat

SEQ ID NO: 5597 - DNA, 1400 bp, Homo sapiens
cattgccaaaaccctggcccagctgaaccccgagtcctccctgttcatcattgcctccaagacctttactacccaggagaccatcacgaatgcagagacggcgaaggagtggtttctccaggcggccaaggatccttctgcagtggcgaagcactttgttgccctgtctactaacacaaccaaagtgaaggagtttggaattgaccctcaaaacatgttcgagttctgggattgggtgggaggacgctactcgctgtggtcggccatcggactctccattgccctgcacgtgggttttgacaacttcgagcagctgctctcgggggctcactggatggaccagcacttccgcacgacgcccctggagaagaacgcccccgtcttgctggccctgctgggtatctggtacatcaactgctttgggtgtgagacacacgccatgctgccctatgaccagtacctgcaccgctttgctgcgtacttccagcagggcgacatggagtccaatgggaaatacatcaccaaatctggaacccgtgtggaccaccagacaggccccattgtgtggggggagccagggaccaatggccagcatgctttttaccagctcatccaccaaggcaccaagatgataccctgtgacttcctcatcccggtccagacccagcaccccatacggaagggtctgcatcacaagatcctcctggccaacttcttggcccagacagaggccctgatgaggggaaaatcgacggaggaggcccgaaaggagctccaggctgcgggcaagagtccagaggaccttgagaggctgctgccacataaggtctttgaaggaaatcgcccaaccaactctattgtgttcaccaagctcacaccattcatgcttggagccttggtcgccatgtatgagcacaagatcttcgttcagggcatcatctgggacatcaacagctttgaccagtggggagtggagctgggaaagcagctggctaagaaaatagagcctgagcttgatggcagtgctcaagtgacctctcacgacgcttctaccaatgggctcatcaacttcatcaagcagcagcgcgaggccagagtccaataaactcgtgctcatctgcagcctcctctgtgactcccctttctcttctcgtccctcctccccggagccggcactgcatgttcctggacaccacccagagcaccctctggttgtgggcttggaccacgagcccttagcagggaaggctggtctcccccagcctaacccccagcccctccatgtctatgctccctctgtgttagaattggctgaagtgtttttgtgcagctgacttttctgacccatgttcacgttgttcacatcccatgtagaaaaataaagatgccacggaggaggt

SEQ ID NO: 5598 - DNA, 1400 bp, Homo sapiens
ggccctgtctgtacctaacgccctatttttgcaatggctatatggcaagaaagctggtaaactatttgtctttcaggaccttttgaagtagtttgtataacttcttaaaagttgtgattccagataaccagctgtaacacagctgagagacttttaatcagacaaagtaattcctctcactaaactttacccaaaaactaaatctctaatatggcaaaaatggctagacacccattttcacattcccatctgtcaccaattggttaatctttcctgatggtacaggaaagctcagctactgatttttgtgatttagaactgtatgtcagacatccatgtttgtaaaactacacatccctaatgtgtgccatagagtttaacacaagtcctgtgaatttcttcactgttgaaaattattttaaacaaaatagaagctgtagtagccctttctgtgtgcaccttaccaactttctgtaaactcaaaacttaacatatttactaagccacaagaaatttgatttctattcaaggtggccaaattatttgtgtaatagaaaactgaaaatctaatattaaaaatatggaacttctaatatatttttatatttagttatagtttcagatatatatcatattggtattcactaatctgggaagggaagggctactgcagctttacatgcaatttattaaaatgattgtaaaatagcttgtatagtgtaaaataagaatgatttttagatgagattgttttatcatgacatgttatatattttttgtaggggtcaaagaaatgctgatggataacctatatgatttatagtttgtacatgcattcatacaggcagcgatggtctcagaaaccaaacagtttgctctaggggaagagggagatggagactggtcctgtgtgcagtgaaggttgctgaggctctgacccagtgagattacagaggaagttatcctctgcctcccattctgaccacccttctcattccaacagtgagtctgtcagcgcaggtttagtttactcaatctccccttgcactaaagtatgtaaagtatgtaaacaggagacaggaaggtggtgcttacatccttaaaggcaccatctaatagcgggttactttcacatacagccctcccccagcagttgaatgacaacagaagcttcagaagtttggcaatagtttgcatagaggtaccagcaatatgtaaatagtgcagaatctcataggttgccaataatacactaattcctttctatcctacaacaagagtttatttccaaataaaatgaggacatgtttttgttttctttgaatgctttttgaatgttatttgttattttcagtattttggagaaattatttaataaaaaaacaatcatttgctttttg

SEQ ID NO: 5599 - DNA, 1400 bp, Homo sapiens
cgggacccagaccagacagatggcctgggcttgtcctacctttccagccatatcgccaacgtggagcgggtgcccttcgacgccgccaccctgcacacctccactgccatggccgcccagcacggcatggatgacgatggcacaggccagaaacagatctggagaatcgaaggttccaacaaggtgcccgtggaccctgccacatatggacagttctatggaggcgacagctacatcattctgtacaactaccgccatggtggccgccaggggcagataatctataactggcagggtgcccagtctacccaggatgaggtcgctgcatctgccatcctgactgctcagctggatgaggagctgggaggtacccctgtccagagccgtgtggtccaaggcaaggagcccgcccacctcatgagcctgtttggtgggaagcccatgatcatctacaagggcggcacctcccgcgagggcgggcagacagcccctgccagcacccgcctcttccaggtccgcgccaacagcgctggagccacccgggctgttgaggtattgcctaaggctggtgcactgaactccaacgatgcctttgttctgaaaaccccctcagccgcctacctgtgggtgggtacaggagccagcgaggcagagaagacgggggcccaggagctgctcagggtgctgcgggcccaacctgtgcaggtggcagaaggcagcgagccagatggcttctgggaggccctgggcgggaaggctgcctaccgcacatccccacggctgaaggacaagaagatggatgcccatcctcctcgcctctttgcctgctccaacaagattggacgttttgtgatcgaagaggttcctggtgagctcatgcaggaagacctggcaacggatgacgtcatgcttctggacacctgggaccaggtctttgtctgggttggaaaggattctcaagaagaagaaaagacagaagccttgacttctgctaagcggtacatcgagacggacccagccaatcgggatcggcggacgcccatcaccgtggtgaagcaaggctttgagcctccctcctttgtgggctggttccttggctgggatgatgattactggtctgtggaccccttggacagggccatggctgagctggctgcctgaggaggggcagggcccacccatgtcaccggtcagtgccttttggaactgtccttccctcaaagaggccttagagcgagcagagcagctctgctatgagtgtgtgtgtgtgtgtgtgttgtttcttttttttttttttacagtatccaaaaatagccctgcaaaaattcagagtccttgcaaaattgtctaaaatgtcagtgtttgggaaattaaatccaataaaaacattttgaagtgtg

SEQ ID NO: 5600 - DNA, 1400 bp, Homo sapiens
cctgaaacagatcgaaatcaacaccatctctgccagctttgggggcctggcctcccggaccccagctgtgcaccgacatgttctcagtgtcctgagtaagaccaaagaagctggcaagatcctctctaataatcccagcaagggactggccctgggaattgccaaagcctgggagctctacggctcacccaatgctctggtgctactgattgctcaagagaaggaaagaaacatatttgaccagcgtgccatagagaatgagctactggccaggaacatccatgtgatccgacgaacatttgaagatatctctgaaaaggggtctctggaccaagaccgaaggctgtttgtggatggccaggaaattgctgtggtttacttccgggatggctacatgcctcgtcagtacagtctacagaattgggaagcacgtctactgctggagaggtcacatgctgccaagtgcccagacattgccacccagctggctgggactaagaaggtgcagcaggagctaagcaggccgggcatgctggagatgttgctccctggccagcctgaggctgtggcccgcctccgcgccacctttgctggcctctactcactggatgtgggtgaagaaggggaccaggccatcgccgaggcccttgctgcccctagccggtttgtgctaaagccccagagagagggtggaggtaacaacctatatggggaggaaatggtacaggccctgaaacagctgaaggacagtgaggagagggcctcctacatcctcatggagaagatcgaacctgagccttttgagaattgcctgctacggcctggcagccctgcccgagtggtccagtgcatttcagagctgggcatctttggggtctatgtcaggcaggaaaagacactcgtgatgaacaagcacgtggggcatctacttcgaaccaaagccatcgagcatgcagatggtggtgtggcagcgggagtggcagtcctggacaacccataccctgtgtgagggcacaaccaggccacgggaccttctatcctctgtatttgtcattcctctcctagccctcctgaggggtatcctcctaaagacctccaaagtttttatggaagggtaaatactggtaccttcccccagctttccatctgaggaccagaaaagttgtgtctcccttagatgagatctagacgcccccaaatccttgagatgtgggtatagctcagggtaagctgctctgaggtaaaggtccatgaaccctgccccactcctgtcagcccctcatcagccttttcagcaggttccagtgcctgacttgggataggactgagtggtaggaggagggggagtggaggggcatagcctttccctaattctgccttaaataaaactgcattgctgt

SEQ ID NO: 5601 - DNA, 1400 bp, Homo sapiens
tattactcccaaagcaggctttgactctgattatgaccaagctcttgctgacataagagaaaatgaacagagcctcctggaatacctagagaaacagcgcaacagaattggctgtaggaccatagtctattgggggattggtaggaaccgttaccagctggaaattcctgagaatttcaccactcgcaatttgccagaagaatacgagttgaaatctaccaagaagggctgtaaacgatactggaccaaaactattgaaaagaagttggctaatctcataaatgctgaagaacggagggatgtatcattgaaggactgcatgcggcgactgttctataactttgataaaaattacaaggactggcagtctgctgtagagtgtatcgcagtgttggatgttttactgtgcctggctaactatagtcgagggggtgatggtcctatgtgtcgcccagtaattctgttgccggaagataccccccccttcttagagcttaaaggatcacgccatccttgcattacgaagactttttttggagatgattttattcctaatgacattctaataggctgtgaggaagaggagcaggaaaatggcaaagcctattgtgtgcttgttactggaccaaatatggggggcaagtctacgcttatgagacaggctggcttattagctgtaatggcccagatgggttgttacgtccctgctgaagtgtgcaggctcacaccaattgatagagtgtttactagacttggtgcctcagacagaataatgtcaggtgaaagtacattttttgttgaattaagtgaaactgccagcatactcatgcatgcaacagcacattctctggtgcttgtggatgaattaggaagaggtactgcaacatttgatgggacggcaatagcaaatgcagttgttaaagaacttgctgagactataaaatgtcgtacattattttcaactcactaccattcattagtagaagattattctcaaaatgttgctgtgcgcctaggacatatggcatgcatggtagaaaatgaatgtgaagaccccagccaggagactattacgttcctctataaattcattaagggagcttgtcctaaaagctatggctttaatgcagcaaggcttgctaatctcccagaggaagttattcaaaagggacatagaaaagcaagagaatttgagaagatgaatcagtcactacgattatttcgggaagtttgcctggctagtgaaaggtcaactgtagatgctgaagctgtccataaattgctgactttgattaaggaattatagactgactacattggaagctttgagttgacttctgaccaaaggtggtaaattcagacaacattatgatctaataaactttattttttaaaaatga

SEQ ID NO: 5602 - DNA, 600 bp, Homo sapiens
gcagtgctggttctccaacagagtggtgtctagatttatcagagtaacgagaagacaaactccggcactgggtttgctccctgattaaagtgccttcagccaagaccatctctccctcctggtgaagtgtgacttcgaattagtttgcacttcctattggaaggtagagcccactgctcattgtataagccccgaggcctagagtggcagccaagagccatctgaagccacctctctgcctgttcctcccaagaggccagggtggccaggggtggtgagggcagttctgcacccagccaaacacataacaataaaaaccaaactctgtgtcagcatctttgcccttctggtttaaacgcctccttcaaaaagcaatctggaagaaagccctgtgctttgggggagtaagaatgtgtgtgcagaattctaggcagcaccttagggagggactgggatgagagaaagtgggacctggtgggctcaaccacacacacctgtctgtgcagatgctttgcccaggcttctcaccacggtgtaccgggatattaaacctctttccccagcaaaaaaaaaaaaaaaaaaaaaaaaaaaaaaaaaaaa

SEQ ID NO: 5603 - DNA, 1400 bp, Homo sapiens
acttctcagaccctgccttcatatcaaaaaccaacaaccacatcatgaagctcaccaagggcctcataaaagatgctctggagaatatagaccctgctacccagatgatgattctcaactgcatctacttcaaaggatcctgggtgaataaattcccagtggaaatgacacacaaccacaacttccggctgaatgagagagaggtagttaaggtttccatgatgcagaccaaggggaacttcctcgcagcaaatgaccaggagctggactgcgacatcctccagctggaatacgtggggggcatcagcatgctaattgtggtcccacacaagatgtctgggatgaagaccctcgaagcgcaactgacaccccgggtggtggagagatggcaaaaaagcatgacaaacagaactcgagaagtgcttctgccgaaattcaagctggagaagaactacaatctagtggagtccctgaagttgatggggatcaggatgctgtttgacaaaaatggcaacatggcaggcatctcagaccaaaggatcgccatcgacctgttcaagcaccaaggcacgatcacagtgaacgaggaaggcacccaagccaccactgtgaccacggtggggttcatgccgctgtccacccaagtccgcttcactgtcgaccgcccctttcttttcctcatctacgagcaccgcaccagctgcctgctcttcatgggaagagtggccaaccccagcaggtcctagaggtggaggtctaggtgtctgaagtgccttgggggcaccctcattttgtttccattccaacaacgagaacagagatgttctggcatcatttacgtagtttacgctaccaatctgaattcgaggcccatatgagaggagcttagaaacgaccaagaagagaggcttgttggaatcaattctgcacaatagcccatgctgtaagctcatagaagtcactgtaactgtagtgtgtctgctgttacctagagggtctcacctccccactcttcacagcaaacctgagcagcgcgtcctaagcacctcccgctccggtgaccccatccttgcacacctgactctgtcactcaagcctttctccaccaggcccctcatctgaataccaagcacagaaatgagtggtgtgactaattccttacctctcccaaggagggtacacaactagcaccattcttgatgtccagggaagaagccacctcaagacatatgaggggtgccctgggctaatgttagggcttaattttctcaaagcctgacctttcaaatccatgatgaatgccatcagtccctcctgctgttgcctccctgtgacctggaggacagtgtgtgccatgtctcccatactagagataaataaatgtagccacatttactgtg

SEQ ID NO: 5604 - DNA, 600 bp, Homo sapiens
gggatgaagaagtgatgtgtttaaatggaaactggacggaaccacctcaatgcaaagattctacaggaaaatgtgggccccctccacctattgacaatggggacattacttcattcccgttgtcagtatatgctccagcttcatcagttgagtaccaatgccagaacttgtatcaacttgagggtaacaagcgaataacatgtagaaatggacaatggtcagaaccaccaaaatgcttacatccgtgtgtaatatcccgagaaattatggaaaattataacatagcattaaggtggacagccaaacagaagctttattcgagaacaggtgaatcagttgaatttgtgtgtaaacggggatatcgtctttcatcacgttctcacacattgcgaacaacatgttgggatgggaaactggagtatccaacttgtgcaaaaagatagaatcaatcataaagtgcacacctttattcagaactttagtattaaatcagttctcaatttcattttttatgtattgttttactcctttttattcatacgtaaaattttggattaatttgtgaaaatgtaattataagctgagaccggtggctctctt

SEQ ID NO: 5605 - DNA, 600 bp, Homo sapiens
tattgtagggtacagaatagagcgtgtgctgttgataatatctctcacccggatccctcctcacttgccctgccactttgcatggtttgattttgacctggtcccccacgtgtgaagtgtagtggcatccatttctaatgtatgcattcatccaacagagttatttattggctggagatggaaaatcacaccacctgacaggccttctgggcctccaaagcccatccttggggttccccctccctgtgtgaaatgtattatcaccagcagacactgccgggcctccctcccgggggcactgcctgaaggcgagtgtgggcatagcattagctgcttcctcccctcctggcacccactgtggcctggcatcgcatcgtggtgtgtcaatgccacaaaatcgtgtgtccgtggaaccagtcctagccgcgtgtgacagtcttgcattctgtttgtctcgtggggggaggtggacagtcctgcggaaatgtgtcttgtcttccatttggataaaaggaaccaaccaacaaacaatgccatcactggaatttcccaccgctttgtgagccgtgtcgtatgacctagtaaactttgtaccaattc

SEQ ID NO: 5606 - DNA, 1400 bp, Homo sapiens
tttccaagcggagccatgtctggtaacggcaatgcggctgcaacggcggaagaaaacagcccaaagatgagagtgattcgcgtgggtacccgcaagagccagcttgctcgcatacagacggacagtgtggtggcaacattgaaagcctcgtaccctggcctgcagtttgaaatcattgctatgtccaccacaggggacaagattcttgatactgcactctctaagattggagagaaaagcctgtttaccaaggagcttgaacatgccctggagaagaatgaagtggacctggttgttcactccttgaaggacctgcccactgtgcttcctcctggcttcaccatcggagccatctgcaagcgggaaaaccctcatgatgctgttgtctttcacccaaaatttgttgggaagaccctagaaaccctgccagagaagagtgtggtgggaaccagctccctgcgaagagcagcccagctgcagagaaagttcccgcatctggagttcaggagtattcggggaaacctcaacacccggcttcggaagctggacgagcagcaggagttcagtgccatcatcctggcaacagctggcctgcagcgcatgggctggcacaaccgggtggggcagatcctgcaccctgaggaatgcatgtatgctgtgggccagggggccttgggcgtggaagtgcgagccaaggaccaggacatcttggatctggtgggtgtgctgcacgatcccgagactctgcttcgctgcatcgctgaaagggccttcctgaggcacctggaaggaggctgcagtgtgccagtagccgtgcatacagctatgaaggatgggcaactgtacctgactggaggagtctggagtctagacggctcagatagcatacaagagaccatgcaggctaccatccatgtccctgcccagcatgaagatggccctgaggatgacccacagttggtaggcatcactgctcgtaacattccacgagggccccagttggctgcccagaacttgggcatcagcctggccaacttgttgctgagcaaaggagccaaaaacatcctggatgttgcacggcagcttaacgatgcccattaactggtttgtggggcacagatgcctgggttgctgctgtccagtgcctacatcccgggcctcagtgccccattctcactgctatctggggagtgattaccccgggagactgaactgcagggttcaagccttccagggatttgcctcaccttggggccttgatgactgccttgcctcctcagtatgtgggggcttcatctctttagagaagtccaagcaacagcctttgaatgtaaccaatcctactaataaaccagttctgaaggtaaaaaaaaaaaaaaaaaaaaaaaaaaaaaaaaaaa

SEQ ID NO: 5607 - DNA, 600 bp, Homo sapiens
agcctttgagcgacctttgggcaggtttctgcttcttctgttttgcccatggtcaagtccctgttccccaggcaggtttcagctgattggcagcaggctccctgagtgatgagcttgaacctgtggtgtttctgggcagaagcttatcttttttgagagtgtccgaagatgaaggcatggcgatgcccgtcctctggcttgggttaattcttcggtgacactggcattgctgggtggtgatgcccgtcctctggcttgggttaattcttcggtgacactggcgttgctgggtggcaatgcccgtcctctggcttgggttaattcttcggtgacactggcgttgctgggtggcgatgcccgtcctctggcttgggttaattcttggatgacgtcggcgttgctgggagaatgtgccgttcctgccctgcctccacccacctcgggagcagaagcccggcctggacacccctcggcctggacacccctcgaaggagagggcgcttccttgagtaggtgggctccccttgcccttccctccctatcactccatactggggtgggctggaggaggccacaggccagctattgtaaaagcttttt

SEQ ID NO: 5608 - DNA, 600 bp, Homo sapiens
ctgggccggcccgtcttccccacggcagagcagttccggcgcatgcgcgcggctgaggacccggtggccgcggcgccccgccccttacccgccggcggccgcctgaccctgcgccccgcgctgcggctgccgtcgcttttgctggtgcacgtgtgtgcgcgccccgagaagccgcccgggcaggtcacgcggctccgcgccctgcccctgacccaagggcagctggttctggtctggtcggatgaacacgtgggctccaagtgcctgtggacatacgagatccagttctctcaggacggtaaggcgtacaccccggtcagcaggaagccatcgaccttcaacctctttgtgttcagcccagacacaggtgctgtctctggctcctaccgagttcgagccctggactactgggcccgaccaggccccttctcggaccctgtgccgtacctggaggtccctgtgccaagagggcccccatccccgggcaatccatgagcctgtgctgagccccagtgggttgcacctccaccggcagtcagcgagctggggctgcactgtgcccatgctgccctcccatcaccccctttgcaatatattttt

SEQ ID NO: 5609 - DNA, 1400 bp, Homo sapiens
gtgcattgccgaggattagagaccagtttggctgaatgtacttttactaagagaagaactatgggttaccaggatttcgctgatgtggtttgttatacacagaaagcagattctccaatggatgacttctttcagtgtgtgaatgggaaatacatttctcagatgaaagcctgtgatggtatcaatgattgtggagaccaaagtgatgaactgtgttgtaaagcatgccaaggcaaaggcttccattgcaaatcgggtgtttgcattccaagccagtatcaatgcaatggtgaggtggactgcattacaggggaagatgaagttggctgtgcaggctttgcatctgtggctcaagaagaaacagaaattttgactgctgacatggatgcagaaagaagacggataaaatcattattacctaaactatcttgtggagttaaaaacagaatgcacattcgaaggaaacgaattgtgggaggaaagcgagcacaactgggagacctcccatggcaggtggcaattaaggatgccagtggaatcacctgtgggggaatttatattggtggctgttggattctgactgctgcacattgtctcagagccagtaaaactcatcgttaccaaatatggacaacagtagtagactggatacaccccgaccttaaacgtatagtaattgaatacgtggatagaattattttccatgaaaactacaatgcaggcacttaccaaaatgacatcgctttgattgaaatgaaaaaagacggaaacaaaaaagattgtgagctgcctcgttccatccctgcctgtgtcccctggtctccttacctattccaacctaatgatacatgcatcgtttctggctggggacgagaaaaagataacgaaagagtcttttcacttcagtggggtgaagttaaactaataagcaactgctctaagttttacggaaatcgtttctatgaaaaagaaatggaatgtgcaggtacatatgatggttccatcgatgcctgtaaaggggactctggaggccccttagtctgtatggatgccaacaatgtgacttatgtctggggtgttgtgagttggggggaaaactgtggaaaaccagagttcccaggtttttacaccaaagtggccaattattttgactggattagctaccatgtaggaaggccttttatttctcagtacaatgtataaaattgtgatctctctcttcattctattctttttctctcaagagttccatttaatggaaataaaacggtataattaataattctctaggggggaaaaatgaagcaaatctcattggatatttttaaaggtctccacagagtttatgccatattggaattttgttgtataattctcaaataaatattttggtgaagcat

SEQ ID NO: 5610 - DNA, 600 bp, Homo sapiens
cacagtttgtagtgccactgttgttttggggggggctttttttctttttccggaaaatccttaaaccttaagatactaaggacgttgttttggttgtacttggaattcttagtcacaaaatatattttgtttacaaaaatttctgtaaaacaggttataacagtgtttaaagtctcagtttcttgcttggggaacttgtgtccctaatgtgttagattgctagattgctaaggagctgatacttgacagttttttagacctgtgttactaaaaaaaagatgaatgtcggaaaagggtgttgggagggtggtcaacaaagaaacaaagatgttatggtgtttagacttatggttgttaaaaatgtcatctcaagtcaagtcactggtctgtttgcatttgatacatttttgtactaactagcattgtaaaattatttcatgattagaaattacctgtggatatttgtataaaagtgtgaaataaattttttataaaagtgttcattgtttcgtaacacagcattgtatatgtgaagcaaactctaaaattataaatgacaacctgaattatctatttcatcaaaaaaaaaaaaaaaaaaaa

SEQ ID NO: 5611 - DNA, 1400 bp, Homo sapiens
gagctcatcaaaaatattgtcatcaaatacaggtggttaatctgacatacattgcagttacatgcattatttttatttacaacatttgctccttaatgatgaatttatctgtgttaccctgtttttctacctggaactccatagaatgatgtttgcaaaccaacatgtgctcttttcagtcattcactgttttaatatgacatggtagagaagataaggtttatggcaggtaattttttgtaatgtgtattaaacgaagttcaaagattagaaatacatctgtgtcctgaaaaccttagatacatagccgactgtatacagaggttcatctcaacctcaacactattgacttttggggctggatagttctctgttgtgggggtttgtcttgtgcactgtaggtttttagtagcatccacactttctcctcaccagatgccagttgcaccctcccccaagttgagacaaccaaaaatgtctccagatattgccagctaccccttgagggatggtacctctggttgagaaccattgctagagaatgatctttactgaatttgccctttataagaaacccagtgaatttctagagcaagtcccaaaaactaagggacagctaagaagttattatggttgacttcaaaggcctaaactgtgttttttatgtccactaaacaacttgattaaaagacggaattttgactcgtgtctgtatcatacaagtacaaatactaattttgccctatgtatccgtaaatgtcatttgtgattttgacttatttatttaatgccctttcttatgccgtgggttttcaagtttactcatttctatggttgcaaataactctaaaacttattatataaactttcatattataggcagaacacaatggctaaatatctgttgcatgtactttaaagtttattataaaatataaacagatatataaagatgttgactcttacctgtgattttgcatggtcagactcggtgtcaggtacggagaggattctcatgactgtcttacctctactgaatattctagtgagttatatgatttacggagtgattaacagaggtctatataaagttacttttcccctttacttaattatattgtagtgtgcagataacaaaactgctaccttctcatccaagtggtctgtagaattcatgtcccttacagtggtcatttaaagtcaatatttatttatgtatgtaataaaaaaagttggatttttgtgtatgtctgtcacattatttagagagaagtaatcttgtaaaaatgttttgtaaaaaacaaaaaagtattgtaaatagtcttgatattctgtgactcattattttcatgttagagtttgtacatactggttcaataataaagtatccttaaaccaga

SEQ ID NO: 5612 - DNA, 600 bp, Homo sapiens
gcccgccaccacgcccggctaattttttgtatttttagtagagacagggtttcaccgtgttagccaggatggtctcgatctcctgaccttgtgatccacccacctcggcctcccaaagtgctgggattacaggcgtgagccactgcgcccggccacattcagttcttatcaaagaaataacccagacttaatcttgaatgatacgattatgcccaatattaagtaaaaaatataagaaaaggttatcttaaatagatcttaggcaaaataccagctgatgaaggcatctgatgccttcatctgttcagtcatctccaaaaacagtaaaaataaccactttttgttgggcaatatgaaatttttaaaggagtagaataccaaatgatagaaacagactgcctgaattgagaattttgatttcttaaagtgtgtttctttctaaattgctgttccttaatttgattaatttaattcatgtattatgattaaatctgaggcagatgagcttacaagtattgaaataattactaattaatcacaaatgtgaagttatgcatgatgtaaaaaatacaaacattctaattaaaggctttgcaacac

SEQ ID NO: 5613 - DNA, 600 bp, Homo sapiens
gcttctcactcatcactaacaaggtcatcatggattatgaaagcctggagaaggccaaccatgaagaagtcttagcagctggcaaacaagctgcacagaaattggaacagtttgtctccattcttatggccagcattccactccctgacaaagccagttgacctgccttggagtcgtctggcatctcccacacaagacccaagtagctgctaccttctttggccccttgctggagtcatgtgcctctgtccttaggttgtagcagaaaggaaaagattcctgtccttcacctttcccactttcttctaccagacccttctggtgccagatcctcttctcaaagctgggattacaggtgtgagcatagtgagaccttggcgctacaaaataaagctgttctcattcctgttctttcttacacaagagctggagcccgtgccctaccacacatctgtggagatgcccaggatttgactcgggccttagaactttgcatagcagctgctactagctctttgagataatacattccgaggggctcagttctgccttatctaaatcaccagagaccaaacaaggactaatccaatacctcttgga

SEQ ID NO: 5614 - DNA, 1400 bp, Homo sapiens
tttattgacgctctgaagaaagcccgacttatagccagtaatgtcaccgaaaccatgggcattaacggcagtgcctaccgagtatttccttacagtgtgttttatgtcttctacgaacagtacctgaccatcattgacgacactatcttcaacctcggtgtgtccctgggcgcgatatttctggtgaccatggtcctcctgggctgtgagctctggtctgcagtcatcatgtgtgccaccatcgccatggtcttggtcaacatgtttggagttatgtggctctggggcatcagtctgaacgctgtatccttggtcaacctggtgatgagctgtggcatctccgtggagttctgcagccacataaccagagcgttcacggtgagcatgaaaggcagccgcgtggagcgcgcggaagaggcacttgcccacatgggcagctccgtgttcagtggaatcacacttacaaaatttggagggattgtggtgttggcttttgccaaatctcaaattttccagatattctacttcaggatgtatttggccatggtcttactgggagccactcacggattaatatttctccctgtcttactcagttacatagggccatcagtaaataaagccaaaagttgtgccactgaagagcgatacaaaggaacagagcgcgaacggcttctaaatttctagccctctcgcagggcatcctgactgaactgtgtctaagggtcggtcggtttaccactggacgggtgctgcatcggcaaggccaagttgaacaccggatggtgccaaccatcggttgtttggcagcagctttgaacgtagcgcctgtgaactcaggaatgcacagttgacttgggaagcagtattactagatctggaggcaaccacaggacactaaacttctcccagcctcttcaggaaagaaacctcattctttggcaagcaggaggtgacactagatggctgtgaatgtgatccgctcactgacactctgtaaaggccaatcaatgcactgtctgtcctctcctttttaggagtaagccatcccacaagttctataccatatttttagtgacagttgaggttgtagatacactttataacattttatagtttaaagagctttattaatgcaataaattaactttgtacacatttttatataaaaaaacagcaagtgatttcagaatgttgtaggcctcattagagcttggtctccaaaaatctgtttgaaaaaagcaacatgttcttcacagtgttcccctagaaaggaagagatttaattgccagttagatgtggcatgaaatgagggacaaagaaagcatctcgtaggtgtgtctactgggttttaacttatttttctttaataaaatacattgttttcctaaaaaaaaaa

SEQ ID NO: 5615 - DNA, 1400 bp, Homo sapiens
gttccacagacccaaccagttacgatggttttggaccatttatgccgggattcgacatcattccctataatgatctgcccgcactggagcgtgctcttcaggatccaaatgtggctgcgttcatggtagaaccaattcagggtgaagcaggcgttgttgttccggatccaggttacctaatgggagtgcgagagctctgcaccaggcaccaggttctctttattgctgatgaaatacagacaggattggccagaactggtagatggctggctgttgattatgaaaatgtcagacctgatatagtcctccttggaaaggccctttctgggggcttataccctgtgtctgcagtgctgtgtgatgatgacatcatgctgaccattaagccaggggagcatgggtccacatacggtggcaatccactaggctgccgagtggccatcgcagcccttgaggttttagaagaagaaaaccttgctgaaaatgcagacaaattgggcattatcttgagaaatgaactcatgaagctaccttctgatgttgtaactgccgtaagaggaaaaggattattaaacgctattgtcattaaagaaaccaaagattgggatgcttggaaggtgtgtctacgacttcgagataatggacttctggccaagccaacccatggcgacattatcaggtttgcgcctccgctggtgatcaaggaggatgagcttcgagagtccattgaaattattaacaagaccatcttgtctttctgagggtagccagctgttttcagtggtccctgggagccagctggagacaggtggtcctgtaaaagctttattcctaatgtgggcacattccactcccatgagtcttcaaaaactttttttttgaatatatttttttcagttgatacataatagaacaacgtttatgaacctgccgtttgctttgtaacgtaactaaataatgtaatggcatctatattcagttgaagtgttttgatgtgcatgtgtacttcctaaggtgaaatgcatctatatacagacagcctctaaatcaagtccttcagtataattgatatatgtttttataatttcctcactggtataagtgtttcatatttgaaaaagttatctctgggtattgcataaaaggcttcatcttataaagtgaaatcattgttattgaattttaggaaggattaatggttaagtgtatataaaatactaatattaagtaaacttcatattggccaacaccagggttgtattctatggatgtcattattttgaattaagaattagtgtttaacattcctaaattgttttgagtgcttgattataatttgtaaaaaatgtttattttcaatacttctttaaatttaaaataaagcttatatttcaaatgtc

SEQ ID NO: 5616 - DNA, 1400 bp, Homo sapiens
gcagggaggcctcctttgacggcatcagcaagttcgaagtcaacaataccattcttcacccagagatcgttgagagccgagtgtttaagacggatatggagctggaggttctgcgctataccaataaaatctccagcgaggcccaccgtgaggtaatgaaggctgtaaaagtgggaatgaaagaatatgggttggaaagcctcttcgagcactactgctactcccggggcggcatgcgccacagctcctacacctgcatctgcggcagtggtgagaactcagccgtgctacactacggacacgccggagctcccaacgaccgaacgatccagaatggggatatgtgcctgttcgacatgggcggtgagtattactctgtcgcttccgacatcacctgctcctttccccgcaacggcaagttcactgcagaccagaaggccgtctatgaggcagtgctgctgagctcccgtgccgtcatgggtgccatgaagccaggtgactggtggcctgacatcgaccgcctggctgaccgcatccacctggaggagctggcccacatgggcatcctgagcggcagcgtggacgccatggtccaggctcacctgggggccgtgtttatgcctcacgggcttggccacttcctgggcattgacgtgcacgacgtgggaggctacccagagggcgtggagcgcatcgacgagcccggcctgcggagcctgcgcactgcacggcacctgcagccaggcatggtgctcaccgtggagccgggcatctacttcatcgaccacctcctggatgaggccctggcggacccggcccgcgcctccttccttaaccgcgaggtcctgcagcgctttcgcggttttggcggggtccgcatcgaggaggacgtcgtggtgatcgacagcggcatagagctgctgacctgcgtgccccgcactgtggaagagattgaagcatgcatggcaggctgtgacaaggcctttacccccttctctggccccaagtagagccagccagaaatcccagcgcacctgggggcctggccttgcaacctcttttcgtgatgggcagcctgctggtcagcactccagtagcgagagacggcacccagaatcagatcccagcttcggcatttgatcagaccaaacagtgctgtttcccggggaggaaacacttttttaattacccttttgcaggcaccacctttaatctgttttataccttgcttattaaatgagcgacttaaaatgattgaaaataatgctgtcctttagtagcaagtaaaatgtgtcttgctgtcatttatattccttttcccaggaaagaagcatttctgatactttctgtcaaaaatcaatatgcagaatggcatttgcaataaaaggtttcctaaaatg

SEQ ID NO: 5617 - DNA, 1400 bp, Homo sapiens
gatagaggaagctggctggagctatgttgggggctggactggccaaggtggctctaaacttgggactaaaaggactctacccaagaagagctttgaacagatcagtgccaatataactaagtttaacattcagggccttgtcatcattgggggctttgaggcttacacagggggcctggaactgatggagggcaggaagcagtttgatgagctctgcatcccatttgtggtcattcctgctacagtctccaacaatgtccctggctcagacttcagcgttggggctgacacagcactcaatactatctgcacaacctgtgaccgcatcaagcagtcagcagctggcaccaagcgtcgggtgtttatcattgagactatgggtggctactgtggctacctggctaccatggctggactggcagctggggccgatgctgcctacatttttgaggagcccttcaccattcgagacctgcaggcaaatgttgaacatctggtgcaaaagatgaaaacaactgtgaaaaggggcttggtgttaaggaatgaaaagtgcaatgagaactataccactgacttcattttcaacctgtactctgaggaggggaagggcatcttcgacagcaggaagaatgtgcttggtcacatgcagcagggtgggagcccaaccccatttgataggaattttgccactaagatgggcgccaaggctatgaactggatgtctgggaaaatcaaagagagttaccgtaatgggcggatctttgccaatactccagattcgggctgtgttctggggatgcgtaagagggctctggtcttccaaccagtggctgagctgaaggaccagacagattttgagcatcgaatccccaaggaacagtggtggctgaaactgaggcccatcctcaaaatcctagccaagtacgagattgacttggacacttcagaccatgcccacctggagcacatcacccggaagcggtccggggaagctgccgtctaaacctctctggagtgaggggaatagattacctgatcatggtcagctcacaccctaataagtccacatcttctcagtgttttagctgtttttttcattaggtttccttttattctgtaccttgcagccatgaccagttctggccaggagctggaggagcaggcagtgggtgggagctccttttaggtagaatttaacatgacttctgccccagctttatctgtcacacaaggctgggcacctctagtgctactgctagatatcacttactcagttagaattttcctaaaaataagctttatttatttctttgtgataacaaagagtcttggttcctctactacttttactacagtgacaaattgtaactacactaataaatgccaactggtcactgtga

SEQ ID NO: 5618 - DNA, 1400 bp, Homo sapiens
aaggactgtgtaggcccagaagtggagaaagcctgtgccaacccagctgctgggtctgtcatcctgctggagaacctccgctttcatgtggaggaagaagggaagggaaaagatgcttctgggaacaaggttaaagccgagccagccaaaatagaagctttccgagcttcactttccaagctaggggatgtctatgtcaatgatgcttttggcactgctcacagagcccacagctccatggtaggagtcaatctgccacagaaggctggtgggtttttgatgaagaaggagctgaactactttgcaaaggccttggagagcccagagcgacccttcctggccatcctgggcggagctaaagttgcagacaagatccagctcatcaataatatgctggacaaagtcaatgagatgattattggtggtggaatggcttttaccttccttaaggtgctcaacaacatggagattggcacttctctgtttgatgaagagggagccaagattgtcaaagacctaatgtccaaagctgagaagaatggtgtgaagattaccttgcctgttgactttgtcactgctgacaagtttgatgagaatgccaagactggccaagccactgtggcttctggcatacctgctggctggatgggcttggactgtggtcctgaaagcagcaagaagtatgctgaggctgtcactcgggctaagcagattgtgtggaatggtcctgtgggggtatttgaatgggaagcttttgcccggggaaccaaagctctcatggatgaggtggtgaaagccacttctaggggctgcatcaccatcataggtggtggagacactgccacttgctgtgccaaatggaacacggaggataaagtcagccatgtgagcactgggggtggtgccagtttggagctcctggaaggtaaagtccttcctggggtggatgctctcagcaatatttagtactttcctgccttttagttcctgtgcacagcccctaagtcaacttagcattttctgcatctccacttggcattagctaaaaccttccatgtcaagattcagctagtggccaagagatgcagtgccaggaacccttaaacagttgcacagcatctcagctcatcttcactgcaccctggatttgcatacattcttcaagatcccatttgaattttttagtgactaaaccattgtgcattctagagtgcatatatttatattttgcctgttaaaaagaaagtgagcagtgttagcttagttctcttttgatgtaggttattatgattagctttgtcactgtttcactactcagcatggaaacaagatgaaattccatttgtaggtagtgagacaaaattgatgatccattaagtaaacaataaaagtgtccattg

SEQ ID NO: 5619 - DNA, 600 bp, Homo sapiens
gaagcgtttaggcatgtttaacatccagcactgtaagaagctgtccagctgggtactgctaatgaaatacctgggcaatgccaccgccatcttcttcctacctgatgaggggaaactacagcacctggaaaatgaactcacccacgatatcatcaccaagttcctggaaaatgaagacagaaggtctgccagcttacatttacccaaactgtccattactggaacctatgatctgaagagcgtcctgggtcaactgggcatcactaaggtcttcagcaatggggctgacctctccggggtcacagaggaggcacccctgaagctctccaaggccgtgcataaggctgtgctgaccatcgacgagaaggggactgaagctgctggggccatgtttttagaggccataccaatgtctatccccccagaggtcaagttcaacaaaccctttgtcttcttaatgattgaacaaaataccaagtctcccctcttcatgggaaaagtggtgaatcccacccaaaaataactgcctctcgctcctcaacccctcccctccatccctggccccctccctggatgacattaaagaagggttgagctgga

SEQ ID NO: 5620 - DNA, 1400 bp, Homo sapiens
ccacccagcgctggctccgatgcctcgcacccctccacctcctccagccagctggatgggctgagcgtgagcctgggccggctggggacaaggtgtgagcctgagccctcccgcctccaagccgtgttcgaggccctgctcacccagtttgaccgactcaaccaggccacagaggacgtctaccagctggagcagcagctgcacagcctgcaaggccgcaggagcagccgggcgcccgccggatcttcccgtggcccatccccgggcctgcggccagcactgcccagccgccttgcccgggccagtcggggtgtggacctggccactggccccagcaggacaccccttcgggccaagaacaaggtccaccccagcagcacttagtcctccttcctggcgggggtgggccgtggagtcggagtggacaccgctcagtattactttctgccgctgtcaaggccgagggccaggcagaatggctgcacgtaggttccccagagagcaggcaggggcatctgtctgtctgtgggcttcagcactttaaagaggctgtgtggccaaccaggacccagggtcccctccccagctcccttgggaaggacacagcagtattggacggtttctagcctctgagatgctaatttatttccccgagtcctcaggtacagcgggctgtgcccggccccaccccctgggcagatgtcccccactgctaaggctgctggcttcagggagggttagcctgcaccgccgccaccctgcccctaagttattacctctccagttcctaccgtactccctgcaccgtctcactgtgtgtctcgtgtcagtaatttatatggtgttaaaatgtgtatatttttgtatgtcactattttcactagggctgaggggcctgcgcccagagctggcctcccccaacacctgctgcgcttggtaggtgtggtggcgttatggcagcccggctgctgcttggatgcgagcttggccttgggccggtgctgggggcacagctgtctgccaggcactctcatcaccccagaggccttgtcatcctcccttgccccaggccaggtagcaagagagcagcgcccaggcctgctggcatcaggtctgggcaagtagcaggactaggcatgtcagaggaccccagggtggttagaggaaaagactcctcctgggggctggctcccagggtggaggaaggtgactgtgtgtgtgtgtgtgtgcgcgcgcgacgcgcgagtgtgctgtatggcccaggcagcctcaaggccctcggagctggctgtgcctgcttctgtgtaccacttctgtgggcatggccgcttctagagcctcgacacccccccaacccccgcaccaagcagacaaagtcaataaaagagctgtctgactgc

SEQ ID NO: 5621 - DNA, 997 bp, Homo sapiens; identical to SEQ ID NO: 386

SEQ ID NO: 5622 - DNA, 1400 bp, Homo sapiens
aggaatccagatgccgataaaggcccctggtgttttaccacagaccccagcgtcaggtgggagtactgcaacctgaaaaaatgctcaggaacagaagcgagtgttgtagcacctccgcctgttgtcctgcttccagatgtagagactccttccgaagaagactgtatgtttgggaatgggaaaggataccgaggcaagagggcgaccactgttactgggacgccatgccaggactgggctgcccaggagccccatagacacagcattttcactccagagacaaatccacgggcgggtctggaaaaaaattactgccgtaaccctgatggtgatgtaggtggtccctggtgctacacgacaaatccaagaaaactttacgactactgtgatgtccctcagtgtgcggccccttcatttgattgtgggaagcctcaagtggagccgaagaaatgtcctggaagggttgtgggggggtgtgtggcccacccacattcctggccctggcaagtcagtcttagaacaaggtttggaatgcacttctgtggaggcaccttgatatccccagagtgggtgttgactgctgcccactgcttggagaagtccccaaggccttcatcctacaaggtcatcctgggtgcacaccaagaagtgaatctcgaaccgcatgttcaggaaatagaagtgtctaggctgttcttggagcccacacgaaaagatattgccttgctaaagctaagcagtcctgccgtcatcactgacaaagtaatcccagcttgtctgccatccccaaattatgtggtcgctgaccggaccgaatgtttcatcactggctggggagaaacccaaggtacttttggagctggccttctcaaggaagcccagctccctgtgattgagaataaagtgtgcaatcgctatgagtttctgaatggaagagtccaatccaccgaactctgtgctgggcatttggccggaggcactgacagttgccagggtgacagtggaggtcctctggtttgcttcgagaaggacaaatacattttacaaggagtcacttcttggggtcttggctgtgcacgccccaataagcctggtgtctatgttcgtgtttcaaggtttgttacttggattgagggagtgatgagaaataattaattggacgggagacagagtgacgcactgactcacctagaggctgggacgtgggtagggatttagcatgctggaaataactggcagtaatcaaacgaagacactgtccccagctaccagctacgccaaacctcggcattttttgtgttattttctgactgctggattctgtagtaaggtgacatagctatgacatttgttaaaaataaactctgtacttaactttgatttgagtaaattttggtttt

SEQ ID NO: 5623 - DNA, 600 bp, Homo sapiens
accaatcaaagagattcaaagagattcctgcaggccagaggccggaacacacctttatggctggggctctccgtggtgttctggacccagcccctggagacaccattcacttttactgctttgtagtgactcgtgctctccaacctgtcttcctgaaaaaccaaggcccccttcccccacctcttccatggggtgagacttgagcagaacaggggcttccccaagttgcccagaaagactgtctgggtgagaagccatggccagagcttctcccaggcacaggtgttgcaccagggacttctgcttcaagttttggggtaaagacacctggatcagactccaagggctgccctgagtctgggacttctgcctccatggctggtcatgagagcaaaccgtagtcccctggagacagccactccagagaacctcttgggagacagaagaggcatctgtgcacagctcgatcttctacttgcctgtggggaggggagtgacaggtccacacaccacactgggtcaccctgtcctggatgcctctgaagagagggacagaccgtcagaaactggagagtttctattaaaggtcatttaaaccac

SEQ ID NO: 5624 - DNA, 1400 bp, Homo sapiens
catcttcagcattctgtctctgttcctgttcttctgccaactcttcaccctcaccaaggggggcaggttttacatcactggaatcttccaaattcttgctggtctgtgcgtgatgagtgctgcggccatctacacggtgaggcacccggagtggcatctcaactcggattactcctacggtttcgcctacatcctggcctgggtggccttccccctggcccttctcagcggtgtcatctatgtgatcttgcggaaacgcgaatgaggcgcccagacggtctgtctgaggctctgagcgtacatagggaagggaggaagggaaaccagaaagcagacaaagaaaaaagagctagcccaaaatcccaaactcaaaccaaaccaaacagaaagcagtggaggtgggggttgctgttgattgaagatgtatataatatctccggtttataaaacctatttataacactttttacatatatgtacatagtattgtttgctttttatgttgaccatcagcctcgtgttgagccttaaagaagtagctaaggaactttacatggtaacagtataatccagctcagtatttttgttttgttttttgtttgtttgttttgttttacccagaaataagataactccatgtcgccccttccctttcatctgaaagaagatacctccctcccagtccacctcatttagaaaaccaaagtgtgggtagaaaccccaaatgtccaaaagcccttttctggtgggtgacccagtgcatccaacagaaacagccgctgcccgaacctgtgtgaagctttacgcgcacacggacaaaatgcccaaactggagcccttgcaaaaacacggcttgtggcattggcatacttgcccttacaggtggagtatcttcgtcacacatctaaatgagaaatcagtgacaacaagtctttgaaatggtgctatggatttaccattccttattatcactaatcatctaaacaactcactggaaatccaattaacaattttacaacataagatagaatggagacctgaataattctgtgtaatataaatggtttataactgcttttgtacctagctaggctgctattattactataatgagtaaatcataaagccttcatcactcccacattttccttacggtcggagcatcagaacaagcgtctagactccttgggaccgtgagttcctagagcttggctgggtctaggctgttctgtgcctccaaggactgtctggcaatgacttgtattggccaccaactgtagatgtatatatggtgcccttctgatgctaagactccagaccttttgtttttgctttgcattttctgattttataccaactgtgtggactaagatgcattaaaataaacatcagagtaactc

SEQ ID NO: 5625 - DNA, 600 bp, Homo sapiens
aatttcatgggggatgagtggtttgtggattccctcaaccagaagatggaggtgcagcgccggccctggttagtgaagtacggggacagcggggagcagattgccggcttcgtgaaggagttctcccacatcgcctttctcacgatcaagggcgccggccacatggttcccaccgacaagcccctcgctgccttcaccatgttctcccgcttcctgaacaagcagccatactgatgaccacagcaaccagctccacggcctgatgcagcccctcccagcctctcccgctaggagagtcctcttctaagcaaagtgcccctgcaggcgggttctgccgccaggactgcccccttcccagagccctgtacatcccagactgggcccagggtctcccatagacagcctgggggcaagttagcactttattcccgcagcagttcctgaatggggtggcctggccccttctctgcttaaagaatgccctttatgatgcactgattccatcccaggaacccaacagagctcaggacagcccacagggaggtggtggacggactgtaattgatagattgattatggaattaaattgggtacagcttc

SEQ ID NO: 5626 - DNA, 600 bp, Homo sapiens
ttcttcctattccattctcgaccaacctgccctttcttaatatgactagtggtcttgatgctagagtcaacttactctgttgctggctttagcagagaataggaggaaccatatgaaaaagatcaggctttctgacttccatccccaaaacacatttaccagcatactccaaactgtttctgatgtgttccatgagaaaaggattgtttgctcaaaaagcttggaaaatactacacactccctttctccttctggagatcaacccacattagagtgtctaaggactcctgagaattcctgttacagtaaacaaaactaacgtaatctaccatttcctacactatttgagcatggaaatcatagtccccactctatgaaaacttaacgctttttggaagacatttctgtagcatgtcagtttggagaaatgatgagctacgccttgatgaaagaaccgtgttggtgctgctaagtttagccattatggtttttcctttctctctcttaagccttattcttcaactaaaagatgaggattaagagcaagaagttgggggggatgtgaaaataattttatgaggttgtctaaaatctcgtgcc

SEQ ID NO: 5627 - DNA, 600 bp, Homo sapiens
ttctgtctcataattgtcaaaaaccagaattaggtcaagttcatagtttctgtaattggcttttgaatcaaagaatagggagacaatctaaaaaatatcttaggttggagatgacagaaatatgattgatttgaagtggaaaaagaaattctgttaatgttaattaaagtaaaattattccctgaattgtttgatattgtcacctagcagatatgtattacttttctgcaatgttattattggcttgcactttgtgagtatctatgtaaaaatatatatgtatataaaatatatattgcataggacagacttaggagttttgtttagagcagttaacatctgaagtgtctaatgcattaacttttgtaaggtactgaatacttaatatgtgggaaacccttttgcgtggtccttaggcttacaatgtgcactgaatcgtttcatgtaagaatccaaagtggacaccattaacaggtctttgaaatatgcatgtactttatattttctatatttgtaactttgcatgttcttgttttgttatataaaaaaattgtaaatgtttaatatctgactgaaattaaacgagcgaagatgagcacc

SEQ ID NO: 5628 - DNA, 1400 bp, Homo sapiens
gcagcttcagctgcgactgccgcagcggctgggagggccgcttctgccagcgcgaggtgagcttcctcaattgctcgctggacaacggcggctgcacgcattactgcctagaggaggtgggctggcggcgctgtagctgtgcgcctggctacaagctgggggacgacctcctgcagtgtcaccccgcagtgaagttcccttgtgggaggccctggaagcggatggagaagaagcgcagtcacctgaaacgagacacagaagaccaagaagaccaagtagatccgcggctcattgatgggaagatgaccaggcggggagacagcccctggcaggtggtcctgctggactcaaagaagaagctggcctgcggggcagtgctcatccacccctcctgggtgctgacagcggcccactgcatggatgagtccaagaagctccttgtcaggcttggagagtatgacctgcggcgctgggagaagtgggagctggacctggacatcaaggaggtcttcgtccaccccaactacagcaagagcaccaccgacaatgacatcgcactgctgcacctggcccagcccgccaccctctcgcagaccatagtgcccatctgcctcccggacagcggccttgcagagcgcgagctcaatcaggccggccaggagaccctcgtgacgggctggggctaccacagcagccgagagaaggaggccaagagaaaccgcaccttcgtcctcaacttcatcaagattcccgtggtcccgcacaatgagtgcagcgaggtcatgagcaacatggtgtctgagaacatgctgtgtgcgggcatcctcggggaccggcaggatgcctgcgagggcgacagtggggggcccatggtcgcctccttccacggcacctggttcctggtgggcctggtgagctggggtgagggctgtgggctccttcacaactacggcgtttacaccaaagtcagccgctacctcgactggatccatgggcacatcagagacaaggaagccccccagaagagctgggcaccttagcgaccctccctgcagggctgggcttttgcatggcaatggatgggacattaaagggacatgtaacaagcacaccggcctgctgttctgtccttccatccctcttttgggctcttctggagggaagtaacatttactgagcacctgttgtatgtcacatgccttatgaatagaatcttaactcctagagcaactctgtggggtggggaggagcagatccaagttttgcggggtctaaagctgtgtgtgttgagggggatactctgtttatgaaaaagaataaaaaacacaaccacgaaaaaaaaaaaaaaaaaaaaaaaaaaaaaaaaaaaaaaaacccccccccgccccccccccctgcag

SEQ ID NO: 5629 - DNA, 1400 bp, Homo sapiens
accacttaaaatagaaaccatctcccatgaagaccttcaaagacaacttgccgtcttggacaaagcaatgaaagcaaaagtggccacatacctgggtggccttccagatgttccattcagtgccacaccagtgaatgccttttataatggctgcatggaagtgaatattaatggtgtacagttggatctggatgaagccatttctaaacataatgatattagagctcactcatgtccatcagtttggaaaaagacaaagaattcttaaggcatcttttctctgcttataataccttttccttgtgtgtaattatacttatgtttcaataacagctgaagggttttatttacaatgtgcagtctttgattattttgtggtcctttcctgggatttttaaaaggtcctttgtcaaggaaaaaaattctgttgtgatataaatcacagtaaagaaattcttacttctcttgctatctaagaatagtgaaaaataacaattttaaatttgaatttttttcctacaaatgacagtttcaatttttgtttgtaaaactaaattttaattttatcatcatgaactagtgtctaaatacctatgtttttttcagaaagcaaggaagtaaactcaaacaaaagtgcgtgtaattaaatactattaatcataggcagatactattttgtttatgtttttgtttttttcctgatgaaggcagaagagatggtggtctattaaatatgaattgaatggagggtcctaatgccttatttcaaaacaattcctcagggggaccagctttggcttcatctttctcttgtgtggcttcacatttaaaccagtatctttattgaattagaaaacaagtgggacatattttcctgagagcagcacaggaatcttcttcttggcagctgcagtctgtcaggatgagatatcagattaggttggataggtggggaaatctgaagtgggtacattttttaaattttgctgtgtgggtcacacaaggtctacattacaaaagacagaattcagggatggaaaggagaatgaacaaatgtgggagttcatagttttccttgaatccaacttttaattaccagagtaagttgccaaaatgtgattgttgaagtacaaaaggaactatgaaaaccagaacaaattttaacaaaaggacaaccacagagggatatagtgaatatcgtatcattgtaatcaaagaagtaaggaggtaagattgccacgtgcctgctggtactgtgatgcatttcaagtggcagttttatcacgtttgaatctaccattcatagccagatgtgtatcagatgtttcactgacagtttttaacaataaattcttttcactgtattttatatcacttataataaatcggtgtataatttt

SEQ ID NO: 5630 - DNA, 600 bp, Homo sapiens
atgcactatgagatgctcttcaactccttccagggattttttgtcgcaatcatatactgtttctgcaatggcgaggtacaagctgagatcaagaaatcttggagccgctggacactggcactggacttcaagcgaaaggcacgcagcgggagcagcagctatagctacggccccatggtgtcccacacaagtgtgaccaatgtcggcccccgtgtgggactcggcctgcccctcagcccccgcctactgcccactgccaccaccaacggccaccctcagctgcctggccatgccaagccagggaccccagccctggagaccctcgagaccacaccacctgccatggctgctcccaaggacgatgggttcctcaacggctcctgctcaggcctggacgaggaggcctctgggcctgagcggccacctgccctgctacaggaagagtgggagacagtcatgtgaccaggcgctgggggctggacctgctgacatagtggatggacagatggaccaaaagatgggtggttgaatgatttcccactcagggcctggggccaagaggaaaaacagggaaaaaaagaaaaaaaaaagaaaaaggaa

SEQ ID NO: 5631 - DNA, 1400 bp, Homo sapiens
ctcgatgcgtgcaggcttttcgggcccgcaactggtgggttgccagcgttgatgtggtggagaatgaagaggccagcgctacgatcattgttaaaatgacagactcgttcactgagcaggctgaccaggtgactgctgaggttggaaagctcttgggtgaagagaaggtggatgcaattctttgcgttgctggaggatgggccgggggcaatgccaaatccaagtctctctttaagaactgtgacctgatgtggaagcagagcatatggacatcgaccatctccagccatctggctaccaagcatctcaaggaaggaggcctcctgaccttggctggcgcaaaggctgccctggatgggactcctggtatgatcgggtacggcatggccaagggtgctgttcaccagctctgccagagcctggctgggaagaacagcggcatgccgcccggggcagccgccatcgctgtgctcccggttaccctggataccccgatgaacaggaaatcaatgcctgaggctgacttcagctcctggacacccttagaattcctagttgaaactttccatgactggatcacagggaaaaaccgaccgagctcaggaagcctaatccaggtggtaaccacagaaggaaggacggaactcaccccagcatatttttaggcctcatctcagtgcctatgaggggcctgccagaaaagtcactaacctgtctcagtgtggccttgtccagccttgtgttttctgtaacccctgtttgtggtacgagataatgagtcctatttttctctcacataatatgcatttgctctcctagggacaagtgtaatacatttatgtgaagtaagacaatgcgagactggtggccgtcaaatagcatccgtcaatctgtgttaactgcataggaggctctcgatagcacctgctatagcggtgtcatgttggatcgctttgtgactgttcatctgtccttgacagtggctgtcatcttgactactttgttgatttgttggtattggggacattttaaaggctgagttatttttgaatgtcatgtttatgtcatagacgtagaaaacgcatccttgaattaaactgccttaactccttttgtggtataagcaaactacatggactctgtccctggtatccttttcctgtgtggttgcccctgtgcctgtggtctggcctaggttaagtgtgcaagataactactcgtgagttattcagaatgttgttcctaataaatgcacttgttgtctgtcttctttaatcaaatcacatcttatatacagcagtcagagatgagtatactagaatcatggattgctggaggtcttttaatctgatgttctcagaagggggtggatttaaatcctgaaataaatatttcaacac

SEQ ID NO: 5632 - DNA, 1400 bp, Homo sapiens
acttacaattcttaaattcagaatctcgtcccctcccttctcgttgaaggcaactgttctggtagctaactttctcctgtgtaatggcgggagggaacaccggcttcagtttttcatgtccccatgacttgcatacaaatggttcaactgtattaaaattaagtgcatttggccaataggtagtatctatacaataacaacaatctctaagaatttccataacttttcttatctgaaaggactcaagtcttccactgcagatacattggaggcttcacccacgttttctttccctttagtttgtttgctgtctggatggccaatgagcctgtctccttttctgtggccaatctgaaggccttcgttggaagtgttgttcacagtaatccttaccaagataacatactgtcctccagaataccaagtattaggtgacactagctcaagctgttgtcttcagagcagttaccaagaagctcggtgcacaggttttctctggttcttacaggaaccacctactctttcagttttctggcccaggagtggggtaaatcctttagttagtgcatttgaacttggtacctgtgcattcagttctgtgaatactgccctttttggcggggtttcctcatctccccagcctgaactgctcaactctaaacccaaattagtgtcagccgaaaggaggtttcaagatagtcctgtcagtatttgtggtgaccttcagattagacagtcttcatttccagccagtggagtcctggctccagagccatctctgagactccgtactactggatgttttaatatcagatcattacccaccatatgcctcccacaggccaagggaaaacagacaccagaacttgggttgagggcactaccagactgacatggccagtacagaggagaactagggaaggaatgatgttttgcaccttattgaaaagaaaattttaagtgcatacataatagttaagagcttttattgtgacaggagaacttttttccatatgcgtgcatactctctgtaattccagtgtaaaatattgtacttgcactagcttttttaaacaaatattaaaaaatggaagaattcatattctattttctaatcgtggtgtgtctatttgtaggatacactcgagtctgtttattgaattttatggtccctttctttgatggtgcttgcaggttttctaggtagaaattatttcattattataataaaacaatgtttgattcaaaatttgaacaaaattgttttaaataaattgtctgtataccagtacaagtttattgtttcagtatactcgtactaataaaataacagtgccaattgcaaaaaaaaaaaaaaaaaaaaaaaaaaaaaaaaaaaaaaaaaaaaaaaaaaaaaaaaa

SEQ ID NO: 5633 - DNA, 1400 bp, Homo sapiens
actttgcattcaatctgtaccggaggttcactgtggagaccccagataagaacatcttcttttcccctgtgagcatttctgcagctttggttatgctttcctttggggcctgctgcagcacccaaactgagattgtggagaccttggggttcaacctcacagacactccaatggtagagatccagcatggcttccagcatctgatctgttcactgaattttccaaagaaggaactggaattgcagataggaaatgccctcttcattggcaagcatctgaaaccactggcaaagttcttgaatgatgtcaagaccctctatgagactgaagtcttttctaccgacttctccaacatttctgcagccaagcaggagattaacagtcatgtggagatgcaaaccaaagggaaagttgtgggtctaattcaagacctcaagccaaacaccactatggtcttagtgaactatattcactttaaagcccagtgggcaaatccttttgatccatccaagacagaagacagttccagcttcttaatagacaagaccaccactgttcaagtgcccatgatgcaccagatggaacaatactatcacctagtggatatggaattgaactgcacagttctgcaaatggactacagcaagaatgctctggcactctttgttcttcccaaggagggacagatggagtcagtggaagctgccatgtcatctaaaacactgaagaagtggaaccgcttactacagaagggatgggttgacttgtttgttccaaagttttccatttctgccacatatgaccttggagccacacttttgaagatgggcattcagcatgcctattctgaaaatgctgatttttctggactcacagaggacaatggtctgaaactttccaatgctgcccataaggctgtgctgcacattggtgaaaagggaactgaagctgcagctgtccctgaagttgaactttcggatcagcctgaaaacactttcctacaccctattatccaaattgatagatctttcatgttgttgattttggagagaagcacaaggagtattctctttctagggaaagttgtgaacccaacggaagcgtagttgggaaaaaggccattggctaattgcacgtgtgtattgcaatgggaaataaataaataatatagcctggtgtgattgatgtgagcttggacttgcattcccttatgatgggatgaagattgaaccctggctgaactttgttggctgtggaagaggccaatcctatggcagagcattcagaatgtcaatgagtaattcattattatccaaagcataggaaggctctatgtttgtatatttctctttgtcagaatacccctcaactcatttgctctaataaatttgactgggttg

SEQ ID NO: 5634 - DNA, 1400 bp, Homo sapiens
cctgaattctgtattcaaagatggaacccctccaattgatgcccatacaaggaatttgcttcggaaccacataattaaagaccagctggcctctaagtatctgtaccatggacagaccctggaaactctgggcggcaaaaaactgagagtttttgtttatcgtaatagcctctgcattgagaacagctgcatcgcggcccacgacaagagggggaggtacgggaccctgttcacgatggaccgggtgctgacccccccaatggggactgtcatggatgtcctgaagggagacaatcgctttagcatgctggtagctgccatccagtctgcaggactgacggagaccctcaaccgggaaggagtctacacagtctttgctcccacaaatgaagccttccgagccctgccaccaagagaacggagcagactcttgggagatgccaaggaacttgccaacatcctgaaataccacattggtgatgaaatcctggttagcggaggcatcggggccctggtgcggctaaagtctctccaaggtgacaagctggaagtcagcttgaaaaacaatgtggtgagtgtcaacaaggagcctgttgccgagcctgacatcatggccacaaatggcgtggtccatgtcatcaccaatgttctgcagcctccagccaacagacctcaggaaagaggggatgaacttgcagactctgcgcttgagatcttcaaacaagcatcagcgttttccagggcttcccagaggtctgtgcgactagcccctgtctatcaaaagttattagagaggatgaagcattagcttgaagcactacaggaggaatgcaccacggcagctctccgccaatttctctcagatttccacagagactgtttgaatgttttcaaaaccaagtatcacactttaatgtacatgggccgcaccataatgagatgtgagccttgtgcatgtgggggaggagggagagagatgtactttttaaatcatgttccccctaaacatggctgttaacccactgcatgcagaaacttggatgtcactgcctgacattcacttccagagaggacctatcccaaatgtggaattgactgcctatgccaagtccctggaaaaggagcttcagtattgtggggctcataaaacatgaatcaagcaatccagcctcatgggaagtcctggcacagtttttgtaaagcccttgcacagctggagaaatggcatcattataagctatgagttgaaatgttctgtcaaatgtgtctcacatctacacgtggcttggaggcttttatggggccctgtccaggtagaaaagaaatggtatgtagagcttagatttccctattgtgacagagccatggtgtgtttgtaataataaaaccaaagaaacata

SEQ ID NO: 5635 - DNA, 1400 bp, Homo sapiens
ccttaccatggacatctacttcgacgagaacatgaagcccctggagcacctgaaccatgattctgtctggaacttccatgtgtggaacgactgctggatgaagaggccggatctgccctcgggctttgatgggtggcaggtggtggatgccacaccccaagagactagcagtggcatcttctgctgcggcccctgctctgtggagtccatcaagaatggcctggtctacatgaagtacgacacgcctttcatttttgctgaggtgaatagtgacaaggtgtactggcagcggcaggatgatggcagcttcaagattgtttatgtggaggagaaggccatcggcacactcattgtcacaaaggccatcagctccaacatgcgggaggacatcacctacctctataagcacccagaaggctcagacgcagagcggaaggcagtagagacagcagcagcccacggcagcaaacccaatgtgtatgccaaccggggctcagcggaggatgtggccatgcaggtggaggcacaggacgcggtgatggggcaggatctgatggtctctgtgatgctgatcaatcacagcagcagccgccgcacagtgaaactgcacctctacctctcagtcactttctatactggtgtcagtggtaccatcttcaaggagaccaagaaggaagtggagctggcaccaggggcctcggaccgtgtgaccatgccagtggcctacaaggaataccggccccatcttgtggaccagggggccatgctgctcaatgtctcaggccacgtcaaggagagcgggcaggtgctggccaagcagcacaccttccgtctgcgcaccccagacctctccctcacgttactgggagcagcagtggttggccaggagtgtgaagtacagattgtcttcaagaacccccttcccgtcaccctcaccaatgtcgtcttccggctcgaaggctctgggttacagaggcccaagatcctcaacgttggggacattggaggcaatgaaacagtgacactgcgccagtcgtttgtgcctgtgcgaccaggcccccgccagctcattgccagcttggacagcccacagctctcccaggtgcacggtgtcatccaggtggatgtggccccagcccctggggatgggggcttcttctcagacgctggaggtgacagtcacttaggagagaccatccctatggcatctcgaggtggagcttagccctgtgccaggagcaatgggactggagtcagatgagcaaggacattgccccaagataggggcacactacagagcagctccccaggagctcaggtggggagtccagggctcccggagagggagtcagtcttcacttgcactgggggaacagatgctaataaactgttttttaatg

SEQ ID NO: 5636 - DNA, 600 bp, Homo sapiens
atgactttttggaatagccctgtctagggcaaactgtggcccccaggagacactacccttccatgccccagacctctgtcttgcatgtgacaattgacaatctggactaccccaagatggcacccaagtgtttggcttctggctacctaaggttaacatgtcactagagtatttttatgagagacaaacattataaaaatctgatggcaaaagcaaaacaaaatggaaagtaggggaggtggatgtgacaacaacttccaaattggctctttggaggcgagaggaaggggagaacttggagaatagtttttgctttgggggtagaggcttcttagattctcccagcatccgcctttccctttagccagtctgctgtcctgaaacccagaagtgatggagagaaaccaacaagagatctcgaaccctgtctagaaggaatgtatttgttgctaaatttcgtagcactgtttacagttttcctccatgttatttatgaattttatattccgtgaatgtatattgtcttgtaatgttgcataatgttcactttttatagtgtgtcctttattctaaacagtaaagtggttttatttctatcac

SEQ ID NO: 5637 - DNA, 1400 bp, Homo sapiens
gtccgttgtagcggaaggaattgcgggccttcaagttattgggctcagtgctgtaggtctgcttattcctcttgatcaggaaactggagcagttccgcacgaccatccattgcagatgcgcagacatggcggcggctcccttcgcagcggcgacctgaccttcagcgcctcggctccagcgccatggcgccctccaggaagttcttcgttgggggaaactggaagatgaacgggcggaagcagagtctgggggagctcatcggcactctgaacgcggccaaggtgccggccgacaccgaggtggtttgtgctccccctactgcctatatcgacttcgcccggcagaagctagatcccaagattgctgtggctgcgcagaactgctacaaagtgactaatggggcttttactggggagatcagccctggcatgatcaaagactgcggagccacgtgggtggtcctggggcactcagagagaaggcatgtctttggggagtcagatgagctgattgggcagaaagtggcccatgctctggcagagggactcggagtaatcgcctgcattggggagaagctagatgaaagggaagctggcatcactgagaaggttgttttcgagcagacaaaggtcatcgcagataacgtgaaggactggagcaaggtcgtcctggcctatgagcctgtgtgggccattggtactggcaagactgcaacaccccaacaggcccaggaagtacacgagaagctccgaggatggctgaagtccaacgtctctgatgcggtggctcagagcacccgtatcatttatggaggctctgtgactggggcaacctgcaaggagctggccagccagcctgatgtggatggcttccttgtgggtggtgcttccctcaagcccgaattcgtggacatcatcaatgccaaacaatgagccccatccatcttccctacccttcctgccaagccagggactaagcagcccagaagcccagtaactgccctttccctgcatatgcttctgatggtgtcatctgctccttcctgtggcctcatccaaactgtatcttcctttactgtttatatcttcaccctgtaatggttgggaccaggccaatcccttctccacttactataatggttggaactaaacgtcaccaaggtggcttctccttggctgagagatggaaggcgtggtgggatttgctcctgggttccctaggccctagtgagggcagaagagaaaccatcctctcccttcttacaccgtgaggccaagatcccctcagaaggcaggagtgctgccctctcccatggtgcccgtgcctctgtgctgtgtatgtgaaccacccatgtgagggaataaacctggcactaggtaaaaaaaaaaaaaaaaaaaaa

SEQ ID NO: 5638 - DNA, 600 bp, Homo sapiens
cagctcttcaacaagtttgcactgccttacatccgtgatgtggccaagcaagtgaaggccaggttgcgggaggcaggcctggcaccagtgcccatgatcatctttgctaaggatgggcattttgccctggaggagctggcccaagctggctatgaggtggttgggcttgactggacagtggccccaaagaaagcccgggagtgtgtggggaagacggtgacattgcagggcaacctggacccctgtgccttgtatgcatctgaggaggagatcgggcagttggtgaagcagatgctggatgactttggaccacatcgctacattgccaacttgggccatgggctttatcctgacatggacccagaacatgtgggcgcctttgtggatgctgtgcataaacactcacgtctgcttcgacagaactgaccgtatacctttaccctcaagtaccactaacacagatgattgatcgtttccaggacaataaaagtttcggagttgaacctattgtgtagttttgtttgtgaaagattgtcccatatcctcagttcttcttagcctctgtctccttccctgggaccctctcatatcctcttatag

SEQ ID NO: 5639 - DNA, 1400 bp, Homo sapiens
caacccggctgtcacactggggctgctgctcagctgccagatcagcatcttccgtgccctcatgtacatcatcgcccagtgcgtgggggccatcgtcgccaccgccatcctctcaggcatcacctcctccctgactgggaactcgcttggccgcaatgacctggctgatggtgtgaactcgggccagggcctgggcatcgagatcatcgggaccctccagctggtgctatgcgtgctggctactaccgaccggaggcgccgtgaccttggtggctcagccccccttgccatcggcctctctgtagcccttggacacctcctggctattgactacactggctgtgggattaaccctgctcggtcctttggctccgcggtgatcacacacaacttcagcaaccactggattttctgggtggggccattcatcgggggagccctggctgtactcatctacgacttcatcctggccccacgcagcagtgacctcacagaccgcgtgaaggtgtggaccagcggccaggtggaggagtatgacctggatgccgacgacatcaactccagggtggagatgaagcccaaatagaaggggtctggcccgggcatccacgtagggggcaggggcaggggcgggcggagggaggggaggggtgaaatccatactgtagacactctgacaagctggccaaagtcacttccccaagatctgccagacctgcatggtcaagcctcttatgggggtgtttctatctctttctttctctttctgtttcctggcctcagagcttcctggggaccaagatttaccaattcacccactcccttgaagttgtggaggaggtgaaagaaagggacccacctgctagtcgcccctcagagcatgatgggaggtgtgccagaaagtcccccctcgccccaaagttgctcaccgactcacctgcgcaagtgcctgggattctaccgtaattgctttgtgcctttgggcaggccctccttcttttcctaacatgcaccttgctcccaatggtgcttggagggggaagagatcccaggaggtgcagtggagggggcaagctttgctccttcagttctgcttgctcccaagcccctgacccgctcggacttactgcctgaccttggaatcgtccctatatcagggcctgagtgacctccttctgcaaagtggcagggaccggcagagctctacaggcctgcagcccctaagtgcaaacacagcatgggtccagaagacgtggtctagaccagggctgctctttccacttgccctgtgttctttccccaggggcatgactgtcgccacacgcctctgcatatatgtctctttggagttggaatttcattatatgttaagaaaataaaggaaaatgacttgtaaggtc

SEQ ID NO: 5640 - DNA, 600 bp, Homo sapiens
gtctacgaagtggtggtggacaggaagcatgtccctgaagaggtgctagctgtgttagagcaggaacccattatcctgccagcatgggaccccatgggagctttggctgagtgatactgccctccagctctttcctccttccatggaacctgacgtagctgcaaaggacagatccagggactgaagccaaagttatgcaagggactgtgtgttgccacaggacacagtcagatttccagtctccaccaggaacctcttcagaaagtgtgctttatgctgaaacagaatactgttaaaggaaaaaaaagaggggggaagatcaggtcatactatctactctcctcatctctaacagctcaggatctcttagcattttaattagatgtaattgtttgtctttaactgtcaaaaagtttggttctgtgtctgtgttttaataagacgagaggacgagcgattgaggtgtatggagagaaaacagacctaatgctccttgttcctagagtagagtggagggagggtggcctaagagttgagctctcggaactgcatgctgctggacagtatcactgtctttcctagatggcagtcactgaattc

SEQ ID NO: 5641 - DNA, 600 bp, Homo sapiens
cctccctccccaaaccccaaggaactctcactcttgctcaagctgttccgtccccttaccacccctgatacaactgccaggttaatttccagaattcttgcaagactcagttcagaagtcaccttctttcgtgaatgttttgattccctgaggctactttattttggtatggctgaaaaatcctagattttctaaacaaaacctgtttgaatcttggttctgatatggactaggagagagactgggtcaagtaagcttatctccctgaggctgtttcctcgtctgttaagtgtgaatatcaatacctgcctttcataatcaccagggaataaagtggaataatgttgataacagtgcttggcacctggaagtaggtggcagatgttaacgcccttcctcccttgcactgcgccccctgtgcctacctctagcattgtaacgaccacatagtattgaaatggccagtttacttgtctgccttcctttccaagaccgttggtgcctagaggactagaatcgtgtcctatttaactttgtgttcccaggtcctagctcaggagttggcaaataagaattaaatgtctgctacaccgaaacaaa

SEQ ID NO: 5642 - DNA, 600 bp, Homo sapiens
atcaaatgtgatgattggaattagaccatttggcctttgaactttcataggaaaaatgacccaacatttcttagcatgagctacctcatctctagaagctgggatggacttactattcttgtttatattttagatactgaaaggtgctatgcttctgttattattccaagactggagataggcagggctaaaaaggtattattatttttcctttaatgatggtgctaaaattcttcctataaaattccttaaaaataaagatggtttaatcactaccattgtgaaaacataactgttagacttcccgtttctgaaagaaagagcatcgttccaatgcttgttcactgttcctctgtcatactgtatctggaatgctttgtaatacttgcatgcttcttagaccagaacatgtaggtccccttgtgtctcaatactttttttttcttaattgcatttgttggctctattttaatttttttcttttaaaataaacagctgggaccatcccaaaagacaagccatgcatacaactttggtcatgtatctctgcaaagcatcaaattaaatgcacgcttttgtcatgtcaaaaaaaaaaaaaaa

SEQ ID NO: 5643 - DNA, 1400 bp, Homo sapiens
tttaatttgggaaaaaaacctgaagtatatttccatccataaccttgaggcttctcttggtgtccatacatatgaactggctatgaaccacctgggggacatgaccagtgaagaggtggttcagaagatgactggactcaaagtacccctgtctcattcccgcagtaatgacaccctttatatcccagaatgggaaggtagagccccagactctgtcgactatcgaaagaaaggatatgttactcctgtcaaaaatcagggtcagtgtggttcctgttgggcttttagctctgtgggtgccctggagggccaactcaagaagaaaactggcaaactcttaaatctgagtccccagaacctagtggattgtgtgtctgagaatgatggctgtggagggggctacatgaccaatgccttccaatatgtgcagaagaaccggggtattgactctgaagatgcctacccatatgtgggacaggaagagagttgtatgtacaacccaacaggcaaggcagctaaatgcagagggtacagagagatccccgaggggaatgagaaagccctgaagagggcagtggcccgagtgggacctgtctctgtggccattgatgcaagcctgacctccttccagttttacagcaaaggtgtgtattatgatgaaagctgcaatagcgataatctgaaccatgcggttttggcagtgggatatggaatccagaagggaaacaagcactggataattaaaaacagctggggagaaaactggggaaacaaaggatatatcctcatggctcgaaataagaacaacgcctgtggcattgccaacctggccagcttccccaagatgtgactccagccagccaaatccatcctgctcttccatttcttccacgatggtgcagtgtaacgatgcactttggaagggagttggtgtgctatttttgaagcagatgtggtgatactgagattgtctgttcagtttccccatttgtttgtgcttcaaatgatccttcctactttgcttctctccacccatgacctttttcactgtggccatcaggactttccctgacagctgtgtactcttaggctaagagatgtgactacagcctgcccctgactgtgttgtcccagggctgatgctgtacaggtacaggctggagattttcacataggttagattctcattcacgggactagttagctttaagcaccctagaggactagggtaatctgacttctcacttcctaagttcccttctatatcctcaaggtagaaatgtctatgttttctactccaattcataaatctattcataagtctttggtacaagtttacatgataaaaagaaatgtgatttgtcttcccttctttgcacttttgaaataaagtatttatc

SEQ ID NO: 5644 - DNA, 1400 bp, Homo sapiens
ggaatggggccaactcaccctatgcagcacagcccaccagctacgactatgatgccccactgagtgaggctggggacctcactgagaagtattttgctctgcgaaacatcatccagaagtttgaaaaagtaccagaaggtcctatccctccatctacaccaaagtttgcatatggaaaggtcactttggaaaagttaaagacagtgggagcagctctggacattctgtgtccctctgggcccatcaaaagcctttatcccttgacatttatccaggtgaaacagcattatgggtttgtgctgtaccggacaacacttcctcaagattgcagcaacccagcacctctctcttcacccctcaatggagtccacgatcgagcatatgttgctgtggatgggatcccccagggagtccttgagcgaaacaatgtgatcactctgaacataacagggaaagctggagccactctggaccttctggtagagaacatgggacgtgtgaactatggtgcatatatcaacgattttaagggtttggtttctaacctgactctcagttccaatatcctcacggactggacgatctttccactggacactgaggatgcagtgcgcagccacctggggggctggggacaccgtgacagtggccaccatgatgaagcctgggcccacaactcatccaactacacgctcccggccttttatatggggaacttctccattcccagtgggatcccagacttgccccaggacacctttatccagtttcctggatggaccaagggccaggtctggattaatggctttaaccttggccgctattggccagcccggggccctcagttgaccttgtttgtgccccagcacatcctgatgacctcggccccaaacaccatcaccgtgctggaactggagtgggcaccctgcagcagtgatgatccagaactatgtgctgtgacgttcgtggacaggccagttattggctcatctgtgacctacgatcatccctccaaacctgttgaaaaaagactcatgcccccacccccgcaaaaaaacaaagattcatggctggaccatgtatgatgatgaaagcctgtgtctttgagggattctaccctgaacatacctcacagatcctccctgtcatgccacatttcactgattggaatgtggaaatggaaaaggaatttaggatgtgcattttcacctgaggtttccctgcatccctgcagtgccaaagccccaccttcagggaccacctggaatgtgtgaggggctgacagcacagtaacgtgcatacatatctgcagggctggaatggaagctttaaaggtggtagtgatttttattttggaagaatcatgttacctttttgttaaataaaatttgcccgaattc

SEQ ID NO: 5645 - DNA, 955 bp, Homo sapiens; identical to SEQ ID NO: 410

SEQ ID NO: 5646 - DNA, 1400 bp, Homo sapiens
tcagaaatctatgatgggtggaggattagcagaaattcctggactttcaatcaactttgcaaaggttcttcatggagagcagtacttagagttatataaaccacttcccagagcaggaaaattaaaatgtgaagcagttgttgctgatgtcctagataaaggatccggtgtagtgattattatggatgtctattcttattctgagaaggaacttatatgccacaatcagttctctctctttcttgttggctctggaggctttggtggaaaacggacatcagacaaagtcaaggtagctgtagccatacctaatagacctcctgatgctgtacttacagataccacctctcttaatcaggctgctttgtaccgcctcagtggagactggaatcccttacacattgatcctaactttgctagtctagcaggttttgacaagcccatattacatggattatgtacatttggattttctgccaggcgtgtgttacagcagtttgcagataatgatgtgtcaagattcaaggcaattaaggctcgttttgcaaaaccagtatatccaggacaaactctacaaactgagatgtggaaggaaggaaacagaattcattttcaaaccaaggtccaagaaactggagacattgtcatttcaaatgcatatgtggatcttgcaccaacatctggtacttcagctaagacaccctctgagggcgggaagcttcagagtacctttgtatttgaggaaataggacgccgcctaaaggatattgggcctgaggtggtgaagaaagtaaatgctgtatttgagtggcatataaccaaaggcggaaatattggggctaagtggactattgacctgaaaagtggttctggaaaagtgtaccaaggccctgcaaaaggtgctgctgatacaacaatcatactttcagatgaagatttcatggaggtggtcctgggcaagcttgaccctcagaaggcattctttagtggcaggctgaaggccagagggaacatcatgctgagccagaaacttcagatgattcttaaagactacgccaagctctgaagggcacactacactattaataaaaatggaatcattaaatactctcttcacccaaatatgcttgattattctgcaaaagtgattagaactaagatgcaggggaaattgcttaacattttcagatatcagataactgcagattttcattttctactaattttcatgtatcattatttttacaaggaactatatataagctagcacatgattatccttctgttcttagatctgtatcttcataataaaaaattttgcccaagtcctgtttccttagaatttgtgatagcattgataagttgaaaggaaaattaaatcaataaaggcctttgatacc

SEQ ID NO: 5647 - DNA, 1400 bp, Homo sapiens
cctgcttgcaagcgacattcacaccgatgtccctgagcccttctcagtccctcgtggtccatgacgtggaatatttgaaaaacatgtcacaactggtggaggagatgctgctaaagcagagggactttctgcagagccacatgatcttagggctggtggtgaccctttctccagccctggacagtcaattccaggaggcacgcagaaagctcagccagaaactgcgggaactgacagagcaaccacccatgcctgcccgcccacgatggatgaagtgcgtggaggagacaggcacgttcttcgagcccacgctggcggctttgtttgttcgtgaggcctttggcccgagcacccgaagtgctgccatgaaattattcactgcgatccgggatgccctcatcactcgcctcagaaaccttccctggatgaatgaggagacccagaacatggcccaggacaaggttgctcaactgcaggtggagatgggggcttcagaatgggccctgaagccagagctggcccgacaagaatacaacgatatacagcttggatcgagcttcctgcagtctgtcctgagctgtgtccggtccctccgagctagaattgtccagagcttcttgcagcctcacccccaacacaggtggaaggtgtccccttgggacgtcaatgcttactattcggtatctgaccatgtggtagtctttccagctggactcctccaacccccattcttccaccctggctatcccagagccgtgaactttggcgctgctggcagcatcatggcccacgagctgttgcacatcttctaccagctcttactgcctgggggctgcctcgcctgtgacaaccatgccctccaggaagctcacctgtgcctgaagcgccattatgctgcctttccattacctagcagaacctccttcaatgactccctcacattcttagagaatgctgcagacgttggggggctagccatcgcgctgcaggcatacagcaagaggctgttacggcaccatggggagactgtcctgcccagcctggacctcagcccccagcagatcttctttcgaagctatgcccaggtgatgtgtaggaagcccagcccccaggactctcacgacactcacagccctccacacctccgagtccacgggcccctcagcagcaccccagcctttgccaggtatttccgctgtgcacgtggtgctctcttgaacccctccagccgctgccagctctggtaacttggttaccaaagatgccacagcacagaaatatcgaccaacacctccctggtcacatccatggaatcagagcaagatttcctttctgcttctgttccaaaaataaaagctggcacttggcttccgcttgtctcttaaaaaaaaaaaaaaaaa

SEQ ID NO: 5648 - DNA, 1400 bp, Homo sapiens
agaatggccgctgtgtgcgcgtgcgggagggctacacctgtgactgttttgagggcttccagctggatgcggcccacatggcctgcgtagatgtgaatgagtgtgatgacttgaacgggcctgctgtgctctgtgtccatggttactgcgagaacacagagggctcctaccgctgccactgctccccgggatatgtggctgaggcagggcccccccactgcactgccaaggagtagcagtcaggggtcagtgtggcaactacctggaaatggcctccagtcacaggcaggggccttgaggatgatttcctagctgggaagacaccgtgacatcaggccagaggtttccaatcagccttgcctgctttcatctctcccagcttagcctctggctgtaagcttcggtcattgcctccatgcccttgcttggctcaagcaccaccaatcgctttaatgcttcagccaccgcatgaggccctgtccaccacctttcctggccttgctatgggatgcttaccaaaggatggccctcatccaccctcccaagctgtgcgagcatgcaaggccccatggcctcacactgcagacacccctttccagccacaatccaccatcatcctgacgatcccacaactgggacagaggctacatctgccctagggaggtccttcagaatctgtggagcaagaaaggatttggggaagcttggggactgactccagagccccctcctaagaaccatcaccaccactcagccaatctgttctgggccctgattttgccacacctccatcctgtagcccattctctgaccccaaggagtggcagaagatcccttcactcagagaagcaaggctgatattagcttgttgaatgtaagagacacaaatgaagaagaacaaagagcctgagaaagcagcaagaggacatgatgaaaaatacgtggagttgatgagaaaggggagccaaggctttatacgtctaaagaaaatattcagtagctgaatccgcccagtgatagcctgtgggcaccagcagcaagggctgccatgggatacagcacccatctacaaagacctctattacataaacactgcttcttacaggaaacaaacctcttctgggatctccttttgtgaaaaccagtttgatgtgctaaaagtaaaaagtctattttccagtgtggtcttgttcagaagcagccagatttccaatgttgtttttcccctccactcagaaacccctgccctttcccttcagaaaacgatggcaggcattcctctgagtttacaagcagagactcactccaacccaaactagctgggagttcagaaccatggtggaataaagaaatgtgcatctggtccaaaaaaaaaaaaaaaaaaaaaaaaaaaaaaaaaa

SEQ ID NO: 5649 - DNA, 1400 bp, Homo sapiens
gtatgtatgctaaattatatgaacctttccccaagaagggccctagaaattgatgtggctttcctcttaaatattaattattagtcctgaaagaaagataacatatgtgatttttgtggttaggagagttgctgtcatgattgttttttcttcagcctcctctgacttttcttttggggcttcagattttatgattacatcttgtccccctagaacatcccccttcctcccatactgcttttaaacagatgcccaagaaggcaagcaggaatgcctcttgtgggggagggcagggagaaataactagttcaaaccaactatctatctatgctttgcaaagactaaggcgtattataggaagagggctagaaacctaactgattcttctcagttttctcattttaaaacagcccagtattcctttgtatcctcaagggtccttgagaatacttctgttattgaaaccctgtgggctacttgtactgtacctcctctcaagccaagaagggctgtgggataatttaccatgaatccttagtagcaatgacagcagagttaaaaaataaaaggtgttttactttcaggctcttgttttggttcagaggagattttaaatattgaatgacacttctacagaacaacggtttttcttctgccaaggctacttcctttaacgaagtgcctttaattcagccttatccaactagggaaaataatgttggacaagtctaggatttgaagagtcagtgaacttttagtgtcagggaataaacatggtgggtagattaggtttgaaaaaaacttccttagaggtatttattctcaatacctgacaggggcccatgggaatgacttcagaagcatcccggataatagatgggtaaaaagtctaggcaccctgaagaacaggtgagacagctggcctctggacagaggtaggcatagtacagtacgatatatcattcctctggtcctaaatatacaaacttattcatgtttttaggtgatgatggtcattgaaactcacttcttttcaggtgtagctacaattgtgtaatgtacaatattagagaaaggacaggctttttatgagtaacacacaccatatataaaacagcctttctggctgaccacatggttaaatgcataccttcccagtactggggggaaaatgacccttcttagaatgtgcaagttccatagagtaatatattgatatgattttgaaaagaattgttgatagttacatcttcaaacttatcattccagtatgcatctttaagataatgtgattctaagtagatgactttatattcttgattaaagagtgctatacatgttaagaaatgcattaaggaatacaataaatattctaaactgatgaaaaaaaaaaaaaaaaa

SEQ ID NO: 5650 - DNA, 600 bp, Homo sapiens
tagaatgaaaactcattacttttccattcccaatctagtgctagatgtataaatctttcttttgattcttcctaacaaaatattttctgggttaaaaccccagccaactcattgggttgtagccaaaggttcactctcaagaagctttaatatttaaataaaatcatattgaatgtttccaacctggagtataatattcagatataaaacagttttgtcagtctttcttagtgcctgtgtggatttttgtgaaaatgtcaaagagaaaacttatatactatttcccttgaaattttaaactatattttctttacaggtatttataatataccaatgcttttatcaaacagaattttaaagagcataataaattatattaaagaaccaaaagttttcctgagaataagaaagtttcacccaataaaatatttttgaaaggcatgttcctctgtcaatgaaaaaaagtacatgtatgtgttgtgatattaaaagtgacatttgtctaatagcctaatacaacatgtagctgagtttaacatgtgtggtcttggtattcttaagggaacttccacattatacatttgatgtattgaccagaat

SEQ ID NO: 5651 - DNA, 1400 bp, Homo sapiens
aactgaactctgaccacttaaaaaaaaatctaaaaattgaactacctatagtagtctgtgtttaaagtgaatttttaaagacaaagcattctaaatgaactcaatataaaaacattcatttggaatgtacatactgaaaaatacaggtttttttgaccaaaagtttttatatcttttctttttatttatttttttcctaagtgccaacaattttctagatattatatacaacacaggctttgatcttggggacttttcccatatatttcacactggagtgaatgaagttgtacttcatttctagagaaaagttatacccaggtccccaattgagaatgtcttgcttgattgaaaacgacatcatcccttggtatactccagggattggtttcaggacccctgcatttaccaaaatttgtgcacactcaagtcctgcagtcacccctgcctaaagatagaatggcttctctgtttttcttctgaaatacaaccagaaacaatgtgtctatttctgaaagaataggattaatgatcatacaaatgggttaatcctgaattctggttgtaaatctggttacagcataactaggattataatgctgcctcattttcacagcactacttgcttatattgacaacaaatcatctcgctaaagagtgaatgtaggccaggcgcggtggctcatgcctgtaatcccagcactttgggaggccgaggcgggtggatcacgaggtcaggagatcgagaccatcctggctaacatggtaaaaccccgtctctactaaaaatagaaaaaaagaaattagcctagcgtggtggctggcgggcgcctgtagtcccagctatttgggaggctaaggcaggagaatggcgtgaacccgggaggcggagcttgcagtgagccgaggtcgtgccactgcactccagcctgggcgacagagcaagactccgtctcaaaaaaaaaaaaaaaaaaaaaaaaagagtgaatgtaatagtcttgcagaaaatgaatgaatacctttgttcaataaaggaaatatgcactgctcacttttttgaaggaaatgccaaagttacgttttacaacaaggctagagtttgtaaattctgggttcatttgtgatgacataagtcagcaaactgcgggaatactgtctcttctatgtattttgtgaatagtaagcataattttagttttgtattatcaatgaaaatttcacttgaaattaaagctgccttttgttatatttttaacctataggataagattccagtattgtatatgagttttaacaaattaaaaaatcaaatcatgtacatttgaaaatatttgcacacatttaaaaataaatgtaaagttgtcttttaaactactcggatgtgtcctttctgaacaaaa

SEQ ID NO: 5652 - DNA, 1400 bp, Homo sapiens
attccagaattccaaaccttagcaggcgctttcagtatagatggctggaattctcaagggtaatccaggggaccacaactttgctgcctcaatgggacaaatgtgtaaactttattgaaagtgccctcccttatgttgttggaaagatgtttgtagatgtgtacttccaggaagataagaaggaaatgatggaggaattggttgagggcgttcgctgggcctttattgacatgctagagaaagaaaatgagtggatggatgcaggaacgaaaaggaaagccaaagaaaaggcgagagctgttttggcaaaagttggctatccagagtttataatgaatgatactcatgttaatgaagacctcaaagctatcaagttttcagaagccgactactttggcaacgtcctacaaactcgcaagtatttagcacagtctgatttcttctggctaagaaaagccgttccaaaaacagagtggtttacaaatccgacgactgtcaatgccttctacagtgcatccaccaaccagatccgatttccagcaggagagctccagaagcctttcttttggggaacagaatatcctcgatctctgagttatggtgctataggagtaattgtcggacatgaatttacacatggatttgataataatggtagaaaatatgataaaaatggaaacctggatccttggtggtctactgaatcagaagaaaagtttaaggaaaaaacaaaatgcatgattaaccagtatagcaactattattggaagaaagctggcttaaatgtcaaggggaagaggaccctgggagaaaatattgctgataatggaggcctgcgggaagcttttagggcttacaggaaatggataaatgacagaaggcagggacttgaggagcctcttctaccaggcatcacattcaccaacaaccagctcttcttcctgagttatgctcatgtgaggtgcaattcctacagaccagaagctgcccgagaacaagtccaaattggtgctcacagtccccctcagtttagggtcaatggtgcaattagtaactttgaagaattccagaaagcttttaactgtccacccaattccacgatgaacagaggcatggactcctgccgactctggtagctgggacgctggtttatggcatcctgagacagttgcacagtgccagcggaggctgcactgagccttcatcgcccattgctttaggcctggagactttcatttttagtgcattttcattatttgggtaggtgacctgcttggatctagacagcatctgttcaaagtcgtagggcttataaagtggaatataagaatgaactaagtatgtttctttagaaaatcaaaccaacaaaaataaatccctaggctacttttgttaaaaaa

SEQ ID NO: 5653 - DNA, 1400 bp, Homo sapiens
gaagctgcgtgacgtgggcgcctactccaagtacctcacctgccctaagaccaagctcaagatctcctataaggacgcgctggaccgcagcatggtggaggagggcacggggctgcggctgctggaggctgccgcgcagtccaccaagggctactacagcccctacagcgtcagcggctccggctctaccgctggctcccgcaccggctcgcgcaccggctcccgggccggctcccgccgcggcagctttgacgccaccggctccggcttctccatgaccttctcttcatcctcctactcctcctcgggctacggccgccgctacgcctcggggtcctcggcctccctggggggccctgagtctgccgtggcctgaggctgcctgcgcccaccccgctctgcatgcggcccagcccggctcccaccgaggcgcgggggccgttttcaacgcttaaaggtgtcttcctcccaagtggtgcctaaagtttaaccaaaaagaccagactaatatattaatatatatctgctgtccagacagcctgtatcttgggggacagggctggcccagccctgctggccgcctcaccccctcgggtctcctcactcccttctacctgccactcacacagccaggtgccttggagggtcccaagctgggccccagcccaccctcctgtcttcccagggtagcccgcctgccagtcctagctgcacagggcagctgggcccaaccctgtctgtagagggccctggtgtttctagcactggcctgcacggtgggccttgctggggacggggggccccagtcagcctctctcccagtctacccagagaagccccttccccatgggaagacgaggccctcgggcccagcccccacagtgctgtctgatctgtgctttccagctcaccccccacactcactcctgagacccctggcctccggcgtcagcctccagcctctgttcccctagtaagtgccttccatgtcggcctctaaccccaggccccgaggacccagacccagtggggaggcggacgttccagccggcatggctgggaactgcagacctgtcctcctggtgggtccaggggcccctccagcttgtggagccccacactggggtgccgcctgcccgtctctctcccatggagccccagccccctttgggcccagggacaccagccaggctctgtgctgaccctcctgttgcgcccagccctggtctcagcagcgaccacccctgcctccaccctctgagctttgcatgttccactaaccccgggcgggtggcaggtggaggtgtcaggctgctggcgcctctgcaagggcagaacactaacctgaccgtgggcggggccttgcggtatccgcccccaataaaagcaattccaacctt

SEQ ID NO: 5654 - DNA, 1400 bp, Homo sapiens
tggtgctctacaagtaccgctgctacaagttcatccatggctggttgatcatgtcttcactgatgctgctgttcctcttcacctatatctaccttggggaagtgctcaagacctacaatgtggccatggactaccccaccctcttgctgactgtctggaacttcggggcagtgggcatggtgtgcatccactggaagggccctctggtgctgcagcaggcctacctcatcatgatcagtgcgctcatggccctagtgttcatcaagtacctcccagagtggtccgcgtgggtcatcctgggcgccatctctgtgtatgatctcgtggctgtgctgtgtcccaaagggcctctgagaatgctggtagaaactgcccaggagagaaatgagcccatattccctgccctgatatactcatctgccatggtgtggacggttggcatggcgaagctggacccctcctctcagggtgccctccagctcccctacgacccggagatggaagaagactcctatgacagttttggggagccttcataccccgaagtctttgagcctcccttgactggctacccaggggaggagctggaggaagaggaggaaaggggcgtgaagcttggcctcggggacttcatcttctacagtgtgctggtgggcaaggcggctgccacgggcagcggggactggaataccacgctggcctgcttcgtggccatcctcattggcttgtgtctgaccctcctgctgcttgctgtgttcaagaaggcgctgcccgccctccccatctccatcacgttcgggctcatcttttacttctccacggacaacctggtgcggccgttcatggacaccctggcctcccatcagctctacatctgagggacatggtgtgccacaggctgcaagctgcagggaattttcattggatgcagttgtatagttttacactctagtgccatatatttttaagacttttctttccttaaaaaataaagtacgtgtttacttggtgaggaggaggcagaaccagctctttggtgccagctgtttcatcaccagactttggctcccgctttggggagcgcctcgcttcacggacaggaagcacagcaggtttatccagatgaactgagaaggtcagattagggcggggagaagagcatccggcatgagggctgagatgcgcaaagagtgtgctcgggagtggcccctggcacctgggtgctctggctggagaggaaaagccagttccctacgaggagtgttcccaatgctttgtccatgatgtccttgttattttattgcctttagaaactgagtcctgttcttgttacggcagtcacactgctgggaagtggcttaatagtaatatcaataaatagatgagtcctgttagaaaaa

SEQ ID NO: 5655 - DNA, 560 bp, Homo sapiens; identical to SEQ ID NO: 420

SEQ ID NO: 5656 - DNA, 1400 bp, Homo sapiens
catgtgcttgtgcctacctggccgcaagtccccagcccctcaaccctccgttcctcctcagcctccctttgccagccacccctcctctagctctggtgggaggcccggggcccttcctcgcacagggcatgcctggcctgaggacccggcgctgagtggcggggcccctgctccgaggggctcatgttcaggcagaaccggtcccagcctgggctcctctgcatcttgctctgtgccttggccctgacccccatcgctctgagcatatgttccatgcctgccttgccggggcctggactgcacaggcagcaaggtcatggtctgagtggggcttcctgggcagttggggcggcccacgccagctggcccagtgggtagtgaattggcttccttgacgcgagaggctctgagggtctgaaaagggcatctcaatggcatgggtgggtggggagtcagtcatgtcactgaaattgaatgggggaggcccaatgaggtggctcatgcctgtaatcccagcactttgggaagctgaggcaggaggatcacctgaggtcaggagttcgagagcagcctggccaacatggcaaaaccccttatttactaaaaatacaaaaacttagccgggcatggtggcatgtgcctgtattcccagctactcatgaggctgaggcaggagaatggcgtgaacccgggagtggagcttgcaatgagccaagattgcgccactgcactccagcctgggtgacagagcaagactccgtctcaaaaaaaaaaaaaaaaaaaaagaaattaattgggggagtcatggtcaggggtgagacctgaaggacctccccctgtgtggccctggacacagcccaccctctgtgagccgtttccaattctaaaacagactcaatgtccccctcacccccacctcaaggtcaggatgcgaacacactgagtgaggagtggacgctgtccattgccacggccatgagggctggagaccagaacagcatggcccgaagcgtgcggggccccggatgacttggggacaccccagaatcccctggggagaacccttcctgcgcgctttcattttttgacctcatcactgagaaaggctcaatttggtgctcacgtgtccttaacacctgatctggcccaagctgcgtgccctttaagccaagagagcctcttgtggaccccgcctgcccgaatgaaatccgaacagttggggctgttatggcaagtggggctggtttttcatttccattggttatttaaagtttcctttaaaataaacgattttaagttataaaaggtgaatctattgaaagaagaacatcaaagaaataaacaggagttcagcggagtagcagaagacaaggcatgtagggggagccattctgtcccag

SEQ ID NO: 5657 - DNA, 1400 bp, Homo sapiens
actcaggatatgaagttcatcatcaaaaattggtgttctttgcagaagatgtgggttcaaacaaaggtgcaatcattggactcatggtgggcggtgttgtcatagcgacagtgatcgtcatcaccttggtgatgctgaagaagaaacagtacacatccattcatcatggtgtggtggaggttgacgccgctgtcaccccagaggagcgccacctgtccaagatgcagcagaacggctacgaaaatccaacctacaagttctttgagcagatgcagaactagacccccgccacagcagcctctgaagttggacagcaaaaccattgcttcactacccatcggtgtccatttatagaataatgtgggaagaaacaaacccgttttatgatttactcattatcgccttttgacagctgtgctgtaacacaagtagatgcctgaacttgaattaatccacacatcagtaatgtattctatctctctttacattttggtctctatactacattattaatgggttttgtgtactgtaaagaatttagctgtatcaaactagtgcatgaatagattctctcctgattatttatcacatagccccttagccagttgtatattattcttgtggtttgtgacccaattaagtcctactttacatatgctttaagaatcgatgggggatgcttcatgtgaacgtgggagttcagctgcttctcttgcctaagtattcctttcctgatcactatgcattttaaagttaaacatttttaagtatttcagatgctttagagagattttttttccatgactgcattttactgtacagattgctgcttctgctatatttgtgatataggaattaagaggatacacacgtttgtttcttcgtgcctgttttatgtgcacacattaggcattgagacttcaagcttttctttttttgtccacgtatctttgggtctttgataaagaaaagaatccctgttcattgtaagcacttttacggggcgggtggggaggggtgctctgctggtcttcaattaccaagaattctccaaaacaattttctgcaggatgattgtacagaatcattgcttatgacatgatcgctttctacactgtattacataaataaattaaataaaataaccccgggcaagacttttctttgaaggatgactacagacattaaataatcgaagtaattttgggtggggagaagaggcagattcaattttctttaaccagtctgaagtttcatttatgatacaaaagaagatgaaaatggaagtggcaatataaggggatgaggaaggcatgcctggacaaacccttcttttaagatgtgtcttcaatttgtataaaatggtgttttcatgtaaataaatacattcttggaggagc

SEQ ID NO: 5658 - DNA, 1400 bp, Homo sapiens; identical to SEQ ID NO: 5657

SEQ ID NO: 5659 - DNA, 600 bp, Homo sapiens
catcgactacatcgcaggcctagactcccgaggcttcctctttggcccctccctggcccaggagcttggactgggctgcgtgctcatccgaaagcgggggaagctgccaggccccactctgtgggcctcctattccctggagtacgggaaggctgagctggagattcagaaagacgccctggagccaggacagagggtggtcgtcgtggatgatctgctggccactggtggaaccatgaacgctgcctgtgagctgctgggccgcctgcaggctgaggtcctggagtgcgtgagcctggtggagctgacctcgcttaagggcagggagaagctggcacctgtacccttcttctctctcctgcagtatgagtgaccacagggcctcccagcccaacatctccagctggatcccagggaaatatcagccttgggcaactgcagtgaccaggggcaccggctgcccacagggaacacattcctttgctggggttcagcgcctctcctggggctggaagtgccaaagcctggggcaaagctgtgtttcagccacactgaacccaattacacacagcgggagaacgcagtaaacagctttcccac

SEQ ID NO: 5660 - DNA, 600 bp, Homo sapiens
acaaggaaggaactgttctacaaggctgatggagagtcgtgttcagcatctatgatgtaccaggaaggcaagttccgttatcggcgcgtggctgaaggcacccaggtgcttgagttgcccttcaaaggtgatgacatcaccatggtcctcatcttgcccaagcctgagaagagcctggccaaggtggagaaggaactcaccccagaggtgctgcaggagtggctggatgaattggaggagatgatgctggtggtccacatgccccgcttccgcattgaggacggcttcagtttgaaggagcagctgcaagacatgggccttgtcgatctgttcagccctgaaaagtccaaactcccaggtattgttgcagaaggccgagatgacctctatgtctcagatgcattccataaggcatttcttgaggtaaatgaagaaggcagtgaagcagctgcaagtaccgctgttgtgattgctggccgttcgctaaaccccaacagggtgactttcaaggccaacaggcctttcctggtttttataagagaagttcctctgaacactattatcttcatgggcagagtagccaacccttgtgttaagtaa

SEQ ID NO: 5661 - DNA, 1400 bp, Homo sapiens
tagaaaatgtattacattttattttttcttaatccagttctgcaaaaatgacctataaatttattcatgtacaattttggttacttgaattgttaaagaaaacattgtttttgactatgggagtcaactcaacatggcagaaccatttttgagatgatgatacaacaggtagtgaaacagcttaagaattccaaaaaaaaaaaaaaaaaaaaaaaaaaagaaaactgggtttgggctttgctttaggtatcactggattagaatgagtttaacattagctaaaactgctttgagttgtttggatgattaagagattgccatttttatcttggaagaactagtggtaaaacatccaagagcactaggattgtgatacagaatttgtgaggtttggtggatccacgcccctctcccccactttcccatgatgaaatatcactaataaatcctgtatatttagatattatgctagccatgtaatcagatttatttaattgggtggggcaggtgtgtatttactttagaaaaaatgaaaaagacaagatttatgagaaatatttgaaggcagtacactctggccaactgttaccagttggtatttctacaagttcagaatattttaaacctgatttactagacctgggaattttcaacatggtctaattatttactcaaagacatagatgtgaaatttaggcaaccttctaaatcttttcaccatggatgaaactataacttaaagataatacttagaagggttaattggaaatcagagtttgaaataaaacttggaccactttgtatacactcttctcacttgacattttagctatataatatgtactttgagtataacatcaagctttaacaaatatttaaagacaaaaaaatcacgtcagtaaaatactaaaaggctcatttttatatttgttttagatgttttaaatagttgcaatggattaaaaatgatgatttaaaatgttgcttgtaatacagttttgcctgctaaattctccacattttgtaacctgttttatttctttgggtgtaaagcgtttttgcttagtattgtgatattgtatatgttttgtcccagttgtatagtaatgtttcagtccatcatccagctttggctgctgaaatcatacagctgtgaagacttgcctttgtttctgttagactgcttttcagttctgtattgagtatcttaagtactgtagaaaagatgtcacttcttcctttaaggctgttttgtaatatatataaggactggaattgtgtttttaaagaaaagcattcaagtatgacaatatactatctgtgttttcaccattcaaagtgctgtttagtagttgaaacttaaactatttaatgtcatttaataaagtgaccaaaatgtg

SEQ ID NO: 5662 - DNA, 1400 bp, Homo sapiens
ttaaaaacctggagccactggtccatccaaattgtggacgtgattccctttctcaggttcttccccaatccaggtctccggaggctgaagcaggccatagagaagagggatcacatcgtggagatgcagctgaggcagcacaaggagagcctcgtggcaggccagtggagggacatgatggactacatgctccaaggggtggcgcagccgagcatggaagagggctctggacagctcctggaagggcacgtgcacatggctgcagtggacctcctgatcggtggcactgagaccacagcaaacaccctctcctgggccgtggtttttttgcttcaccaccctgagattcagcagcgactgcaggaggagctagaccacgaactgggccctggtgcctccagctcccgggtcccctacaaggaccgtgcacggctgcccttgctcaatgccaccatcgccgaggtgctgcgcctgcggcccgttgtgcccttagccttgccccaccgcaccacacggcccagcagcatctccggctacgacatccctgagggcacagtcatcattccgaacctccaaggcgcccacctggatgagacggtctgggagaggccacatgagttctggcctgatcgcttcctggagccaggcaagaactccagagctctggccttcggctgcggtgcccgcgtgtgcctgggcgagccgctggcgcgcctggagctcttcgtggtgctgacccgactgctgcaggccttcacgctgctgccctccggggacgccctgccctccctgcagcccctgccccactgcagtgtcatcctcaagatgcagcctttccaagtgcggctgcagccccgggggatgggggcccacagcccgggccagagccagtgatggggcaggaccgatgccagccgggtacctcagtttctcctttattgctcctgtacgaacccctcccctcccccctgtaaacacagtgctgcgagatcgctggcagagaaggcttcctccagcggctgggtggtgaaggaccctggctcttctctcggggcgacccctcagtgctcggcagtcatactggggtgcgagagaggtgggcagcagctcagcctccccccgctggggagcgaaagtttcttggtctcagcttcatttccgtgaagggcaccgagaactcgaagcccttccagtggtaccagctcactccctgggaaaggggttgtcaagagagagtcaaagccggatgtcccatctgctcctcccattccccttaaggaggtagctcccagcactcaaccaacctccccgcagagctcccttcctgaccctccgctgcagaggattgaggcttaattctgagctggccctttccagccaataaatcaactccagctccc

SEQ ID NO: 5663 - DNA, 600 bp, Homo sapiens
cggagcaggaggagggcggtgaggcggtgcacgaggtggaggtggtcatcaagcacaaccggttcacaaaggagacctatgacttcgacatcgccgtgctccggctcaagacccccatcaccttccgcatgaacgtggcgcctgcctgcctccccgagcgtgactgggccgagtccacgctgatgacgcagaagacggggattgtgagcggcttcgggcgcacccacgagaagggccggcagtccaccaggctcaagatgctggaggtgccctacgtggaccgcaacagctgcaagctgtccagcagcttcatcatcacccagaacatgttctgtgccggctacgacaccaagcaggaggatgcctgccagggggacagcgggggcccgcacgtcacccgcttcaaggacacctacttcgtgacaggcatcgtcagctggggagagggctgtgcccgtaaggggaagtacgggatctacaccaaggtcaccgccttcctcaagtggatcgacaggtccatgaaaaccaggggcttgcccaaggccaagagccatgccccggaggtcataacgtcctctccattaaagtgagatcccactc

SEQ ID NO: 5664 - DNA, 1400 bp, Homo sapiens
cccggtgggctacaccggacccttctgcgacgtggacaccaaggcaagctgctatgatggccgcgggctcagctaccgcggcctggccaggaccacgctctcgggtgcgccctgtcagccgtgggcctcggaggccacctaccggaacgtgactgccgagcaagcgcggaactggggactgggcggccacgccttctgccggaacccggacaacgacatccgcccgtggtgcttcgtgctgaaccgcgaccggctgagctgggagtactgcgacctggcacagtgccagaccccaacccaggcggcgcctccgaccccggtgtcccctaggcttcatgtcccactcatgcccgcgcagccggcaccgccgaagcctcagcccacgacccggaccccgcctcagtcccagaccccgggagccttgccggcgaagcgggagcagccgccttccctgaccaggaacggcccactgagctgcgggcagcggctccgcaagagtctgtcttcgatgacccgcgtcgttggcgggctggtggcgctacgcggggcgcacccctacatcgccgcgctgtactggggccacagtttctgcgccggcagcctcatcgccccctgctgggtgctgacggccgctcactgcctgcaggaccggcccgcacccgaggatctgacggtggtgctcggccaggaacgccgtaaccacagctgtgagccgtgccagacgttggccgtgcgctcctaccgcttgcacgaggccttctcgcccgtcagctaccagcacgacctggctctgttgcgccttcaggaggatgcggacggcagctgcgcgctcctgtcgccttacgttcagccggtgtgcctgccaagcggcgccgcgcgaccctccgagaccacgctctgccaggtggccggctggggccaccagttcgagggggcggaggaatatgccagcttcctgcaggaggcgcaggtaccgttcctctccctggagcgctgctcagccccggacgtgcacggatcctccatcctccccggcatgctctgcgcagggttcctcgagggcggcaccgatgcgtgccagggtgattccggaggcccgctggtgtgtgaggaccaagctgcagagcgccggctcaccctgcaaggcatcatcagctggggatcgggctgtggtgaccgcaacaagccaggcgtctacaccgatgtggcctactacctggcctggatccgggagcacaccgtttcctgattgctcagggactcatctttccctccttggtgattccgcagtgagagagtggctggggcatggaaggcaagattgtgtcccattcccccagtgcggccagctccgcgccaggatggcgaggaactcaataaagtgctttgaaaatgctgag

SEQ ID NO: 5665 - DNA, 1400 bp, Homo sapiens
tcaagtcactgtagcgatgactccacgctccgaaggctccagtgtgaatctgtcacctccattggagcagtgtgtccctgatcgggggcagcagtaccaggggcgcctggcggtgaccacacatgggctcccctgcctggcctgggccagcgcacaggccaaggccctgagcaagcaccaggacttcaactcagctgtgcagctggtggagaacttctgccgcaacccagacggggatgaggagggcgtgtggtgctatgtggccgggaagcctggcgactttgggtactgcgacctcaactattgtgaggaggccgtggaggaggagacaggagatgggctggatgaggactcagacagggccatcgaagggcgtaccgccaccagtgagtaccagactttcttcaatccgaggacctttggctcgggagaggcagactgtgggctgcgacctctgttcgagaagaagtcgctggaggacaaaaccgaaagagagctcctggaatcctacatcgacgggcgcattgtggagggctcggatgcagagatcggcatgtcaccttggcaggtgatgcttttccggaagagtccccaggagctgctgtgtggggccagcctcatcagtgaccgctgggtcctcaccgccgcccactgcctcctgtacccgccctgggacaagaacttcaccgagaatgaccttctggtgcgcattggcaagcactcccgcacaaggtacgagcgaaacattgaaaagatatccatgttggaaaagatctacatccaccccaggtacaactggcgggagaacctggaccgggacattgccctgatgaagctgaagaagcctgttgccttcagtgactacattcaccctgtgtgtctgcccgacagggagacggcagccagcttgctccaggctggatacaaggggcgggtgacaggctggggcaacctgaaggagacgtggacagccaacgttggtaaggggcagcccagtgtcctgcaggtggtgaacctgcccattgtggagcggccggtctgcaaggactccacccggatccgcatcactgacaacatgttctgtgctggttacaagcctgatgaagggaaacgaggggatgcctgtgaaggtgacagtgggggaccctttgtcatgaagagcccctttaacaaccgctggtatcaaatgggcatcgtctcatggggtgaaggctgtgaccgggatgggaaatatggcttctacacacatgtgttccgcctgaagaagtggatacagaaggtcattgatcagtttggagagtaggggccactcatattctgggctcctggaaccaatcccgtgaaagaattatttttgtgtttctaaaactatggttcccaataaaagtgactctcagcgg

SEQ ID NO: 5666 - DNA, 1400 bp, Homo sapiens
agaatctggtaaaagcaccattgtgaagcagatgaggatcctgcatgttaatgggtttaatggagagggcggcgaagaggacccgcaggctgcaaggagcaacagcgatggtgagaaggcaaccaaagtgcaggacatcaaaaacaacctgaaagaggcgattgaaaccattgtggccgccatgagcaacctggtgccccccgtggagctggccaaccccgagaaccagttcagagtggactacatcctgagtgtgatgaacgtgcctgactttgacttccctcccgaattctatgagcatgccaaggctctgtgggaggatgaaggagtgcgtgcctgctacgaacgctccaacgagtaccagctgattgactgtgcccagtacttcctggacaagatcgacgtgatcaagcaggctgactatgtgccgagcgatcaggacctgcttcgctgccgtgtcctgacttctggaatctttgagaccaagttccaggtggacaaagtcaacttccacatgtttgacgtgggtggccagcgcgatgaacgccgcaagtggatccagtgcttcaacgatgtgactgccatcatcttcgtggtggccagcagcagctacaacatggtcatccgggaggacaaccagaccaaccgcctgcaggaggctctgaacctcttcaagagcatctggaacaacagatggctgcgcaccatctctgtgatcctgttcctcaacaagcaagatctgctcgctgagaaagtccttgctgggaaatcgaagattgaggactactttccagaatttgctcgctacactactcctgaggatgctactcccgagcccggagaggacccacgcgtgacccgggccaagtacttcattcgagatgagtttctgaggatcagcactgccagtggagatgggcgtcactactgctaccctcatttcacctgcgctgtggacactgagaacatccgccgtgtgttcaacgactgccgtgacatcattcagcgcatgcaccttcgtcagtacgagctgctctaagaagggaacccccaaatttaattaaagccttaagcacaattaattaaaagtgaaacgtaattgtacaagcagttaatcacccaccatagggcatgattaacaaagcaacctttcccttcccccgagtgattttgcgaaacccccttttcccttcagcttgcttagatgttccaaatttagaaagcttaaggcggcctacagaaaaaggaaaaaaggccacaaaagttccctctcactttcagtaaaaataaataaaacagcagcagcaaacaaataaaatgaaataaaagaaacaaatgaaataaatattgtgttgtgcagcattaaaaaaaatcaaaataaaaattaaatgtgagcaaag

SEQ ID NO: 5667 - DNA, 626 bp, Homo sapiens; identical to SEQ ID NO: 432

SEQ ID NO: 5668 - DNA, 600 bp, Homo sapiens
aaaaataaataaatcctccagtctggatcgtttgacgggacttcaggttctttctgaaatcgccgtgttactgttgcactgatgtccggagagacagtgacagcctccgtcagactcccgcgtgaagatgtcacaagggattggcaattgtccccagggacaaaacactgtgtcccccccagtgcagggaaccgtgataagcctttctggtttcggagcacgtaaatgcgtccctgtacagatagtggggattttttgttatgtttgcactttgtatattggttgaaactgttatcacttatatatatatatacacacatatatataaaatctatttatttttgcaaaccctggttgctgtatttgttcagtgactattctcggggccctgtgtagggggttattgcctctgaaatgcctcttctttatgtacaaagattatttgcacgaactggactgtgtgcaacgctttttgggagaatgatgtccccgttgtatgtatgagtggcttctgggagatgggtgtcactttttaaaccactgtatagaaggtttttgtagcctgaatgtcttactgtgatcaattaaatttcttaaatg

SEQ ID NO: 5669 - DNA, 600 bp, Homo sapiens
cgtgctccaggggcagaggctcatagcacctcagactctcaacttaactgctgttaatgaagctgttctgatagaaaatctggaaatatttagaaagaatggctttgattttgttatcgatgaaaatgctccagtcactgaaagggctaaactgatttccttgccaactagtaaaaactggaccttcggaccccaggacgtcgatgaactgatcttcatgctgagcgacagccctggggtcatgtgccggccttcccgagtcaagcagatgtttgcctccagagcctgccggaagtcggtgatgattgggactgctcttaacacaagcgagatgaagaaactgatcacccacatgggggagatggaccacccctggaactgtccccatggaaggccaaccatgagacacatcgccaacctgggtgtcatttctcagaactgaccgtagtcactgtatggaataattggttttatcgcagatttttatgttttgaaagacagagtcttcactaaccttttttgttttaaaatgaaacctgctacttaaaaaaaatacacatcacacccatttaaaagtgatcttgagaaccttttcaaacc

SEQ ID NO: 5670 - DNA, 1400 bp, Homo sapiens
gatgcctcgctggggactgctgctgctgctctggggctcctgtacctttggtctcccgacagacaccaccacctttaaacggatcttcctcaagagaatgccctcaatccgagaaagcctgaaggaacgaggtgtggacatggccaggcttggtcccgagtggagccaacccatgaagaggctgacacttggcaacaccacctcctccgtgatcctcaccaactacatggacacccagtactatggcgagattgggatcgggaccccaccccaaaccttcaaagtcgtctttgacactggttcgtccaatgtttgggtgccctcctccaagtgcagccgtctctacactgcctgtgtgtatcacaagctcttcgatgcttcggattcctccagctacaagcacaatggaacagaactcaccctccgctattcaacagggacagtcagtggctttctcagccaggacatcatcaccgtgggtggaatcacggtgacacagatgtttggagaggtcacggagatgcccgccttacccttcatgctggccgagtttgatggggttgtgggcatgggcttcattgaacaggccattggcagggtcacccctatcttcgacaacatcatctcccaaggggtgctaaaagaggacgtcttctctttctactacaacagagattccgagaattcccaatcgctgggaggacagattgtgctgggaggcagcgacccccagcattacgaagggaatttccactatatcaacctcatcaagactggtgtctggcagattcaaatgaagggggtgtctgtggggtcatccaccttgctctgtgaagacggctgcctggcattggtagacaccggtgcatcctacatctcaggttctaccagctccatagagaagctcatggaggccttgggagccaagaagaggctgtttgattatgtcgtgaagtgtaacgagggccctacactccccgacatctctttccacctgggaggcaaagaatacacgctcaccagcgcggactatgtatttcaggaatcctacagtagtaaaaagctgtgcacactggccatccacgccatggatatcccgccacccactggacccacctgggccctgggggccaccttcatccgaaagttctacacagagtttgatcggcgtaacaaccgcattggcttcgccttggcccgctgaggccctctgccacccaggcaggccctgccttcagccctggcccagagctggaacactctctgagatgcccctctgcctgggcttatgccctcagatggagacattggatgtggagctcctgctggatgcgtgccctgacccctgcaccagcccttccctgctttgaggacaaagagaataaagacttcatgttcac

SEQ ID NO: 5671 - DNA, 600 bp, Homo sapiens
tgtctgaagagctggagctggaattattaccgaattgtagccaggtatgagaacaccctggctgctcagttctttggccacactcatgtggatgaatttgaggtcttctatgatgaagagactctgagccggccgctggctgtagccttcctggcacccagtgcaactacctacatcggccttaatcctggttaccgtgtgtaccaaatagatggaaactactccgggagctctcacgtggtcctggaccatgagacctacatcctgaatctgacccaggcaaacataccgggagccataccgcactggcagcttctctacagggctcgagaaacctatgggctgcccaacacactgcctaccgcctggcacaacctggtatatcgcatgcggggcgacatgcaacttttccagaccttctggtttctctaccataagggccacccaccctcggagccctgtggcacgccctgccgtctggctactctttgtgcccagctctctgcccgtgctgacagccctgctctgtgccgccacctgatgccagatgggagcctcccagaggcccagagcctgtggccaaggccactgttttgctag

SEQ ID NO: 5672 - DNA, 600 bp, Homo sapiens
cagtatgaggacatggtcgtggagtcgtgtggctgcaggtagcagcactggccctctgtcttcctgggtggcacatcccaagagccccttcctgcactcctggaatcacagaggggtcaggaagctgtggcaggagcatctacacagcttgggtgaaaggggattccaataagcttgctcgctctctgagtgtgacttgggctaaaggcccccttttatccacaagttcccctggctgaggattgctgcccgtctgctgatgtgaccagtggcaggcacaggtccagggagacagactctgaatgggactgagtcccaggaaacagtgctttccgatgagactcagcccaccatttctcctcacctgggccttctcagcctctggactctcctaagcacctctcaggagagccacaggtgccactgcctcctcaaatcacatttgtgcctggtgacttcctgtccctgggacagttgagaagctgactgggcaagagtgggagagaagaggagagggcttggatagagttgaggagtgtgaggctgttagactgttagatttaaatgtatattgatgagataaaaagcaaaactgtgcct

SEQ ID NO: 5673 - DNA, 1400 bp, Homo sapiens
ggagtgacccgttgccagagtgcagagaaatttattgtccagcaccaccacaaattgacaatggaataattcaaggggaacgtgaccattatggatatagacagtctgtaacgtatgcatgtaataaaggattcaccatgattggagagcactctatttattgtactgtgaataatgatgaaggagagtggagtggcccaccacctgaatgcagaggaaaatctctaacttccaaggtcccaccaacagttcagaaacctaccacagtaaatgttccaactacagaagtctcaccaacttctcagaaaaccaccacaaaaaccaccacaccaaatgctcaagcaacacggagtacacctgtttccaggacaaccaagcattttcatgaaacaaccccaaataaaggaagtggaaccacttcaggtactacccgtcttctatctgggcacacgtgtttcacgttgacaggtttgcttgggacgctagtaaccatgggcttgctgacttagccaaagaagagttaagaagaaaatacacacaagtatacagactgttcctagtttcttagacttatctgcatattggataaaataaatgcaattgtgctcttcatttaggatgctttcattgtctttaagatgtgttaggaatgtcaacagagcaaggagaaaaaaggcagtcctggaatcacattcttagcacacctacacctcttgaaaatagaacaacttgcagaattgagagtgattcctttcctaaaagtgtaagaaagcatagagatttgttcgtatttagaatgggatcacgaggaaaagagaaggaaagtgatttttttccacaagatctgtaatgttatttccacttataaaggaaataaaaaatgaaaaacattatttggatatcaaaagcaaataaaaacccaattcagtctcttctaagcaaaattgctaaagagagatgaaccacattataaagtaatctttggctgtaaggcattttcatctttccttcgggttggcaaaatattttaaaggtaaaacatgctggtgaaccaggggtgttgatggtgataagggaggaatatagaatgaaagactgaatcttcctttgttgcacaaatagagtttggaaaaagcctgtgaaaggtgtcttctttgacttaatgtctttaaaagtatccagagatactacaatattaacataagaaaagattatatattatttctgaatcgagatgtccatagtcaaatttgtaaatcttattcttttgtaatatttatttatatttatttatgacagtgaacattctgattttacatgtaaaacaagaaaagttgaagaagatatgtgaagaaaaatgtatttttcctaaatagaaataaatgatcccattttttggt

SEQ ID NO: 5674 - DNA, 1400 bp, Homo sapiens
tcacctgtgccataccagttaaacaggctgattctggaagttctgaggaaaagcagctttacaacaaatacccagatgctgtggccacatggctaaaccctgacccatctcagaagcagaatctcctagccccacagacccttccaagtaagtccaacgaaagccatgaccacatggatgatatggatgatgaagatgatgatgaccatgtggacagccaggactccattgactcgaacgactctgatgatgtagatgacactgatgattctcaccagtctgatgagtctcaccattctgatgaatctgatgaactggtcactgattttcccacggacctgccagcaaccgaagttttcactccagttgtccccacagtagacacatatgatggccgaggtgatagtgtggtttatggactgaggtcaaaatctaagaagtttcgcagacctgacatccagtaccctgatgctacagacgaggacatcacctcacacatggaaagcgaggagttgaatggtgcatacaaggccatccccgttgcccaggacctgaacgcgccttctgattgggacagccgtgggaaggacagttatgaaacgagtcagctggatgaccagagtgctgaaacccacagccacaagcagtccagattatataagcggaaagccaatgatgagagcaatgagcattccgatgtgattgatagtcaggaactttccaaagtcagccgtgaattccacagccatgaatttcacagccatgaagatatgctggttgtagaccccaaaagtaaggaagaagataaacacctgaaatttcgtatttctcatgaattagatagtgcatcttctgaggtcaattaaaaggagaaaaaatacaatttctcactttgcatttagtcaaaagaaaaaatgctttatagcaaaatgaaagagaacatgaaatgcttctttctcagtttattggttgaatgtgtatctatttgagtctggaaataactaatgtgtttgataattagtttagtttgtggcttcatggaaactccctgtaaactaaaagcttcagggttatgtctatgttcattctatagaagaaatgcaaactatcactgtattttaatatttgttattctctcatgaatagaaatttatgtagaagcaaacaaaatacttttacccacttaaaaagagaatataacattttatgtcactataatcttttgttttttaagttagtgtatattttgttgtgattatctttttgtggtgtgaataaatcttttatcttgaatgtaataagaatttggtggtgtcaattgcttatttgttttcccacggttgtccagcaattaataaaacataaccttttttactgcctaaaaaaaaaaaaaaaaaaaa

SEQ ID NO: 5675 - DNA, 600 bp, Homo sapiens
ggggaagtgccctcgccagcgtcgcgccctggagcggggtctgcaggacgaggatggctacaggatgaagtttgcctgctactacccccgtgtggagtacggcttccaggttaaggttctccgagaagacagcagagctgctttccgcctctttgagaccaagatcacccaagtcctgcacttcaccaaggatgtcaaggccgctgctaatcagatgcgcaacttcctggttcgagcctcctgccgccttcgcttggaacctgggaaagaatatttgatcatgggtctggatggggccacctatgacctcgagggacacccccagtacctgctggactcgaatagctggatcgaggagatgccctctgaacgcctgtgccggagcacccgccagcgggcagcctgtgcccagctcaacgacttcctccaggagtatggcactcaggggtgccaggtgtgagggctgccctcccacctccgctgggaggaacctgaacctgggaaccatgaagctggaagcactgctgtgtccgctttcatgaacacagcctgggaccagggcatattaaaggcttttggcagcaaagtgtcagtgttggc

SEQ ID NO: 5676 - DNA, 1400 bp, Homo sapiens
aagaggtttttgaaatgcctatggtttctttgaatggtaaacttgagcatcttttcactttccagtagtcagcaaagagcagtttgaattttcttgtcgcttcctatcaaaatattcagagactcgagcacagcacccagacttcatgcgcccgtggaatgctcaccacatgttggtcgaagcggccgaccactgactttgtgacttaggcggctgtgttgcctatgtagagaacacgcttcacccccactccccgtacagtgcgcacaggctttatcgagaataggaaaacctttaaaccccggtcatccggacatcccaacgcatgctcctggagctcacagccttctgtggtgtcatttctgaaacaagggcgtggatccctcaaccaagaagaatgtttatgtcttcaagtgacctgtactgcttggggactattggagaaaataaggtggagtcctacttgtttaaaaaatatgtatctaagaatgttctagggcactctgggaacctataaaggcaggtatttcgggccctcctcttcaggaatcttcctgaagacatggcccagtcgaaggcccaggatggcttttgctgcggccccgtggggtaggagggacagagagacagggagagtcagcctccacattcagaggcatcacaagtaatgtcacaattcttcggatgactgcagaaaatagtgttttgtagttcaacaactcaagacgaagcttatttctgaggataagctctttaaaggcaaagctttattttcatctctcatcttttgtcctccttagcacaatgtaaaaaagaatagtaatatcagaacaggaaggaggaatggcttgctggggagcccatccaggacactgggagcacatagagattcacccatgtttgttgaacttagagtcattctcatgcttttctttataattcacacatatatgcagagaagatatgttcttgttaacattgtatacaacatagccccaaatatagtaagatctatactagataatcctagatgaaatgttagagatgctatttgatacaactgtggccatgactgaggaaaggagctcacgcccagagactgggctgctctcccggaggccaaacccaagaaggtctggcaaagtcaggctcagggagactctgccctgctgcagacctcggtgtggacacacgctgcatagagctctccttgaaaacagaggggtctcaagacattctgcctacctattagcttttctttatttttttaactttttggggggaaaagtatttttgagaagtttgtcttgcaatgtatttataaatagtaaataaagtttttaccattaaaaaaataaaaaaaaaaaaaaaaaaaaaaaaaaaaaaaaaaaaaaaaaaaa

SEQ ID NO: 5677 - DNA, 600 bp, Homo sapiens
ccccccgcgccccccgcgcccctctttttccccttgatggaaattgaccatacaatttcatcctccttcaggggatcaaaaggacggagtggggggacagagactcagatgaggacagagtggtttccaatgtgttcaatagatttaggagcagaaatgcaaggggctgcatgacctaccaggacagaactttccccaattacagggtgactcacagccgcattggtgactcacttcaatgtgtcatttccggctgctgtgtgtgagcagtggacacgtgaggggggggtgggtgagagagacaggcagctcggattcaactaccttagataatatttctgaaaacctaccagccagagggtagggcacaaagatggatgtaatgcactttgggaggccaaggcgggaggattgcttgagcccaggagttcaagaccagcctgggcaacataccaagacccccgtctctttaaaaatatatatattttaaatatacttaaatatatatttctaatatctttaaatatatatatatattttaaagaccaatttatgggagaattgcacacagatgtgaaatgaatgtaatctaatagaagc

SEQ ID NO: 5678 - DNA, 1400 bp, Homo sapiens
gctccacctgaagaagattgtacatcagtcacagacctgcccaatgcctttgatggaccaattaccataactattgttaaccgtgatggcacccgctatgtccagaaaggagaatacagaacgaatcctgaagacatctaccccagcaaccctactgatgatgacgtgagcagcggctcctccagtgaaaggagcagcacttcaggaggttacatcttttacaccttttctactgtacaccccatcccagacgaagacagtccctggatcaccgacagcacagacagaatccctgctaccagagaccaagacacattccaccccagtggggggtcccataccactcatggatctgaatcagatggacactcacatgggagtcaagaaggtggagcaaacacaacctctggtcctataaggacaccccaaattccagaatggctgatcatcttggcatccctcttggccttggctttgattcttgcagtttgcattgcagtcaacagtcgaagaaggtgtgggcagaagaaaaagctagtgatcaacagtggcaatggagctgtggaggacagaaagccaagtggactcaacggagaggccagcaagtctcaggaaatggtgcatttggtgaacaaggagtcgtcagaaactccagaccagtttatgacagctgatgagacaaggaacctgcagaatgtggacatgaagattggggtgtaacacctacaccattatcttggaaagaaacaaccgttggaaacataaccattacagggagctgggacacttaacagatgcaatgtgctactgattgtttcattgcgaatcttttttagcataaaattttctactctttttgttttttgtgttttgttctttaaagtcaggtccaatttgtaaaaacagcattgctttgtaaattagggcccaattaataatcagcaagaatttgatcgttcagttccacttggaggccttcatcctcgggtgtgctatggatggcttctaacaaaaactacacatatgtattcctgatcgccaacctttcccccaccagctaaggacatttcccagggttaatagggcctggtccctgggaggaaatttgaatgggtccattttgcccttccatagcctaatccctgggcattgctttccactgaggttggggtgtactagttacacatcttcaacagaccccctctagaaatttttcagatgcttctgggagacaccaaagggtgaagctatttatctgtagtaaactatttatctgtgtttttgaaatattaaaccctggatcagtcctttgatcagtataattttttaaagttactttgtcagaggcacaaaagggtttaaactgattcataataaatatctgtacttcttcgatcttc

SEQ ID NO: 5679 - DNA, 600 bp, Homo sapiens
acaacagatctgcaggggtatgttttaccatctgcatccagcctcctgctaactcctagctgactcagcatagattgtataaaatacctttgtaacggctcttagcacactcacagatgtttgaggctttcagaagctcttctaaaaaatgatacacacctttcacaagggcaaactttttccttttccctgtgtattctagtgaatgaatctcaagattcagtagacctaatgacatttgtattttatgatcttggctgtatttaatggcataggctgacttttgcagatggaggaatttcttgattaatgttgaaaaaaaacccttgattatactctgttggacaaaccgagtgcaatgaatgatgcttttctgaaaatgaaatataacaagtgggtgaatgtggttatggccgaaaaggatatgcagtatgcttaatggtagcaactgaaagaagacatcctgagcagtgccagctttcttctgttgatgccgttccctgaacataggaaaatagaaacttgcttatcaaaacttaaaaaaaaaaaaaaaaaaaaaaaaaaaaaaaaaaaaaaaaaaaaaaaaaaaaaaaaaaaaaa

SEQ ID NO: 5680 - DNA, 600 bp, Homo sapiens
gctttcacagagcattcaccgctgacccctcaccgtcgggacctctgtagccgctctatctggctagcaaggaagattcgttcagacctgactgctcttacggaatcctatgtgaagcatcagggcctgaacaagaacatcaacctggactctgcggatgggatgccagtggcaagcactgatcagtggagtgagctgaccgaggcagagcgactccaagagaaccttcaagcttatcgtaccttccatgttttgttggccaggctcttagaagaccagcaggtgcattttaccccaaccgaaggtgacttccatcaagctatacatacccttcttctccaagtcgctgcctttgcataccagatagaggagttaatgatactcctggaatacaagatcccccgcaatgaggctgatgggatgcctattaatgttggagatggtggtctctttgagaagaagctgtggggcctaaaggtgctgcaggagctttcacagtggacagtaaggtccatccatgaccttcgtttcatttcttctcatcagactgggatcccagcacgtgggagccattatattgctaacaacaagaaaatgtag

SEQ ID NO: 5681 - DNA, 600 bp, Homo sapiens
aagtgggagacaagcttcaaccacaaaggcacccaagagcaagacttctacgtgacctcggagactgtggtgcgggtacccatgatgagccgcgaggatcagtatcactacctcctggaccggaacctctcctgcagggtggtgggggtcccctaccaaggcaatgccacggctttgttcattctccccagtgagggaaagatgcagcaggtggagaatggactgagtgagaaaacgctgaggaagtggcttaagatgttcaaaaagaggcagctcgagctttaccttcccaaattctccattgagggctcctatcagctggagaaagtcctccccagtctggggatcagtaacgtcttcacctcccatgctgatctgtccggcatcagcaaccactcaaatatccaggtgtctgagatggtgcacaaagctgtggtggaggtggacgagtcgggaaccagagcagcggcagccacggggacaatattcactttcaggtcggcccgcctgaactctcagaggctagtgttcaacaggccctttctgatgttcattgtggataacaacatcctcttccttggcaaagtgaaccgcccctga

SEQ ID NO: 5682 - DNA, 1270 bp, Homo sapiens; identical to SEQ ID NO: 447

SEQ ID NO: 5683 - DNA, 1400 bp, Homo sapiens
caagatttgtgctgggaacatctgagtgatgaatacgtgtgtagccggcctcttgtgggcaagcagacaacgtacactgagtgctgctgtctgtatggagaggcctggggcatgcagtgtgccctctgccccctgaaggattcagatgactatgctcagctgtgtaacatccccgtgacgggacgccggcagccatatggacgggacgccttggttgacttcagtgaacagtatactccagaagccgatccctacttcatccaagaccgttttctaaatagctttgaggagttacaggctgaggaatgcggcatcctcaatggatgtgaaaatggtcgctgtgtgagggtccaggaaggttacacctgcgattgcttggatgggtatcacttggatactgccaagatgacctgtttcgatgtaaatgaatgcgatgagttgaacaaccggatgtctctctgcaagaatgccaagtgcattaacaccgatggttcctacaagtgtttgtgtctgccaggctacgtgccttctgacaagccaaactactgcactccgttgaataccgccttgaatttagagaaagacagtgacctggagtgaaacagaatctacataacctaagcccatatactctgcactgtgtaaaggaaaagggagaaatgtattatacttgagacattgcacctaccccggaaggctggaaatacagaaacagcatggagttgcaagtcctctgaagacaatgagaggatttaggatgagcccgataggtgtggcagaccaaatggacatttctctaaaaaaccagtatatatagtctgttcatatgtaaaattcaatggaagagaggtggaacagtgctgttattttaaacagaaggttgtattattatgttgttttgttttttttactattgcttgattaaatttggcatttaaatagtggtggaaatatttttatataattttcattttttggttgtgcagttccttggctactgtttttcttttacttcagttttttaaaaatctcaaatgaaaaagtcttcgatacaatattgttaagctgtattataagtattgttacacagggttatgcaattcccggcctggagcatttttgaaattcaaattgtctgtcctgtggagcaggcagtgattttgttccaaaactttgtatacacatttggagaaaagtactttatattttcagtgttttgtctgattttaatgtccgttcttagccaagctgctagcaggtgttaattggatccctttccttcactgaaatggaagagtttataagcttacgttagtattgtaatatgtaaagtaagcccaacaaaaatttttaaaaatttgatgatccccaatatatctaccattgtatgttaaataaat

SEQ ID NO: 5684 - DNA, 600 bp, Homo sapiens
tgtccaaggctcaggttggggttggcttggtttcaataaggaacggggacacttacaaattgctgcttgtccaaatcaggatccactgcaaggaacaacaggccttattccactgctggggattgatgtgtgggagcacgcttactaccttcagtataaaaatgtcaggcctgattatctaaaagctatttggaatgtaatcaactgggagaatgtaactgaaagatacatggcttgcaaaaagtaaaccacgatcgttatgctgagtatgttaagctctttatgactgtttttgtagtggtatagagtactgcagaatacagtaagctgctctattgtagcatttcttgatgttgcttagtcacttatttcataaacaacttaatgttctgaataatttcttactaaacattttgttattgggcaagtgattgaaaatagtaaatgctttgtgtgattgaatctgattggacattttcttcagagagctaaattacaattgtcatttataaaaccatcaaaaatattccatccatatactttggggacttgtagggatgcctttctagtcctattctattgcagttatagaaaatctag

SEQ ID NO: 5685 - DNA, 1400 bp, Homo sapiens
tgctcttactaccagagctgctgcacagactatacggctgagtgcaagccccaagtgactcgcggggatgtgttcactatgccggaggatgagtacacggtctatgacgatggcgaggagaaaaacaatgccactgtccatgaacaggtggggggcccctccctgacctctgacctccaggcccagtccaaagggaatcctgagcagacacctgttctgaaacctgaggaagaggcccctgcgcctgaggtgggcgcctctaagcctgaggggatagactcaaggcctgagacccttcatccagggagacctcagcccccagcagaggaggagctgtgcagtgggaagcccttcgacgccttcaccgacctcaagaacggttccctctttgccttccgagggcagtactgctatgaactggacgaaaaggcagtgaggcctgggtaccccaagctcatccgagatgtctggggcatcgagggccccatcgatgccgccttcacccgcatcaactgtcaggggaagacctacctcttcaagggtagtcagtactggcgctttgaggatggtgtcctggaccctgattacccccgaaatatctctgacggcttcgatggcatcccggacaacgtggatgcagccttggccctccctgcccatagctacagtggccgggagcgggtctacttcttcaaggggaaacagtactgggagtaccagttccagcaccagcccagtcaggaggagtgtgaaggcagctccctgtcggctgtgtttgaacactttgccatgatgcagcgggacagctgggaggacatcttcgagcttctcttctggggcagaacctctgctggtaccagacagccccagttcattagccgggactggcacggtgtgccagggcaagtggacgcagccatggctggccgcatctacatctcaggcatggcaccccgcccctccttggccaagaaacaaaggtttaggcatcgcaaccgcaaaggctaccgttcacaacgaggccacagccgtggccgcaaccagaactcccgccggccatcccgcgccatgtggctgtccttgttctccagtgaggagagcaacttgggagccaacaactatgatgactacaggatggactggcttgtgcctgccacctgtgaacccatccagagtgtcttcttcttctctggagacaagtactaccgagtcaatcttcgcacacggcgagtggacactgtggaccctccctacccacgctccatcgctcagtactggctgggctgcccagctcctggccatctgtaggagtcagagcccacatggccgggccctctgtagctccctcctcccatctccttcccccagcccaataaaggtcccttagccccgagtttaaa

SEQ ID NO: 5686 - DNA, 716 bp, Homo sapiens; identical to SEQ ID NO: 451

SEQ ID NO: 5687 - DNA, 1400 bp, Homo sapiens
agcgtgagcccagcgacaggagagtgagctcaccacgcgcagcgccatgaccagcaagggtcccgaggaggagcacccatcggtgacgctcttccgccagtacctgcgtatccgcactgtccagcccaagcctgactatggagctgctgtggctttctttgaggagacagcccgccagctgggcctgggctgtcagaaagtagaggtggcacctggctatgtggtgaccgtgttgacctggccaggcaccaaccctacactctcctccatcttgctcaactcccacacggatgtggtgcctgtcttcaaggaacattggagtcacgacccctttgaggccttcaaggattctgagggctacatctatgccaggggtgcccaggacatgaagtgcgtcagcatccagtacctggaagctgtgaggaggctgaaggtggagggccaccggttccccagaaccatccacatgacctttgtgcctgatgaggaggttgggggtcaccaaggcatggagctgttcgtgcagcggcctgagttccacgccctgagggcaggctttgccctggatgagggcatagccaatcccactgatgccttcactgtcttttatagtgagcggagtccctggtgggtgcgggttaccagcactgggaggccaggccatgcctcacgcttcatggaggacacagcagcagagaagctgcacaaggttgtaaactccatcctggcattccgggagaaggaatggcagaggctgcagtcaaacccccacctgaaagaggggtccgtgacctccgtgaacctgactaagctagagggtggcgtggcctataacgtgatacctgccaccatgagcgccagctttgacttccgtgtggcaccggatgtggacttcaaggcttttgaggagcagctgcagagctggtgccaggcagctggcgagggggtcaccctagagtttgctcagaagtggatgcacccccaagtgacacctactgatgactcaaacccttggtgggcagcttttagccgggtctgcaaggatatgaacctcactctggagcctgagatcatgcctgctgccactgacaaccgctatatccgcgcggtgggggtcccagctctaggcttctcacccatgaaccgcacacctgtgctgctgcacgaccacgatgaacggctgcatgaggctgtgttcctccgtggggtggacatatatacacgcctgctgcctgcccttgccagtgtgcctgccctgcccagtgacagctgagccctggaactcctaaacctttgcccctggggcttccatcccaaccagtgccaaggacctcctcttcccccttccaaataataaagtctatggacagggctgtctctgaagtactaacacaaggaca

SEQ ID NO: 5688 - DNA, 1399 bp, Homo sapiens; identical to SEQ ID NO: 453

SEQ ID NO: 5689 - DNA, 1400 bp, Homo sapiens
ctgatacgacagagaatcagagtggtgtctcttttgacaagacttcagctacctggcttgctctgtccagaattgcaggtctttgtaacagggcagtgtttcaggctaaccaggaaaacctacctattcttaagcgggcagttgcaggagatgcctctgagtcagcactcttaaagtgcatagagctgtgctgtggttccgtgaaggagatgagagaaagatacgccaaaatcgtcgagatacccttcaactccaccaacaagtaccagttgtctattcataagaaccccaacacatcggagccccaacacctgttggtgatgaagggcgccccagaaaggatcctagaccgttgcagctctatcctcctccacggcaaggagcagcccctggatgaggagctgaaagacgcctttcagaacgcctatttggagctggggggcctcggagaacgagtcctaggtttctgccacctctttctgccagatgaacagtttcctgaagggttccagtttgacactgacgatgtgaatttccctatcgataatctgtgctttgttgggctcatctccatgattgaccctccacgggcggccgttcctgatgccgtgggcaaatgtcgaagtgctggaattaaggtcatcatggtcacaggagaccatccaatcacagctaaagctattgccaaaggtgtgggcatcatctcagaaggcagtggacctatgagcagaggaaaatcgtggagttcacctgccacacagccttcttcgtcagtatcgtggtggtgcagtgggccgacttggtcatctgtaagaccaggaggaattcggtcttccagcaggggatgaagaacaagatcttgatatttggcctctttgaagagacagccctggctgctttcctttcctactgccctggaatgggtgttgctcttaggatgtatcccctcaaacctacctggtggttctgtgccttcccctactctcttctcatcttcgtatatgacgaagtcagaaaactcatcatcaggcgacgccctggcggctgggtggagaaggaaacctactattagccccccgtcctgcacgccgtggagcatcaggccacacactctgcatccgacacccaccccctctttgtgtacttcagtcttggagtttggaactctaccctggtaggaaagcaccgcagcatgtggggaagcaagacgtcctggaatgaagcatgtagctctatggggggaggggggagggctgcctgaaaaccatccatctgtggaaatgacagcggggaaggtttttatgtgcctttttgtttttgtaaaaaaggaacacccggaaagactgaaagaatacattttatatctggatttttacaaataaagatggctattataatgg

SEQ ID NO: 5690 - DNA, 824 bp, Homo sapiens; identical to SEQ ID NO: 455

SEQ ID NO: 5691 - DNA, 848 bp, Homo sapiens; identical to SEQ ID NO: 456
  misc_feature (447)..(447): n is a, c, g, or t

SEQ ID NO: 5692 - DNA, 600 bp, Homo sapiens
gtgggcctctcggtggtggtgacggtgatcgtgctgcagtaccaccaccacgaccccgacgggggcaagatgcccaagtggaccagagtcatccttctgaactggtgcgcgtggttcctgcgaatgaagaggcccggggaggacaaggtgcgcccggcctgccagcacaagcagcggcgctgcagcctggccagtgtggagatgagcgccgtggcgccgccgcccgccagcaacgggaacctgctgtacatcggcttccgcggcctggacggcgtgcactgtgtcccgacccccgactctggggtagtgtgtggccgcatggcctgctcccccacgcacgatgagcacctcctgcacggtgggcaaccccccgagggggacccggacttggccaagatcctggaggaggtccgctacattgccaaccgcttccgctgccaggacgaaagcgaggcggtctgcagcgagtggaagttcgccgcctgtgtggtggaccgcctgtgcctcatggccttctcggtcttcaccatcatctgcaccatcggcatcctgatgtcggctcccaacttcgtggaggccgtgtccaaagactttgcgtaa

SEQ ID NO: 5693 - DNA, 600 bp, Homo sapiens
ccttcgccgccttctggctgccctaccacgtggtgaacctggctgaggcgggccgcgcgctggccggccaggccgccgggttagggctcgtggggaagcggctgagcctggcccgcaacgtgctcatcgcactcgccttcctgagcagcagcgtgaaccccgtgctgtacgcgtgcgccggcggcggcctgctgcgctcggcgggcgtgggcttcgtcgccaagctgctggagggcacgggttccgaggcgtccagcacgcgccgcgggggcagcctgggccagaccgctaggagcggccccgccgctctggagcccggcccttccgagagcctcactgcctccagccctctcaagttaaacgaactgaactaggcctggtggaaggaggcgcactttcctcctggcagaatgctagctctgagccagttcagtacctggaggaggagcaggggcgtggagggcgtggagggcgtgggagcgtgggaggcgggagtggagtggaagaagagggagagatggagcaaagtgagggccgagtgagagcgtgctccagcctggctcccacaggcagctttaaccattaaaactgaagtctgaa

SEQ ID NO: 5694 - DNA, 600 bp, Homo sapiens
catccagttccagttccacgaggcactgtgccaggcagctggccacacgggccccctgcacaagtgtgacatctaccagtccaaggaggccgggcagcgcctggcgaccgccatgaagctgggcttcagtaggccgtggccggaagccatgcagctgatcacgggccagcccaacatgagcgcctcggccatgttgagctacttcaagccgctgctggactggctccgcacggagaacgagctgcatggggagaagctgggctggccgcagtacaactggacgccgaactccgctcgctcagaagggcccctcccagacagcggccgcgtcagcttcctgggcctggacctggatgcgcagcaggcccgcgtgggccagtggctgctgctcttcctgggcatcgccctgctggtagccaccctgggcctcagccagcggctcttcagcatccgccaccgcagcctccaccggcactcccacgggccccagttcggctccgaggtggagctgagacactcctgaggtgacccggctgggtcggccctgcccaagggcctcccaccagagactgggatgggaacactggtgggcagctgagg

SEQ ID NO: 5695 - DNA, 1400 bp, Homo sapiens
aaggattaatgaaaacctttactagcatttagagcttttcagaacatccccactgtcatgtgtctcagcagtggagactgcaagtaaggcttttaattttaggaggtttttttttttttttttttttcccctaaatggtatggccaaaagtcagagttaaaatatatatagttagattccaacttcctccttcactctaaaaatagaatccaaacccactcttcatatatgcttccagaatggggcttaagtaccaatctctgctttgcaatgggcacaatcttggtcatgtcctgaggctctctaagaaaagagaggatctaggatgggagagctagaaagttgctaactgggaagaacaaggccctgaggggttggtctaccaatctgggaagatttgaaaacaaacttctcgcaactgaaggaaggctgaaggctgctgcaagtcattgagtgactttaggatgagcaaaacattgggccacttcctaatgccctatgtgtatagtaccagaagcaaggtctcagacttaacagacccagctctgttccaaggtgagtctgaaccaatagaaagcaaacatgtgcagatatccaaacaagactgctcatgcaagtcggggctggctacccgtcttaggcagcaacagcagagctccagggagcttattcaatatttactgagacttcgaagacccagcagatgtttaatgaagtcactattttggctcaaaccctccacttctccccctcccctcaaaaagccaacaggtaaacacataaatgaaagaaacccacagaaggggatgggaaataaagaaaattctctcaagacttctccaggcccatgtcactggtcagcgtggtttttatgtgtattaggattgggggatgtgaagaaataagtatccagtactttataaccaaagcaattaaatgatattggggtagggaatgttggccagttttgtttagttttgccatcacattgtcacccagacctcacctagccccaagtaatcgggcgccccgaagagggagacagagatgtgccagagttgacccagtgtgcggatgataactactgacgaaagagtcatcgacctcagttagtggttggatgtagtcacattagtttgcctctccccatctttgtctccctggcaaggagaatatgcgggacatgatgctaagagccctgggtaaatgtggtgagaatgcacgcgtgcatatgctacacatatgtgcttctcagttgcagaaaatgaactgctttgggagattatcagtagaaagagtgttatcatattggtgctgagtgctatgtgtgcttatacaatttgttcttgtattttaataaactttgaataaaagaataaaaaaaaaaaaaaaaaaaaaaa

SEQ ID NO: 5696 - DNA, 1400 bp, Homo sapiens
actatttccctctactgagtaaaccctatctgtgattcccccaaacatctggcatggctcccttttgtccttcctgtgccctgcaaatattagcaaagaagcttcatgccaggttaggaaggcagcattccatgaccagaaacagggacaaagaaatccccccttcagaacagaggcatttaaaatggaaaagagagattggattttggtgggtaacttagaaggatggcatctccatgtagaataaatgaagaaagggaggcccagccgcaggaaggcagaataaatccttgggagtcattaccacgccttgaccttcccaaggttactcagcagcagagagccctgggtgacttcaggtggagagcactagaagtggtttcctgataacaagcaaggatatcagagctgggaaattcatgtggatctggggactgagtgtgggagtgcagagaaagaaagggaaactggctgaggggataccataaaaagaggatgatttcagaaggagaaggaaaaagaaagtaatgccacacattgtgcttggcccctggtaagcagaggctttggggtcctagcccagtgcttctccaacactgaagtgcttgcagatcatctggggacctggtttgaatggagattctgattcagtgggttgggggcagagtttctgcagttccatcaggtcccccccaggtgcaggtgctgacaatactgctgccttacccgccatacattaaggagcagggtcctggtcctaaagagttattcaaatgaaggtggttcgacgccccgaacctcacctgacctcaactaacccttaaaaatgcacacctcatgagtctacctgagcattcaggcagcactgacaatagttatgcctgtactaaggagcatgattttaagaggctttggccaatgcctataaaatgcccatttcgaagatatacaaaaacatacttcaaaaatgttaaacccttaccaacagcttttcccaggagaccatttgtattaccattacttgtataaatacacttcctgcttaaacttgacccaggtggctagcaaattagaaacaccattcatctctaacatatgatactgatgccatgtaaaggcctttaataagtcattgaaatttactgtgagactgtatgttttaattgcatttaaaaatatatagcttgaaagcagttaaactgattagtattcaggcactgagaatgatagtaataggatacaatgtataagctactcacttatctgatacttatttacctataaaatgagatttttgttttccactgtgctattacaaattttcttttgaaagtaggaactcttaagcaatggtaattgtgaataaaaattgatgagagtgttaaaaaaaaaaaaaaaaa

SEQ ID NO: 5697 - DNA, 1400 bp, Homo sapiens
cactacaccgggatgcttgaagatggaaagaaatttgattcctcccgggacagaaacaagccctttaagtttatgctaggcaagcaggaggtgatccgaggctgggaagaaggggttgcccagatgagtgtgggtcagagagccaaactgactatatctccagattatgcctatggtgccactgggcacccaggcatcatcccaccacatgccactctcgtcttcgatgtggagcttctaaaactggaatgacaggaatggcctcctcccttagctccctgttcttggatctgccatggagggatctggtgcctccagacatgtgcacatgagtccatatggagcttttcctgatgttccactccactttgtatagacatctgccctgactgaatgtgttctgtcactcagctttgcttccgacacctctgtttcctcttcccctttctcctcgtatgtgtgtttacctaaactatatgccataaacctcaagttattcattttattttgttttcattttggggtgaagattcagtttcagtcttttggatataggtttccaattaagtacatggtcaagtattaacagcacaagtggtaggttaacattagaataggaattggtgttggggggggggtttgcaagaatattttattttaattttttggatgaaatttttatctattatatattaaacattcttgctgctgcgctgcaaagccatagcagatttgaggcgctgttgaggactgaattactctccaagttgagagatgtctttgggttaaattaaaagccctacctaaaactgaggtggggatggggagagcctttgcctccaccattcccacccaccctccccttaaaccctctgcctttgaaagtagatcatgttcactgcaatgctggacactacaggtatctgtccctgggccagcagggacctctgaagccttctttgtggccttttttttttttcatcctgtggtttttctaatggactttcaggaattttgtaatctcataactttccaagctccaccacttcctaaatcttaagaactttaattgacagtttcaattgaaggtgctgtttgtagacttaacacccagtgaaagcccagccatcatgacaaatccttgaatgttctcttaagaaaatgatgctggtcatcgcagcttcagcatctcctgttttttgatgcttggctccctctgctgatctcagtttcctggcttttcctccctcagccccttctcacccctttgctgtcctgtgtagtgatttggtgagaaatcgttgctgcacccttcccccagcaccatttatgagtctcaagttttattattgcaataaaagtgctttatgccggcttttctcaaaaaaaaaaaaaaaaaa

SEQ ID NO: 5698 - DNA, 600 bp, Homo sapiens
ggtcaccgtctcgctgagggacggtgaggccaccctggaggtggacggcaccaggggccagagcgaggtgagcgccgcgcagctgcaggagaggctggccgtgctcgagaggcacctgcggagccccgtgctcacctttgctggcggcctgccagatgtgccggtgacttcagcgccagtcaccgcgttctaccgcggctgcatgacactggaggtcaaccggaggctgctggacctggacgaggcggcgtacaagcacagcgacatcacggcccactcctgcccccccgtggagcccgccgcagcctaggcccccacgggacgcggcaggcttctcagtctctgtccgagacagccgggaggagcctgggggctcctcaccacgtggggccatgctgagagctgggctttcctctgtgaccatcccggcctgtaacatatctgtaaatagtgagatggacttggggcctctgacgccgcgcactcagccgtgggcccgggcgcggggaggccggcgcagcgcagagcgggctcgaagaaaataattctctattatttttattaccaagcgcttctttctgactctaaaatatggaaaat

SEQ ID NO: 5699 - DNA, 1400 bp, Homo sapiens
ttacgatttatctggcagtcaggagatcctgtgcaattagaaaaaattgccttgcctcaatttgatatcaaaaaggaagatattgaatatggtaactgtacaaaatactataaaggcacgggctactacacatgcgtggaagtcatcttcaccctgaggaggcaggtcggcttttacatgatgggggtctacgccccaaccctgctcattgttgttctctcctggctttccttctggatcaacccggacgcgagtgctgccagagtgcccctgggtatcttctcagtcctcagcttggcctctgagtgcacaacccttgccgctgagcttcccaaagtttcctatgtgaaggctcttgatgtttggcttattgcttgccttctctttgggtttgcttccctggtggagtatgcagttgtccaggtgatgctgaacaaccccaaaagggttgaagctgaaaaagccagaattgctaaggctgagcaagcagatggaaaaggtggaaatgtggctaaaaagaatactgtgaatggaacagggactcctgttcatattagcactttgcaggttggtgagaccagatgcaaaaaagtttgtacttctaagtctgatctgagatctaatgacttcagcattgttggaagcttaccaagagattttgaactatccaattatgactgctatggaaaacccattgaagttaacaacggacttgggaaatctcaggctaagaacaacaagaagcctccccctgcgaaacctgttattccaacagcagcaaagcgaattgatctttatgcaagagcattgtttcctttctgcttcttgttcttcaatgttatatattggtctatatatttatgataaatcttttccatttgtacaaaataaaattccatttcattgtgacctactcctttcataaatgccaatctgtgagaacttttgaattttcatagcaacattgcattttggatgccatttgattgtaataaaactgtggcaccttaattttgaatggcagcatgatcatgtaatatctgtgctctaataacgatgtatatatgtatagtgaacatattgcttagtaacaaatgaaggacaagcatactacataatataatccatacaattctcttcagttagtgtaaactgcaaatactacagataattctgataataaaatgatatgcacgctgaatcctgctatggtaccattctaatgtatgtagtatttcaaatttccttccttgtaactttcaaagaaagccatcttattcttgtaaaattttagatggtattatcacagatttaaaaaggttgtattacatattgtttaaactttgtaagtagaaatatatctgttataattatacaggctctgtggagaaataaagttc

SEQ ID NO: 5700 - DNA, 1400 bp, Homo sapiens
gctccctgaacactcggaggtggcggtggatcttactccttccagccagtgaggatccagcaacctgctccgtgcctcccgcgcctgttggttggaagtgacgaccttgaagatcggccggttggaagtgacgaccttgaagatcggcgggcgcagcggggccgagggggcgggtctggcgctaggtccagcccctgcgtgccgggaaccccagaggaggtcgcagttcagcccagctgaggcctgtctgcagaatcgacaccaaccagcatcatgtccatgacactggggtactgggacatccgcgggctggcccacgccatccgcctgctcctggaatacacagactcaagctacgaggaaaagaagtatacgatgggggacgctcctgactatgacagaagccagtggctgaatgaaaaattcaagctgggcctggactttcccaatctgccctacttgattgatggggctcacaagatcacccagagcaacgccatcctgtgctacattgcccgcaagcacaacctgtgtggggagacagaagaggagaagattcgtgtggacattttggagaaccaggctatggacgtctccaatcagctggccagagtctgctacagccctgactttgagaaactgaagccagaatacttggaggaacttcctacaatgatgcagcacttctcacagttcctggggaagaggccatggtttgttggagacaagatcacctttgtagatttcctcgcctatgatgtccttgacctccaccgtatatttgagcccaactgcttggacgccttcccaaatctgaaggacttcatctcccgctttgagggcttggagaagatctctgcctacatgaagtccagccgcttcctcccaaaacctctgtacacaagggtggctgtctggggcaacaagtaatgccttgaaggccaggaggtgggagtgaggagcccatactcagcctgctgcccaggctgtgcagcgcagctggactctgcatcccagcacctgcctcctcgttcctttctcctgtttattcccatctttacccccaagactttattgggcctcttcacttcccctaaacccctgtcccatgcaggccctttgaagcctcagctacctactttccttcatgaacatccccctcccaacactacccttccctgcactaaagccagcctgaccttccttcctgttagtggttgtatctgctttgaagggcctacctggcccctcgcctgtggagctcagccctgagctgtccccgtgttgcatgacagcattgactggtttacaggccctgctcctgcagcatggcccctgccttaggcctacctgatcaaaataaagcctcagccacaaaaaaaaaaaaaaaaaaaaaaaaa

SEQ ID NO: 5701 - DNA, 1400 bp, Homo sapiens
gtacacgatgggggacgctcctgactatgacagaagccagtggctgaatgaaaaattcaagctgggcctggactttcccaatctgccctacttgattgatggggctcacaagatcacccagagcaatgccatcctgcgctacattgcccgcaagcacaacctgtgtggggagacagaagaggagaagattcgtgtggacattttggagaaccaggttatggataaccacatggagctggtcagactgtgctatgacccagattttgagaaactgaagccaaaatacttggaggaactccctgaaaagctaaagctctactcagagtttctggggaagcggccatggtttgcaggagacaagatcacctttgtggatttccttgcctatgatgtccttgacatgaagcgtatatttgagcccaagtgcttggacgccttcctaaacttgaaggacttcatctcccgctttgagggtttgaagaagatctctgcctacatgaagtccagccaattcctccgaggtcttttgtttggaaagtcagctacatggaacagcaaatagggcccagtgatgccagaagatgggagggaggagccaaccttgctgcctgcgaccctggaggacagcctgactccctggacctgccttcttcctttttccttctttctactctcttctcttccccaaggcctcattggcttcctttcttctaacatcatccctccccgcatcgaggctctttaaagcttcagctccccactgtcctccatcaaagtccccctcctaacgtcttcctttccctgcactaacgccaacctgactgcttttcctgtcagtgcttttctcttctttgagaagccagactgatctctgagctccctagcactgtcctcaaagaccatctgtatgccctgctccctttgctgggtccctaccccagctccgtgtgatgcccagtaaagcctgaaccatgcctgccatgtcttgtcttattccctgaggctcccttgaactcaggactgtcctcgaattgtgggtggttttttgtcttctgttgtccacagccagagcttagtggatgggtgtgtgtgtgtgtgtgggggtggtgatcaggcaggttcataaatttccttggtcatttctgccctctagccacatccctctgttcctcactgtggggattactacagaaaggtgctctgtgccaagttcctcactcattcgcgctcctgtaggccgtctagaactggcatggttcaaagaggggctaggctgatggggaagggggctgagcagctcccaggcagactgccttctttcaccctgtcctgatagacttccctgatctagatatccttcgtcatgacacttctcaataaaacgtatcccaccgtattgt

SEQ ID NO: 5702 - DNA, 737 bp, Homo sapiens; identical to SEQ ID NO: 467

SEQ ID NO: 5703 - DNA, 1004 bp, Homo sapiens; identical to SEQ ID NO: 468

SEQ ID NO: 5704 - DNA, 1082 bp, Homo sapiens; identical to SEQ ID NO: 469

SEQ ID NO: 5705 - DNA, 600 bp, Homo sapiens
gcaatctggttgtgatttatattttaaagcttggtgctaaaccacaatatgtatagcacatggagtgcctgtacaagctgatgttttgtattttgtgttcctctttgcatgatctgtcaaagtgagatatttttacctgcctaaaatatgatgtttaaaagcatactctatgtgatttatttatttctacctttctgagtctcttggactaagaagatgttttgaaatgtaccatcaaatgttaacagagtttgatatgggctttctctttggtttctcatcacatttgtaaatgtcttttcaaaaggatttactttttgtaaaaagcttcattctcactctgctttgcatcccccaaacttcttgttcaaaacggggggagtttaggagactttaatcccggtttcagaagctgcagctggtctgtttccaggtcagaaaccattgttcagaagacctccctgtgagagagttgctcctcagggtccctcaggaccaaagaacactcgaaaagagcacttcacacagacaagtggctaagtgtccattatttaccttgaacaatcaaggcaactagtggagagaactgattgtgagctc

SEQ ID NO: 5706 - DNA, 600 bp, Homo sapiens
tgagtgttagaaaaaactggaaacatctgatttctgaactatcagggcaagctcatagcacatgttttacaaagaaacaaaatataaatcacagatttccaaaagtactagcaataagttgaatgataatagctcacagcacatttgttaatgattcttgtgtcatcaagtagtagtacttaatagtacccaacctggtaattatcctcaagttgtgtgctattcgtaagttctgtgcagtttggtatgaaacaaatatactcatttggatataaatcttacccttcaatgttaaatctacaaacttttataaatgttttaaagaagtccatgtgataattgtaaaggtgatgaatttaccatcaaacaaatcattttgatgtattattatatatgtatatctgtgtaagacacgtgcaacagactgccttatattattttctgtaattcttctcctttgtcaaatggtattttttgtgaatggttgcaaagtgttgtcttattcctaattcctgtatgttatccactacaggttttatgagacttcctattaatttattaaatttattaaatgttgaaaaaaaaaaaaaaaaaaaaaaa

SEQ ID NO: 5707 - DNA, 1400 bp, Homo sapiens
ttaaaaaaatcacactctaagttctattgaacctaggacttgagcctccatttctggcttctagtctggtgttctgagtacttgatttcaggtcaataacggtcccccctcactccacactggcacgtttgtgagaagaaatgacattttgctaggaagtgaccgagtctaggaatgcttttattcaagacaccaaattccaaacttctaaatgttggaattttcaaaaattgtgtttagattttatgaaaaactcttctactttcatctattctttccctagaggcaaacatttcttaaaatgtttcattttcattaaaaatgaaagccaaatttatatgccaccgattgcaggacacaagcacagttttaagagttgtatgaacatggagaggacttttggtttttatatttctcgtatttaatatgggtgaacaccaacttttatttggaataataattttcctcctaaacaaaaacacattgagtttaagtctctgactcttgcctttccacctgctttctcctgggcccgctttgcctgcttgaaggaacagtgctgttctggagctgctgttccaacagacagggcctagctttcatttgacacacagactacagccagaagcccatggagcagggatgtcacgtcttgaaaagcctattagatgttttacaaatttaattttgcagattattttagtctgtcatccagaaaatgtgtcagcatgcatagtgctaagaaagcaagccaatttggaaacttaggttagtgacaaaattggccagagagtgggggtgatgatgaccaagaattacaagtagaatggcagctggaatttaaggagggacaagaatcaatggataagcgtgggtggaggaagatccaaacagaaaagtgcaaagttattccccatcttccaagggttgaattctggaggaagaagacacattcctagttccccgtgaacttcctttgacttattgtccccactaaaacaaaacaaaaaacttttaatgccttccacattaattagattttcttgcagtttttttatggcatttttttaaagatgccctaagtgttgaagaagagtttgcaaatgcaacaaaaatatttaattaccggttgttaaaactggtttagcacaatttatattttccctctcttgcctttcttatttgcaataaaaggtattgagccattttttaaatgacatttttgataaattatgtttgtactagttgatgaaggagttttttttaacctgtttatataattttgcagcagaagccaaattttttgtatattaaagcaccaaattcatgtacagcatgcatcacggatcaatagactgtacttattttccaataaaattttcaaactttgtactgttaaa

SEQ ID NO: 5708 - DNA, 1400 bp, Homo sapiens
atggacacagtcacagaggctgggatggccatagcaatggcgcttacaggcggtattggcttcatccaccacaactgtacacctgaattccaggccaatgaagttcggaaagtgaagaaatatgaacagggattcatcacagaccctgtggtcctcagccccaaggatcgcgtgcgggatgtttttgaggccaaggcccggcatggtttctgcggtatcccaatcacagacacaggccggatggggagccgcttggtgggcatcatctcctccagggacattgattttctcaaagaggaggaacatgactgtttcttggaagagataatgacaaagagggaagacttggtggtagccccccgcagcatcacactgaaggaggcaaatgaaattctgcagcgcagcaagaagggaaagttgcccattgtaaatgaagatgatgagcttgtggccatcattgcccggacagacctgaagaagaatcgggactacccactagcctccaaagatgccaagaaacagctgctgtgtggggcagccattggcactcatgaggatgacaagtataggctggacttgctcgcccaggctggtgtggatgtagtggttttggactcttcccagggaaattccatcttccagatcaatatgatcaagtacatcaaagacaaataccctaatctccaagtcattggaggcaatgtggtcactgctgcccaggccaagaacctcattgatgcaggtgtggatgccctgcgggtgggcatgggaagtggctccatctgcattacgcaggaagtgctggcctgtgggcggccccaagcaacagcagtgtacaaggtgtcagagtatgcacggcgctttggtgttccggtcattgctgatggaggaatccaaaatgtgggtcatattgcgaaagccttggcccttggggcctccacagtcatgatgggctctctcctggctgccaccactgaggcccctggtgaatacttcttttccgatgggatccggctaaagaaatatcgcggtatgggttctctcgatgccatggacaagcacctcagcagccagaacagatatttcagtgaagctgacaaaatcaaagtggcccagggagtgtctggtgctgtgcaggacaaagggtcaatccacaaatttgtcccttacctgattgctggcatccaacactcatgccaggacattggtgccaagagcttgacccaagtccgagccatgatgtactctggggagcttaagtttgagaagagaacgtcctcagcccaggtggaaggtggcgtccatagcctccattcgtatgagaagcggcttttctgaaaagggatccagcacacctcctcggtttttttttcaataaaagtttagaaagacccgaattc

SEQ ID NO: 5709 - DNA, 1400 bp, Homo sapiens
aaaacatctgaaagtggcacaccaagttcctctactcctcaagaaaacaccatatctggatatagccttttaacctgcaaaagaactttacctgaaccctgccattctaaaatttacccgggagttgactttggaggagaagaattgaatgtgacttttgttaaaggagtgaatgtttgccaagagacttgcacaaagatgattcgctgtcagtttttcacttattctttactcccagaagactgtaaggaagagaagtgtaagtgtttcttaagattatctatggatggttctccaactaggattgcgtatgggacacaagggagctctggttactctttgagattgtgtaacactggggacaactctgtctgcacaacaaaaacaagcacacgcattgttggaggaacaaactcttcttggggagagtggccctggcaggtgagcctgcaggtgaagctgacagctcagaggcacctgtgtggagggtcactcataggacaccagtgggtcctcactgctgcccactgctttgatgggcttcccctgcaggatgtttggcgcatctatagtggcattttaaatctgtcagacattacaaaagatacacctttctcacaaataaaagagattattattcaccaaaactataaagtctcagaagggaatcatgatatcgccttgataaaactccaggctcctttgaattacactgaattccaaaaaccaatatgcctaccttccaaaggtgacacaagcacaatttataccaactgttgggtaaccggatggggcttctcgaaggagaaaggtgaaatccaaaatattctacaaaaggtaaatattcctttggtaacaaatgaagaatgccagaaaagatatcaagattataaaataacccaacggatggtctgtgctggctataaagaagggggaaaagatgcttgtaagggagattcaggtggtcccttagtttgcaaacacaacggaatgtggcgtttggtgggcatcacaagctggggtgaaggctgtgcccgcagggagcaacctggtgtctacaccaaagtcgctgagtacatggactggattttagagaaaacacagagcagtgatggaaaagctcagatgcagtcaccagcatgagaagcagtccagagtctaggcaatttttacaacctgagttcaagtcaaattctgagcctggggggtcctcatctgcaaagcatggagagtggcatcttctttgcatcctaaggacgaaagacacagtgcactcagagctgctgaggacaatgtctgctgaagcccgctttcagcacgccgtaaccaggggctgacaatgcgaggtcgcaactgagatctccatgactgtgtgttgtgaaataaaatggtgaaagatc

SEQ ID NO: 5710 - DNA, 1400 bp, Homo sapiens
taccctgctacctgattgctttagttgttggagctttagaaagcaggcaaattggcccaagaactttggtgtggtctgagaaagagcaggtggaaaagtctgcttatgagttttctgagactgaatctatgcttaaaatagcagaagatctgggaggaccgtatgtatggggacagtatgacctattggtcctgccaccatccttcccttatggtggcatggagaatccttgccttacttttgtaactcctactctactggcaggcgacaagtcactctccaatgtcattgcacatgaaatatctcatagctggacagggaatctagtgaccaacaaaacttgggatcacttttggttaaatgagggacatactgtgtacttggaacgccacatttgcggacgattgtttggtgaaaagttcagacattttaatgctctgggaggatggggagaactacagaattcggtaaagacatttggggagacacatcctttcaccaaacttgtggttgatctgacagatatagaccctgatgtagcttattcttcagttccctatgagaagggctttgctttacttttttaccttgaacaactgcttggaggaccagagattttcctaggattcttaaaagcttatgttgagaagttttcctataagagcataactactgatgactggaaggatttcctgtattcctattttaaagataaggttgatgttctcaatcaagttgattggaatgcctggctctactctcctggactgcctcccataaagcccaattatgatatgactctgacaaatgcttgtattgccttaagtcaaagatggattactgccaaagaagatgatttaaattcattcaatgccacagacctgaaggatctctcttctcatcaattgaatgagtttttagcacagacgctccagagggcacctcttccattggggcacataaagcgaatgcaagaggtgtacaacttcaatgccattaacaattctgaaatacgattcagatggctgcggctctgcattcaatccaagtgggaggacgcaattcctttggcgctaaagatggcaactgaacaaggaagaatgaagtttacccggcccttattcaaggatcttgctgcctttgacaaatcccatgatcaagctgtccgaacctaccaagagcacaaagcaagcatgcatcccgtgactgcaatgctggtggggaaagacttaaaagtggattaaagacctgcgtattgatgattttagagatttctcttttttaaatggaattcgtaaagaaatataaaacttcagctcacaattaaaactgtctttttagttttggctttttattgttttgttggtgattttactgaaataaagatgagctacttcttc

SEQ ID NO: 5711 - DNA, 1400 bp, Homo sapiens
gccataatgggatttatcctggcccacaaagccagaaaactggcacgtcttaccaaagaggaaaggttgaagaaactttgtgaactctatgccaaggttctgggttccctagaagctctggagccagtgcattatgaagaaaagaactggtgtgaggagcagtactctgggggctgctacacaacttatttcccccctgggatcctgactcaatatggaagggttctacgccagccagtggacaggatttactttgcaggcaccgagactgccacacactggagcggctacatggagggggctgtagaggccggggagagagcagcccgagagatcctgcatgccatggggaagattccagaggatgaaatctggcagtcagaaccagagtctgtggatgtccctgcacagcccatcaccaccacctttttggagagacatttgccctccgtgccaggcctgctcaggctgattggattgaccaccatcttttcagcaacggctcttggcttcctggcccacaaaagggggctacttgtgagagtctaaagagagagggtgtctgtaatcacactctcttcttactgtatttgggatatgagtttggggaaagagttgcaagtaaagttccatgaagacaaatagtgtggagtgaggcgggggagcatgaagataaatccaactctgactgtaaaatacaatggtatctctttctccgttgtggcccctgcttagtgtcccttacctggcttagcgttctgtttcaccagtttccaagtttattgccctcaaatctttagaatagttaaattggcttgtttaaggttcttgctgccccacaacacaccttgcccatgcacaggatgaattttttcctaccattatggctttgtgcttgttcttcctcttacctgtatagcctcacttccctagttctttgcattcgtccttaggtactgtattgttacagctgaaagacagtaaagaccatttagtcctcaccttctgttttagagttgagcaaactgaagcccacagaggtggaacttaattacctaagagccacaataagccactggtatctgggggactagaacacaaataattgcttttcccacctctttggatgttttccccaattatcctccttcactccctgtcatagttaccgatggtgtcccgttgtgtgggtttactctgtgctaagttgtcttacacttctcaaatgctactcagtatatagccttaactcttactgttttgtgcggtgtgtctccagctgattttaacttttttgatggtagaaattttatctcttcttccttttgtatcctccattgtatcttcatacaaaggacagtacacacttgggtaattaaaaataaaagttgattgaccat

SEQ ID NO: 5712 - DNA, 603 bp, Homo sapiens; identical to SEQ ID NO: 477

SEQ ID NO: 5713 - DNA, 1400 bp, Homo sapiens
catcctattgttgatgggcacttgagaactttccattttggcgctattacaaatagtgcaactatgaatgtactgcatgttaccatcttacttgagcctttaatggacttatttcttcaaatccttccaaaaattattataagcattgaaattatagtttcaagccaactgtggatacccttaccctttcctcctttatcacaaccaccgttacaagtatacttatatttccctaaaatacatttaaaacttacctaagtgacatttgtagttggagtaataggagcttccagctctaataaaacagctgtctctaacttattttatttccatcatgtcagagcaggtgaagagccagaagtgaagagtgactagtacaaattataaaaagccactagactcttcactgttagctttttaaaacattaggctcccatccctatggaggaacaactctccagtgcctggatcccctctgtctacaaatataagattttctgggcctaaaggatagatcaaagtcaaaaatagcaatgcctccctatccctcacacatccagacatcatgaattttacatggtactcttgttgagttctatagagccttctgatgtctctaaagcactaccgattctttggagttgtcacatcagataagacatatctctaattccatccataaatccagttctactatggctgagttctggtcaaagaaagaaagtttagaagctgagacacaaagggttgggagctgatgaaactcacaaatgatggtaggaagaagctctcgacaatacccgttggcaaggagtctgcctccatgctgcagtgttcgagtggattgtaggtgcaagatggaaaggattgtaggtgcaagctgtccagagaaaagagtccttgttccagccctattctgccactcctgacagggtgaccttgggtatttgcaatattcctttgggcctctgcttctctcacctaaaaaaagagaattagattatattggtggttctcagcaagagaaggagtatgtgtccaatgctgccttcccatgaatctgtctcccagttatgaatcagtgggcaggataaactgaaaactcccatttaagtgtctgaatcgagtgagacaaaattttagtccaaataacaagtaccaaagttttatcaagtttgggtctgtgctgctgttactgttaaccatttaagtggggcaaaaccttgctaattttctcaaaagcatttatcattcttgttgccacagctggagctctcaaactaaaagacatttgttattttggaaagaagaaagactctattctcaaagtttcctaatcagaaatttttatcagtttccagtctcaaaaatacaaaataaaaacaaacgtttttaatact

SEQ ID NO: 5714 - DNA, 976 bp, Homo sapiens; identical to SEQ ID NO: 479

SEQ ID NO: 5715 - DNA, 600 bp, Homo sapiens
ggtgttctgtttacctagtgtcttactctgttttctggatctgaagactagtaataaactaggacactaactgggttccatgtgattgccctttcatatgatcttctaagttgatttttttcctcccaagtcttttttaaagaaagtatactgtattttaccaaccccctctcttttcttttagctcctctgtggtgaattaaacgtacttgagttaaaatatttcgattttttttttttttttaatggaaagtcctgcataacaacactgggccttcttaactaaaatgctcaccacttagcctgtttttttatcccttttttaaaatgacagatgattttgttcaggaattttgctgtttttcttagtgctaataccttgcctcttattcctgctacagcagggtggtaatattggcattctgattaaatactgtgccttaggagactggaagtttaaaaatgtacaagtcctttcagtgatgagggaattgattttttttaaaagtctttttcttagaaagccaaaatgtttgtttttttaagattctgaaatgtgttgtgacaacaatgacctatttatgatcttaaatctttttt

SEQ ID NO: 5716 - DNA, 1400 bp, Homo sapiens
aggagctgacggcagagaggatcacagagttctgccaccgcttcctggagggcaaaatcaagccccacctgatgagccaggagctgccggaggactgggacaagcagcctgtcaaggtgcttgttgggaagaactttgaagacgtggcttttgatgagaaaaaaaacgtctttgtggagttctatgccccatggtgtggtcactgcaaacagttggctcccatttgggataaactgggagagacgtacaaggaccatgagaacatcgtcatcgccaagatggactcgactgccaacgaggtggaggccgtcaaagtgcacagcttccccacactcaagttctttcctgccagtgccgacaggacggtcattgattacaacggggaacgcacgctggatggttttaagaaattcctggagagcggtggccaggatggggcaggggatgatgacgatctcgaggacctggaagaagcagaggagccagacatggaggaagacgatgatcagaaagctgtgaaagatgaactgtaatacgcaaagccagacccgggcgctgccgagacccctcgggggctgcacacccagcagcagcgcacgcctccgaagcctgcggcctcgcttgaaggagggcgtcgccggaaacccagggaacctctctgaagtgacacctcacccctacacaccgtccgttcacccccgtctcttccttctgcttttcggtttttggaaagggatccatctccaggcagcccaccctggtggggcttgtttcctgaaaccatgatgtactttttcatacatgagtctgtccagagtgcttgctaccgtgttcggagtctcgctgcctccctcccgcgggaggtttctcctctttttgaaaattccgtctgtgggatttttagacatttttcgacatcagggtatttgttccaccttggccaggcctcctcggagaagcttgtcccccgtgtgggagggacggagccggactggacatggtcactcagtaccgcctgcagtgtcgccatgactgatcatggctcttgcatttttgggtaaatggagacttccggatcctgtcagggtgtcccccatgcctggaagaggagctggtggctgccagccctggggcccggcacaggcctgggccttccccttccctcaagccagggctcctcctcctgtcgtgggctcattgtgaccactggcctctctacagcacggcctgtggcctgttcaaggcagaaccacgacccttgactcccgggtggggaggtggccaaggatgctggagctgaatcagacgctgacagttcttcaggcatttctatttcacaatcgaattgaacacattggccaaataaagttgaaattttaccaccaaaaaaaaaaaaaaaa

SEQ ID NO: 5717 - DNA, 600 bp, Homo sapiens
ccagaatgtcagattcctttccctttagcacgtttaaagttctgtgtatttaattgtaaactgtactagtctgtgtgggactgtacacactttatttacttcgttttggttaagttggcttctgtttctagttgaggagtttcctaaaagttcataacagtgccattgtctttatatgaacatagactagagaaaccgtcctctttttccatcataattctaatctaacaatggaagatttgcccatttacacttttgagactttttggtggatgtaaataaccccattctttgcttgaacacagtatcttcccaatagcactttcattgccagtgtctttctttggtgcctttcctgttcagcattcttagcctgtggcaataaagagaaactttgtgctacatgacgacaaagctgctaaatctcctatttttttaaaatcactaacattatattgcaatgaaggaaataaaaaagtctctatttaaattcttttttaaattttcttcagttggtgtgtttttgggatgtcttatttttagatggttacactgttagaacactattttcagaatctgaatgtaatttgtgtaataacg

SEQ ID NO: 5718 - DNA, 1400 bp, Homo sapiens
cctgctggattctctctgccgcccactgcttccaggagaggtttccgccccaccacctgacggtgatcttgggcagaacataccgggtggtccctggcgaggaggagcagaaatttgaagtcgaaaaatacattgtccataaggaattcgatgatgacacttacgacaatgacattgcgctgctgcagctgaaatcggattcgtcccgctgtgcccaggagagcagcgtggtccgcactgtgtgccttcccccggcggacctgcagctgccggactggacggagtgtgagctctccggctacggcaagcatgaggccttgtctcctttctattcggagcggctgaaggaggctcatgtcagactgtacccatccagccgctgcacatcacaacatttacttaacagaacagtcaccgacaacatgctgtgtgctggagacactcggagcggcgggccccaggcaaacttgcacgacgcctgccagggcgattcgggaggccccctggtgtgtctgaacgatggccgcatgactttggtgggcatcatcagctggggcctgggctgtggacagaaggatgtcccgggtgtgtacaccaaggttaccaactacctagactggattcgtgacaacatgcgaccgtgaccaggaacacccgactcctcaaaagcaaatgagatcccgcctcttcttcttcagaagacactgcaaaggcgcagtgcttctctacagacttctccagacccaccacaccgcagaagcgggacgagaccctacaggagagggaagagtgcattttcccagatacttcccattttggaagttttcaggacttggtctgatttcaggatactctgtcagatgggaagacatgaatgcacactagcctctccaggaatgcctcctccctgggcagaaagtggccatgccaccctgttttcagctaaagcccaacctcctgacctgtcaccgtgagcagctttggaaacaggaccacaaaaatgaaagcatgtctcaatagtaaaagataacaagatctttcaggaaagacggattgcattagaaatagacagtatatttatagtcacaagagcccagcagggcctcaaagttggggcaggctggctggcccgtcatgttcctcaaaagcacccttgacgtcaagtctccttcccctttccccactccctggctctcagaaggtattccttttgtgtacagtgtgtaaagtgtaaatcctttttctttataaactttagagtagcatgagagaattgtatcatttgaacaactaggcttcagcatatttatagcaatccatgttagtttttactttctgttgccacaaccctgttttatactgtacttaataaattcagatatatttttcacagtttttcc

SEQ ID NO: 5719 - DNA, 1400 bp, Homo sapiens
tcatttcccctttaagaacaacatgagctttgtggtccttgtacccacccactttgaatggaacgtgtcccaggtactggccaacctgagttgggacaccctgcacccacctctggtgtgggagaggcccaccaaggtccggctgcctaagctgtatctgaaacaccaaatggacctggtggccaccctcagccagctgggcctgcaggagttgttccaggccccagacctgcgtgggatctccgagcagagcctggtggtgtccggcgtgcagcatcagtccaccctggagctcagcgaggtcggcgtggaggcggcggcggccaccagcattgccatgtcccgcatgtccctgtcctccttcagcgtgaaccgccccttcctcttcttcatcttcgaggacaccacaggccttcccctcttcgtgggcagcgtgaggaaccccaaccccagtgcaccgcgggagctcaaggaacagcaggattccccgggcaacaaggacttcctccagagcctgaaaggcttcccccgcggagacaagcttttcggccctgacttaaaacttgtgccccccatggaggaggattacccccagtttggcagccccaagtgaggggccgtggctgtggcatccagactccctgcctggaccagcctctccactcatgtgactctttccaacctgctttgtggcactggggcaggggccgggggcagtctgagagaggccattctttcccaacacctcttggggagtttagggtgggggggggcgcggctgggaggagggcaggcatcggggagccgggagcctgaccctcatctttcttccaaacaggctcagagggtgtcctgcaccggggcctgggcaggagggaggtgcttctagttctgccaggagacaggttagctgctccccacgtcagctgggacaccccgacttttgtttaccagagaaaaagggagggggagagggctgcctttggacttgtcccgggacacctaggctagggtggggagagacgggccctggtggtggctcgggaggcgaagcgttgtcctcagccccgcgtggaactcgtgtctggcacagcctggctgtggcctaacctgccgagagtccatcagcctccatcctaccccctgtgccttgtcacgccagacttcccacggctcctcgagatcccaacactgccagcatttcccttccttcctctcctgtctccctcctctgcccgggagctcaggaaccgaggcagggaaggatcccatgagctccttaaggctcttttgtaaggtttttgtagtgatttttatgccacctgaataaagaatgaatgggcaaaaaaaaaaaaaaaaaaaaaaaaaaaaaaaaaaaaaaaaaaaaaaaaaaggaattc

SEQ ID NO: 5720 - DNA, 1400 bp, Homo sapiens
ccacgaaaaggctggagcttcatgcatcctgggagactcacacatttgcatgaaggacttcctgttaaaaatggaacaagatacattgcagtgtcatttatagatccctaagttatttacttttcattgaattgaaatttattttgggtgaatgactggcatgaacacgtctttgaagttgtggctgagaagatgagaggaatatttaaataacatcaacagaacaacttcactttgggccaaacatttgaaaaactttttataaaaaattgtttgatatttcttaatgtctgctctgagccttaaaacacagattgaagaagaaaagaaagaaaaaacttaaatatttatttctatgctttgttgcctctgagaataatgacaatttatgaatttgtgtttcaaattgataaaatatttaggtacaaataacaagactaataatattttcttatttaaaaaaagcatgggaagatttttatttatcaaaatatagaggaaatgtagacaaaatggatataaatgaaaattaccatgttgtaaaaccttgaaaatcagattctaactgattgtatgcaactaagtatttctgaacacctatgcaggtcttatttacagtgttactaagggaacacacaaagaattacacaacgttttcctcaagaaaatggtacaaaacacaaccgaggagcgtatacagttgaaaacatttttgttttgattggaaggcagattattttatattagtattaaaaatcaaaccctatgtttctttcagatgaatcttccaaagtggattatattaagcaggtattagatttagaaaacctttccatttcttaaagtattatcaagtgtcaagatcagcaagtgtccttaagtcaaataggtttttttttgttggtggttgtgcttgctttccttttttagaaagttctagaaaataggaaaacgaaaaatttcattgagatgagtagtgcatttaattattttttaaaaaactttttaagtacttgaattttatatcaggaaaacaaagttgttgagccttgcttcttccgttttgccctttgtctcgctccttattcttttttggggggagggttatttgcttttttatcttcctggcataatttccattttattcttctgagtgtctatgttaacttccctctatcccgcttataaaaaaattctccaacaaaaatacttgttgacttgatgttttatcacttctctaagtaaggttgaaatatccttattgtagctactgtttttaatgtaaaggttaaacttgaaaagaaattcttaatcacggtgccaaaattcattttctaacaccatgtgttagaaaattataaaaaataaaataattttaaaaaaaaaaaaaaaaaaaaaaa

SEQ ID NO: 5721 - DNA, 1028 bp, Homo sapiens; identical to SEQ ID NO: 486

SEQ ID NO: 5722 - DNA, 1400 bp, Homo sapiens
ctttgaaattttgtaatcaaaaaaaagctttgaaaaaatctaaaggggagagtattctttaaagtttttaacataagcttgtcaatgcacatgtagatggttagcatgtttagcaaaccttgtgaaattataataagtttgtagttacatgtgaaactctaaatgcatggcaactgttaatgtcataacagtttagttattttgttctgttctgtcatgtgccacaaaatatgtacttttttcacttttttccctttgtatatcagttacgggttacaactggttcattctgaaaacaacaacaacaaaagtccattcatattttttaacaattgtataagtgcccaagtaattcactacagcctaaagccttgcctttgtaatttgacttctgacatgttggcaatcaaagcatgcacttgtaacaatgaaaaagaaaaagcattttatattactactcaataaaatgtgcatgaacttacagaattctcatccttccactgagtccgctgaagggatttatgtgcacaaccaccatgtgtcttctaggtgctggcccaccaccacacatcacaggctgatttccacaggcttcttcctaggggcctcgtgatctgaggggtggtgcctacttccactgtaagaaagaatcttggtggatttgtgtctcaaatcagataagagaagcctgtttaaagagcagatgccatcttctggcttcctcaaggagccagttaaaaaaccagagcattcctttttattgaaaaataaaattaatttgttatcaggttgtttcagttgtattggatgccctatctatctgctaaagcaaaaagtactaggctactaagtgcattttcatcacagaaaagagttgcatttgtattaacaagaaatttgtatacccacgcttcagctactatctaatcatcacccgaagatttaagatacaccaaatttcagtttgtttgtaacattgttcatctttagtgcactttgttttatataataaagtatgcctgttatattaaataataagaatatggcaattagcgatatagcatacccaaacaaagatgttctcgatacagtctggcaaagactatcccaaggttattttaatgaattcagacattttttcctgtggatatttctccatcctaaaaaaagtggcaaccaaggaaaatatttagatgcaacttactagagtgatgatgtgaaagaaatggtgattctggtatcatggtgtttattttctttcttataactgcagagaaaatatcctgactaaaaaaatttcatttttttggattcctttcttttacaaattgtgctgaggcaactatggcatagaaataaacatttgacattaaaataagtaaaaaaaaaaaaaaaaaaaa

SEQ ID NO: 5723 - DNA, 1400 bp, Homo sapiens
caaattgtagacaaaaccataataaatgcagataaggatggagatggaagaatatcctttgaagaattctgtgctgttgtaggtggcctagatatccacaaaaagatggtggtagatgtgtgactcttatcagagagtaccacccaacacttttgctttcttctccatctctgaagatctgctcaagacgtccagcaatgctctctgtgtatttaaatggaagtatttttctctgtgaagccacattttccaacatgagcctcatgaagccaactaagtgttattgaactgtaattctctcaataactcagtgtagcactttaaagtctgaaggacagcaacatgaaaagagcatatcaatgtggtggagaaagggaaggggttggctttttaatttatttttcttcatcttttataacaagaaagtatctatatatacatatgtaaatatttatatatagatatatgtagctttctatatatgtagtaggttggctttaatttaatatccttgattcagaaacaaaacaatagagtacaaaagtgccaagcagaacataaaacatccttacttttatttcacacagttttatatatagatagaagactgtacaatttgagccgggtgttaggccagctattttccttttcctgtgctttctcctttgagagattgacaaagcatttgttaacgtcctattatttaccttaattacatttttgtaacaaaggagtctgtaactttatttatacttatgaatatatccagggactacttctcattgctgagcagcttttaatacacctctgcttgaggagaaagtctagttcattgctactgccaagagctagttcttgtgttcatatagtaactgcacagggcttatagctgcttcattctgctactttgtaactaggagccattgcatttattaaatgtccctcagtaacgttaagtgctagttgtgattttatacataaaggccagaagctgtctgaggcaatcatgattgattgtatgtatcacttactgaagaatacctgaagtgatcatgtaactacttataagggatatccatttgtttgattacatgggtaaataatttgtcattaaacttgtgtttgaatcatgaattcccttgtttcaaaagacttgcagctaatctaaaaaactggtgatatttaatatgcatgtatgtatctaaacacccacatatatttgtggtttaagtgtgagaaatcttgctaatctatatgccacagaagagcaaaattgtatccaaatttatgccacttaaatttctttaccacgagggatagagcatgcatactggtttttttttcttgatttgcccatataattggtaatggataacttaataaatttgtgtgatataaaa

SEQ ID NO: 5724 - DNA, 775 bp, Homo sapiens; identical to SEQ ID NO: 489

SEQ ID NO: 5725 - DNA, 1311 bp, Homo sapiens; identical to SEQ ID NO: 490

SEQ ID NO: 5726 - DNA, 1400 bp, Homo sapiens
ctccgccatggcgtgtgctcgcccactgatatcggtgtactccgaaaagggggagtcatctggcaaaaatgtcactttgcctgctgtattcaaggctcctattcgaccagatattgtgaactttgttcacaccaacttgcgcaaaaacaacagacagccctatgctgtcagtgaattagcaggtcatcagactagtgctgagtcttggggtactggcagagctgtggctcgaattcccagagttcgaggtggtgggactcaccgctctggccagggtgcttttggaaacatgtgtcgtggaggccgaatgtttgcaccaaccaaaacctggcgccgttggcatcgtagagtgaacacaacccaaaaacgatacgccatctgttctgccctggctgcctcagccctaccagcactggtcatgtctaaaggtcatcgtattgaggaagttcctgaacttcctttggtagttgaagataaagttgaaggctacaagaagaccaaggaagctgttttgctccttaagaaacttaaagcctggaatgatatcaaaaaggtctatgcctctcagcgaatgagagctggcaaaggcaaaatgagaaaccgtcgccgtatccagcgcaggggcccgtgcatcatctataatgaggataatggtatcatcaaggccttcagaaacatccctggaattactctgcttaatgtaagcaagctgaacattttgaagcttgctcctggtgggcatgtgggacgtttctgcatttggactgaaagtgctttccggaagttagatgaattgtacggcacttggcgtaaagccgcttccctcaagagtaactacaatcttcccatgcacaagatgattaatacagatcttagcagaatcttgaaaagcccagagatccaaagagcccttcgagcaccacgcaagaagatccatcgcagagtcctaaagaagaacccactgaaaaacttgagaatcatgttgaagctaaacccatatgcaaagaccatgcgccggaacaccattcttcgccaggccaggaatcacaagctccgggtggataaggcagctgctgcagcagcggcactacaagccaaatcagatgagaaggcggcggttgcaggcaagaagcctgtggtaggtaagaaaggaaagaaggctgctgttggtgttaagaagcagaagaagcctctggtgggaaaaaaggcagcagctaccaagaaaccagcccctgaaaagaagcctgcagagaagaaacctactacagaggagaagaagcctgctgcataaactcttaaatttgattattccataaaggtcaaatcattttggacagcttcttttgaataaagacctgattatacaggcagtgagaaacatgaaaaaaaaaaaaaaaaaa

SEQ ID NO: 5727 - DNA, 1033 bp, Homo sapiens; identical to SEQ ID NO: 492

SEQ ID NO: 5728 - DNA, 600 bp, Homo sapiens
ttaaacttcgcaaaatgcctagatattatcctactgaagatgtgcctcgaaagctgttgagccacggcaaaaaacccttcagtcagcacgtgagaaaactgcgagccagcattacccccgggaccattctgatcatcctcactggacgccacaggggcaagagggtggttttcctgaagcagctggctagtggcttattacttgtgactggacctctggtcctcaatcgagttcctctacgaagaacacaccagaaatttgtcattgccacttcaaccaaaatcgatatcagcaatgtaaaaatcccaaaacatcttactgatgcttacttcaagaagaagaagctgcggaagcccagacaccaggaaggtgagatcttcgacacagaaaaagagaaatatgagattacggagcagcgcaagattgatcagaaagctgtggactcacaaattttaccaaaaatcaaagctattcctcagctccagggctacctgcgatctgtgtttgctctgacgaatggaatttatcctcacaaattggtgttctaaatgtcttaagaacctaattaaatagctgactacaaaaaaaaaaaaaaaaaaa

SEQ ID NO: 5729 - DNA, 838 bp, Homo sapiens; identical to SEQ ID NO: 494

SEQ ID NO: 5730 - DNA, 600 bp, Homo sapiens
ggaccgccaaacagctactcagctgcttaagctggcccacaagtacagaccagagacaaagcaagagaagaagcagagactgttggcccgggccgagaagaaggctgctggcaaaggggacgtcccaacgaagagaccacctgtccttcgagcaggagttaacaccgtcaccaccttggtggagaacaagaaagctcagctggtggtgattgcacacgacgtggatcccatcgagctggttgtcttcttgcctgccctgtgtcgtaaaatgggggtcccttactgcattatcaagggaaaggcaagactgggacgtctagtccacaggaagacctgcaccactgtcgccttcacacaggtgaactcggaagacaaaggcgctttggctaagctggtggaagctatcaggaccaattacaatgacagatacgatgagatccgccgtcactggggtggcaatgtcctgggtcctaagtctgtggctcgtatcgccaagctcgaaaaggcaaaggctaaagaacttgccactaaactgggttaaatgtacactgttgagttttctgtacataaaaataattgaaataatacaaattttccttc

SEQ ID NO: 5731 - DNA, 609 bp, Homo sapiens; identical to SEQ ID NO: 496

SEQ ID NO: 5732 - DNA, 632 bp, Homo sapiens; identical to SEQ ID NO: 497

SEQ ID NO: 5733 - DNA, 493 bp, Homo sapiens; identical to SEQ ID NO: 498

SEQ ID NO: 5734 - DNA, 618 bp, Homo sapiens; identical to SEQ ID NO: 499

SEQ ID NO: 5735 - DNA, 698 bp, Homo sapiens; identical to SEQ ID NO: 500

SEQ ID NO: 5736 - DNA, 568 bp, Homo sapiens; identical to SEQ ID NO: 501

SEQ ID NO: 5737 - DNA, 574 bp, Homo sapiens; identical to SEQ ID NO: 502

SEQ ID NO: 5738 - DNA, 546 bp, Homo sapiens; identical to SEQ ID NO: 503

SEQ ID NO: 5739 - DNA, 898 bp, Homo sapiens; identical to SEQ ID NO: 504

SEQ ID NO: 5740 - DNA, 556 bp, Homo sapiens; identical to SEQ ID NO: 505

SEQ ID NO: 5741 - DNA, 525 bp, Homo sapiens; identical to SEQ ID NO: 506

SEQ ID NO: 5742 - DNA, 513 bp, Homo sapiens; identical to SEQ ID NO: 507

SEQ ID NO: 5743 - DNA, 514 bp, Homo sapiens; identical to SEQ ID NO: 508

SEQ ID NO: 5744 - DNA, 500 bp, Homo sapiens; identical to SEQ ID NO: 509

SEQ ID NO: 5745 - DNA, 737 bp, Homo sapiens; identical to SEQ ID NO: 510

SEQ ID NO: 5746 - DNA, 442 bp, Homo sapiens; identical to SEQ ID NO: 511

SEQ ID NO: 5747 - DNA, 521 bp, Homo sapiens; identical to SEQ ID NO: 512

SEQ ID NO: 5748 - DNA, 600 bp, Homo sapiens
caaaacaaagaaacatgtcagcagggcctatggtggttccatgtgtgctaaatgtgttcgtgacaggatcaagcgtgctttccttatcgaggagcagaaaatcgttgtgaaagtgttgaaggcacaagcacagagtcagaaagctaaataaaaaaatgaaacttttttgagtaataaaaatgaaaagacgctgtccaatagaaaaagttggtgtgctggagctacctcacctcagcttgagagagccagttgtgtgcatctctttccagttttgcatccagtgacgtctgcttggcatcttgagattgttatggtgagagtatttacacctcagcaaatgctgcaaaatcctgttttcccccagagagctggaggttaaatactaccagcacatccctagatactactcaagttacagtatatgatcactaatatagtatgctcttggtaccaggagctctgatatatatctggtacatgtttgataatgacttgattgttattataagtacttattaatacttcgattctgtaaagagtttagggtttgattttataaaatccaaaatgagccttttattgaaaaaaaaaaaaaaaaaa

SEQ ID NO: 5749 - DNA, 511 bp, Homo sapiens; identical to SEQ ID NO: 514

SEQ ID NO: 5750 - DNA, 371 bp, Homo sapiens; identical to SEQ ID NO: 515

SEQ ID NO: 5751 - DNA, 392 bp, Homo sapiens; identical to SEQ ID NO: 516

SEQ ID NO: 5752 - DNA, 368 bp, Homo sapiens; identical to SEQ ID NO: 517

SEQ ID NO: 5753 - DNA, 1116 bp, Homo sapiens; identical to SEQ ID NO: 518

SEQ ID NO: 5754 - DNA, 512 bp, Homo sapiens; identical to SEQ ID NO: 519

SEQ ID NO: 5755 - DNA, 482 bp, Homo sapiens; identical to SEQ ID NO: 520

SEQ ID NO: 5756 - DNA, 843 bp, Homo sapiens; identical to SEQ ID NO: 521

SEQ ID NO: 5757 - DNA, 921 bp, Homo sapiens; identical to SEQ ID NO: 522

SEQ ID NO: 5758 - DNA, 600 bp, Homo sapiens
gacgggagagaatttccgtctgatctatgacaccaagggtcgctttgctgtacatcgtattacacctgaggaggccaagtacaagttgtgcaaagtgagaaagatctttgtgggcacaaaaggaatccctcatctggtgactcatgatgcccgcaccatccgctaccccgatcccctcatcaaggtgaatgataccattcagattgatttggagactggcaagattactgatttcatcaagttcgacactggtaacctgtgtatggtgactggaggtgctaacctaggaagaattggtgtgatcaccaacagagagaggcaccctggatcttttgacgtggttcacgtgaaagatgccaatggcaacagctttgccactcgactttccaacatttttgttattggcaagggcaacaaaccatggatttctcttccccgaggaaagggtatccgcctcaccattgctgaagagagagacaaaagactggcggccaaacagagcagtgggtgaaatgggtccctgggtgacatgtcagatctttgtacgtaattaaaaatattgtggcaggattaatagcaaaaaaaaaaaaaaaaaaaaaa

SEQ ID NO: 5759 - DNA, 931 bp, Homo sapiens; identical to SEQ ID NO: 524

SEQ ID NO: 5760 - DNA, 725 bp, Homo sapiens; identical to SEQ ID NO: 525

SEQ ID NO: 5761 - DNA, 829 bp, Homo sapiens; identical to SEQ ID NO: 526

SEQ ID NO: 5762 - DNA, 729 bp, Homo sapiens; identical to SEQ ID NO: 527

SEQ ID NO: 5763 - DNA, 705 bp, Homo sapiens; identical to SEQ ID NO: 528

SEQ ID NO: 5764 - DNA, 691 bp, Homo sapiens; identical to SEQ ID NO: 529

SEQ ID NO: 5765 - DNA, 598 bp, Homo sapiens; identical to SEQ ID NO: 530

SEQ ID NO: 5766 - DNA, 594 bp, Homo sapiens; identical to SEQ ID NO: 531

SEQ ID NO: 5767 - DNA, 534 bp, Homo sapiens; identical to SEQ ID NO: 532

SEQ ID NO: 5768 - DNA, 529 bp, Homo sapiens; identical to SEQ ID NO: 533

SEQ ID NO: 5769 - DNA, 515 bp, Homo sapiens; identical to SEQ ID NO: 534

SEQ ID NO: 5770 - DNA, 541 bp, Homo sapiens; identical to SEQ ID NO: 535

SEQ ID NO: 5771 - DNA, 570 bp, Homo sapiens; identical to SEQ ID NO: 536

SEQ ID NO: 5772 - DNA, 515 bp, Homo sapiens; identical to SEQ ID NO: 537

SEQ ID NO: 5773 - DNA, 569 bp, Homo sapiens; identical to SEQ ID NO: 538

SEQ ID NO: 5774 - DNA, 539 bp, Homo sapiens; identical to SEQ ID NO: 539

SEQ ID NO: 5775 - DNA, 356 bp, Homo sapiens; identical to SEQ ID NO: 540

SEQ ID NO: 5776 - DNA, 506 bp, Homo sapiens; identical to SEQ ID NO: 541

SEQ ID NO: 5777 - DNA, 514 bp, Homo sapiens; identical to SEQ ID NO: 542

SEQ ID NO: 5778 - DNA, 459 bp, Homo sapiens; identical to SEQ ID NO: 543

SEQ ID NO: 5779 - DNA, 344 bp, Homo sapiens; identical to SEQ ID NO: 544

SEQ ID NO: 5780 - DNA, 398 bp, Homo sapiens; identical to SEQ ID NO: 545

SEQ ID NO: 5781 - DNA, 346 bp, Homo sapiens; identical to SEQ ID NO: 546

SEQ ID NO: 5782 - DNA, 1400 bp, Homo sapiens
gggcagccagtggagcctgtggttcggctcctcggtgttgtctgtggtggagatggctgagctcgtctttgacctgctggtcatcatgttcctcatgctgctccgaaggttccgaagccgatactggtctccaggccgagggggcaggggtgctcaggaggtagcctccaccctggcatcctcccctccttcccacttctgcccccaccccatgtctctgtccttgtcccagccaggccctgctccctctccagccttgacagcccctccccctgcctatgccaccctgggcccccgcccatctccagggggctctgcaggggccagttcctccacctgtcctctgggggggccctgagagggaaggagaggtttctcacaccaaggcagatgctcctctggtgggagggtgctggccctggcaagattgaaggatgtgcagggcttcctctcagagccgcccaaactgccgttgatgtgtggaggggaagcaagatgggtaagggctcaggaagttgctccaagaacagtagctgatgaagctgcccagaagtgccttggctccagccctgtaccccttggtactgcctctgaacactctggtttccccacccaactgcggctaagtctctttttcccttggatcagccaagcgaaacttggagctttgacaaggaactttcctaagaaaccgctgataaccaggacaaaacacaaccaagggtacacgcaggcatgcacgggtttcctgcccagcgacggcttaagccagcccccgactggcctggccacactgctctccagtagcacagatgtctgctcctcctcttgaacttgggtgggaaaccccacccaaaagccccctttgttacttaggcaattccccttccctgactcccgagggctagggctagagcagacccgggtaagtaaaggcagacccagggctcctctagcctcatacccgtgccctcacagagccatgccccggcacctctgccctgtgtctttcatacctctacatgtctgcttgagatatttcctcagcctgaaagtttccccaaccatctgccagagaactcctatgcatcccttagaaccctgctcagacaccattacttttgtgaacgcttctgccacatcttgtcttccccaaaattgatcactccgccttctcctgggctcccgtagcacactataacatctgctggagtgttgctgttgcaccatactttcttgtacatttgtgtctcccttcccaactagactgtaagtgccttgcggtcagggactgaatcttgcccgtttatgtatgctccatgtctagcccatcatcctgcttggagcaagtaggcaggagctcaataaatgtttgttgcatgaaaaaaaaaaaaaaaaaa

SEQ ID NO: 5783 - DNA, 600 bp, Homo sapiens
acatcgaggaggcgctttgcggccccgccgccctcccgcccgcgcccagtcttctcagatgaggctgcgcccctgcgggcagctctaaggaccgtcctgcgagatcgccttccaaccccacttttttctggaaaggaggggtcctgcaggggcaagcaggagctagcagccgcctacttggtgctaacccctcgatgtacatagcttttctcagctgcctgcgcgccgccgacagtcagcgctgtgcgcgcggagagaggtgcgccgtgggctcaagagcctgagtgggtggtttgcgaggatgagggacgctatgcctcatgcccgttttgggtgtcctcaccagcaaggctgctcgggggcccctggttcgtccctgagcctttttcacagtgcataagcagttttttttgtttttgttttgttttgttttgtttttaaatcaatcatgttacactaatagaaacttggcactcctgtgccctctgcctggacaagcacatagcaagctgaactgtcctaaggcaggggcgagcacggaacaatggggccttcagctggagctgtggacttttgtacatacactaaaattctgaagtt

SEQ ID NO: 5784 - DNA, 1400 bp, Homo sapiens
ggagagaatcaacgtgtactacaatgaggctgctggtaacaaatatgtacctcgggccatcctggtggatctggagcctggcaccatggactctgtcaggtctggacccttcggccagatcttcagaccagacaacttcgtgttcggccagagtggagccgggaataactgggccaagggccactacacagagggagccgagctggtcgactcggtcctggatgtggtgaggaaggagtcagagagctgtgactgtctccagggcttccagctgacccactctctggggggcggcacggggtccgggatgggcaccctgctcatcagcaagatccgggaagagtacccagaccgcatcatgaacaccttcagcgtcatgccctcacccaaggtgtcagacacggtggtggagccctacaacgccaccctctcggtccaccagctggtggaaaacacagatgaaacctactccattgataacgaggccctgtatgacatctgcttccgcaccctgaagctgaccacccccacctacggggacctcaaccacctggtgtcggccaccatgagcggggtcaccacctgcctgcgcttcccgggccagctgaacgcagacctgcgcaagctggcggtgaacatggtgcccttccctcgcctgcacttcttcatgcccggcttcgcgcccctgaccagccggggcagccagcagtaccgggcgctcacggtgcccgagctcacccagcagatgttcgactccaagaacatgatggccgcctgcgacccgcgccacggccgctacctgacggtggctgccatcttccggggccgcatgtccatgaaggaggtggacgagcagatgctcaacgtgcagaacaagaacagcagctacttcgtggagtggatccccaacaacgtgaagacggccgtgtgcgacatcccgccccgcggcctgaagatgtcggccaccttcatcggcaacagcacggccatccaggagctgttcaagcgcatctccgagcagttcacggccatgttccggcgcaaggccttcctgcactggtacacgggcgagggcatggacgagatggagttcaccgaggccgagagcaacatgaacgacctggtgtccgagtaccagcagtaccaggacgccacggccgacgaacaaggggagttcgaggaggaggagggcgaggacgaggcttaaaaacttctcagatcaatcgtgcatccttagtgaacttctgttgtcctcaagcatggtctttctacttgtaaactatggtgctcagttttgcctctgttagaaattcacactgttgatgtaatgatgtggaactcctctaaaaattacagtattgtctgtgaaggtatctatactaataaaaaagcatgtgtag

SEQ ID NO: 5785 - DNA, 600 bp, Homo sapiens
gcctgaagaacagtaactgccatcaagatgagagaactggaggagttccttgatctgtatatacaataacataatttgtacatatgtaaaataaaattatgccatagcaagattgcttaaaatagcaacactctatatttagattgttaaaataactagtgttgcttggactattataatttaatgcatgttaggaaaatttcacattaatatttgctgacagctgacctttgtcatctttcttctattttattccctttcacaaaattttattcctatatagtttattgacaataatttcaggttttgtaaagatgccgggttttatatttttatagacaaataataagcaaagggagcactgggttgactttcaggtactaaatacctcaacctatggtataatggttgactgggtttctctgtatagtactggcatggtacggagatgtttcacgaagtttgttcatcagactcctgtgcaactttcccaatgtggcctaaaaatgcaacttctttttattttcttttgtaaatgtttaggtttttttgtatagtaaagtgataatttctggaattagaaaaaaaaaaaaaaaaaaa

SEQ ID NO: 5786 - DNA, 1400 bp, Homo sapiens
agaaccaagaccgagggacacacgtggacctcggattagcctccgccaacgtggacttcgctttcagcctgtacaagcagttagtcctgaaggcccttgataagaatgtcatcttctccccactgagcatctccaccgccttggccttcctgtctctgggggcccataataccaccctgacagagattctcaaggcctcgagttcacctcacggagacttactgaggcagaaattcactcagagcttccagcacctccgcgcaccctcaatcagttccagcgatgagctgcagctgagtatgggaaatgccatgtttgtcaaagagcaactcagtctgctggacaggttcacggaggatgccaagaggctgtatggctccgaggcctttgccactgactttcaggactcagctgcagctaagaagctcatcaacgactacgtgaagaatggaactagggggaaaatcacagatctgatcaaggaccccgactcgcagacaatgatggtcctggtgaattacatcttctttaaagccaaatgggagatgccctttgacccccaagatactcatcagtcaaggttctacttgagcaagaaaaagtgggtaatggtgcccatgatgagtttgcatcacctgactataccttacttccgggacgaggagctgtcctgcaccgtggtggagctgaagtacacaggcaatgccagcgcactcttcatcctccctgatcaagacaagatggaggaagtggaagccatgctgctcccagagaccctgaagcggtggagagactctctggagttcagagagataggtgagctctacctgccaaagttttccatctcgagggactataacctgaacgacatacttctccagctgggcattgaggaagccttcaccagcaaggctgacctgtcagggatcacaggggccaggaacctagcagtctcccaggtggtccataaggtcgtgtctgatgtatttgaggagggcacagaagcatctgctgccacagcagtcaaaatcaccctcctttctgcattagtggagacaaggaccattgtgcgtttcaacaggcccttcctgatgatcattgtccctacagacacccagaacatcttcttcatgagcaaagtcaccaatcccagcaagcctagagcttgcatcaagcagtggggctctcagtaaggaacttggaatgcaagctggatgcctgggtctctgggcacagctggcccctgtgcaccgtagtggccatggcatgtgtggccctgtctgcttatccttggaaggtgacagcgattccctgtgaagctctcacacgcacaggggcccatggactcttcagtctggagggtcctggcctcctgacagcaataaataatttcgttggcc

SEQ ID NO: 5787 - DNA, 600 bp, Homo sapiens
gaacagctaggggaacctgatctctccgacaaggaccgaaaggacctggagggccggctaaaggctcgcgaggacctgctgctccccatctaccaccaggtggcggtgcagttcgccgacttccatgacacacccggccggatgctggagaagggcgtcatatctgacatcctggagtggaagaccgcacgcaccttcctgtattggcgtctgcgccgcctcctcctggaggaccaggtcaagcaggagatcctgcaggccagcggggagctgagtcacgtgcatatccagtccatgctgcgtcgctggttcgtggagacggagggggctgtcaaggcctacttgtgggacaacaaccaggtggttgtgcagtggctggaacagcactggcaggcaggggatggcccgcgctccaccatccgtgagaacatcacgtacctgaagcacgactctgtcctcaagaccatccgaggcctggttgaagaaaaccccgaggtggccgtggactgtgtgatatacctgagccagcacatcagcccagctgagcgggcgcaggtcgttcacctgctgtctaccatggacagcccggcctccacctga

SEQ ID NO: 5788 - DNA, 1388 bp, Homo sapiens; identical to SEQ ID NO: 553

SEQ ID NO: 5789 - DNA, 1400 bp, Homo sapiens
ggcccccctgaaccccaaggccaaccgcgagaagatgacccagatcatgtttgagaccttcaacaccccagccatgtacgttgctatccaggctgtgctatccctgtacgcctctggccgtaccactggcatcgtgatggactccggtgacggggtcacccacactgtgcccatctacgaggggtatgccctcccccatgccatcctgcgtctggacctggctggccgggacctgactgactacctcatgaagatcctcaccgagcgcggctacagcttcaccaccacggccgagcgggaaatcgtgcgtgacattaaggagaagctgtgctacgtcgccctggacttcgagcaagagatggccacggctgcttccagctcctccctggagaagagctacgagctgcctgacggccaggtcatcaccattggcaatgagcggttccgctgccctgaggcactcttccagccttccttcctgggcatggagtcctgtggcatccacgaaactaccttcaactccatcatgaagtgtgacgtggacatccgcaaagacctgtacgccaacacagtgctgtctggcggcaccaccatgtaccctggcattgccgacaggatgcagaaggagatcactgccctggcacccagcacaatgaagatcaagatcattgctcctcctgagcgcaagtactccgtgtggatcggcggctccatcctggcctcgctgtccaccttccagcagatgtggatcagcaagcaggagtatgacgagtccggcccctccatcgtccaccgcaaatgcttctaggcggactatgacttagttgcgttacaccctttcttgacaaaacctaacttgcgcagaaaacaagatgagattggcatggctttatttgttttttttgttttgttttggttttttttttttttttggcttgactcaggatttaaaaactggaacggtgaaggtgacagcagtcggttggagcgagcatcccccaaagttcacaatgtggccgaggactttgattgcacattgttgtttttttaatagtcattccaaatatgagatgcattgttacaggaagtcccttgccatcctaaaagccaccccacttctctctaaggagaatggcccagtcctctcccaagtccacacaggggaggtgatagcattgctttcgtgtaaattatgtaatgcaaaatttttttaatcttcgccttaatacttttttattttgttttattttgaatgatgagccttcgtgcccccccttccccctttttgtcccccaacttgagatgtatgaaggcttttggtctccctgggagtgggtggaggcagccagggcttacctgtacactgacttgagaccagttgaataaaagtgcacacctta

SEQ ID NO: 5790 - DNA, 1400 bp, Homo sapiens
tccagcaactgctctgcccagtgccacaaccatggggtgtgcaaccacaagcaggagtgccactgccacgcgggctgggccccgccccactgcgcgaagctgctgactgaggtgcacgcagcgtccgggagcctccccgtcctcgtggtggtggttctggtgctcctggcagttgtgctggtcaccctggcaggcatcatcgtctaccgcaaagcccggagccgcatcctgagcaggaacgtggctcccaagaccacaatggggcgctccaaccccctgttccaccaggctgccagccgcgtgccggccaagggcggggctccagccccatccaggggcccccaagagctggtccccaccacccacccgggccagcccgcccgacacccggcctcctcggtggctctgaagaggccgccccctgctcctccggtcactgtgtccagcccacccttcccagttcctgtctacacccggcaggcaccaaagcaggtcatcaagccaacgttcgcacccccagtgcccccagtcaaacccggggctggtgcggccaaccctggtccagctgagggtgctgttggcccaaaggttgccctgaagccccccatccagaggaagcaaggagccggagctcccacagcaccctaggggggcacctgcgcctgtgtggaaatttggagaagttgcggcagagaagccatgcgttccagccttccacggtccagctagtgccgctcagccctagaccctgactttgcaggctcagctgctgttctaacctcagtaatgcatctacctgagaggctcctgctgtccacgccctcagccaattccttctccccgccttggccacgtgtagccccagctgtctgcaggcaccaggctgggatgagctgtgtgcttgcgggtgcgtgtgtgtgtacgtgtctccaggtggccgctggtctcccgctgtgttcaggaggccacatatacagcccctcccagccacacctgcccctgctctggggcctgctgagccggctgccctgggcacccggttccaggcagcacagacgtggggcatccccagaaagactccatcccaggaccaggttcccctccgtgctcttcgagagggtgtcagtgagcagactgcaccccaagctcccgactccaggtcccctgatcttgggcctgtttcccatgggattcaagagggacagccccagctttgtgtgtgtttaagcttaggaatgccctttatggaaagggctatgtgggagagtcagctatcttgtctggttttcttgagacctcagatgtgtgttcagcagggctgaaagcttttattctttaataatgagaaatgtatattttactaataaattattgaccgagttctgtagattcttgttaga

SEQ ID NO: 5791 - DNA, 600 bp, Homo sapiens
tcacaagtaacagttgaagaaaaaatggcaagagatcatatcctcagaccaggtggaattacttaaattttaaagcctgaaaattccaatttgggggtgggaggtggaaaaggaacccaattttcttatgaacagatatttttaacttaatggcacaaagtcttagaatattattatgtgccccgtgttccctgttcttcgttgctgcattttcttcacttgcaggcaaacttggctctcaataaacttttaccacaaattgaaataaatatatttttttcaactgccaatcaaggctaggaggctcgaccacctcaacattggagacatcacttgccaatgtacataccttgttatatgcagacatgtatttcttacgtacactgtacttctgtgtgcaattgtaaacagaaattgcaatatggatgtttctttgtattataaaatttttccgctcttaattaaaaattactgtttaattgacatactcaggataacagagaatggtggtattcagtggtccaggattctgtaatgctttacacaggcagttttgaaatgaaaatcaatttaccccatggtacccggatcctcgaattc

SEQ ID NO: 5792 - DNA, 1400 bp, Homo sapiens
cgtcaacatcgccagcaggatggacaccaccggcgtggagtgccgcatccaggtgagcgaagagagctaccgcgtcttgagcaagatgggctatgacttcgactacagagggaccgtgaatgtcaaggggaaaggccagatgaagacctacctgtacccaaagtgcacggatcacagggtcatcccagcaccagctgtccatctccccagacatccgcgtccaggtggatggcagcatcggacggtctcccacagacgagattgccaacctggtgccttctgtccagtatgtggacaagacatctctgggttctgacagcagcacgcaggccaaggatgcccacctgtcccccaagagaccgtggaaggagcccgtcaaagccgaagaaaggggtcgatttggcaaagccatagagaaagacgactgtgacgaaacaggaatagaagaagccaacgaactcaccaagctcaacgtttcaaagagtgtgtgaggcggcgcccacccgctgcccgaggtgctctgtttgtcgaaacacagtaatatttgtatttggctgttgtgctttccaagcgccacagttgccctccccggacgtggtgttatgtggtcatttcagccctaacttctgtgtggatcacagttattcagggttcattttcatccattcttccctttcgctcccttccctggaaaccccgctgcctctgggtcatccgttcagcacgtggtggagaacaagtgccttcagggctggcctcggcctcgagtctcgggacagaggccgccagtggagatcatggctttgggtattatttgacttttagaacaaaagctgtggttaagatctcatttttattgctttttcccacgtcccacgagacactattttcggttctctggctaataccctgtttttgagtttattttgtttctgtctatgtcacagtgtccccctacgacccgacctctctatgtaagcacacatgcgcacacacacttgcattcatgaatctgatataaagtgccagtaatccgccaagagggggtgcgaagggggcatgtcacgacagctccgccaccccccattgcccacccgcactttcccgagcaccgcgccccgtgggctgtgggtgagccgcgctccctgcactgagcgggtttaggggctcgcccacatgcatgcaggccaagacagcaaatgccagccgggcacgacgcctgtgtgcccaggcctcgggggtctcagagccgcctctcacccccgaccctccacccaggggtctccccgtcgggagtggaggcgttggtcctggaagctgactcatcggagagggaaataccaaataaacatccgaggttgcaaaaaaaaaaaaaaaaaaaaaaaaaaaaaaaaaaaaaa

SEQ ID NO: 5793 - DNA, 1400 bp, Homo sapiens
tgattcaacagccacacaaagcagcaacattttttggatgcattgggatagataaatttggggagatcctgaagagaaaagctgctgaagcccatgtggatgctcattactacgagcagaatgagcagccaacaggaacttgtgctgcatgcatcactggtgacaacaggtccctcatagctaatcttgctgctgccaattgttataaaaaggaaaaacatcttgatctggagaaaaactggatgttggtagaaaaagcaagagtttgttatatagcaggcttttttcttcacgtttccccagagtcagtattaaaggtggctcaccatgcttctgaaaacaacaggattttcactttgaatctatctgcaccgtttattagccagttctacaaggaatcattgatgaaagttatgccttatgttgatatactttttggaaatgagacagaagctgccacttttgctagagagcaaggctttgagactaaagacattaaagagatagccaaaaagacacaagccctgccaaagatgaactcaaagaggcagcgaatcgtgatcttcacccaagggagagatgacactataatggctacagaaagtgaagtcactgcttttgctgtcttggatcaagaccagaaagaaattattgataccaatggagctggagatgcatttgttggaggttttctgtctcaactggtctctgacaagcctctgactgaatgtatccgtgctggccactatgcagcaagcatcataattagacggactggctgcacctttcctgagaagccagacttccactgatggaagagctgaaaacacaagcccaggagtgcagacactgccctaattgcttcctgacaattcccatattaataaagaagaaaattatctgccattttttcctactataataatgctgaatcttaatttagagggtacaagggtatggtaatgcttgtagaatctttattatctcaacaatctaaaaaatgatgtttatttccatagtttgatagtgccacttaaatgccaattaaacaagaatataacatttcaatagaaatttttatttcattttcaattactttgtaaattcgtgtgtatttagtacactgatttgttttttacatttctgctttgaatgcagatgcaatttaatataatagattttttaatgaattaatcttaacatagtaatctttagctttttatacaaatatatttaatttaggagtatatgtgtgtctatacacacacatacataaatataccacatatacacctgatagtcaaataaggtacagaaattttatcttgtcaattatgccaaataatctctttaatgtgcactcaacatgtaataaactttggataattaaaaaaaaaaaa

SEQ ID NO: 5794 - DNA, 600 bp, Homo sapiens
ccggcggcgagctctggctttgcaagggcccctccttctgggggcttcgcttccttagccttgctcaggtgcaagtgccccagggggcggggtgcagaagaatccgagtgtttgccaggcttaaggagaggagaaactgagaaatgaatgctgagacccccggagcaggggtctgagccacagccgtgctcgcccacaaactgatttctcacggcgtgtcaccccaccagggcgcaagcctcactattacttgaactttccaaaacctaaagaggaaaagtgcaatgcgtgttgtacatacagaggtaactatcaatatttaagtttgttgctgtcaagattttttttgtaacttcaaatatagagatatttttgtacgttatatattgtattaagggcattttaaaagcaattatattgtcctcccctattttaagacgtgaatgtctcagcgaggtgtaaagttgttcgccgcgtggaatgtgagtgtgtttgtgtgcatgaaagagaaagactgattacctcctgtgtggaagaaggaaacaccgagtctctgtataatctatttacataaaatgggtgatatgcgaacagcaaacc

SEQ ID NO: 5795 - DNA, 600 bp, Homo sapiens
ctattagatattgattttgggacttacccttttgtaacctcttcaaattgtactgttggaggtgtttgtactggtttgggtatgccacctcaaaatgttggagaagtgtatggagttgtgaaagcttatacaactagagttggtattggtgcctttcctacagagcaagacaatgaaattggagaattattacaaacaaggggtagagagtttggtgtaactactggaaggaaaagaagatgtggctggttggacctcgttttgctcaaatatgctcatatgatcaatggatttactgcgttggcacttaccaagttggatattttggacatgtttacggaaatcaaagttggagttgcttacaagttagatggtgaaatcatacctcatatcccagcaaaccaagaagtcttaaataaagttgaagttcaatataagactctcccaggatggaacacagacatatcaaatgcaagggcgtttaaagaactacctgttaatgcacaaaactatgttcgatttattgaagatgagcttcaaattccagttaagtggattggtgttggtaaatccagagaatctatgattcaactcttttaa

SEQ ID NO: 5796 - DNA, 1400 bp, Homo sapiens
ggtctccgaggcccaggagactccagaccacgccatcttccggtggcttgccatctccttcgcctccgcacacctcaccttgaccgagccctaccgcggaggctgccaagcccaggactacaccggcggcatgggcatcgtcaacggggccaagtggaacccccggaccgggactatcaatgacttcagttacctgcataccaactgcctggagctctccttctacctgggctgtgacaagttccctcatgagagtgagctgccccgcgagtgggagaacaacaaggaggcgctgctcaccttcatggagcaggtgcaccgcggcattaagggggtggtgacggacgagcaaggcatccccattgccaacgccaccatctctgtgagtggcattaatcacggcgtgaagacagccagtggtggtgattactggcgaatcttgaacccgggtgagtaccgcgtgacagcccacgcggagggctacaccccgagcgccaagacctgcaatgttgactatgacatcggggccactcagtgcaacttcatcctggctcgctccaactggaagcgcatccgggagatcatggccatgaacgggaaccggcctatcccacacatagacccatcgcgccctatgaccccccaacagcgacgcctgcagcagcgacgcctacaacaccgcctgcggcttcgggcacagatgcggctgcggcgcctcaacgccaccaccaccctaggcccccacactgtgcctcccacgctgccccctgcccctgccaccaccctgagcactaccatagagccctggggcctcataccgccaaccaccgctggctgggaggagtcggagactgagacctacacagaggtggtgacagagtttgggaccgaggtggagcccgagtttgggaccaaggtggagcccgagtttgagacccagttggagcctgagttcgagacccagctggaacccgagtttgaggaagaggaggaggaggagaaagaggaggagatagccactggccaggcattccccttcacaacagtagagacctacacagtgaactttggggacttctgagatcagcgtcctaccaagaccccagcccaactcaagctacagcagcagcacttcccaagcctgctgaccacagtcacatcacccatcagcacatggaaggcccctggtatggacactgaaaggaagggctggtcctgcccctttgagggggtgcaaacatgactgggacctaagagccagaggctgtgtagaggctcctgctccacctgccagtctcgtaagagatggggttgctgcagtgttggagtaggggcagagggagggagccaaggtcactccaataaaacaagctcatggcaaaaaaaaaaaaaaaaaaaaa

SEQ ID NO: 5797 - DNA, 600 bp, Homo sapiens
actgctgcagaccaggaggtatgtgaggagggctggaacaagtaccagggccactgttaccgccacttcccggaccgcgagacctgggtggatgctgagcgccggtgtcgggagcagcagtcacacctgagcagcatcgtcacccccgaggagcaggagtttgtcaacaacaatgcccaagactaccagtggatcggcctgaacgacaggaccatcgaaggggacttccgctggtcagatggacaccccatgcaatttgagaactggcgccccaaccagcctgacaacttttttgccgctggagaggactgtgtggtgatgatctggcacgagaagggcgagtggaatgatgttccctgcaattaccacctccccttcacgtgtaaaaagggcacagccaccacctacaaacgcagactacagaagcggagctcacggcaccctcggaggagccgccccagcacagcccactgagaagagcttccaggacgcacccaggacgctgagcccaggagcctgccaggctgacgtgcatcccacccagacggtgtcctcttcttgtcgctttttgtcatataaggaatcccattaaaaaaaaaa

SEQ ID NO: 5798 - DNA, 1400 bp, Homo sapiens
aaatgggtcctgcaggggcacaatttttaggccctgtcatagtggaaatccctcactttgggtccatgagaggaaaagagagagaactcattgttcttcgaagtgaaaatggtgaaacttggaaggagcatcagtttgacagcaaaaatgaagatttaaccgagttacttaatggcatggatgaagaacttgatagcccagaagagttagggaaaaagcgtatctgcaggattatcacgaaagatttcccccagtattttgcagtggtttcccggattaagcaggaaagcaaccagattggtcctgaaggtggaattctgagcagcaccacagtgccccttgttcaagcatctttcccagagggtgccctaactaaaagaattcgagtgggcctccaggcccagcctgttccagatgaaattgtgaaaaagatccttggaaacaaagcaacttttagcccaattgtcactgtggaaccaagaagacggaaattccataaaccaatcacaatgaccattccggtgcccccgccctcaggagaaggtgtatccaatggatacaaaggggacactacacccaatctgcgtcttctctgtagcattacagggggcacttcgcctgctcagtgggaagacatcacaggaacaactcctttgacgtttataaaagattgtgtctcctttacaaccaatgtttcagccagattttggcttgcagactgccatcaagttttagaaactgtggggttagccacgcaactgtacagagaattgatatgtgttccatatatggccaagtttgttgtttttgccaaaatgaatgatcccgtagaatcttccttgcgatgtttctgcatgacagatgacaaagtggacaaaactttagagcaacaagagaattttgaggaagtcgcaagaagcaaagatattgaggttctggaaggaaaacctatttatgttgattgttatggaaatttggccccacttaccaaaggaggacagcaacttgtttttaacttttattctttcaaagaaaatagactgccattttccatcaagattagagacaccagccaagagccctgtggtcgtctgtcttttctgaaagaaccaaagacaacaaaaggactgcctcaaacagcggtttgcaacttaaatatcactctgccagcacataaaaagattgagaaaacagatagacgacagagcttcgcatccttagctttacgtaagcgctacagctacttgactgagcctggaatgagtgagtttcctgacacgtccactaatccgggtcaatgttttaggagaagagacattttttctatgcgctctaaattatgatgtggtttcgaaaataaacgccctgggccaaaaaaaaaaaaaaaaaaaaaaaaaaaa

SEQ ID NO: 5799 - DNA, 1400 bp, Homo sapiens
gcacagatcattaatgacgccttcaacctggccagtgcccataaggtccctgtcactctggcgctgaacaacaccctcttcctgattgaagagagacagtacatgccctgggaggccgccctgagcagcctgagctacttcaagctcatgtttgaccgctccgaggtctatggccccatgaagaactacctgaagaagcaggtcacacccctcttcattcacttcagaaataataccaacaactggagggagatcccagaaaacctgatggaccagtacagcgaggttaatgccatcagcaccgcctgctccaacggagttccagagtgtgaggagatggtctctggccttttcaagcagtggatggagaaccccaataataacccgatccaccccaacctgcggtccaccgtctactgcaacgctatcgcccagggcggggaggaggagtgggacttcgcctgggagcagttccgaaatgccacactggtcaatgaggctgacaagctccgggcagccctggcctgcagcaaagagttgtggatcctgaacaggtacctgagctacaccctgaacccggacttaatccggaagcaggacgccacctctaccatcatcagcattaccaacaacgtcattgggcaaggtctggtctgggactttgtccagagcaactggaagaagctttttaacgattatggtggtggctcgttctccttctccaacctcatccaggcagtgacacgacgattctccaccgagtatgagctgcagcagctggagcagttcaagaaggacaacgaggaaacaggcttcggctcaggcacccgggccctggagcaagccctggagaagacgaaagccaacatcaagtgggtgaaggagaacaaggaggtggtgctccagtggttcacagaaaacagcaaatagtccccagcccttgaagtcacccggccccgatgcaaggtgcccacatgtgtccatcccagcggctggtgcagggcctccattcctggagcccgaggcaccagtgtcctcccctcaaggacaaagtctccagcccacgttctctctgcctgtgagccagtctagttcctgatgacccaggctgcctgagcacctcccagcccctgcccctcatgccaaccccgccctaggcctggcatggcacctgtcgcccagtgccctggggctgatctcagggaagcccagctccagggccagatgagcagaagctctcgatggacaatgaacggccttgctgggggccgccctgtaccctctttcacctttccctaaagaccctaaatctgaggaatcaacagggcagcagatctgtatatttttttctaagagaaaatgtaaataaaggatttctagatgaaaaaaaaaaaaaaaaa

SEQ ID NO: 5800 - DNA, 600 bp, Homo sapiens
ttaaatggaagactgttctaaaatcacttttttccctaatccaatttttagagtggctagtagtttcttcatttgaaattgtaagcatccggtcagtaagaatgcccatccagttttctatatttcatagtcaaagccttgaaagcatctacaaatctctttttttaggttttgtccatagcatcagttgatccttactaagtttttcatgggagacttccttcatcacatcttatgttgaaatcactttctgtagtcaaagtataccaaaaccaatttatctgaactaaattctaaagtatggttatacaaaccatatacatctggttaccaaacataaatgctgaacattccatattattatagttaatgtcttaatccagcttgcaagtgaatggaaaaaaaaataagcttcaaactaggtattctgggaatgatgtaatgctctgaatttagtatgatataaagaaaacttttttgtgctaaaaatactttttaaaatcaattttgttgattgtagtaatttctatttgcactgtgcctttcaactccagaaacattctaagatgtacttggatttaattaaaaagttcactttgt

SEQ ID NO: 5801 - DNA, 1400 bp, Homo sapiens
tggatttgatgagcgggctgatgcagaaactcttcggaaggctatgaaaggcttgggcacagatgaggagagcatcctgactctgttgacatcccgaagtaatgctcagcgccaggaaatctctgcagcttttaagactctgtttggcagggatcttctggatgacctgaaatcagaactaactggaaaatttgaaaaattaattgtggctctgatgaaaccctctcggctttatgatgcttatgaactgaaacatgccttgaagggagctggaacaaatgaaaaagtactgacagaaattattgcttcaaggacacctgaagaactgagagccatcaaacaagtttatgaagaagaatatggctcaagcctggaagatgacgtggtgggggacacttcagggtactaccagcggatgttggtggttctccttcaggctaacagagaccctgatgctggaattgatgaagctcaagttgaacaagatgctcaggctttatttcaggctggagaacttaaatgggggacagatgaagaaaagtttatcaccatctttggaacacgaagtgtgtctcatttgagaaaggtgtttgacaagtacatgactatatcaggatttcaaattgaggaaaccattgaccgcgagacttctggcaatttagagcaactactccttgctgttgtgaaatctattcgaagtatacctgcctaccttgcagagaccctctattatgctatgaagggagctgggacagatgatcataccctcatcagagtcatggtttccaggagtgagattgatctgtttaacatcaggaaggagtttaggaagaattttgccacctctctttattccatgattaagggagatacatctggggactataagaaagctcttctgctgctctgtggagaagatgactaacgtgtcacggggaagagctccctgctgtgtgcctgcaccaccccactgccttccttcagcacctttagctgcatttgtatgccagtgcttaacacattgccttattcatactagcatgctcatgaccaacacatacacgtcatagaagaaaatagtggtgcttctttctgatctctagtggagatctctttgactgctgtagtactaaagtgtacttaatgttactaagtttaatgcctggccattttccatttatatatattttttaagaggctagagtgcttttagccttttttaaaaactccatttatattacatttgtaaccatgatactttaattagaagcttagccttgaaattgtgaactcttggaaatgttattagtgaagttcgcaactaaactaaacctgtaaaattatgatgattgtattcaaaagattaatgaaaaataaacatttctgtccccctgaattat

SEQ ID NO: 5802 - DNA, 1400 bp, Homo sapiens
caaatcagagttaagtggaaatatggaagaactgatcctggccctcttcatgcctcctacgtattacgatgcctggagcttacggaaagcaatgcagggagcaggaactcaggaacgtgtattgattgagattttgtgcacaagaacaaatcaggaaatccgagaaattgtcagatgttatcagtcagaatttggacgagaccttgaaaaggacattaggtcagatacatcaggacattttgaacgtttacttgtgtccatgtgccagggaaatcgtgatgagaaccagagtataaaccaccaaatggctcaggaagatgctcagcgtctctatcaagctggtgaggggagactagggaccgatgaatcttgctttaacatgatccttgccacaagaagctttcctcagctgagagctaccatggaggcttattctaggatggctaatcgagacttgttaagcagtgtgagccgtgagttttccggatatgtagaaagtggtttgaagaccatcttgcagtgtgccctgaaccgccctgccttctttgctgagaggctctactatgctatgaaaggtgctggcacagatgactccaccctggtccggattgtggtcactcgaagtgagattgaccttgtacaaataaaacagatgttcgctcagatgtatcagaagactctgggcacaatgattgcaggtgacacgagtggagattaccgaagacttcttctggctattgtgggccagtaggagggatttttttttttttaatgaaaaaaaaatttctattcatagcttatccttcagagcaatgacctgcatgcagcaatatcaaacatcagctaaccgaaagagctttctgtcaaggaccgtatcagggtaatgtgcttggtttgcacatgttgttattgccttaattctaattttattttgttctctacatacaatcaatgtaaagccatatcacaatgatacagtaatattgcaatgtttgtaaaccttcattcttactagtttcattctaatcaagatgtcaaattgaataaaaatcacagcaatctctgattctgtgtaataatattgaataattttttagaaggttactgaaagctctgccttccggaatccctctaagtctgcttgatagagtggatagtatgttaaaactgtgtactttaaaaaaaaattcaacctttacatctagaataatttgcatctcattttgcctaaattggttctgtattcataaacactttccacatagaaaatagattagtattacctgtggcaccttttaagaaagggtcaaatgtttatatgcttaagatacatagcctccctttttttcgcgttgtttcctttttttaaattgagttatgacaaataaaaaattgcatat

SEQ ID NO: 5803 - DNA, 1400 bp, Homo sapiens
aatagaacaattttcatctaattccatttacttttagatgaatggcattgtgaatgccattcttttaatgaatttcaagagaattctctggttttctgtgtaattccagatgagtcactgtaactctagaagattaaccttccagccaacctattttcctttcccttgtctctctcatcctcttttccttccttctttcctttctcttcttttatctccaaggttaatcaggaaaaatagcttttgacaggggaaaaaactcaataactagctatttttgacctcctgatcaggaactttagttgaagcgtaaatctaaagaaacattttctctgaaatatattattaagggcaatggagataaattaatagtagatgtggttcccagaaaatataatcaaaattcaaagattttttttgtttctgtaactggaactaaatcaaatgattactagtgttaatagtagataacttgtttttattgttggtgcatattagtataactgtggggtaggtcggggagagggtaagggaatagatcactcagatgtattttagataagctatttagcctttgatggaatcataaatacagtgaatacaatcctttgcattgttaaggaggttttttgtttttaaatggtgggtcaaggagctagtttacaggcttactgtgatttaagcaaatgtgaaaagtgaaaccttaattttatcaaaagaaatttctgtaaatggtatgtctccttagaatacccaaatcataattttatttgtacacactgttaggggctcatctcatgtaggcagagtataaagtattaccttttggaattaaaagccactgactgttataaagtataacaacacacatcaggttttaaaaagccttgaatggcccttgtcttaaaaagaaattaggagccaggtgcggtggcacgtgcctgtagtcccagctccttgggaggctgagacaggaggattccttgagccctggagtttgagtccagcctgggtgacatagcaagaccctgtcttaaaagaaaaatgggaagaaagacaaggtaacatgaagaaagaagagatacctagtatgatggagctgcaaatttcatggcagttcatgcagtcggtcaagaggaggattttgttttgtagtttgcagatgagcatttctaaagcattttcccttgctgtatttttttgtattataaattacattggacttcatatatataatttttttttacattatatgtctcttgtatgttttgaaactcttgtatttatgatatagcttatatgatttttttgccttggtatacattttaaaatatgaatttaaaaaatttttgtaaaaataaaattcacaaaattgttttgaaaaacaaaaaaaaaaaaaa

SEQ ID NO: 5804 - DNA, 1400 bp, Homo sapiens
tgaggtgttgggaatctggagatgatccatgggtagaacatgccaagtggtttccaaggtgtgagttcttgatacgaatgaaaggccaagagtttgttgatgagattcaaggtagatatcctcatcttcttgaacagctgttgtcaacttcagataccactggagaagaaaatgctgacccaccaattattcattttggacctggagaaagttcttcagaagatgctgtcatgatgaatacacctgtggttaaatctgccttggaaatgggctttaatagagacctggtgaaacaaacagttcaaagtaaaatcctgacaactggagagaactataaaacagttaatgatattgtgtcagcacttctaaatgctgaagatgaaaaaagagaggaggagaaggaaaaacaagctgaagaaatggcatcagatgatttgtcattaattcggaagaacagaatggctctctttcaacaattgacatgtgtgcttcctatcctggataatcttttaaaggccaatgtaattaataaacaggaacatgatattattaaacaaaaaacacagatacctttacaagcgagagaactgattgataccattttggttaaaggaaatgctgcggccaacatcttcaaaaactgtctaaaagaaattgactctacattgtataagaacttatttgtggataagaatatgaagtatattccaacagaagatgtttcaggtctgtcactggaagaacaattgaggaggttgcaagaagaacgaacttgtaaagtgtgtatggacaaagaagtttctgttgtatttattccttgtggtcatctggtagtatgccaggaatgtgccccttctctaagaaaatgccctatttgcaggggtataatcaagggtactgttcgtacatttctctcttaaagaaaaatagtctatattttaacctgcataaaaaggtctttaaaatattgttgaacacttgaagccatctaaagtaaaaagggaattatgagtttttcaattagtaacattcatgttctagtctgctttggtactaataatcttgtttctgaaaagatggtatcatatatttaatcttaatctgtttatttacaagggaagatttatgtttggtgaactatattagtatgtatgtgtacctaagggagtagtgtcactgcttgttatgcatcatttcaggagttactggatttgttgttctttcagaaagctttgaatactaaattatagtgtagaaaagaactggaaaccaggaactctggagttcatcagagttatggtgccgaattgtctttggtgcttttcacttgtgttttaaaataaggatttttctcttatttctccccctagtttgtgagaaacatctcaataaagtgcttt

SEQ ID NO: 5805 - DNA, 1249 bp, Homo sapiens; identical to SEQ ID NO: 570

SEQ ID NO: 5806 - DNA, 600 bp, Homo sapiens
atttatgtagtagacagttgtgaccgagaccgaattggcatttccaaatcagagttagttgccatgttggaggaagaagagctgagaaaagccattttagtggtgtttgcaaataaacaggacatggaacaggccatgacttcctcagagatggcaaattcacttgggttacctgccttgaaggaccgaaaatggcagatattcaaaacgtcagcaaccaaaggcaccggccttgatgaggcaatggaatggttagttgaaacattaaaaagcagacagtaattcagtccattcttctcccctgaaatgaagactacatcacctctctccctttggaaacagtcaagtgtacttcacactactagatgttaaaactatatgattattggcatatactgactgactgcaatatttgtagtaaatagggaaaataagtatttagttggagggataatttgatcgaatcacctgaatgttctatgtaatgtaaaatattcttttcttgctttcttgtgttaaggtatatattctatttgtatggaattcttattcaaatacagttgtattaaagagtatactcctattggatgaaaaaaacct

SEQ ID NO: 5807 - DNA, 600 bp, Homo sapiens
tgggtctgcaggagaaagaagatggacaaccaattgaccagcagcctatagacaaggagattgagccagatggtgcagagctggaaggccctgaagagaaacgtgagggtgaggagcgggacgaagagtccaggagaccctgtgccatggtcacacccggtgcagaggaaccatctatacctgagcctccaaagcctgcggctgatcaggatggagctgaggtgcttgggactaggagcagaagcctgccagaaaaaggccctcccaaggctttggcctataagacagtggaagtggtggaatctatcgagaagatttccacggagagcattcagacatatgaagaaaccgctgtgatcgtggagaccatgattggaaagacaaagtcagacaagaagaaatcaggagagaagagctcttaaaatgcccaggcttgatgggataaaatgtatttggggccactgtaggggtaatgctttgatattttagagcaaatgataaaagggtgagggttcctgtttggattagaccatagttgacccatctggcattgccaacgaagccttcattaaaatgttttctttgcttgcaaaaaaaaaa

SEQ ID NO: 5808 - DNA, 600 bp, Homo sapiens
agctggtggcccccacccagtaccgcatctccctgcagtttgacttctttgagacagagggcaatgatgtgtgcaagtacgacttcgtggaggtgcgcagtggactcacagctgactccaagctgcatggcaagttctgtggttctgagaagcccgaggtcatcacctcccagtacaacaacatgcgcgtggagttcaagtccgacaacaccgtgtccaaaaagggcttcaaggcccacttcttctcagaaaagaggccagctctgcagccccctcggggacgcccccaccagctcaaattccgagtgcagaaaagaaaccggaccccccagtgaggcctgccaggcctcccggaccccttgttactcaggaacctcaccttggacggaatgggatgggggcttcggtgcccaccaaccccccacctccactctgccattccggcccacctccctctggccggacagaactggtgctctcttctccccactgtgcccgtccgcggaccggggacccttccccgtgccctaccccctcccattttgatggtgtctgtgacatttcctgttgtgaagtaaaagagggacccctgcgtcctgc

SEQ ID NO: 5809 - DNA, 600 bp, Homo sapiens
taaatctaaatgtggcttttgtcaagcacttagatggatataaatgcagcaacttgttttaaaaaaatgcacatttacttcccaaaaaagttgttacttgccttttcaagtgtgacaaactcacatttgatattctcttatatgttatagtaatgtaacgtataaactcaagcctttttattctttgtgattaaatcctgttttaaaatgtcacaaaacaggaaccagcattctaattagatttactatatcaagatatggttcaaataggactactagagttcattgaacactaaaactatgaaacaattactttttatattaaaaagaccatggatttaacttatgaaaatccaaatgcaggatagtaatttttgtttacttttttaaccaaactgaatttttgaaagactattgcaggtgtttaaaaagaaagaaaagttgttttatctaatactgtaagtagttgtcatattctggaaaatttaatagttttagagttaagatatctcctctctttggttagggaagaagaaagcccttcaccattgtggaatgatgccctggctttaaggtttagctccacatcatgcttctctt

SEQ ID NO: 5810 - DNA, 600 bp, Homo sapiens
agcagatgacaaaaaacttcagttctccttaaagaagttaggggtaaacaatatctctggtattgaagaggtgaatatgtttacaaaccaaggaacagtgatccactttaacaaccctaaagttcaggcatctctggcagcgaacactttcaccattacaggccatgctgagacgaagcagctgacagaaatgctacccagcatcttaaaccagcttggtgcggatagtctgactagtttaaggagactggccgaagctctgcccaaacaatctgtggatggaaaagcaccacttgctactggagaggatgatgatgatgaagttccagatcttgtggagaattttgatgaggcttccaagaatgaggcaaactgaattgagtcaacttctgaagataaaacctgaagaagttactgggagctgctattttatattatgactgctttttaagaaattcttgtttatggatctgataaaatctagatctctaatatttttaagcccaagccccttggacactgcagctcttttcagtttttgcttatacacaattcattctttgcagctaattaagccgaagaagccttaagtgggaattc

SEQ ID NO: 5811 - DNA, 600 bp, Homo sapiens
ccgcggccccaatggcctggccattctcagcctctttgtcaacgttgccagtacctctaacccattcctcagtcgcctccttaaccgcgacaccatcactcgcatctcctacaagaatgatgcctactttcttcaagacctgagcctggagctcctgttccctgaatccttcggcttcatcacctatcagggctctctcagcaccccgccctgctccgagactgtcacctggatcctcattgaccgggccctcaatatcacctcccttcagatgcactccctgagactcctgagccagaatcctccatctcagatcttccagagcctcagcggtaacagccggcccctgcagcccttggcccacagggcactgaggggcaacagggacccccggcaccccgagaggcgctgccgaggccccaactaccgcctgcatgtggatggtgtcccccatggtcgctgagactccccttcgaggattgcacccgcccgtcctaagcctccccacaaggcgaggggagttacccctaaaacaaagctattaaagggacagaatacttcctgtttaaaaaaaaaaaaaaaaaaaaaaaaaaaaaaaaa

SEQ ID NO: 5812 - DNA, 1400 bp, Homo sapiens
tgccaaggaattaatcttggtttcactacaattaaaattcactcctttccaatcatgtcattgaaagtgcctttaacgaaagaaatggtcactgaatgggaattctcttaagaaaccctgagattaaaaaaagactatttggataacttataggaaagcctagaacctcccagtagagtggggatttttttcttcttccctttctcttttggacaatagttaaattagcagtattagttatgagtttggttgcagtgttcttatcttgtgggctgatttccaaaaaccacatgctgctgaatttaccagggatcctcatacctcacaatgcaaaccacttactaccaggcctttttctgtgtccactggagagcttgagctcacactcaaagatcagaggacctacagagagggctctttggtttgaggaccatggcttacctttcctgcctttgacccatcacaccccatttcctcctctttccctctccccgctgccaaaaaaaaaaaaaaggaaacgtttatcatgaatcaacagggtttcagtccttatcaaagagagatgtggaaagagctaaagaaaccaccctttgttcccaactccactttacccatattttatgcaacacaaacactgtccttttgggtccctttcttacagatggacctcttgagaagaattatcgtattccacgtttttagccctcaggttaccaagataaatatatgtatatataacctttattattgctatatctttgtggataatacattcaggtggtgctgggtgatttattataatctgaacctaggtatatcctttggtcttccacagtcatgttgaggtgggctccctggtatggtaaaaagccaggtataatgtaacttcaccccagcctttgtactaagctcttgatagtggatatactcttttaagtttagccccaatatagggtaatggaaatttcctgccctctgggttccccatttttactattaagaagaccagtgataatttaataatgccaccaactctggcttagttaagtgagagtgtgaactgtgtggcaagagagcctcacacctcactaggtgcagagagcccaggccttatgttaaaatcatgcacttgaaaagcaaaccttaatctgcaaagacagcagcaagcattatacggtcatcttgaatgatccctttgaaattttttttttgtttgtttgtttaaatcaagcctgaggctggtgaacagtagctacacacccatattgtgtgttctgtgaatgctagctctcttgaatttggatattggttattttttatagagtgtaaaccaagttttatattctgcaatgcgaacaggtacctatctgtttctaaataaaactgtttacattcaaaaa

SEQ ID NO: 5813 - DNA, 1311 bp, Homo sapiens; identical to SEQ ID NO: 578

SEQ ID NO: 5814 - DNA, 600 bp, Homo sapiens
ctgcttcatatctctcccttctttaccttcatttcatcctgttggctgctgccaccaaatctgtctagaatcctgctttacaggatcatgtaaatgctcaaagatgtaatgtagttctttgttcctgctttctctttcagtattaaactctcctttgatattatgtggcttttatttcagtgccatacatgttattgttttcaacctagaaacctttatccctgcttatctgaaacttcccaacttccctgatctttaagacttttttttttttttttttttttttgagacagagtctcgctctgtcgcccaggctggagggcagtggcacgatctcagctcactgcaagctccaactcccgggttcacgccattctcctgcctcagccttccaagtagctgggactacaggtgcccgccaccgtgcccggctaatttttttgtatttttagtagagacagggtttcaccatgttagccgggatggtcttgatctcctgacctcatgatccacccacctcagcctcccaaagtgttgggattacaggcgtgagccactgcgcccgggcaagacctttttttaaaaaaaaaaaaaaaaaaa

SEQ ID NO: 5815 - DNA, 1286 bp, Homo sapiens; identical to SEQ ID NO: 580

SEQ ID NO: 5816 - DNA, 1400 bp, Homo sapiens
ccagaaaggcggggcacctgcgcagatagagacaatcttacccgcaggttttcagatctaggatttgaagtgaaatgctttaatgatcttaaagcagaagaactactgctcaaaattcatgaggtgtcaactgttagccacgcagatgccgattgctttgtgtgtgtcttcctgagccatggcgaaggcaatcacatttatgcatatgatgctaaaatcgaaattcagacattaactggcttgttcaaaggagacaagtgtcacagcctggttggaaaacccaagatatttatcattcaggcatgtcggggaaaccagcacgatgtgccagtcattcctttggatgtagtagataatcagacagagaagttggacaccaacataactgaggtggatgcagcctccgtttacacgctgcctgctggagctgacttcctcatgtgttactctgttgcagaaggatattattctcaccgggaaactgtgaacggctcatggtacattcaagatttgtgtgagatgttgggaaaatatggctcctccttagagttcacagaactcctcacactggtgaacaggaaagtttctcagcgccgagtggacttttgcaaagacccaagtgcaattggaaagaagcaggttccctgttttgcctcaatgctaactaaaaagctgcatttctttccaaaatctaattaattaatagaggctatctaattccacactctgtattgaaaatggctttctcagccaggcgtggttactcacacctgtaatcccagcactttgggagtccaaggtgggcggatcacctgaggtcgggagttcgagaccagcctgaccaacatggagaagccccgtctctactaaaaatgcaaaaaaaaatttagctaggcatggcggcgcatgcctgcaatcccagctacttggaaggctgaggcaggagaatcacttgaacccaggaggtggaggctgcggtgagccgagattgcgccattgcactccagcctgggcaacgagtgaaactccgtctcaaaaaaaagaaaatgtctttctcttccttttatataaatatcgttagggtgaagcattatggtctaatgattcaaatgttttaaagtttaatgcctagcagagaactgccttaaaaaaaaaaaaaaaaagttcatgttggccatggtgaaagggtttgatatggagaaacaaaatcctcaggaaattagataaataaaaatttataagcatttgtattattttttaataaactgcagggttacacaaaaatctagctgatttaacttgtattttgtcacttttttataaaagtttattgtttgatgtttttaaaggtttttgaaatccaggaattaaatcatcccttaataaaatattcgaaattc

SEQ ID NO: 5817 - DNA, 600 bp, Homo sapiens
aggaccaccaatggattgtggaaaatggagccatgacaagaacaaagccactgactgagatggagtgagctgagacagataagagaataccttggtctcacctatcctgccctcacatcttccaccagcaccttactgcccaggcctatctggaagccacctcaccaaggaccttggaagagcaagggacagtgaggcaggagaagaacaagaaatggatgtaagcctggcccataatgtgaacataagtaatcactaatgctcaacaatttatccattcaatcatttattcattgggttgtcagatagtctatgtatgtgtaaaacaatctgttttggctttatgtgcaaaatctgttatagctttaaaatatatctggaactttttagattattccaagccttattttgagtaaatatttgttacttttagttctataagtgaggaagagtttatggcaaagatttttggcactttgttttcaagatggtgttatcttttgaattcttgataaatgactgtttttttctgcctaatagtaactggttaaaaaacaaatgttcatatttattgattaaaaatgtggttgcttaattcct

SEQ ID NO: 5818 - DNA, 1400 bp, Homo sapiens
tctgctggggatggccactgtgaataactgtgtttcctaccgaaaccctgcagagggaacctggtacatccagtcactttgccagagcctgagagagcgatgtcctcgaggcgatgatattctcaccatcctgactgaagtgaactatgaagtaagcaacaaggatgacaagaaaaacatggggaaacagatgcctcagcctactttcacactaagaaaaaaacttgtcttcccttctgattgatggtgctattttgtttgttttgttttgttttgtttttttgagacagaatctcgctctgtcgcccaggctggagtgcagtggcgtgatctcggctcaccgcaagctccgcctcccgggttcaggccattctcctgcctcagcctcccgagtagctgggactacaggggcccgccaccacacctggctaattttttaaaaatatttttagtagagacagggtttcactgtgttagccagggtggtcttgatctcctgacctcgtgatccacccacctcggcctcccaaagtgctgggattacaggcgtgagccaccgcgcctggccgatggtactatttagatataacactatgtttatttactaattttctagattttctactttattaattgttttgcacttttttataagagctaaagttaaataggatattaacaacaataacactgtctcctttctcttacgcttaaggctttgggaatgtttttagctggtggcaataaataccagacacgtacaaaatccagctatgaatatagagggcttatgattcagattgttatctatcaactataagcccactgttaatattctattaactttaattctctttcaaagctaaattccacactaccacattaaaaaaattagaaagtagccacgtatggtggctcatgtctataatcccagcactttgggaggttgaggtgggaggatttgcttgaacccaagaggtccaaggctgcagtgagccatgttcacaccgctgcactcaagcttgggtgacagagcaagaccccgtccccaaaaaaattttttttttaataaacccaaatttgtttgaaaacttttaaaaattcaaatgatttttacaagttttaaataagctctccccaaacttgctttatgccttcttattgcttttatgatatatatatgcttggctaactatatttgctttttgctaacaatgctctggggtctttttatgcatttgcatttgctctttcatctctgcttggattattttaaatcattaggaattaagttatctttaaaatttaagtatcttttttccaaaacattttttaatagaataaaatataatttgatcttaaaaaaaaaaaaaaaaaaaaaaaaaaaaaaaaaaaaaaaa

SEQ ID NO: 5819 - DNA, 600 bp, Homo sapiens
actcaaggactttgcagccggcacagggtctgctctttctctgccagtgacagacaggctcttagcagcttccagattgacgacaagtgctgaacagtggaggaagagggacagatgaatgccgtggattgcacgtggcctcttgagcagtggctggtccagggctagtgacttgtgtcccatgatccctgtgttgtctctagagcagggattaacctctgcactactgacatgtggggccaggtcaccctttgctgtgaggctgtcctgtacattgtgggatgttcagcactgtcccttgcctcaatgccagtaacgcgtcttcctgagtggtgccaaacaaaaaggttctcaggtgttgccaaatatgtcctggggtataaaactttcctcgcctgacaaccactggtctgtagggatttttggctacacacaaaccagtatcgctcatagatcagcaaaccggggcctactagagtctgaacagctgtaatctatgaattctaagtgaaattttaaaaattgttaatttttcctatattgcattaattttaaaaaaaaaaaaaaaaaaaaaaaaaaaaaaaaaaaaaaaaaaaaaaa

SEQ ID NO: 5820 - DNA, 600 bp, Homo sapiens
gcagtagactgcagtggacagtccccaccttgttactgctactacactttgctcctctggcccaaggcatgaggagagaggctgtgtcagaaactgaagctgttctcaggatcactgggctcttcttggcagaggggatgtctggcttgcctgaagggagtggctctgtaaggacgccttgatgctttcttcattaagattttgagcatttttacgtacttgagcttttttttttttttttttcaatttctagaggaactttttctctgttaattcctggaactgtattttgaatccttaaaggtgagccctcatagggagatccaaagtcctgtggttaacgccttcatttatagatgaggcagctgaggcctggggatgtgaacaacctgctcacagtcctcatttactggatttgacttcagccaggtgaactggaatgccttggggcgtggaagggcattaggagtgtttcatttgatatgtgaatgctcataaaaaaatgtcaaggaatgaagaacaacaactctcagtggtgcctgcatttataattatttatgtgaaagtcaaattcatgtacagtaaatttgttataagaat

SEQ ID NO: 5821 - DNA, 600 bp, Homo sapiens
gctatggagagggcttgaaatgtgtacaggtgtcaccatcatttctagtatattaggaaactgggatgggaggttgatttgctctctaaacttccctctagttggcaagtctcacatattcatcagcaggagtggagggtgggggaaaactagaaagatgaaaacttttacatttttctgatgggttcatgtctctgattgggtcagctggcttcctagcctaagctgggatctgaataccccttctctgtagctgctagtgagccttcccatttagattaaagattgctttatccagcagtcaattaactctccagttatcagtactcccacaattggccagggcaacaataattggagttcatactgatgccctgaggcactgaaaaaaaaaaaaatcccaaagtgccttctgagctgtctaaaagttacattgtgcttggtagatttagtgttaagtgtgcagtataattttctaatttattttctcaatcttttagcacatgtgtaagacactgtgcaaatttttggaaaatagagcaatactttttgtggaatactagctaactaattctgtcattaaactcatattttggaaat

SEQ ID NO: 5822 - DNA, 1400 bp, Homo sapiens
ggtcaccaaggacgtggagcgcacggacggcgccctgttagtcaacgccatgttcttcaagccacactgggatgagaaattccaccacaagatggtggacaaccgtggcttcatggtgactcggtcctataccgtgggtgtcatgatgatgcaccggacaggcctctacaactactacgacgacgagaaggaaaagctgcaaatcgtggagatgcccctggcccacaagctctccagcctcatcatcctcatgccccatcacgtggagcctctcgagcgccttgaaaagctgctaaccaaagagcagctgaagatctggatggggaagatgcagaagaaggctgttgccatctccttgcccaagggtgtggtggaggtgacccatgacctgcagaaacacctggctgggctgggcctgactgaggccattgacaagaacaaggccgacttgtcacgcatgtcaggcaagaaggacctgtacctggccagcgtgttccacgccaccgcctttgagttggacacagatggcaacccctttgaccaggacatctacgggcgcgaggagctgcgcagccccaagctgttctacgccgaccaccccttcatcttcctagtgcgggacacccaaagcggctccctgctattcattgggcgcctggtccggcctaagggtgacaagatgcgagacgagttatagggcctcagggtgcacacaggatggcaggaggcatccaaaggctcctgagacacatgggtgctattggggttgggggggaggtgaggtaccagccttggatactccatggggtgggggtggaaaagcagaccggggttcccgtgtgcctgagcggaccttcccagctagaattcactccacttggacatgggccccagataccatgatgctgagcccggaaactccacatcctgtgggacctgggccatagtcattctgcctgccctgaaagtcccagatcaagcctgcctcaatcagtattcatatttatagccaggtaccttctcacctgtgagaccaaattgagctaggggggtcagccagccctcttctgacactaaaacacctcagctgcctccccagctctatcccaacctctcccaactataaaactaggtgctgcagcccctgggaccaggcacccccagaatgacctggccgcagtgaggcggattgagaaggagctcccaggaggggcttctgggcagactctggtcaagaagcatcgtgtctggcgttgtggggatgaactttttgttttgtttcttccttttttagttcttcaaagatagggagggaagggggaacatgagcctttgttgctatcaatccaagaacttatttgtacattttttttttcaataaaacttttccaatgacattt

SEQ ID NO: 5823 - DNA, 1400 bp, Homo sapiens
ggggacttcgagatcgcagccaagtacgtgtgtcggaccctggagacacagccgcagagcagccccttctcatgcatggacctcacctacgtcagcctgctactccaggagttcggctttcccaggagcaaagtgctgaagctcactcggaaaattgacaatgttgagaccagctgggctctgggggccatttttcattacatcgactccctgaacagacagaagagtccagcctcatagtggccgagccatccctgtccccgtcagcagtgtctgtgtgtctgcataaaccctcctgtcctggacgtgacttcatcctgaggagccacagcacaggccgtgctggcactttctgcacactggctctgggacttgcagaaggcctggtgctgccctggcatcagcctcttccagtcacatctggccagagggctgtctggacctgggccctgctcaatgccacctgtctgcctgggctccaagtgggcaggaccaggacagaaccacaggcacacactgagggggcagtgtggctccctgcctgtcccatccccatgccccgtccgcggggctgtggctgctgctgtgcatgtccctgcgatgggagtcttgtctcccagcctgtcagtttcctccccagggcagagctccccttcctgcaagagtctgggaggcggtgcaggctgtcctggctgctctggggaagccgagggacagccataacacccccgggacagtaggtctgggcggcaccactgggaactctggacttgagtgtgtttgctcttccttgggtatgaatgtgtgagttcacccagaggcctgctctcctcacacattgtgtggtttggggttaatgatggagggagacacctcttcatagacggcaggtgcccacctttcagggagtctcccagcatgggcggatgccgggcatgagctgctgtaaactatttgtggctgtgctgcttgagtgacgtctctgtcgtgtgggtgccaagtgcttgtgtagaaactgtgttctgagcccccttttctggacaccaactgtgtcctgtgaatgtatcgctactgtgagctgttcccgcctagccagggccatgtcttaggtgcagctgtgccacgggtcagctgagccacagtcccagaaccaagctctcggtgtctcgggccaccatccgcccacctcgggctgaccccacctcctccatggacagtgtgagccccgggccgtgcatcctgctcagtgtggcgtcagtgtcggggctgagccccttgagctgcttcagtgaatgtacagtgcccggcacgagctgaacctcatgtgttccactcccaataaaaggttgacaggggcttctccttcaaaaaaaaaaaaaaaaaaaaaaaaaaaaaaaaaa

SEQ ID NO: 5824 - DNA, 600 bp, Homo sapiens
gtcctgcaccgctcatgctcgcccggctttggggtcaagcagattgctacaggggtttctgataccatctgcgagccctgcccagtcggcttcttctccaatgtgtcatctgctttcgaaaaatgtcacccttggacaagctgtgagaccaaagacctggttgtgcaacaggcaggcacaaacaagactgatgttgtctgtggtccccaggatcggctgagagccctggtggtgatccccatcatcttcgggatcctgtttgccatcctcttggtgctggtctttatcaaaaaggtggccaagaagccaaccaataaggccccccaccccaagcaggaaccccaggagatcaattttcccgacgatcttcctggctccaacactgctgctccagtgcaggagactttacatggatgccaaccggtcacccaggaggatggcaaagagagtcgcatctcagtgcaggagagacagtgaggctgcacccacccaggagtgtggccacgtgggcaaacaggcagttggccagagagcctggtgctgctgctgcaggggtgcaggcagaagcggggagctatgcccagtcagtgccagcccctc

SEQ ID NO: 5825 - DNA, 600 bp, Homo sapiens
tggtgggggggtacccttatttcctcgacacgccgctggctcaaagacaatgttattttccttccctttcttgaagaacaaaaagaaagccgggcatgacggctcatgcctgtaatcccagcactttgggaggctgaggcaggtggatcactggaggtcaggtctttgaggccagccctagccaacatggtgtaaacactgtctctactaaaaatacaattagccaggtgtggcggcgtaatcccatgctaacctgtaatcccagctacttgggaggctgaggcagagctgcttgaaccctggaagtggaggttgcagtgagcctgtcatcgctccactgagccaagatcgctcccactgcactccagcctgggcgacagagccagactgtctcaaataaataaatatgagataatgcagtcgggagaagggagggagagaattttattaaatgtgacgaactgcccccccccccccccccagcaggagagcagcaaaatttatgtaaatctttgacggggttttccttgctcctgccaggattaaaagtccatgagtttcttgctcaaaaaaaaaaaaaaaaaaaaaaaaaaaaaaaaa

SEQ ID NO: 5826 - DNA, 1400 bp, Homo sapiens
atcttcctccctcctttaattaatggaatcttctgaattttccctgaatgtttaaagatcatgacatatgacttgatcttctgggagcaggaacaatgactactttttctggtgtgttaacatgtcgctagccagtgctccaggcacccagctttgtctgtgggttagtattggtgtatgtatgagtatctgtatgtatatatacacggtatttatagagagagactatcctggagaagcctcgttttgatgccattcttccttgcaaggttaagcaaggtgggtggaaactaagacacctgaaccctccagggcctcccgcatcaaggtcagcatgaggacagaccacagagctgtcacttttgctccgaagctacttctccactgtcccgttcagtctgaatgctgccacaaccagccaggcaggtccacagagagggagagcagagaaagaagtcctttctctttattgagttcgaggactacaaccaatttacactgccatctgatgccgtgatcctgagccaaggaggtgaggagcagagcaggcaatttcaccaccaaatgccaagaaaagggctgacattttctttcatgggcaccaacctgcatttgtatgtgtcccgaatccacagtcgtactgattctaatggggacacagatcatggtagagaatctctccctcctcagtaaatgtacaactgcacctgtcatcatggaggtcatacatgcatacaaagaggtgtacaggtaccatcttgtatacacatatatacccacatgtacagacatacatttatgcacattcacgctgtttgtttcatatatacaggcataaaatagagtaaatacaggtagttttaaaagtacccttttgtgtgaattgactaccgttgtttgcaaacccgaaaataaaagacgttcattatgtatgaaaagtaactgatttgtattctgtgagcatgtaaaagcggaaagttagtgcttgttctaagattaccttcttgttgataaaccataaatgaatcatcaaagctcacaccaaatttttctatcaaataaaactagtgacagcttgtggctttttattagagctcgccacgaactagggtaaggtgagtgtcttagcatattttaatgcagttgcttactaaaggttttaaccgcacatgcacacacacacgctttcttatgcaatctatgtttgcacttgtgctttcagttagccttctgtaggaagtagaagtcatatgttgtctttgttgtagtgaaattatacagatagagttccatatattgtatttgtttcaatggtaaatccttttggaacatatagaatgcagagatttttttttccattaaaataaatgggtattggtggttaaaaaaaaaaaaaaaaa

SEQ ID NO: 5827 - DNA, 600 bp, Homo sapiens
aacatcgaggataatgaagggaacctgcccttgcacttggctgccaaagaaggccacctccgggtggtggagttcctggtgaagcacacggccagcaatgtggggcatcggaaccataagggggacaccgcctgtgatttggccaggctctatgggaggaatgaggttgttagcctgatgcaggcaaacggggctgggggagccacaaatcttcaataaacgtggggagggctcccccacgttgcctctactttatcaattaactgagtagctctcctgacttttaatgtcatttgttaaaatacagttctgtcatatgttaagcagctaaattttctgaaactgcataagtgaaaatcttacaacaggcttatgaatatatttaagcaacatctttttaacctgcaaaatctgttctaacatgtaattgcagataactttgactttcttctgaatattttatctttccttggcttttcccttgcttccccttttgccaatctcaacacccaagttgaagactttgtttttaaaatggtttgtcctgatgcttttgtctaattaaaacactttcaaaacaggaaaaaaaaaaaaaaaaaa

SEQ ID NO: 5828 - DNA, 600 bp, Homo sapiens
gttccccaccaagaggtccaagaaagctggccgccattaaacaggttctgacccagccagtcctggtgactggcctctgccttccaccggagagactactgaccttctcacctccgacccataccttctccccacagcctctgctgatgcacagagctgcctacacctagacacgtcctggcagggggcctcgggcactccactaccaacccagctccacccagcagtgtcctggggagaaggaaggctgagcctctccccagccttcatgccttccccaccctccagctcctcttggagaagctgttgctgagaccccccccccccccccaagtcaatcagaaccacaacaggttggtcatcaggatggccaccctcccaggatcatccttcctctgttctctttccctgccacgtggaaacaatcatcagatccttgccccaccccttgcttccagaaagggttttaaagcccatgccccaactctgccagcccccacctgccaggacgttctagcaggtcatcggtgctttgctgtccatcttcccatgctgcaatttcttcctgagatttctataaatataaatgtatgtatgtat

SEQ ID NO: 5829 - DNA, 600 bp, Homo sapiens
caacacagtaattgccttacatgacttgaaagatataaacagatcttctatcagtagcagtattgttacttctttccaggatgcaaggtctattatcccaacagaagagaaaatatttttatatttaaggattatgctgcactgtactacaaaattgtagtacttttttttgttttcttttttaaagaaatggaaaatgtttactattacagggacctcaacactgccctcccatacaggctggataaaactgtttttaagtcagtgattttagactgacctccatttaaattatgtttatatatgaactttactctgacctgtgatcatgtttcaggaaggaatgaaagagagttctttcttaataaagaaaaacactcaaggactttgttcatttccaaagctacttgtttacattgtacactgcgaccaccttgccgcttttcatcacaagcttgaatatttaaattctgtacttatatctgtaaaatagccaggaatttcctgtttgtgatctattatgcctttttacaaaaaaaatggctgtaaattattgtaaatattaaaggaactttccttacaaaaaaaaaaaaaaaaaaa

SEQ ID NO: 5830 - DNA, 600 bp, Homo sapiens
tctggctccagctggccgggagcctgatcacctgccctgctgagtcccaggctgagcctcagtctccctcccttggggcctatgcagaggtccacaacacacagatttgagctcagccctggtgggcagagaggtagggatggggctgtggggatagtgaggcatcgcaatgtaagactcgggattagtacacacttgttgatgattaatggaaatgtttacagatccccaagcctggcaagggaatttcttcaactccctgccccctagccctccttatcaaaggacaccattttggcaagctctatcaccaaggagccaaacatcctacaagacacagtgaccatactaattataccccctgcaaagccagcttgaaaccttcacttaggaacgtaatcgtgtcccctatcctacttccccttcctaattccacagctgctcaataaagtacaagagtttaacagtgtgttggcgctttgctttggtctatctttgagcgcccactagacccactggactcacctcccccatctcttctgggttccttcctctgagccttgggacccctgagcttgcagagatgaaggccgccatgtt

SEQ ID NO: 5831 - DNA, 600 bp, Homo sapiens
ttctgatcttgtcaaacccagcctgaccgcttctgacgccgggatggcctcgttactagacttttctttttaaggaagtgctgtttttttttgagggttttcaaaacattttgaaaagcatttacttttttgaccacgagccatgagttttcaaaaaaatcgggggttgtgtgggtttttggtttttgttttagtttttggttgcgttgccttttttttttagtggggttggccccatgaagtgggtgccccactcacttctctgagatcgaacggactgtgaatccgctctttgtcggaagctgagcaagctgtggcttttttccaactccgtgtgacgtttctgagtgtagtgtggtaggacccggcgggtgtgcagcaactgccctggagccccagcccctgcgtccatctgtgctgtgcgccccacagtagacgtgcagacgtccctgagaggttcttgaagatgtttatttatattgtccttttttactggaagacgtacgcatactccatcgatgttgtatttgcagtggctgaggaattcttgtacgcagttttctttggctttacgagccgattaaaagaccgtgtgaaatg

SEQ ID NO: 5832 - DNA, 1271 bp, Homo sapiens; identical to SEQ ID NO: 597

SEQ ID NO: 5833 - DNA, 1225 bp, Homo sapiens; identical to SEQ ID NO: 598

SEQ ID NO: 5834 - DNA, 600 bp, Homo sapiens
tataccctgtaatagcatactattattgaaatcgcttgaccggtcttgttcacataggcctctgggagtgatttggttctttgccctaatgtttcatttgacggtctctttttgatcaaccaatttttctaaaagttcagtcgaaagcttttaagtatagcttcctcccttgaaaaaaaatgtaaactatgactgctgagtgataaaacactgtggtgtgaaagtgtcatcttcactgccaatcaggcaaagaccggaaagatttgcattttattatgtctgtcttatcatgcaatggaaatgatgctttttgtaagtatgcatcttaccaatgatgtaacggtttaatacctttgaatgttttaataaccaagttgctgctgaacttatactaaatcaggggaccaaaaaacttgctcttatcttctcaaattgtattctatatccattaatgtatcagttatcccaaagccttcaggtggaggggtttaccaccttcctaggtcgttcaaccaggttttgtgaggaatgcattcaaagtggctttataaaagaagattttctttagcaagaaaaaaaaaaaaaaaaaaaaaaaaaaaa

SEQ ID NO: 5835 - DNA, 600 bp, Homo sapiens
atctccataccaactgctttgagatcacgctggaactgagttgcgacaagtttccccccgaagaggagttacagcgggagtggctgggtaatcgggaagccctaatccagttcctggaacaggttcaccagggcatcaagggaatggtgcttgatgagaattacaataatctcgccaatgctgtcatttctgtcagtgggattaaccatgatgtcacttcaggtgaccatggtgattacttccggctgctgcttccaggtatctacactgttagtgccacagcacctgggtatgacccagagacagtaactgtgaccgtgggtcctgcggaaccaacgttggttaacttccacctcaaaagaagcatccctcaagtaagccctgtgaggagagctcccagcagaaggcacggagtcagagccaaagtgcagccccaagccagaaagaaagaaatggagatgaggcagctgcagagaggccctgcctgaaacccacagtgccaggcaacccttcagaaaggctttgctcctgctctcagatcagatcaagcattctttctattttattatctgggacatatttaaatacaaacatattcag

SEQ ID NO: 5836 - DNA, 600 bp, Homo sapiens
atatttgtatgtttagaccagccaaattctgtcattattttagtatcaacctgctgtatattagagcaactgaatataatatggaataagtttgaccaggtcaagttttaggatatagttgaatttctttaaaaagttttctattttatctaaaatctttctattatatctaaattagaatgatcatcctgcgcaaattcagattactgtttgctggctaattgacagtatttctcagcatcactatgtagcattctgttttagcatctttgaattatgatcatttgatttggctaattacaaaaagtacaggtttaaactggacttaccttgagttaaaggcaaagaaaatctaaaaacataaatgttatatttcacaagaaatcagttgcatattatccattacatatttagttttaaaaggaggagtcaccttgaattattttctgagtcaccttgagttatttgatctctcagcctgctttctcatctgtaaaaaaggggggaggataactttcacagggtaattggtaggctaaataggagttacagaaaactgttaaatagggaagaactacattaaatttaaatattcacatt

SEQ ID NO: 5837 - DNA, 438 bp, Homo sapiens; identical to SEQ ID NO: 602

SEQ ID NO: 5838 - DNA, 1160 bp, Homo sapiens; identical to SEQ ID NO: 603

SEQ ID NO: 5839 - DNA, 600 bp, Homo sapiens
cgtggcaatgaattcttctgtgaagtggatgaagactacatccaggacaaatttaatcttactggactcaatgagcaggtccctcactaccgacaagctctagacatgatcttggacctggagcctgatgaagaactggaagacaaccccaaccagagtgacctgattgagcaggcagccgagatgctttatggattgatccacgcccgctacatccttaccaaccgtggcatcgcccagatgttggaaaagtaccagcaaggagactttggttactgtcctcgtgtgtactgtgagaaccagccaatgcttcccattggcctttcagacatcccaggtgaagccatggtgaagctctactgccccaagtgcatggatgtgtacacacccaagtcatcaagacaccatcacacggatggcgcctacttcggcactggtttccctcacatgctcttcatggtgcatcccgagtaccggcccaagagacctgccaaccagtttgtgcccaggctctacggtttcaagatccatgcgatggcctaccagctgcagctccaagccgccagcaacttcaagagcccagtcaagacgattcgctga

SEQ ID NO: 5840 - DNA, 627 bp, Homo sapiens; identical to SEQ ID NO: 605

SEQ ID NO: 5841 - DNA, 600 bp, Homo sapiens
agcgctgggcctcgtgtcgcttgtcgtccgtcctgtgggcgctctgccctgtgtccttcgcgttcctcgttaagcagaagaagtcagtagttattctcccatgaacgttcttgtctgtgtacagtttttagaacattacaaaggatctgtttgcttagctgtcaacaaaaagaaaacctgaaggagcatttggaagtcaatttgaggtttttttttttggtttttttttttttgtattttggaacgtgccccagaatgaggcagttggcaaacttctcaggacaatgaatcttcccgtttttctttttatgccacacagtgcattgttttttctacctgcttgtcttatttttagcataatttagaaaaacaaaacaaaggctgtttttcctaattttggcatgaacccccccttgttccaaaatgaagacggcatcatcacgaagcagctccaaaaggaaaagcttggcaggtgccctcgtcctggggacgtggagggtggcacggtccccgcctgcaccagtgccgtcctgctgatgtggtaggctagcaatattttggttaaaatcatgtttgtggccgaacgggcccctgcacccg

SEQ ID NO: 5842 - DNA, 600 bp, Homo sapiens
tcacagtggtcgcacctggaaaggagaaggccctgatgaaagcagtcgcaactgtggggcccatctccgttgctatggatgcaggccattcgtccttccagttctacaaatcaggcatttattttgaaccagactgcagcagcaaaaacctggatcatggtgttctggtggttggctacggctttgaaggagcaaattcgaataacagcaagtattggctcgtcaaaaacagctggggtccagaatggggctcgaatggctatgtaaaaatagccaaagacaagaacaaccactgtggaatcgccacagcagccagctaccccaatgtgtgagctgatggatggtgaggaggaaggacttaaggacagcatgtctggggaaattttatcttgaaactgaccaaacgcttattgtgtaagataaaccagttgaatcattgaggatccaagttgagattttaattctgtgacatttttacaagggtaaaatgttaccactactttaattattgttatacacagctttatgatatcaaagactcattgcttaattctaagacttttgaattttcattttttaaaaagatgtacaaaacagttt

SEQ ID NO: 5843 - DNA, 600 bp, Homo sapiens
atgaaggttttcataatgcaatgtaacatagtacttcaaagtattattcaacttcaagtttcagcaactacctacaaaagattctaaggcctagtagtatttaaactaagtttcagaatgttcccttcttgtagagagatggacaaccaaagtcagtgggacaaactccagcacagaagcctgcgaggaagcctatggaatagtttcctgtcctgagacgaaattcagattaggagatattttaggcccctgcaactggggaaggctactgtttgtttttgtttgcttattatttatttgtttgtttattgtgagatatttcaggtgggatcaaagaggtcataagaatttattttcttttgtggggtgtaactactagctttagattacccctatacacaagaatggccaacctaaaattatgtgtgtcttgtacagttagttatattagcagccctctgagatggcgtatctatcggaaggatttcaaacaccaattgctttacctgaacaaatggtgcttaccctttgaacagcagagtgaccacgtagaaggaaggaaaagggcaaaatcgcttcagttaaactgaaaccgaattc

SEQ ID NO: 5844 - DNA, 600 bp, Homo sapiens
gtgcatgaactgctggactgtggccgctgtggggatggctgccacggtggcttcgtctgggacgcgttcataactgtcctcaacaacagcggcctggccagtgaaaaggactacccgttccagggcaaagtcagagcccacaggtgccaccccaagaagtaccagaaggtggcctggatccaggacttcatcatgctgcagaacaacgagcacagaattgcgcagtacctggccacttatggccccatcaccgtgaccatcaacatgaagccccttcagctataccggaaaggtgtgatcaaggccacacccaccacctgtgacccccagcttgtggaccactctgtcctgctggtgggttttggcagcgtcaagtcagaggaggggatatgggcagagacagtctcatcgcagtctcagcctcagcctccacaccccaccccatactggatcctgaagaactcctggggggcccaatggggagagaagggctatttccggctgcaccgagggagcaatacctgtggcatcaccaagttcccgctcactgcccgtgtgcagaaaccggatatgaagccccgagtctcctgccctccctga

SEQ ID NO: 5845 - DNA, 600 bp, Homo sapiens
ggacaccacatatataaaccatgtcgtttccgtggctgggtggggcatcagtgatgggactgagtactggattgtccggaattcatggggtgaaccatggggcgagagaggctggctgaggatcgtgaccagcacctataaggatgggaagggcgccagatacaaccttgccatcgaggagcactgtacatttggggaccccatcgtttaaggccatgtcactagaagcgcagtttaagaaaaggcatggtgacccatgaccagaggggatcctatggttatgtgtgccaggctggctggcaggaactggggtggctatcaatattggatggcgaggacagcgtggtactggctgcgagtgttcctgagagttgaaagtgggatgacttatgacacttgcacagcatgctctgcctcacaatgatgcagtcagccacctggtgaagaagtgacctgcaacacaggaaacgatgggacctcagtcttcttcagcagaggacttgatattttgtatttggcaactgtgggcaataatatggcatttaagaggtgaaagagttcagacttatcaccattcttatgtcactttagaatcaaggg

SEQ ID NO: 5846 - DNA, 600 bp, Homo sapiens
ataaattaagatcctaaactctctagcttaagtgtaaatgaagtacagtagtttccctactgaaccctacctcttgtgtccctggaaccttctagaacacctgccttctaccctctggttgggagatgcagccaccacatcccttcatatcatactgttttgaataaattttcaaatccttattgttcagagttgtttgggggttctgtttcagagcataaaacctaaaggttatagtagaacaaggcaccttcttaaaagaaatcttgcttcagaccatcagttacagagaatttcctaaagtaaaattgaagcaactacaacttctccttagacactttggaatctaaccacttaaggacctttttaaagagatagcttctcttctttctgaagatcaatttctcccaaggccaagattgtccttttctcccatttcttgctagctattgcaaatgagggaagaacattattcatctctcctccccttttttttctgattcttttttcagtcagttttgctcctgggttcaagtagtattaccaccctttcacaagcaacagactctcacagggcaaaaaaaaaaaaaaaaaaaaaaa

SEQ ID NO: 5847 - DNA, 1400 bp, Homo sapiens
attttgagaaggttttctctattggaccagtattcagagcggaagactctaatacccatagacatctaactgagtttgttggtttggacattgaaatggcttttaattaccattaccacgaagttatggaagaaattgctgacaccatggtacaaatattcaaaggacttcaagaaaggtttcagactgaaattcaaacagtgaataaacagttcccatgtgagccattcaaatttttggagccaactctaagactagaatattgtgaagcattggctatgcttagggaagctggagtcgaaatgggagatgaagacgatctgagcacaccaaatgaaaagctgttgggtcatttggtaaaggaaaagtatgatacagatttttatattcttgataaatatccattggctgtaagacctttctataccatgcctgacccaagaaatcccaaacagtccaagtcttacgatatgttcatgagaggagaagaaatattgtcaggagctcaaagaatacatgatcctcaactgctaacagagagagctttacatcatggaaatgatttggagaaaattaaggcttacattgattccttccgctttggagcccctcctcatgctggtggaggcattggattggaacgagttactatgctgtttctgggattgcataatgttcgtcagacctccatgttccctcgtgatcccaaacgactcactccttaaattcacactttgccacttaactccagtgtggatgacagagcgagaccctgcctcaaaaaaaaaaaaaaaaaaaaaaaaaaaaaaaaaaaaaaaaaaaaaaaaaaaaaaaaaaaaaagaaagccacacttattcttttcagtaacctgctagtgcacaggctgtactttaggtacttaaaatatgcactagaataaatttgcaaggccctaaaatatcactgttatttttggagtaattcagtataggttcgtttaaaagagatttttataacttcagacatgcatcagtaggaaataacttgagaaattcatatggttatgttacaaattcatattctgttactacagtaaacgttaagagttttaaacagttaagattgtacaatttttcttcttttctatattacaagggccccagtgttaatgtcttagattttcagtatttgaacttatttttttaaattctgtcattgagataagaataattcaggtagcatctgaaattttaatgaatgtataattggcatatcatggaaaattaaccagaaagtatcagttcttaaaagttatgcctagaaattatgtaaagctaaactactggttagaaagtattcagtgtaatattgtattaatttgttaaattctaaacttgaatttcaataaaattttaaagct

SEQ ID NO: 5848 - DNA, 600 bp, Homo sapiens
ctcttggaggacccagtcctttgtgccttggcaaaaaagcacaagcgaaccccagccctgattgccctgcgctaccagctacagcgtggggttgtggtcctggccaagagctacaatgagcagcgcatcagacagaacgtgcaggtgtttgaattccagttgacttcagaggagatgaaagccatagatggcctaaacagaaatgtgcgatatttgacccttgatatttttgctggcccccctaattatccattttctgatgaatattaacatggagggcattgcatgaggtctgccagaaggccctgcgtgtggatggtgacacagaggatggctctatgctggtgactggacacatcgcctctggttaaatctctcctgcttggtgatttcagcaagctacagcaaagcccattggccagaaaggaaagacaataattttgttttttcattttgaaaaaattaaatgctctctcctaaaaaaaaaaaaaaaaaaaaaaaaaaaaaaaaaaaaaaaaaaaaaaaaaaaaaaaaaaaaaaaaaaaaaaaaaaaaaaaaaaaaaaaaaaaaaaaaaaaaaaaaaaaaaaaaaaaaaaaaaa

SEQ ID NO: 5849 - DNA, 1400 bp, Homo sapiens
tgcgttgagatgttaaactggcttactatagacttcgtaaaaatggctccagaaaagtaacaaactgaaatctttgagatcacacaggttggaaatatgtacataactgcacaaggtgtcaattctgctctacagtgcagttttagtcagttttagttgcataggtttccattgtatttatagtctgtttatgctaaatctggccaaagatgaacattgtccaccactaaaatgcctctgccactttgaattctgtgctaattttgtggccagaatgcggtgatcaaaacgctccatctttttacagtggcataggaagacggcaaaaatttcctaaagtgcaatagattttcaagtgtattgtgccttgttctaaaacttttattaagtaggtgcacttgacagtattgaggtcatttgttatggtgctatttcaattagtctaggtttaggcccttgtacattttgcccataactttttacaaagtacttcttttattgcacattcagagaattttatatatatgtcttgtgtgcgtgtccttaaacttccaatcttactttgtctcttggagattgttgaacgcagcttgtctaggaaggggatgggactagattctaaaatttatttgggaccatgggaatgatagttgggaagaaaactatttgcacacgacagatttctagatactttttgctgctagctttatgtaatatttattgaacattttgacaaatatttatttttgtaagcctaaaagtgattctttgaaagtttaaagaaacttgaccaaaagacagtacaaaaacactggcacttgaatgttgaatgtcaccgtatgcgtgaaattatatatttcggggtagtgtgagcttttaatgtttaagtcatattaaactcttaagtcaaattaagcagacccggcgttggcagtgtagccataactttctgatgttagtaaaaacaaaattggcgacttgaaattaaattatgccaaggttttgatacacttgtcttaagatattaatgaaacacttcaaaacactgatgtgaagtgtccagattctcagatgtttgttgtgtggattttgtttagttgtgtgtttttttttttttcagtgaatgtctggcacattgcaatcctcaaacatgtggttatctttgttgtattggcataatcagtgacttgtacattcagcaatagcatttgagcaagttttatcagcaagcaatattttcagttaataaggtttcaaaaatcatgtaaggatttaaacttgctgaatgtaaagattgaacctcaagtcactgtagctttagtaattgcttattgtattagtttagatgctagcactgcatgtgctgtgcatattctgattttattaaaataaaaaaaaaa

SEQ ID NO: 5850 - DNA, 1400 bp, Homo sapiens
ctggaaacagattttctgatcacgtagcccttttatcagtattccaagcctgggatgatgctagaatgggtggagaagaagcagagatacgtttttgtgagcacaaaagacttaatatggctacactaagaatgacctgggaagccaaagttcagctcaaagagattttgattaattctgggtttccagaagattgtttgttgacacaagtgtttactaacactggaccagataataatttggatgttgttatctccctcctggcctttggtgtgtaccccaatgtatgctatcataaggaaaagaggaagattctcaccactgaagggcgtaatgcacttatccacaaatcatctgttaattgtccttttagtagccaagacatgaattacccatctcccttctttgtatttggtgaaaagattcgaactcgagccatctctgctaaaggcatgactttagtaccccccctgcagttgcttctctttgcctccaagaaagtccaatctgatgggcagattgtgcttgtagatgactggattaaactgcaaatatctcatgaagctgctgcctgtatcactggtctccgggcagccatggaggctttggttgttgaagtaaccaaacaacctgctatcatcagccagttggaccccgtaaatgaacgtatgctgaacatgatccgtcagatctctgagccctcagctgctggtatcaaccttatgattggcagtacacggtatggagatggtccacgtcctcccaagatggcccgatacgacaatggaagcggatatagaaggggaggttctagttacagtggtggaggctatggcggtggatatagcagtggaggctatggtagcggaggctatggtggcagcgcaactccttcgggcaggatatgtgcaggtgttggtggaggctatagaggagtttcccgaggtggctttagaggcaactctggaggagactacagagggcctagtggaggctacagaggatctgggggattccagcgaggaggtggtaggggggcctatggaactggctacttggacattgaagaggaggtggcggctataaaacttggttatgtcagttctgtgtgtagacagtaaggaaaaaaaggcatgctatgtgttacgtgttttttccagtatgtttatttgccaccaaaaagtaaatgcattttcacccattctgtggttcattgtagtttaaggaaaccaagcatatagatgcattagtgattttgtttattttatgtaaaatataacgatcttcttttaaaaataccacagtttgtatttttctttaaggagtaaagatttgcctttaaataacttggtattttcctggctttcgtttaatacaatagaaaataaagtattacaccg

SEQ ID NO: 5851 - DNA, 600 bp, Homo sapiens
aatgacttctctgtttgagttgggaagcctcaccttcagacccagtaactgtccgcagctgtctgctagtggttgtcttaacatcgtagtcctagtttgcattttttaaatcccctctgtttaaaaggtttgtaaaacaaaaacaaaaaactaagtctgctcagtgaaatgctgtagaaccctaaataagtggtagaagagtgtcactgaattttgtctctgaattcagtataactgagttttgtccatgctggtgtctgggttataggcctgatgggcctggtagttttccatcttgttctggcctagaggtcagtcctttgcacttcctcaaagcttgtgtacagtgctcacctaaatccatctgactacttgttcctgtgccctcttgttttaggcctcgtttacttttaaaaaatgaaattgttcattgctgggagaagaatgttgtaatttttacttattaaagtcaacttgttaagttttttatgtattcctgttgggttttcttgttgatctcatgctagcagagcaaaaattgtaaaatattttgattaaaaatctagggacctttatgtcctatttggaattcgatatcaa

SEQ ID NO: 5852 - DNA, 1400 bp, Homo sapiens
atgccgtctcacccacagtatcacacgtggaaccgcagacagggcccagaagctttagaggtatgaggctgcagaaccggagagattttcctctgtgcagtgctctctggctaaagtcacggtcaaacctaaacaccgagcctcattaacccaagtgaaccaaccaaagtcaccagttcagaagtgctaagctaataggagtctgacccgagggcctgctgcttcctggttaagtatcttttgagattctagaacacatgggagctttttattttcggggaaaaaccgtatttttttcttgtccaattatttctaaagacacactacatagaaagaggccctataaactcaaaaagtcattgggaaacttaaagtctattctactttgcaagaggagaaatgtgttttatgaacgatagatcacatcagaactcctgtggggaggaaaccttataaattaaacacatggcccccttagagaccacaggtgatgtctgtctccatccttccctctccttttctgtcacctttccccctagctggctcctttggacctacccctgtccttgctgacttgtgttgcattgtattccaaacgtgtttacaggttctcttaagcaatgttgtatttgcaggcttttctgaataccaaatctgctttttgtaaagcgtaaaaacatcacaaagtaggtcattccatcaccacccttgtctctctacacattttgcctttggggatctggttggggttttgggttttttgttgttgttgtttatttgttattttaaaggtaaattgcacttttaaaaaaataattggttgacttaatatatttgctttttttctcacctgcacttagaggaaatttgaacaagttggaaaaaaacaatttttgtttcaattctaagaaacacttgcagctctagtattcacttgagtcttcctgtttttcctgtaccgggtcatggtaatttttggttgttttggttgttttcttaaaaaacaagttaaaacctgacgatttctgcaggctgtgtaagcatgtttacctgttggcttgctttgtgtgtctgttaaatgaatgtcatatgtaaatgctaaaataaatcgacagtgtctcagaactgaataactgcagtgacttgatgctctaaaacagtgtaggatttaagaatagatggtttttaatcctggaaattgtgattgtgacccatgagtggaggaactttcagttctaaagctgataaagtgtgtagccagaagagtacttttttttttgtaaccactgtcttgatggcaaaataattatggtaaaaaacaagtctcgtgtttattattccttaagaactctgtgttatattaccatggaacgcctaataaagcaaaatgtggttgtttc

SEQ ID NO: 5853 - DNA, 600 bp, Homo sapiens
gagggccacgggcttgggtagtggaaagggtgtttgggaaattgttaaatcagttacccgtagtagagctatttcttgtacttctaagttttctagaagtggaaggattgtagtcatcctgaaaatgggtttacttcaaaatccctcagccttgttcttcacgactgtctatactgagagtgtcatgtttccacaaagggctgacacctgagcctggattttcactcatccctgagaagccctttccagtagggtgggcaattcccaacttccttgccacaagcttcccaggctttctcccctggaaaactccagcttgagtcccagatacactcatgggctgccctgggcagccagcattcattgtaagttccctctttgaaaactggtgtgtgggtgttcagttctgtgtctggtgggtatggacagacagtaatctcctgtgatctgtgctagctgtgaggcagctctggaacgtgaagagctgtttggtttgaaccgtgaacaaaactgtgttttgagtttagctgacattaaagaaaaaagttcatcacgtgactgttaatgtaaacctggttattaaaataactatgaaattac

SEQ ID NO: 5854 - DNA, 1400 bp, Homo sapiens
cagattgaacggatccctggctatgtgtttggccacatggaaccaggcctggaatacttgtacctgtcatttaacaaacttgctgatgatggcatggaccgtgtctccttctatggggcatatcattctctgagagaattatttctggatcacaatgacttaaaatctataccacctgggatacaagaaatgaaagcactacattttctgaggctgaacaacaacaagatacggaacattcttccagaagaaatttgcaatgctgaagaggatgatgactcaaatctggaacatcttcatcttgaaaacaattatattaaaattagagaaataccatcttacacattttcatgcataagatcatactcaagtatcgttcttaaaccacaaaacatcaagtaattccaagttttcctttgctgtttataaactttactcatgtatttgtagtagctgcatttgtcattaataagagagacataatcctcctgttatactcagtatcattatatgctagtcaacctgattcactaacacacagatgaacaaccaaaatatacctaaaaggtatagtctctaggagttttattaatagtaaaggtaaaatctctcagtttcctacctctagaaagaggccatctcactagaataggatattatgcatactgagctagaccagaagagtctggaacaaaataaacacagcctttataatcaacttgaatactggtgttagctgagaactctgtaagtccctttaaaaattatgtatcttttggttcaagattaagaagcataatgacaacaaaaaaagcaggcagaatttatgaataagtgttgtttattattaaaacaataatttgttaatttcttataaggtcctgtgctataattactggtataaatataactgaatattggggtagctttcatttcttccattaattacatgtgtaaaattaaaacactactgtaatgttaatttcctggttttgaaaatcatattatggttatgtacattgttaacattaaggaaagctggcagaagggtgtgcataaattctatactctttttgaaacttttctataattctaaaattattttttaaagttaaacagtatattaagattaccttcactattcctcactcaagattaagacattttttgaaaagcagtagagtttgcttaaaatacaaattaattattcttgactataaccttgtaaaggtaaatctaatgtataaatttttgaaaaattttgcaccactggtcatagcatctatctcctttgccttaatttactgaaatacatcattttattcggttcaattgaaataaagctatgtctttactatgtattggccctaccaaaatcatatattaaaattttctaacat

SEQ ID NO: 5855 - DNA, 600 bp, Homo sapiens
gtcgtgggccatgagctgactcatgcttttgatgatcaaggacgggagtatgacaaggacgggaacctccggccatggtggaagaactcatccgtggaggccttcaagcgtcagaccgagtgcatggtagagcagtacagcaactacagcgtgaacggggagccggtgaacgggcggcacaccctgggggagaacatcgccgacaacgggggtctcaaggcggcctatcgggcttaccagaactgggtgaagaagaacggggctgagcactcgctccccaccctgggcctcaccaataaccagctcttcttcctgggctttgcacaggtctggtgctccgtccgcacacctgagagctcccacgaaggcctcatcaccgatccccacagcccctctcgcttccgggtcatcggctccctctccaattccaaggagttctcagaacacttccgctgcccacctggctcacccatgaacccgcctcacaagtgcgaagtctggtaaggacgaagcggagagagccaagacggaggaggggaaggggctgaggacgagacccccatccagcctccagggcattgctcagcccgcttggccacc

SEQ ID NO: 5856 - DNA, 1196 bp, Homo sapiens; identical to SEQ ID NO: 621

SEQ ID NO: 5857 - DNA, 600 bp, Homo sapiens
gtatttgtttaggtcatgaagcaaacaatgctctaatcacaatattaactgtttaattaaaatgttgtaacaagtataaaacagggaatgtaagtttattaccaaagtgatatgtattccaaaaaagtcatagaagatgaagcactataatattgttcccatatatttaaaatacccaagtacattctaattaccagtatatcagaggaaaattttcgtagtctttgtaaaataatatactcatcatagaaaacttgaaaaatgcagaaatgtataaaaaagcaaaaatgattactgataatatcacaacccagaagtaaccacctttaaaaagcaacccccatgtatgcctatatgtgtattgtatactttttttacataattggagtcatactgtaaacagttttataagtagatctttttcattgcaaaattgccacattttcttatggcattaaaaattttacaaaaacataattttaatggctatattatattccatttaatggatgcaactcagtttatttaaccattcccatgttgttaactatttaggttgtttctaattttcattattataaagttgcagaaatttggtgt

SEQ ID NO: 5858 - DNA, 600 bp, Homo sapiens
attcttgaagtctggtgatgctgccattgttgatatggttcctggcaagcccatgtgtgttgagagcttctcagactatccacctttgggtcgctttgctgttcgtgatatgagacagacagttgcggtgggtgtcatcaaagcagtggacaagaaggctgctggagctggcaaggtcaccaagtctgcccagaaagctcagaaggctaaatgaatattatccctaatacctgccaccccactcttaatcagtggtggaagaacggtctcagaactgtttgtttcaattggccatttaagtttagtagtaaaagactggttaatgataacaatgcatcgtaaaaccttcagaaggaaaggagaatgttttgtggaccactttggttttcttttttgcgtgtggcagttttaagttattagtttttaaaatcagtactttttaatggaaacaacttgaccaaaaatttgtcacagaattttgagacccattaaaaaagttaaatgagaaaaaaaaaaaaaaaaaaaaaaaaaaaaaaaaaaaaaaaaaaaaaaaaaaaaaaaaaaaaaaaaaaaaaaaaaaaaaaaaaaaaaaaaaaaaaa

SEQ ID NO: 5859 - DNA, 600 bp, Homo sapiens
tattggattgccacacggctcacattgcatgcaagtttgctgagctgaaggaaaagattgatcgccgttctggtaaaaagctggaagatggccctaaattcttgaagtctggtgatgctgccattgttgatatggttcctggcaagcccatgtgtgttgagagcttctcagactatccacctttgggctgctttgctgttcgtgatatgagacagacagttgcggtgggtgtcatcaaagcagtggacaagaaggctgctggagctggcaaggtcaccaagtctgcccagaaagctcagaaggctaaatgaatattatccctaatcctcccaccccactcttaatcagtggtggaagaccggtctcagaactgtttgtttcaattgccatttaagtttagtagtaaaagactggttaatgataacaatgcatcgtaaaacctttcagaaggaaaggagaatgttttgtggacacgttggttttcttttttgcgtgtggcagttttagttattagtttttaaaatcagtactttttaatggaaacaacttgacccccaaatttgtcacagaattttgggacccattaaaaggttaactggg

SEQ ID NO: 5860 - DNA, 600 bp, Homo sapiens
ccttcgctcacctgcccaagagtacctttgtgttggatgaatttaagcgcaagtactccaatgaggacacactctctgtggcactgccatatttctgggagcactttgataaggacggctggtccctgtggtactcagagtatcgcttccctgaagaactcactcagaccttcatgagctgcaatctcatcactggaatgttccagcgactggacaagctgaggaagaatgccttcgccagtgtcatcctttttggaaccaacaatagcagctccatttctggagtctgggtcttccgaggccaggagcttgcctttccgctgagtccagattggcaggtggactacgagtcatacacatggcggaaactggatcctggcagcgaggagacccagacgctggttcgagagtacttttcctgggagggggccttccagcatgtgggcaaagccttcaatcagggcaagatcttcaagtgaacatctcttgccatcacctagctgcctgcacctgcccttcagggagatgggggtcattaaaggaaactgaacattgaaaaaaaaaaaaaaaaaaaaaaaaaaaaaaaaaaaaaaaaaaaaa

SEQ ID NO: 5861 - DNA, 600 bp, Homo sapiens
tgacattggagatgatgatgaagatattgatgacatctaaattgaactcaacattttacattccatcttttctgaagattgtcctacaatttggattttgatcatgacaaagaagattaaaatttcattagcatgaatgcaatttgttaaagcagactgatttgtttctaagatatttttggtttttttaaaactgataataatgctgaattatcttaagtgagatgttaagcccactttgttcttttaatgtaatggagcttatgggtagaagaccatgtctactaattacaaaaaaaaaaaaaaaccatgattgctgcttttcctaccacttccagtaagaaaatgggtgttttgaagaaatcatttgccttgtctcacggaatctgattaagccctggcctcttgatgtatagagtcatggatattccagttacctagatattcccttgagattttgatacaatttgagggaggcagaagtctgcagttgaagaaaaaaaataagtctgtttgtcatatttaagtagcctgtgcgtatttttatactgattttgatatcatgttcttttcatagtcgtattttgccaccgtaaacat

SEQ ID NO: 5862 - DNA, 1383 bp, Homo sapiens; identical to SEQ ID NO: 627

SEQ ID NO: 5863 - DNA, 600 bp, Homo sapiens
caggaacgggaacggtcgaggacaggaagtgagtcatcacaaactgggacctccaccacatctagcagaaatgcacgaaggagagagagtgagaagtctctagaaaatgaaacactcaataaggaggaagattgccactctccaacttctaaacctcccaaacctgatcagcccctaaaggtaatgccagcccctccaccaaaggagaatgcttgggtgaagcgaagttctaaccctcctgctcgatctcagagctcagacacagagcagcagtcccctacaagtggtgggggaaaagtagctccagctcaaccatctgaggaaggaccaggaaggaaagatgaaaataaagtagatgggatgaatgccccaaaaggccaaactgggaactctagccgtggtccaggagacggagggaacagagaccactggaaggagtcagataggaaagatggcaaaaaggatcaagactccagatctgcacctgagccaaagaaacctgaggaaaatccagcttctaagttcagttctgcaagcaagtatgctgctctctctgttgatggtgaagatgaaaatgagggagaagattatgccgaatag

SEQ ID NO: 5864 - DNA, 1400 bp, Homo sapiens
cccagaaattgatcagaataaggaccgcatgttggagattttggaaggaaagggactgagtttcttattcccactcctcaaattggagaaggaactgttgaagcaaataaagttggatccatcccctcaaaccatatataaatggattaaagataacatctctcccaaacttcatgtagataaaggatttgtgaacatcttaatgactagcttcttacagtacatttctagtgaagtaaacccccccagcgatgaaacagattcatcctctgctccttccaaagaacagttagagcaggaaaaacaactactactatctttcaagccagtaatgcagaaatttcttcatgatcacgttgatctacaagtcagtgccctgtatgctctccaggtgcactgctataacagcaacttcccaaaaggcatgttacttcgcttttttgtgcacttctatgacatggaaattattgaagaagaagctttcttggcttggaaagaagatataacccaagagtttccgggaaaaggcaaggctttgttccaggtgaatcagtggctaacctggttagaaactgctgaagaagaagaatcagaggaagaagctgactaaagaaccagccaaagccttaaattgtgcaaaacatactgttgctatgatgtaactgcatttgacctaaccactgcgaaaattcattccgctgtaatgttttcacaatatttaaagcagaagcacgtcagttaggatttccttctgcataaggtttttttgtagtgtaatgtcttaatcatagtctaccatcaaatattttaggagtatctttaatgtttagatagtatattagcagcatgcaataattacatcataagttctcaagcagaggcagtctattgcaaggaccttctttgctgccagttatcataggctgttttaagttagaaaactgaatagcaacactgaatactgtagaaatgcactttgctcagtaatacttgagttgttgcaatatttgattatccatttggttgttacagaaaaattcttaactgtaattgatggttgttgccgtaatagtatattgcctgtatttctacctctagtaatgggctttatgtgctagattttaatatccttgagcctgggcaagtgcacaagtctttttaaaagaaacatggtttacttgcacaaaactgatcagttttgagagatcgttaatgcccttgaagtggtttttgtgggtgtgaaacaaatggtgagaatttgaattggtccctcctattatagtattgaaattaagtctacttaatttatcaagtcatgttcatgccctgattttatatacttgtatctatcaataaacattgtgatacttgaaaaaaaaaaaaaaaaaaaaaaaaaaaaa

SEQ ID NO: 5865 - DNA, 600 bp, Homo sapiens
tatcgccctgagaagatctaccccagggagaatctgagacatcttgcctacttttctttattagctttctcctcatccatttcttttatacctttcctttttggggagttgttatgccatgatttttggtatttatgtaaaaggattattactaattctatttctctatgtttattctagttaaggaaatgttgagggcaagccaccaaattacctaggctgaggttagagagattggccagcaaaaactgtgggaagatgaactttgtcattatgatttcattatcacatgattatagaaggctgtcttagtgcaaaaaacatacttacatttcagacatatccaaagggaatactcacattttgttaagaagttgaactatgactggagtaaaccatgtattcccttatcttttactttttttctgtgacatttatgtctcatgtaatttgcattactctggtggattgttctagtactgtattgggcttcttcgttaatagattatttcatatactataattgtaaatattttgatacaaatgtttataactctagggatataaaaacagattctgattcccttcaaaaaaaaaaaa

SEQ ID NO: 5866 - DNA, 600 bp, Homo sapiens
ctggtgggtaggagatgagttttttgcagatgtctggagaatatgtaccaacaacacgaattgcacagtcatcaatgacagctttcaagagtactccacgctgcaggcggtccaggccaccatgatcctctccaccattctctgctgcatcgccttcttcatcttcgtgctccagctcttccgcctgaagcagggagagaggtttgtcctaacctccatcatccagctaatgtcatgtctgtgtgtcatgattgcggcctccatttatacagacaggcgtgaagacattcacgacaaaaacgcgaaattctatcccgtgaccagagaaggcagctacggctactcctacatcctggcgtgggtggccttcgcctgcaccttcatcagcggcatgatgtacctgatactgaggaagcgcaaatagagttccggagctgggttgcttctgctgcagtacagaatccacattcagataaccattttgtatataatcattattttttgaggtttttctagcaaacgtattgtttcctttaaaagccaaaaaaaaaaaaaaaaaaaaaaaaaaaaaaaaaaaagaaaaaaaaaaaaaaaaaaaaa

SEQ ID NO: 5867 - DNA, 1400 bp, Homo sapiens
gagaagattgacaaactgatgatcgagatggatggaacagaaaataaatctaagtttggtgcgaacgccattctgggggtgtcccttgccgtctgcaaagctggtgccgttgagaagggggtccccctgtaccgccacatcgctgacttggctggcaactctgaagtcatcctgccagtcccggcgttcaatgtcatcaatggcggttctcatgctggcaacaagctggccatgcaggagttcatgatcctcccagtcggtgcagcaaacttcagggaagccatgcgcattggagcagaggtttaccacaacctgaagaatgtcatcaaggagaaatatgggaaagatgccaccaatgtgggggatgaaggcgggtttgctcccaacatcctggagaataaagaaggcctggagctgctgaagactgctattgggaaagctggctacactgataaggtggtcatcggcatggacgtagcggcctccgagttcttcaggtctgggaagtatgacctggacttcaagtctcccgatgaccccagcaggtacatctcgcctgaccagctggctgacctgtacaagtccttcatcaaggactacccagtggtgtctatcgaagatccctttgaccaggatgactggggagcttggcagaagttcacagccagtgcaggaatccaggtagtgggggatgatctcacagtgaccaacccaaagaggatcgccaaggccgtgaacgagaagtcctgcaactgcctcctgctcaaagtcaaccagattggctccgtgaccgagtctcttcaggcgtgcaagctggcccaggccaatggttggggcgtcatggtgtctcatcgttcgggggagactgaagataccttcatcgctgacctggttgtggggctgtgcactgggcagatcaagactggtgccccttgccgatctgagcgcttggccaagtacaaccagctcctcagaattgaagaggagctgggcagcaaggctaagtttgccggcaggaacttcagaaaccccttggccaagtaagctgtgggcaggcaagcccttcggtcacctgttggctacacagacccctcccctcgtgtcagctcaggcagctcgaggcccccgaccaacacttgcaggggtccctgctagttagcgccccaccgccgtggagttcgtaccgcttccttagaacttctacagaagccaagctccctggagccctgttggcagctctagctttgcagtcgtgtaattggcccaagtcattgtttttctcgcctcactttccaccaagtgtctagagtcatgtgagcctcgtgtcatctccggggtggccacaggctagatccccggtggttttgtgctcaaaataaaaagcctcagtgacccatgag

SEQ ID NO: 5868 - DNA, 1400 bp, Homo sapiens
aatctggccaacaagcgctttgttttccaccaggagcaagtgtattgtcccgactgtgccaaaaagctgtaaactgacaggggctcctgtcctgtaaaagggcatttgaatctcgttctttgtgtccttactttctgccctataccatcaataggggaagagtggtccttcccttctttaaagttcctcccttccgtcttttctcccattttacagtattactcaaataagggcacacagtgatcatattagcatttagcaaaaagcaaccctgcagcaaagtgaatttctgtccggctgcaatttaaaaatgaaaacttaggtagattgactcttctgcatgtttctcatagagcagaaaagtgctaatcatttagccacttagtgatgtaagcaagaagcataggagataaaacccccactgagatgcctctcatgcctcagctgggacccaccgtgtagacacacgacatgcaagagttgcagcggctgctccaactcactgctcaccctcttctgtgagcaggaaagaaccctactgacatgcatggtttaacttcctcatcagaactctgcccttccttctgttcttttgtgctttcaaataactaacacgaacttccagaaaattaacatttgaacttagctgtaattctaaactgacctttccccgtactaacgtttggtttccccgtgtggcatgttttctgagcgttcctactttaaagcatggaacatgcaggtgatttgggaagtgtagaaagacctgagaaaacgagcctgtttcagaggaacatcgtcacaacgaatacttctggaagcttaacaaaactaaccctgctgtcctttttattgtttttaattaatatttttgttttaattgatagcaaaatagtttatgggtttggaaacttgcatgaaaatattttagccccctcagatgttcctgcagtgctgaaattcatcctacggaagtaaccgcaaaactctagagggggagttgagcaggcgccagggctgtcatcaacatggatatgacatttcacaacagtgactagttgaatcccttgtaacgtagtagttgtctgctctttgtccatgtgttaatgaggactgcaaagtcccttctgttgtgattcccaggacttttcctcaagaggaaatctggatttccacctaccgcttacctgaaatgcaggatcacctacttactgtattctacattattatatgacatagtataatgagacaatatcaaaagtaaacatgtaatgacaatacatactaacattcttgtaggagtggttagagaagctgatgcctcatttctacattctgtcattagctattatcatctaacgtttcagtgtatccttacagaaataaagcagcatatgaat

SEQ ID NO: 5869 - DNA, 1400 bp, Homo sapiens
ggggctgaaaccccatccctaaaatattgctgttgtaaaatgccttcagaaataagtcctagactggactcttgagggacatattggagaatcttaagaaatgcaagcttgttcagggggctgagaagatcctgagtacactaggtgcaaaccagaactcttggtggaacagaccagccactgcagcagacagaccaggaacacaatgagactgacatttcaaaaaaacaaaactggctagcctgagctgctggttcactcttcagcatttatgaaacaaggctaggggaagatgggcagagaaaaaggggacacctagtttggttgtcatttggcaaaggagatgacttaaaatccgcttaatctcttccagtgtccgtgttaatgtatttggctattagatcactagcactgctttaccgctcctcatcgccaacacccccatgctctgtggccttcttacacttctcagagggcagagtggcagccgggcaccctacagaaactcagagggcagagtggcagccaggcccacatgtctctcaagtacctgtcccctcgctctggtgattatttcttgcagaatcaccacacgagaccatcccggcagtcatggttttgctttagttttccaagtccgtttcagtcccttccttggtctgaagaaattctgcagtggcgagcagtttcccacttgccaaagatcccttttaaccaacactagcccttgtttttaacacacgctccagcccttcatcagcctgggcagtcttaccaaaatgtttaaagtgatctcagaggggcccatggattaacgccctcatcccaaggtccgtcccatgacataacactccacacccgccccagccaacttcatgggtcactttttctggaaaataatgatctgtacagacaggacagaatgaaactcctgcggctctttggcctgaaagttgggaatggttgggggagagaagggcagcagcttattggtggtcttttcaccattggcagaaacagtgagagctgtgtggtgcagaaatccagaaatgaggtgtagggaattttgcctgccttcctgcagacctgagctggctttggaatgaggttaaagtgtcagggacgttgcctgagcccaaatgtgtagtgtggtctgggcaggcagacctttaggttttgctgcttagtcctgaggaagtggccactcttgtggcaggtgtagtatctggggcgagtgttgggggtaaaagcccaccctacagaaagtggaacagcccggacctgatgtgaaaggaccacgggtgttgtaagctgggaccggaaccaaactggaatcaaacgcgactgtaaattgtatcttataacttattaaataaaacattgctccgtaaaaaaaaaaa

SEQ ID NO: 5870 - DNA, 1400 bp, Homo sapiens
ggaagcggtgattgccgggggaggagaagctcccagatccttgtgtccacttgcagcgggggaggcggagacgcggagcgggccttttggcgtccactgcgcggctgcaccctgccccatcctgccgggatcatggtctgcggcagcccgggagggatgctgctgctgcgggccgggctgcttgccctggctgctctctgcctgctccgggtgcccggggctcgggctgcagcctgtgagcccgtccgcatccccctgtgcaagtccctgccctggaacatgactaagatgcccaaccacctgcaccacagcactcaggccaacgccatcctggccatcgagcagttcgaaggtctgctgggcacccactgcagccccgatctgctcttcttcctctgtgccatgtacgcgcccatctgcaccattgacttccagcacgagcccatcaacccctgtaagtctgtgtgcgagcgggcccggcagggctgtgagcccatactcatcaagtaccgccactcgtggccggagaacctggcctgcgaggagctgccagtgtacgacaggggcgtgtgcatctctcccgaggccatcgttactgcggacggagctgattttcctatggattctagtaacggaaactgtagaggggcaagcagtgaacgctgtaaatgtaagcctattagagctacacagaagacctatttccggaacaattacaactatgtcattcgggctaaagttaaagagataaagactaagtgccatgatgtgactgcagtagtggaggtgaaggagattctaaagtcctctctggtaaacattccacgggacactgtcaacctctataccagctctggctgcctctgccctccacttaatgttaatgaggaatatatcatcatgggctatgaagatgaggaacgttccagattactcttggtggaaggctctatagctgagaagtggaaggatcgactcggtaaaaaagttaagcgctgggatatgaagcttcgtcatcttggactcagtaaaagtgattctagcaatagtgattccactcagagtcagaagtctggcaggaactcgaacccccggcaagcacgcaactaaatcccgaaatacaaaaagtaacacagtggacttcctattaagacttacttgcattgctggactagcaaaggaaaattgcactattgcacatcatattctattgtttactataaaaatcatgtgataactgattattacttctgtttctcttttggtttctgcttctctcttctctcaacccctttgtaatggtttgggggcagactcttaagtatattgtgagttttctatttcactaatcatgagaaaaactgttcttttgcaataataataaattaaacatgctgtta

SEQ ID NO: 5871 - DNA, 600 bp, Homo sapiens
tccacctgtagctataccagccagactccctgaaaggcgctacattgagaacatttaccattccaaaccaatgagatggccatttttcttattcattcctttctttattattttctgtgtactgattgctataatggtgaaagttaatttccaaaggaaaaaatggagaactgaggactattcaagcgatgagcaacctgaaagtgagagtgaacctaaagggtagtctggacaacagagatgccatgatatcacttcttctagagtaattatctgtgatggatggacacaaaaaaatggaaagaaaagaatgtacattacctggtttcctgggattcaaacctgcatattgtgattttaatttgaccagaaaatatgatatatatgtataatttcacagataatttacttatttaaaaatgcatgataatgagttttacattacaaatttctgtttttttaaagttatcttacgctatttctgttggttagtagacactaattctgtcagtaggggcatggtataaggaaatatcataatgtaatgaggtggtactatgattaaaagccactgttacatttcaaaaaaaaaaaaaaaaa

SEQ ID NO: 5872 - DNA, 1400 bp, Homo sapiens
gggttcactttgaggaatccagcaagctagaagacctgttgcggaaggttcgcgccaaggagaccaggaagcgagcactcagcaggttaaagctgaagctcaacaaagatatagtgatctctgtgggcatttataatctggtccagaaggctctcaagcctcctccaataaagctctatcgggaaacaaatgaaccagtgaaaaccaagacccggacctttaatacaagtacaggcggtttgcttctgcctagcgataccaagaggtctcagatctatgggagtcgtcagattatactggagaaagaggaaacagaagagctaaaacggtttgatgatccaggtttgatgctcatgggtttcaagccgttggtactgctgaagaaacaccattacctgaggccctccctgttcgtgtacccagaggagtcgctggtgattgggagctcaaccctgttcagtgctctgctcatcaagtgtctggagaaggaggttgcagcattgtgcagatacacaccccgcaggaacatccctccttattttgtggctttggtgccacaggaagaagagttggatgaccagaaaattcaggtgactcctccaggcttccagctggtctttttaccctttgctgatgataaaaggaagatgccctttactgaaaaaatcatggcaactccagagcaggtgggcaagatgaaggctatcgttgagaagcttcgcttcacatacagaagtgacagctttgagaaccccgtgctgcagcagcacttcaggaacctggaggccttggccttggatttgatggagccggaacaagcagtggacctgacattgcccaaggttgaagcaatgaataaaagactgggctccttggtggatgagtttaaggagcttgtttacccaccagattacaatcctgaagggaaagttaccaagagaaaacacgataatgaaggttctggaagcaaaaggcccaaggtggagtattcagaagaggagctgaagacccacatcagcaagggtacgctgggcaagttcactgtgcccatgctgaaagaggcctgccgggcttacgggctgaagagtggtctgaagaagcaggagctgctggaagccctcaccaagcacttccaggactgaccagaggccgcgcgtccagctgcccttccgcagtgtggccaggctgcctggccttgtcctcagccagttaaaatgtgtttctcctgagctaggaagagtctacccgacataagtcgagggactttatgtttttgaggctttctgttgccatggtgatggtgtagccctcccactttgctgttctttactttactgcctgaataaagagccctaagtttgtactaaaaaaaaaaaaaaaaaaaaaaaaaaaaaaaaaaa

SEQ ID NO: 5873 - DNA, 1400 bp, Homo sapiens
aggtcttaccaactccgaccaggaaccatgattgaatggggcaattactgggctcgtgcaatccgcttcagacaggatggtaacgaagccgtcggaggattcttctctcagattgggcagctgtacatggtgcaccatctttgggcttacagggatcttcagaccagggaagacatacggaatgcagcatggcacaaacatggctgggaggaattggtatattacacagttccacttattcaggaaatggaatccagaatcatgatcccactgaagacctcgcccctccagtaaagctgtagagtttctatgtgcctacatacatttctgtgacaagtatttgtcgtaaattaattttaattgtgtatcaagtgaaaaagaaacactgaggttttaagctgctgtatatagcttgtgagaaacctcttttctttaaaatttacataatcacaagaaaggaaagaattacagttggactgattgtgacagtgccttgtcgtcctctttgaaacaccccgtgttgtccagtataccttataacacttagccacttctccccaccctccagaaggggtccacgttgaattctgaatcatcttgaaaataagattccaaccacaaaaaaaatttagccatttctttactaaaaaaaaccaaaaaacaaatctgttttataatcacagatttttagacaaatttcttgtatcaggaagaaatacaaattttgtcatgtttctcaagcagtttttctgagtagtttctgaggaggaacaaattacaagtgtacccaataactgaaaatgttttaactcactctcatttgtaagcagtccacatagtagacaatgggttttccaagctgggcaaggtacatttaatcagtaaatcagtttcacatcatgtattgtgatgtttcaatgtgagacacaaaaacaatggcttgaaacttgtgtatcatatgtgattttgaaatgaacaccttgaatagcactaatttttatttgtggtatttttctataacaaaacaagtagctctaggaaaagaggttttattttgtaaacgatcatttgtgacctcagacactctctggctaatattttaataagctcacagcagataattctgagatcatgggtgaggggtggtgcatgttgagatttaaattggcataaagctgcatactttttgtctagctgtttgatttcattttttaatatagtatgccaattttgtgactgttaccatgtgaaagtcctgttgaaatgaacaattgtctgccccacaatcaagaatgtatgtgtaaagtgtgaataaatctcatatcaaatgtcaaacttttacatgtgaatgattttctcaaagaacatagaaaaggcaataaaatcctcttaatttccac

SEQ ID NO: 5874 - DNA, 1400 bp, Homo sapiens
atatgctgaacaaacctgtggatgacatcatcatggagaacggcaaggtggtgggcgtgaagtctgagggagaggtggcccgctgcaagcagctgatctgtgaccccagctacatcccggaccgtgtgcggaaggctggccaggttatccgcatcatctgtatccttagccaccccatcaagaacaccaacgacgccaactcctgccaaataatcatcccccagaaccaggtcaacaggaagtcagacatctacgtgtgcatgatctcctatgcacacaacgtggcggcccagggcaagtacatagctattgccagcactactgtggagaccacggaccctgaaaaggaggtggagccggctctggagctgttggagcccattgaccagaagtttgtggctatcagtgacttgtatgagcccattgatgatggttgtgagagccaggtgttctgttcctgctcctacgatgccaccacacactttgagacaacctgcaacgacatcaaagacatctacaaacgcatggctggcacggcctttgactttgagaacatgaagcgcaaacagaacgacgtctttggagaagctgagcagtgattgtggccgcccccagcccctgctgccccagcctgtgtctgttctcctcgagggctccagcatcctctgcttcccccaccacgttcccatcacccacctcattgatccactgaccaaatccttaaccctagcgatggcttgggagatggggggttggatagcatcctctttcttggcccttccttatcctaggaaaagagggttcctctccttgtgtgtgtctcttccccccacccctaattcttctgctctgtttgggaagacgtggaggaaaaggtgacttctgcccccaccgctcttacccccactgtagtggcctttggagatgcccccacctcccccccaccaactctcgcgtgttggagagaaggggccctcccagcacaaagttgcattcctccccccctaatttattctaatttattaactttgacccaccctttctgagcctgcagccttcccgtgtggcctgagggctgtcgagtgagctgccccagccccctcccagcccttgcccagcctgggggagtggggaaggcttgggcatggccccgttggaggttgatttgctgttttgtttcttgtctttgtgttctgtggtacttgctgagagaaaagaaaagtgagccaagcagaaggaggtggaaaacggacccaaaccccagtgtgccctgccccatgcctttcctttagtggtgggaaacccttatcttgcaaagtgaatgtgtccccttccccaccctctagtgtatttcacagaaaacaaaacctcccaataaaacggttgaaacctgaaaaaaa

SEQ ID NO: 5875 - DNA, 1400 bp, Homo sapiens
atgagaaggatcttagactctgccgagtttatcaaattcacggtcattagaccatttccaggacttgtgattaataaccagctggttgatcagagtgagtcagaaggccccgtgatacaagaatcagctgaaccaagccagttggaagttccagccacagaagaaataaaagagactgatggaagctctcagatcaagcaagaaccagaccccacgtggtagacctcttccctcctaggcttaaagtatcagtggttgagaagagcttttcggacctgttactaccccaagctgtgtaatataccttggtataacagaaataccttctatacaaacctttttttctacttttagatagaaatgtctactttttcagcagttctgtgaattaaagagcagagtgactgtgggtctggaatggctggtgtacttgggaatgtactatcaggattttacagcaatgctgggaaatgacagggaaaatgacaggaatgaatctcaccagattttttatgtactcagcagagccttgagttacggtgtttattttccaatcaagtgaagatatctcctacttctcctactggaacatctcagcttctgcagtgaagaaaaattcctgtgatagttcagttctttagtttttctatttgaaaaaaaaaaaatcatttaaatgatcctttgttcacggctctccttaatgactgagtgaacagttcctatctgtatatttgactaaaccttttcctaagctatctctcatggttcctatgtttttttatcataattaaaagcaaaaccatctggatcacctaacagtcagaggtcagtatctcagcgtgtgaattatagaggaatacagagagaacctctcccactttttacttttcgtccaaataaaatgcatggtgtaccagaagttgaagatcgggttgaggattggggctagctcgatgacactaaggccccaacatcgcgggacctgctgtggcgcggattcttaggaacgctgttctagccggccccctctccaggggtcgccgtggccggcattatttcctagttcttcttgtaaccctgaggtgccagcgcggggagtgaggaggggtcagggggctaaggatgcaacctctgacgttctgcgccttcctaggagagtcttacatgtgttgagatttcacaagcaatgcgagttgtaaaataccagctctacaagaaactaggctctgtgacggcatagttttcagtagctttatcacaatattcacaatggagaattatatgacatggtagcagaaataggcccttttatgtgttgcttctattttacctcaaattgtagatatagggtaatcaataaaatccatccatgcctttcacacactaaaaaaaaaaaaaaa

SEQ ID NO: 5876 - DNA, 600 bp, Homo sapiens
ggctcctcagcctaagactatggctcatgagaaacactcaggcctgacctaggcttgggagtcaaactgctcatattgagcatattgttaagtgggtaaagccaagtaaaggtactgggtgtttttgtgaccacttgtgaatgggtgtatggagaactgaaaagggtatctgcatgaaggctcctgtctgactattccaggatccaatattactgccttctgaaacttcctctttagggtaaccatcatgtatgcccacgagggtgatagtaattcgtgagactgaagttgcttagagtacttctttgaccaaggaataccacagacaccctaccgatagaacagtggctcagatcttacttgctcctgcttacgaagtattcccaatcactggtcatctgaccctacttgaacactcctgaacagtcatgttttttaaaatcttcctttatatcaagtcagagagtatacttctataaatttcactcatggatgttaggaaatctagtcatcttccctgtgattgccctgttaagtatttaaccatagctatcatgtgtttcccaaatcttctctagattaaatatcttcagttacttc

SEQ ID NO: 5877 - DNA, 1400 bp, Homo sapiens
gaggggggcgaccgctgggcccgcgtgcgccagggccacgtggaacagtgcgagtgcttcgggggccggacctggtgcgaaggcacccgacatacagcttgtctgagcagcccttgcctgaacgggggcacctgccacctgatcgtggccaccgggaccaccgtgtgtgcctgcccaccaggcttcgctggacggctctgcaacatcgagcctgatgagcgctgcttcttggggaacggcactgggtaccgtggcgtggccagcacctcagcctcgggcctcagctgcctggcctggaactccgatctgctctaccaggagctgcacgtggactccgtgggcgccgcggccctgctgggcctgggcccccatgcctactgccggaatccggacaatgacgagaggccctggtgctacgtggtgaaggacagcgcgctctcctgggagtactgccgcctggaggcctgcgaatccctcaccagagtccaactgtcaccggatctcctggcgaccctgcctgagccagcctccccggggcgccaggcctgcggcaggaggcacaagaagaggacgttcctgcggccacgtatcatcggcggctcctcctcgctgcccggctcgcacccctggctggccgccatctacatcggggacagcttctgcgccgggagcctggtccacacctgctgggtggtgtcggccgcccactgcttctcccacagcccccccagggacagcgtctccgtggtgctgggccagcacttcttcaaccgcacgacggacgtgacgcagaccttcggcatcgagaagtacatcccgtacaccctgtactcggtgttcaaccccagcgaccacgacctcgtcctgatccggctgaagaagaaaggggaccgctgtgccacacgctcgcagttcgtgcagcccatctgcctgcccgagcccggcagcaccttccccgcaggacacaagtgccagattgcgggctggggccacttggatgagaacgtgagcggctactccagctccctgcgggaggccctggtccccctggtcgccgaccacaagtgcagcagccctgaggtctacggcgccgacatcagccccaacatgctctgtgccggctacttcgactgcaagtccgacgcctgccagggggactcaggggggcccctggcctgcgagaagaacggcgtggcttacctctacggcatcatcagctggggtgacggctgcgggcggctccacaagccgggggtctacacccgcgtggccaactatgtggactggatcaacgaccggatacggcctcccaggcggcttgtggctccctcctgaccctccagcgggacaccctggttcccaccattccctgccttgctgacaataaagatatttccaag

SEQ ID NO: 5878 - DNA, 1400 bp, Homo sapiens
gatgcaaatctagtgaacagaatggaatggagcaaaagacaattattttaataccctctgatttagcatgtagactgctggggcaatcaatggatgaaagtggattaccacagctgaccagttatgattgtgaagttaatgctcctatacaaggcagcagaaacctactgcagggtgaagaattactcagagctttggatcaagttaactgagctttttcttaatttcattcctttttttggacactggtggctcactacctaaagcagtctatttatattttctacatctaattttagaagcctggctacaatactgcacaaacttggttagttcaatttttgatcccctttctacttaatttacattaatgctcttttttagtatgttctttaatgctggatcacagacagctcattttctcagttttttggtatttaaaccattgcattgcagtagcatcattttaaaaaatgcacctttttatttatttatttttggctagggagtttatccctttttcgaattatttttaagaagatgccaatataatttttgtaagaaggcagtaacctttcatcatgatcataggcagttgaaaaatttttacaccttttttttcacattttacataaataataatgctttgccagcagtacgtggtagccacaattgcacaatatattttcttaaaaaataccagcagttactcatggaatatattctgcgtttataaaactagtttttaagaagaaattttttttggcctatgaaattgttaaacctggaacatgacattgttaatcatataataatgattcttaaatgctgtatggtttattatttaaatgggtaaagccatttacataatatagaaagatatgcatatatctagaaggtatgtggcatttatttggataaaattctcaattcagagaaatcatctgatgtttctatagtcactttgccagctcaaaagaaaacaataccctatgtagttgtggaagtttatgctaatattgtgtaactgatattaaacctaaatgttctgcctaccctgttggtataaagatattttgagcagactgtaaacaagaaaaaaaaaatcatgcattcttagcaaaattgcctagtatgttaatttgctcaaaatacaatgtttgattttatgcactttgtcgctattaacatcctttttttcatgtagatttcaataattgagtaattttagaagcattattttaggaatatatagttgtcacagtaaatatcttgttttttctatgtacattgtacaaatttttcattccttttgctctttgtggttggatctaacactaactgtattgttttgttacatcaaataaacatcttctgtggaaaaaaaaaaaaaaaaaaaa

SEQ ID NO: 5879 - DNA, 600 bp, Homo sapiens
gagaagagacatgtaccttgaccatcgtccttcctctcaagctagcccagagggtgggagcctaaggaagcgtggggtagcagatggagtaatggtcacgaggtccagacccactcccaaagctcagacttgccaggctccctttctcttcttccccaggtccttcctttaggtctggttgttgcaccatctgcttggttggctggcagctgagagccctgctgtgggagagcgaagggggtcaaaggaagacttgaagcacagagggctagggaggtggggtacatttctctgagcagtcagggtgggaagaaagaatgcaagagtggactgaatgtgcctaatggagaagacccacgtgctaggggatgaggggcttcctgggtcctgttcccctaccccatttgtggtcacagccatgaagtcaccgggatgaacctatccttccagtggctcgctccctgtagctctgcctccctctccatatctccttcccctacacctccctccccacacctccctactcccctgggcatcttctggcttgactggatggaaggagacttaggaacctaccagttggccatgatgtcttttctt

SEQ ID NO: 5880 - DNA, 1124 bp, Homo sapiens; identical to SEQ ID NO: 645

SEQ ID NO: 5881 - DNA, 1400 bp, Homo sapiens
agaactatctctccccaacttgggctgtcccaaccctcggctggtcaaagttaccgggcagtgctgcgaggagtgggtctgtgacgaggatagtatcaaggaccccatggaggaccaggacggcctccttggtaaggagctgggattcgatgcctccgaggtggagttgacgagaaacaatgaattgattgcagttggaaaaggcagctcactgaagcggatccctgtttttggaatggagcctcgcatccgatacaaccctttacaaggccagaaatgtattgttcaaacaacttcatggtcccagtgctcaaagacctgtggaactggtatctccacacgagttaccaatgacaaccctgagtgccgccttgtgaaagaaacccggatttgtgaggtgcggccttgtggacagccagtgtacagcagcctgaaaaagggcaagaaatgcagcaagaccaagaaatcccccgaaccagtcaggtttacttacgctggatgtttgagtgtgaagaaataccggcccaagtactgcggttcctgcgtggacggccgatgctgcacgccccagctgaccaggactgtgaagatgcggttccgctgcgaagatggggagacattttccaagaacgtcatgatgatccagtcctgcaaatgcaactacaactgcccgcatgccaatgaagcagcgtttcccttctacaggctgttcaatgacattcacaaatttagggactaaatgctacctgggtttccagggcacacctagacaaacaagggagaagagtgtcagaatcagaatcatggagaaaatgggcgggggtggtgtgggtgatgggactcattgtagaaaggaagccttgctcattcttgaggagcattaaggtatttcgaaactgccaagggtgctggtgcggatggacactaatgcagccacgattggagaatactttgcttcatagtattggagcacatgttactgcttcattttggagcttgtggagttgatgactttctgttttctgtttgtaaattatttgctaagcatattttctctaggcttttttccttttggggttctacagtcgtaaaagagataataagattagttggacagtttaaagcttttattcgtcctttgacaaaagtaaatgggagggcattccatcccttcctgaagggggacactccatgagtgtctgtgagaggcagctatctgcactctaaactgcaaacagaaatcaggtgttttaagactgaatgttttatttatcaaaatgtagcttttggggagggaggggaaatgtaatactggaataatttgtaaatgattttaattttatattcagtgaaaagattttatttatggaattaaccatttaataaagaaatatttacct

SEQ ID NO: 5882 - DNA, 1102 bp, Homo sapiens; identical to SEQ ID NO: 647

SEQ ID NO: 5883 - DNA, 1400 bp, Homo sapiens
ggaggcacactgccccctccagactttccacctccaccactgccggactcagccatcttcctgccccccagcctggatcctttaccagggccagtggtccggggccgtggtggggctgaggcccgtggcccaccacctcccaaggcccatccaaggcctccactgcccccaggcccctcaccagccagcactttcctgggggaagtgggcagtggggatgaccggtcctgctcggtgctgcagatggccaagacgctgagcgaggtggactatgcccctgctgggcctgcacgctcagcgctcctcccaggccccctggagctgcagcccccccggggactgccctcggactatggccggcccctcagcttccctccaccccgcatccgggagagcatccaggaagacctggcagaggaggctccgtgcctgcagggcgggcgggccagcgggctgggcgaggcaggcatgagtgcctggctgcgggccatcggcttggagcgctatgaggagggcctggtgcataatggctgggacgacctggagtttctcagtgacatcaccgaggaggacttggaggaggctggggtgcaggacccggctcacaagcgcctccttctggacaccctgcagctcagcaagtgatagcggaggcaccacgaagctgtgaactcagagcccctccctgctaccaaggcccagctatggccccagggttgaaaagttatgagggtcagggcagtatctctctgcctatttattggggtgcctatttattggggatctgcattccccgctgcccaatcatttgcaatgccctaattagggcatcctgcccctcgccttttaggctcaggacggaaggtcagttgccatggttaccgaggaccctggttactctggtgctgtcctgttttactggaccccgcctcccagccccaggggtgcctgtgggggtccatttgggtacgtctgggcccccactttcaccagtttctgcggccttccaccgggcctgaaccacagcggaggagctccgctaagacctccccacccccgctgggggtgggggcgggtgtccgtccggaaatgaaggaatagcccgaggaccgggctggggtttatttaaactgttctgtgtgggtctggggagggagagcaccttaatattattggggttggttggggtggggcaggatctcagccataaagtgccagtttgcttagttctcactgtctcctggtctgtgctgccctgctctggggatgcacggcggcagggtgggggagggaggttcctcgcaggtctcagcccgggacagggtcttgcaagcagcctcctgggcagtcgtaagggttgcggcgtgatgtcttcaataaattaagttttatttggaaaa

SEQ ID NO: 5884 - DNA, 1400 bp, Homo sapiens
agatatataatgaaaaggaattattacaaggtaaattggaccttcttagtgataccaacatggtagactttgctatggatgtatacaaaaacctttattctgatgatattcctcatgctttgagagagaaaagaaccacagtggttgcacaactgaaacagcttcaggcagaaacagaaccaattgtgaagatgtttgaagatccagaaactacaaggcaaatgcagtcaaccagggatggtaggatgctctttgactacctggcggacaagcatggttttaggcaggaatatttagatacactctacagatatgcaaaattccagtacgaatgtgggaattactcaggagcagcagaatatctttatttttttagagtgctggttccagcaacagatagaaatgctttaagttcactctggggaaagctggcctctgaaatcttaatgcagaattgggatgcagccatggaagaccttacacggttaaaagagaccatagataataattctgtgagttctccacttcagtctcttcagcagagaacatggctcattcactggtctctgtttgttttcttcaatcaccccaaaggtcgcgataatattattgacctcttcctttatcagccacaatatcttaatgcaattcagacaatgtgtccacacattcttcgctatttgactacagcagtcataacaaacaaggatgttcgaaaacgtcggcaggttctaaaagatctagttaaagttattcaacaggagtcttacacatataaagacccaattacagaatttgttgaatgtttatatgttaactttgactttgatggggctcagaaaaagctgagggaatgtgaatcagtgcttgtgaatgacttcttcttggtggcttgtcttgaggatttcattgaaaatgcccgtctcttcatatttgagactttctgtcgcatccaccagtgtatcagcattaacatgttggcagataaattgaacatgactccagaagaagctgaaaggtggattgtaaatttgattagaaatgcaagactggatgccaagattgattctaaattaggtcatgtggttatgggtaacaatgcagtctcaccctatcagcaagtgattgaaaagaccaaaagcctttcctttagaagccagatgttggccatgaatattgagaagaaacttaatcagaatagcaggtcagaggctcctaactgggcaactcaagattctggcttctactgaagaaccataaagaaaagatgaaaaaaaaaactatcaaagaaagatgaaataataaaactattatataaagggtgacttacattttggaaacaacatattacgtataaattttgaagaattggaataaaattgattcattttaaaaaaaaa

SEQ ID NO: 5885 - DNA, 1400 bp, Homo sapiens
acttcgccctgcgctcagtgcttggggaagctgaccagaaaggctcattggttgctcctgaccgcctcagatttgactttactgccaagggagccatgtccacccaacagatcaagaaggctgaagagattgctaatgagatgattgaggcagccaaggccgtctatacccaggattgccccctggcagcagcgaaagccatccagggcctacgggctgtgtttgatgagacctatcctgaccctgtgcgagtcgtctccattggggtcccggtgtccgagttgctggatgacccctctgggcctgctggctccctgacttctgttgagttctgtgggggaacgcacctgcggaactcgagtcatgcaggagcttttgtgatcgtgacggaagaagccattgccaagggtatccggaggattgtggctgtcacaggtgccgaggcccagaaggccctcaggaaagcagagagcttgaagaaatgtctctctgtcatggaagccaaagtgaaggctcagactgctccaaacaaggatgtgcagagggagatcgctgaccttggagaggccctggccactgcagtcatcccccagtggcagaaggatgaattgcgggagactctcaaatccctaaagaaggtcatggatgacttggaccgagccagcaaagccgatgtccagaaacgagtgttagagaagacgaagcagttcatcgacagcaaccccaaccagcctcttgtcatcctggagatggagagcggcgcctcagccaaggccctgaatgaagccttgaagctcttcaagatgcactcccctcagacttctgccatgctcttcacggtggacaatgaggctggcaagatcacgtgcctgtgtcaagtcccccagaatgcagccaatcggggcttaaaagccagcgagtgggtgcagcaggtgtcaggcttgatggacggtaaaggtggtggcaaggatgtgtctgcacaggccacaggcaagaacgttggctgcctgcaggaggcgctgcagctggccacttccttcgcccagctgcgcctcggggatgtaaagaactgagtggggaaggaggaggctcccactggatccatccgtccagccaagagctcttcatctgctacaagaacatttgaatcttgggacctttaaagagcccctcctaacccagcagtaactggaacacacttgggagcagtcctatgtctcagtgccccttaaatttctgccctgagccctccacgtcagtgccatcggtctagaaccactaaccccgcattgctgttgatcgtcacgctcgcatctatagataacggctctccagacctgagctttccgcgtcagcaagtaggaatcgtttttgctgcagagaataaaaggaccacgtgc

SEQ ID NO: 5886 - DNA, 1400 bp, Homo sapiens
ctggcattgtcatggactctggagacggggtcacccacacggtgcccatctacgagggctacgccctcccccacgccatcctgcgtctggacctggctggccgggacctgaccgactacctcatgaagatcctcactgagcgaggctacagcttcaccaccacggccgagcgggaaatcgtgcgcgacatcaaggagaagctgtgctacgtcgccctggacttcgagcaggagatggccaccgccgcatcctcctcttctctggagaagagctacgagctgcccgatggccaggtcatcaccattggcaatgagcggttccggtgtccggaggcgctgttccagccttccttcctgggtatggaatcttgcggcatccacgagaccaccttcaactccatcatgaagtgtgacgtggacatccgcaaagacctgtacgccaacacggtgctgtcgggcggcaccaccatgtacccgggcattgccgacaggatgcagaaggagatcaccgccctggcgcccagcaccatgaagatcaagatcatcgcacccccagagcgcaagtactcggtgtggatcggtggctccatcctggcctcactgtccaccttccagcagatgtggattagcaagcaggagtacgacgagtcgggcccctccatcgtccaccgcaaatgcttctaaacggactcagcagatgcgtagcatttgctgcatgggttaattgagaatagaaatttgcccctggcaaatgcacacacctcatgctagcctcacgaaactggaataagccttcgaaaagaaattgtccttgaagcttgtatctgatatcagcactggattgtagaacttgttgctgattttgaccttgtattgaagttaactgttccccttggtatttgtttaataccctgtacatatctttgagttcaacctttagtacgtgtggcttggtcacttcgtggctaaggtaagaacgtgcttgtggaagacaagtctgtggcttggtgagtctgtgtggccagcagcctctgatctgtgcagggtattaacgtgtcagggctgagtgttctgggatttctctagaggctggcaagaaccagttgttttgtcttgcgggtctgtcagggttggaaagtccaagccgtaggacccagtttcctttcttagctgatgtctttggccagaacaccgtgggctgttacttgctttgagttggaagcggtttgcatttacgcctgtaaatgtattcattcttaatttatgtaaggttttttttgtacgcaattctcgattctttgaagagatgacaacaaattttggttttctactgttatgtgagaacattaggccccagcaacacgtcattgtgtaaggaaaaataaaagtgctgccgtaacc

SEQ ID NO: 5887 - DNA, 600 bp, Homo sapiens
cctcatggagaagaggaaagagaagcttgattctgtgattgaattcagcatcccagactctctgctgatccgaagaatcacaggaaggctgattcaccccaagagtggccgttcctaccacgaggagttcaaccctccaaaagagcccatgaaagatgacatcaccggggaacccttgatccgtcgatcagatgataatgaaaaggccttgaaaatccgcctgcaagcctaccacactcaaaccaccccactcatagagtactacaggaaacgggggatccactccgccatcgatgcatcccagacccccgatgtcgtgttcgcaagcatcctagcagccttctccaaagccacatgtaaagacttggttatgtttatctaatgttgggtccaagaaggaatttctttccatccctgtgaggcaatgggtgggaatgataggacaggcaaagagaagcttcctcaggctagcaaaaatatcatttgatgtattgattaaaaaagcacttgcttgatgtatctttggcgtgtgtgctactctcatctgtgtgtatgtgtgttgtgtgtgtgtgtgtgtgcatcgcaatatcgtgttccact

SEQ ID NO: 5888 - DNA, 1262 bp, Homo sapiens; identical to SEQ ID NO: 653

SEQ ID NO: 5889 - DNA, 1400 bp, Homo sapiens
tgttaacactgtgggtttatatactaattctataccccagatggggaattaggggggagatggtccctgggcttaatattctttaaagggcatgggaatttagcctctcttttattgtaatgtgctcttttggaaaatagttggttagcagggagaccagagttgtagattgagattgggtgtactggctgttctgtggaaaacatacattctgtgttcctcgaataagtgaaattgagcttctaatgagatgcacccctttactaacttgatgatgatataaaattcatttttatttagttaattaccagagagatttagcataattttgcttctggattcagtaaatcaagtcagcttggatcattcaccttaacttttcctttagcagccctttccactagtttcccattaagtagtgttctataaactttgatccaaagcagaatcaatgtcttttccatctcgtgacttaaagttctgtgactgtgatgcatgtgagtgttccgacttcatctgttcctcttaactacggtgtttcccttaccgatcggcattcataggatgaaatgaatgactgtcccagaatgagaatttgtccagattattcagataaacatcataaagagaataacattataaataagtagaatatgaataaatagaataataaaattccaaaatactcaatgggaaatgactagtaatataggctttcaagagttggtacctttacgtatatttgcagattctctgggattttaaggaactgagaaaacagaaaagttgactaaattttatatttcttgtcctctaaatattttgataatttctggattgatgcagtgatgtttttcgttccttgtatttataaatgaaaacctttttttggtgtttctaaacctaaaatctacttggtttgaaatcaagtggttggaacactgtttgacttttatttgaagcatgttgttgattgaaaatttcattgaggaagttttcaatcagtgtgatcagtttgattctgtaatgagcacagcacctaatattttgaggagctctgttttgaggaccaatgcttaaggtggaccttgttgctaaacaatatcccaatagatttgttgacttgaggtctggtttggttttgtttttgttttgttttggttttgttttgtttcccaatagaattaagaattctaatgttgaaaaactgtataaatttttatgggacaaagcctagaaaagagaaatgtagtttgaatcataatctaaatcatcgtatgataggaaggaaaagttttggtgccataatttctcctttcactggtgttggacttaaatcagttgaaatgtatttctgtaccacaatttacgcttcaataaaagtttaattgtctagtgag

SEQ ID NO: 5890 - DNA, 1400 bp, Homo sapiens
acccatctctgatcccccatcaccaatgcagccagctgtgcctgtatgactggtataccaaggttacctcagtggtggtagatgttgtgcctcggcagctgggagagaacttctctgggatctactgcagccttctgcctttgggatgctggtcagctgacagccagagagtggtctttgactcggctcagcgcagccggcaggacctgtttgctgtggacacccaagtgggcactgtgacctccctcacagctggagggtcaggtgggagctggaagttgctcacaattgaccaggacctcatggtggcacagttttccacacccagcctacctccaaccctgaaagttgggttcctgccttctgcagggaaggagcagtcagtgttgtgggtgtccctggaggaggccgagcccattcccgacatccactggggcatccgggtgctacagccacccccagagcaagagaatgtgcagtatgctggccttgactttgaagcaatcctgctgcagcctggcagccctccagataagacccaagtgcccatggtggtcatgccccacggggggccccattcatcctttgtcactgcctggatgctgttcccagccatgctttgcaagatgggctttgcggtactactagtgaactatcgtggctccacgggctttggccaggacagcatcctctccctcccaggcaatgtgggccaccaggatgtgaaggatgtccagtttgcagtggaacaggtgctccaggaggaacactttgatgcaagccatgtggcccttatgggtggttcccatggtggcttcatttcctgccacttgattggtcagtacccagagacctacagggcctgcgtggcccggaaccccgtgatcaacatcgcctccatgttgggctccactgacatccctgactggtgcgtggtggaggctggctttcctttcagcagtgactgcctgccagacctcagcgtgtgggctgagatgctggacaaatcgcccatcagatacatccctcaggtgaagacaccactgttactgatgttgggccaggaggaccggcgtgtgcccttcaagcagggcatggagtattaccgtgccctcaagacccggaatgtgcctgttcggctcctgctctatcccaaaagcacccacgcattatcagaggtggaggtggagtcagacagcttcatgaatgctgtgctctggctacgcacacacttgggcagctgaagccctgccattctgcatgagctgatcagcctgtgccacacttcgctcttgaggagctcaacggtctggcagggcagcaggaggctttctgggctctggactccacggatgcgtgggcagaggaatgtgggctatgtagtcataataaattaggac

SEQ ID NO: 5891 - DNA, 1400 bp, Homo sapiens
ccccacctacaaatacctggagcagatgcagatttaggtggcagggagcgcggcagccctggcggagggatgcaggtgggccggaagatcccacgattccgatcgactgccaagcagcagccgctgccaggggctgcgtctgacatcctgacctcctggactgtaggactatataaagtactactgtagaactgcaatttccattcttttaaatgggtgaaaaatggtaatataacaatatatgatatataaaccttaaatgaaaaaaatgatctattgcagatatttgatgtagttttcttttttaaattaatcagaaaccccacttccattgtattgtctgacacatgctctcaatatataataaatgggaaatgtcgattttcaataatagacttatatgcaggctgtcgttccggttatgttgtgtaagtcaactcttcagcctcattcactgtcctggcttttatttaaagaaaaaaaaggcagtattccctttttaaatgagctttcaggaagttgctgagaaatggggtggaatagggaactgtaatggccactgaagcacgtgagagaccctcgcaaaatgatgtgaaaggaccagtttcttgaagtccagtgtttccacggctggatacctgtgtgtctccataaaagtcctgtcaccaaggacgttaaaggcattttattccagcgtcttctagagagcttagtgtatacagatgagggtgtccgctgctgctttccttcggaatccagtgcttccacagagattagcctgtagcttatatttgacattcttcactgtctgttgtttacctaccgtagctttttaccgttcacttccccttccaactatgtccagatgtgcaggctcctcctctctggactttctccaaaggcactgaccctcggcctctactttgtcccctcacctccaccccctcctgtcaccggccttgtgacattcactcagagaagaccacaccaaggaggggccgcggctggcccaggagagaacacggggaggtttgtttgtgtgaaaggaaagtagtccaggctgtccctgaaactgagtctgtggacactgtggaaagctttgaacaattgtgttttcgtcacaggagtctttgtaatgcttgtacagttgatgtcgatgctcactgcttctgctttttctttctttttattttaaaaaatctgaaggttctggtaacctgtggtgtatttttattttcctgtgactgtttttgttttgtttttttcctttttcctcccctttagccctattcatgtctctacccactatgcacagattaaacttcacctacaaactccttaatatgatctgtggagaatgtacacagtttaaacacatcaataaatactttaacttccaa

SEQ ID NO: 5892 - DNA, 809 bp, Homo sapiens; identical to SEQ ID NO: 657

SEQ ID NO: 5893 - DNA, 1400 bp, Homo sapiens
caccctgtccgtgacgtggattggtgctgcacccctcatcctgtctcggattgtgggaggctgggagtgcgagaagcattcccaaccctggcaggtgcttgtggcctctcgtggcagggcagtctgcggcggtgttctggtgcacccccagtgggtcctcacagctgcccactgcatcaggaacaaaagcgtgatcttgctgggtcggcacagcctgtttcatcctgaagacacaggccaggtatttcaggtcagccacagcttcccacacccgctctacgatatgagcctcctgaagaatcgattcctcaggccaggtgatgactccagccacgacctcatgctgctccgcctgtcagagcctgccgagctcacggatgctgtgaaggtcatggacctgcccacccaggagccagcactggggaccacctgctacgcctcaggctggggcagcattgaaccagaggagttcttgaccccaaagaaacttcagtgtgtggacctccatgttatttccaatgacgtgtgtgcgcaagttcaccctcagaaggtgaccaagttcatgctgtgtgctggacgctggacagggggcaaaagcacctgctcgggtgattctgggggcccacttgtctgtaatggtgtgcttcaaggtatcacgtcatggggcagtgaaccatgtgccctgcccgaaaggccttccctgtacaccaaggtggtgcattaccggaagtggatcaaggacaccatcgtggccaacccctgagcacccctatcaaccccctattgtagtaaacttggaaccttggaaatgaccaggccaagactcaagcctccccagttctactgacctttgtccttaggtgtgaggtccagggttgctaggaaaagaaatcagcagacacaggtgtagaccagagtgtttcttaaatggtgtaattttgtcctctctgtgtcctggggaatactggccatgcctggagacatatcactcaatttctctgaggacacagataggatggggtgtctgtgttatttgtggggtacagagatgaaagaggggtgggatccacactgagagagtggagagtgacatgtgctggacactgtccatgaagcactgagcagaagctggaggcacaacgcaccagacactcacagcaaggatggagctgaaaacataacccactctgtcctggaggcactgggaagcctagagaaggctgtgagccaaggagggagggtcttcctttggcatgggatggggatgaagtaaggagagggactggaccccctggaagctgattcactatggggggaggtgtattgaagtcctccagacaaccctcagatttgatgatttcctagtagaactcacagaaataaagagctgttatactgtg

SEQ ID NO: 5894 - DNA, 1400 bp, Homo sapiens
gacgagctccgggatgctgtcctcctggtgttcgccaacaagcaggacctccccaacgccatgaatgcggccgagatcacagacaagctggggctgcactcactacgccacaggaactggtacattcaggccacctgcgccaccagcggcgacgggctctatgaaggactggactggctgtccaatcagctccggaaccagaagtgaacgcgacccccctccctctcactcctcttgccctctgctttactctcatgtggcaaacgtgcggctcgtggtgtgagtgccagaagctgcctccgtggtttggtcaccgtgtgcatcgcaccgtgctgtaaatgtggcagacgcagcctgcggccaggctttttatttaatgtaaatagtttttgtttccaatgaggcagtttctggtactcctatgcaatattactcagctttttttattgtaaaaagaaaaatcaactcactgttcagtgctgagaggggatgtaggcccatgggcacctggcctccaggagtcgctgtgttgggagagccggccacgcccttggcttagagctgtgttgaaatccattttggtggttggttttaacccaaactcagtgcattttttaaaatagttaagaatccaagtcgagaacacttgaacacacagaagggagaccccgcctagcatagatttgcagttacggcctggatgccagtcgccagcccagctgttcccctcgggaacatgaggtggtggtggcgcagcagactgcgatcaattctgcatggtcacagtagagatccccgcaactcgcttgtccttgggtcaccctgcattccatagccatgtgcttgtccctgtgctcccacggttcccaggggccaggctgggagcccacagccaccccactatgccgcaggccgccctacccaccttcaggcagcctatgggacgcaggccccatctgtccctcggtccgcgtgtggccagagtggtccgtcgtccccaacactcgtgctcgctcagacactttggcaggatgtctggggcctcaccagcaggagcgcgtgcaagccgggcaggcggtccacctagacccacagcccctcgggagcaccccacctctgtgtgtgatgtagctttctctccctcagcctgcaagggtccgatttgccatcgaaaaagacaacctctacttttttcttttgtattttgataaacactgaagctggagctgttaaatttatcttggggaaacctcagaactggtctatttggtgtcgtaggaacctcttactgctttcaatacacgattagtaatcaactgttttgtatacttgttttcagttttcatttcgacaaacaagcactgtaattatagctattagaataaaatctcttaactatt

SEQ ID NO: 5895 - DNA, 600 bp, Homo sapiens
tccatgtattttttcctacttaggattttccactctatctttgtggttcatgaggactttgcctcttctcctgcctcattccctgactttctctagttagatgtcagtcctaaataggttttcctcacttcaggcctcacccctcaccttgtttttttgggggctccagggaccaatctggggctggaaatgttaggaggttgccttggtgctgccccagatctgtccagcagggggcagtaagtgatcttggtagtatccctggctgctaagcccttggcaggggtggtcctttctacattcccattcacttaacagctcttttgggattgggtgtttcattccatttctgcccactccctctcctctcctctctggtaggtttaattttatgctttccctgattccagctttctgcttcctgaggactcccgctccccccaccccaaagtttgtctgtggtgttatagtggtaactgcagttcctcctctggaatgtagactgtatatgtttaataactcaccttctctatccttgctcaaaatgtgggataacgcgatgactgtgaccctggttggaaattaaacttgttttatgca

SEQ ID NO: 5896 - DNA, 1400 bp, Homo sapiens
atgggcctcactatctcctccctcttctcccgactatttggcaagaagcagatgcgcattttgatggttggattggatgctgctggcaagacaaccattctgtataaactgaagttaggggagatagtcaccaccattcctaccattggttttaatgtggaaacagtagaatataagaacatttgtttcacagtatgggatgttggtggtcaagatagaattaggcctctctggaagcattacttccagaatacccagggtcttatttttgtggtagatagcaacgatcgtgaaagaattcaggaagtagcagatgagctgcagaaaatgcttctggtagatgaattgagagatgcagtgctgctactttttgcaaacaaacaggatttgccaaatgctatggccatcagtgaaatgacagataaactagggcttcagtctcttcgtaacagaacatggtatgttcaagccacttgtgcaacacaaggaactggtctgtatgaaggacttgactggctgtcaaatgagctttcaaaacgttaaatgaaattggatatctaaccaaggacatgtttgataaaattggtctaggcttgttacaacaaaattagtttgtatcttggttattaaacagtatctgggactggtttgggcagaatattaaacttattttgttgccaattattgtttaccgagtataatgttgctatttagcaatgtgcttggttttaaagaaattctccttgggaaaaaagtatcctcttttaattttacttcccataagcgtaaatgcctggacatagctcttgtgaacctttaaataaattgtttgagtgtttttgagccccagacaaataatgttttaaagttatcccttgctactttactgatacctttatcattcctgagacagtttgctaatttaaaaatgtagcattccatttgtatttatttctctcccttgccaaaaagattttctaatactgcttgtaccagccagagaaagatccaaaacactactcagctctcttgcactgaggaaatttttccccctacattgactcctggcctacatcagccaaacttaaccttggtggggtttggatttgatagccaattagttctgtgctggttgcaaagaattgatatttagatggtttttaatactcagcagattgtcttcccatattgtgtcttttttatgttgcatgttgcttttgttatcagcctgattttttgctcagtatatgatagttctgctgatgttttgtttattgggcagacatatcttcattaagagtttttggaaaactcatcaaattcgatgaatacattttcttcataacccatttggaattattcctaataaaatgataaaatacgtaaaaaaaaaggaattc

SEQ ID NO: 5897 - DNA, 1400 bp, Homo sapiens
ataccgatgttatactgatgtgtttttccatcgacagccctgatagtttagaaaacatcccagaaaagtggaccccagaagtcaagcatttctgtcccaacgtgcccatcatcctggttgggaataagaaggatcttcggaatgatgagcacacaaggcgggagctagccaagatgaagcaggagccggtgaaacctgaagaaggcagagatatggcaaacaggattggcgcttttgggtacatggagtgttcagcaaagaccaaagatggagtgagagaggtttttgaaatggctacgagagctgctctgcaagctagacgtgggaagaaaaaatctggttgccttgtcttgtgaaaccttgctgcaagcacagcccttatgcggttaattttgaagtgctgtttattaatcttagtgtatgattactggcctttttcatttatctataatttacctaagattacaaatcagaagtcatcttgctaccagtatttagaagccaactatgattattaacgatgtccaacccgtctggcccaccagggtccttttgacactgctctaacagccctcctctgcactcccacctgacacaccaggcgctaattcaaggaatttcttaacttcttgcttctttctagaaagagaaacagttggtaacttttgtcaattaggctgtaactactttataactaacatgtcctgccctattatctgtcagctgcaaggtactctggtgagtcaccacttcagggctttactccgtaacagattttgttggcatagctctggggtgggcagttttgaaaatgggctcaaccagaaaagcccaagttcatgcagctgtggcagagttacagttctgtggtttcatgttagttaccttatagttactgtgtaattagtgccacttaatgtatgttaccaaaaataaatatatctacccagactagatgtagtattttgtataattggattctaatactgtcatctcaagaagtgtatggtttaaagaagtgtattggaaataaagtcagatggaaattcattttaaattcccgtttgtcacttttctgataaaagatggccatattaccccttttcggccccatgtatctcagtaccccatggagctgggctaagtaaataggaattggtttcacgcctcaggcaattagacactttggaagatggcataacctgtctcacctggacttaagcgtctggctctaattcacagtgctctttctcctcactgtatccaggttccctcccagaggagccaccagttctcatgggtggcactcagtctctcttctctccagctgactaaactttttttctgtaccagttaatttttccaactactaatagaataaaggcagttttctaaaaaaa

SEQ ID NO: 5898 - DNA, 902 bp, Homo sapiens; identical to SEQ ID NO: 663

SEQ ID NO: 5899 - DNA, 1400 bp, Homo sapiens
ccgtgagcgtccattttgtggaacctgagttgcaagcagggaggggcaaatacaactgccctgttcccgattctctagatggccgatctagagaagtcccgcctcataagtggaaggatgaaattctcagaacagctaacctctaatgggagttggcttctgattctcattcaggcttctcacggcattcagcagcagcgttgctgtaaccgacaaagacaccttcgaattaagcacattcctcgattccagcaaagcaccgcaacatgaccgaaatgagcttcctgagcagcgaggtgttggtgggggacttgatgtcccccttcgacccgtcgggtttgggggctgaagaaagcctaggtctcttagatgattacctggaggtggccaagcacttcaaacctcatgggttctccagcgacaaggctaaggcgggctcctccgaatggctggctgtggatgggttggtcagtccctccaacaacagcaaggaggatgccttctccgggacagattggatgttggagaaaatggatttgaaggagttcgacttggatgccctgttgggtatagatgacctggaaaccatgccagatgaccttctgaccacgttggatgacacttgtgatctctttgcccccctagtccaggagactaataagcagcccccccagacggtgaacccaattggccatctcccagaaagtttaacaaaacccgaccaggttgcccccttcaccttcttacaacctcttcccctttccccaggggtcctgtcctccactccagatcattcctttagtttagagctgggcagtgaagtggatatcactgaaggagataggaagccagactacactgcttacgttgccatgatccctcagtgcataaaggaggaagacaccccttcagataatgatagtggcatctgtatgagcccagagtcctatctggggtctcctcagcacagcccctctaccaggggctctccaaataggagcctcccatctccaggtgttctctgtgggtctgcccgtcccaaaccttacgatcctcctggagagaagatggtagcagcaaaagtaaagggtgagaaactggataagaagctgaaaaaaatggagcaaaacaagacagcagccactaggtaccgccagaagaagagggcggagcaggaggctcttactggtgagtgcaaagagctggaaaagaagaacgaggctctaaaagagagggcggattccctggccaaggagatccagtacctgaaagatttgatagaagaggtccgcaaggcaagggggaagaaaagggtcccctagttgaggatagtcaggagcgtcaatgtgcttgtacatagagtgctgtagctgtgtgttccaataaattattttgtaggg

SEQ ID NO: 5900 - DNA, 1400 bp, Homo sapiens
agtattttggactgggcaactcccctggttttcctctgcagtattatccgtactatggcaaactcctgcagcccaaatacctgcagcccctgctggccgtacagttcaccaatcttaccatggacactgaaattcgcatagagtgtaaggcgtacggtgagaacattgggtacagtgagaaagaccgttttcagggacgttttgatgtaaaaattgaagttaagagctgatcacaagcacaaatctttcccactagccatttaataagttaaaaaaagatacaaaaacaaaaacctactagtcttgaacaaactgtcatacgtatgggacctacacttaatctatatgctttacactagctttctgcatttaataggttagaatgtaaattaaagtgtagcaatagcaacaaaatatttattctactgtaaatgacaaaagaaaaagaaaaattgagccttgggacgtgcccatttttactgtaaattatgattccgtaactgaccttgtagtaagcagtgtttctggcccctaagtattgctgccttgtgtattttatttagtgtacagtactacaggtgcatactctggtcatttttcaagccatgttttattgtatctgttttctactttatgtgagcaaggtttgctgtccaaggtgtaaatattcaacgggaataaaactggcatggtaattttttttttttgtttgttttttgttttttggctctttcaaaggtaatggcccatcgatgagcatttttaacatactccatagtcttttcctgtggtgttaggtctttatttttatttttttcctgggggctggggtgggggtttgtcatgggggaactgccctttaaattttaagtgacactacagaaaaacacaaaaaggtgatgggttgtgttatgcttgtattgaatgctgtcttgacatctcttgccttgtcctccggtatgttctaaagctgtgtctgagatctggatctgcccatcactttggcctagggacagggctaattaatttgctttatacattttcttttactttccttttttcctttctggaggcatcacatgctggtgctgtgtctttatgaatgttttaaccattttcatggtggaagaattttatatttatgcagttgtacaattttatttttttctgcaagaaaaagtgtaatgtatgaaataaaccaaagtcacttgtttgaaaataaatctttattttgaactttataaaagcaatgcagtaccccatagactggtgttaaatgttgtctacagtgcaaaatccatgttctaacatatgtaataattgccaggagtacagtgctcttgttgatcttgtattcagtcaggttaaaacaacggacaataaaagaatgaaccgaattc

SEQ ID NO: 5901 - DNA, 1400 bp, Homo sapiens
acattcagtaggtctgatccaacttcgtatgcagggtacattgaagaccttaagaagtttctaaaaccatatactttagaagaacagaagaacctcacagtctgtcctgatggagcactttttgaacagaagggtccagtttatgttgcatgtcagtttcctatttcattacttcaagcatgcagtggtatgaatgatcctgattttggctattctcaaggaaacccttgtattcttgtgaaaatgaacagaataattggattaaagcctgaaggagtgccaaggatagattgtgtttcaaagaatgaagatataccaaatgtagcagtttatcctcataatggaatgatagacttaaaatatttcccatattatgggaaaaaactgcatgttgggtatctacagccattggttgctgttcaggtcagctttgctcctaacaacactgggaaagaagtaacagttgagtgcaagattgatggatcagccaacctaaaaagtcaggatgatcgtgacaagtttttgggacgagttatgttcaaaatcacagcacgtgcatagtatgagtaggatatctccacagagtaaatgttgtgttgtctgtcttcattttgtaacagctggaccttccattctagaattatgagaccaccttggagaaaggtgtgtggtacatgacattgggttacatcataacgtgcttccagatcatagtgttcagtgtcctctgaagtaactgcctgttgcctctgctgccctttgaaccagtgtacagtcgccagatagggaccggtgaacacctgattccaaacatgtaggatgggggtcttgtcctctttttatgtggtttaattgccaagtgtctaaagcttaatatgccgtgctatgtaaatattttatggatataacaactgtcatattttgatgtcaacagagttttagggataaaatggtacccggccaacatcaagtgactttatagctgcaagaaatgtggtatgtggagaagttctgtatgtgaggaaggaaaaaaagaaaataaaagtgtgtttgaaaaatattatcttgggttctttgtaaaatttattttttacatgctgaattagcctcgatctttttgattaagagcacaaacttttttttgtaaaacatgtaaaaaaaaaaactgggattaatttttagtgttggaactgcctcttattttaggctgtagataaaatagcatttttaggttagccagtgtgactatgcacctaattttttatgagattaaattcataagacttaatttgtacaatagtttgtgaaatatcttgttactgcttttatttagcagactgtggactgtaataaagtatataaattgtgaaatataaaaacttggaacttattcaaagctt

SEQ ID NO: 5902 - DNA, 1178 bp, Homo sapiens; identical to SEQ ID NO: 667

SEQ ID NO: 5903 - DNA, 1400 bp, Homo sapiens
tgctatggatggtacagaaggcttggttagaggccagaaagtactggattctggtgcaccaatcaaaattcctgttggtcctgagactttgggcagaatcatgaatgtcattggagaacctattgatgaaagaggtcccatcaaaaccaaacaatttgctcccattcatgctgaggctccagagttcatggaaatgagtgttgagcaggaaattctggtgactggtatcaaggttgtcgatctgctagctccctatgccaagggtggcaaaattgggctttttggtggtgctggagttggcaagactgtactgatcatggagttaatcaacaatgtcgccaaagcccatggtggttactctgtgtttgctggtgttggtgagaggacccgtgaaggcaatgatttataccatgaaatgattgaatctggtgttatcaacttaaaagatgccacctctaaggtagcgctggtatatggtcaaatgaatcaaccacctggtgctcgtgcccgggtagctctgactgggctgactgtggctgaatacttcagagaccaagaaggtcaagatgtactgctatttattgataacatctttcgcttcacccaggctggttcagaggtgtctgcattattgggccgaatcccttctgctgtgggctatcagcctaccctggccactgacatgggcactatgcaggaaagaattaccactaccaagaagggatctatcacctctgtacaggctatctatgtgcctgctgatgacttgactgaccctgcccctgctactacgtttgcccatttggatgctaccactgtactgtcgcgtgccattgctgagctgggcatctatccagctgtggatcctctagactccacctctcgtatcatggatcccaacattgttggcagtgagcattacgatgttgcccgtggggtgcaaaagatcctgcaggactacaaatccctccaggatatcattgccatcctgggtatggatgaactttctgaggaagacaagttgaccgtgtcccgtgcacggaaaatacagcgtttcttgtctcagccattccaggttgctgaggtcttcacaggtcatatggggaagctggtacccctgaaggagaccatcaaaggattccagcagattttggcaggtgaatatgaccatctcccagaacaggccttctatatggtgggacccattgaagaagctgtggcaaaagctgataagctggctgaagagcattcatcgtgaggggtctttgtcctctgtacttgtctctctccttgcccctaacccaaaaagcttcatttttctatataggctgcacaagagccttgattgaagatatattctttctgaacagtatttaaggtttccaataaaatcggaattc

SEQ ID NO: 5904 - DNA, 1134 bp, Homo sapiens; identical to SEQ ID NO: 669

SEQ ID NO: 5905 - DNA, 1400 bp, Homo sapiens
tagtagcaattaaaggctgtttgcacctttaaggaccagctgggctgtagtgattcctggggccagagtggcattatgtttttacaaaataatgacatatgtcacatgtttgcatgtttgtttgcttgttgaatttttgaacagccagttgaccaatcatagaaagtattactttctttcatatggtttttggttcactggcttaagaggtttctcagaatatctatggccacagcagcataccagtttccatcctaataggaatgaaattaattttgtatctactgataacagaatctgggtcacatgaaaaaaaatcattttatccgtcttttaagtatatgtttaaaataataatttatgtgtctgcatattgcagaacagctctgagagcaacagtttcccattaactctttctgaccaatagtgctggcaccgttgcttcctctttgggaagaggaaagggtgtgtgaacatggctaacaatcttcaaatacccaaattgtgatagcataaataaagtatttattttatgcctcagtatattattatttaattttttaggtaatgcctatctcttggtctattaaggaaagaagcaatcagtagagaattcaggatagttttgtttaaattcttgcagattacatgtttttacagtggcctgctattgaggaaaggtattcttctatacaacttgttttaacctttgagaacattgacagaaattatgcaatggtttgttgagatacggacttgatggtgctgtttaatcagtttgcttccaaagtggcctactcaagaggccctaagactggtagaaattaaaaggatttcaaaaactttctattcctttcttaaacctaccagcaaactaggattgtgatagcaatgaatggtatgatgaagaaagtttgaccaaatttgtttttttgttgttgttgttgttttgaatttgaaatcattcttattccctttaagaatgtttatgtatgagtgtgaagatgctagcgaacctatgctcagatattcatcgtaagtctcccttcacctgttacagagtttcagatcggtcactgatagtatgtatttctttagtaagaatgtgttaaaattacaatgatcttttaaaaagatgatgcagttctgtatttattgtgctgtgtctggtcctaagtggagccaattaaacaagtttcatatgtatttttccagtgttgaatctcacacactgtactttgaaaatttccttccatcctgaataacgaatagaagaggccatatatattgcctccttatccttgagatttcactacctttatgttaaaagttgtgtataattgttaaaatctgtgaaagaataaaaagtggatttaaattaaaaaaaaaaaaaaaaaaaa

SEQ ID NO: 5906 - DNA, 1126 bp, Homo sapiens; identical to SEQ ID NO: 671

SEQ ID NO: 5907 - DNA, 1126 bp, Homo sapiens; identical to SEQ ID NO: 671

SEQ ID NO: 5908 - DNA, 600 bp, Homo sapiens
gctggatctcatagcccagcagatgatgccagaagtccggggagccttgtttggtgcaaatgccaacaggaagtttttggactaagccttcaggaggtggagctcgtcgtcagctctcctgctgtgatgtggaagcttctgatatttgaagaaacacgaatgtctctgtagcttcctcttcactgccccagtattgctctgtatttatcagcgatgcccctctgtcactcatgccttgcctaattgttcacaatggtggaaagcttcatgtaatatgatcaggacccacctccagttcttctgaaagtgtgacagtgtccagccggttctgcagcactaggggagggggcagatggtggttgcatgggcttcctgggtctccactctccgtctggcctaaaggtgatgtatttggtgtttggccctgcagtccccactcttgaggcttaaggcgcatgtggcacaccactccttccagcagtagtcgctttactgttacctgtttaggcctagaagttttccctcatctgtaaatgtgatttaaaatctaagccatgaatatgctttatttattaaaagagttatgcggatttaatgtga

SEQ ID NO: 5909 - DNA, 600 bp, Homo sapiens
gggggtgccctgatccatgcccgcttcgtgatgaccgcggccagctgcttccaaagccagaaccccggggttagcaccgtggtgctgggtgcctatgacctgaggcggcgggagaggcagtcccgccagacgttttccatcagcagcatgagcgagaatggctacgacccccagcagaacctgaacgacctgatgctgcttcagctggaccgtgaggccaacctcaccagcagcgtgacgatactgccactgcctctgcagaacgccacggtggaagccggcaccagatgccaggtggccggctgggggagccagcgcagtggggggcgtctctcccgttttcccaggtttgtcaacgtgactgtgacccccgaggaccagtgtcgccccaacaacgtgtgcaccggtgtgctcacccgccgcggtggcatctgcaatggggacgggggcacccccctcgtctgcgagggcctggcccacggcgtggcctccttttccctggggccctgtggccgaggccctgacttcttcacccgagtggcgctcttccgagactggatcgatggtgttctcaacaacccgggaccggggccagcctag

SEQ ID NO: 5910 - DNA, 600 bp, Homo sapiens
gaataagctgaaatatggccagactatcaggcccatttgtctcccctgcaccgagggaacaactcgagctttgaggcttcctccaactaccacttgccagcaacaaaaggaagagctgctccctgcacaggatatcaaagctctgtttgtgtctgaggaggagaaaaagctgactcggaaggaggtctacatcaagaatggggataagaaaggcagctgtgagagagatgctcaatatgccccaggctatgacaaagtcaaggacatctcagaggtggtcacccctcggttcctttgtactggaggagtgagtccctatgctgaccccaatacttgcagaggtgattctggcggccccttgatagttcacaagagaagtcgtttcattcaagttggtgtaatcagctggggagtagtggatgtctgcaaaaaccagaagcggcaaaagcaggtacctgctcacgcccgagactttcacatcaacctctttcaagtgctgccctggctgaaggagaaactccaagatgaggatttgggttttctataaggggtttcctgctggacaggggcgtgggattgaattaaaacagctgcgacaac

SEQ ID NO: 5911 - DNA, 600 bp, Homo sapiens
tcccagacccctgctccactggcccttcgaccagtcctcccttctgttctctctttccccgtccttcctctctctctctctctctctctgtgtgtgtgtgtgtgtgtgtgtgtgtgtgtgtgtgtgtgtgtgtgtgtgtcttgtgcttcctcagacctttctcgcttctgagcttggtggcctgttccctccatctctccgaacctggcttcgcctgtccctttcactccacaccctctggccttctgccttgagctgggactgctttctgtctgtccggcctgcacccagcccctgcccacaaaaccccagggacagcggtctccccagcctgccctgctcaggccttgcccccaaacctgtactgtcccggaggaggttgggaggtggaggcccagcatcccgcgcagatgacaccatcaaccgccagagtcccagacaccggttttcctagaagcccctcacccccactggcccactggtggctaggtctccccttatccttctggtccagcgcaaggaggggctgcttctgaggtcggtggctgtctttccattaaagaaacaccgtgcaacgtgaaaaaaaaaaaaaaaaaaaaa

SEQ ID NO: 5912 - DNA, 600 bp, Homo sapiens
atttctacacctcaatcctccatttgctgtactctttgctagtaccaaaagtagactgattacactgaggtgaggctacaaggggtgtgtaaccgtgtaacacgtgaaggcagtgctcacctcttctttaccagaacggttctttgaccagcacattaacttctggactgccggctctagtaccttttcagtaaagtggttctctgcctttttactatacagcataccacgccacagggttagaaccaacgaagaaaataaaatgagggtgcccagcttataagaatggtgttagggggatgagcatgctgtttatgaacggaaatcatgatttccctgtagaaagtgaggctcagattaaattttagaatattttctaaatgtctttttcacaatcatgtgactgggaaggcaatttcatactaaactgattaaataatacatttataatctacaactgtttgcacttacagctttttttgtaaatataaactataatttattgtctattttatatctgttttgctgtggcgttggggggggggccgggcttttgggggggggggtttgtttggggggtgtcgtggtgtgggcgggcgg

SEQ ID NO: 5913 - DNA, 1400 bp, Homo sapiens
cagacgaagaaactaaacagatcttgcgtatgctggagaaggacgatttcctcgatgaccccggcctgaggaacgacactcgaaatatgcctgtgcagctgccgctggctcactcaggatggctttttaaggaagaaaatgacgaaccagatgttaaaccttggctggctggccccaaggaagaggacatggaggtggacatacctgctgtgaaagtgaaagaggagccacgagatgaggaggaagaggccaagatgaaggctcctcccaaagcagccaggaagactccaggcctcccgaaggatgtatctgtggcagagctgctgagggagctgagcctcaccaaggaagaggaactgctgtttctgcagctgccagacaccctccctggccagccacccacccaggacatcaagcctatcaagacagaggtgcagggcgaggacggacaggtggtgctcatcaagcaggagaaagaccgagaagccaaattggcagagaatgcttgtaccctggctgacctgacagagggtcaggttggcaagctactcatccgcaagtctggaagggtgcaactcctcttgggcaaggtgactctggacgtgaccatgggaactgcctgctccttcctgcaggagctggtgtccgtgggccttggagacagtaggacaggggagatgacagtcctgggacacgtgaagcacaaacttgtatgttcccctgattttgaatccctcttggatcacaaacaccggtaaaatgagcaggtggaggaggacggcgcctgtgcccacgctgctgcctgctccagacattttgttcttgaatctgtgagacccagaagggcccactgagcccactcactccacctttggcaaccattgttccaggtcccccagggcttcctcccacagcagctgtgaatggcacagtgaccttcctgcagcgtggagatggcacatccttgctgctggggacttggccctgctatttatttttgtatttatgtcttaatctcttccactgatgcatcctccaagggtagatggggagggtctgtgtgaaggggccggcttctcttggtgcctgctgggttgcaggggcaggaagcgtgtggactgcagcttctgctggtgctccccccgtcctcctggaggcagtataggagagagagcaaggattgagtctgagacttaagcactcggtcccagcttgccagttcctggttctgtgtccttggaaaactacctaacctttctgagcctcctatactatccgacacaaatggggatgatacctacctccagggttggcgtgaggattcatgggctattatagatgaaaactgcacaaggccagaactagcaggcactcaataaacgttcatgtcctttttctct

SEQ ID NO: 5914 - DNA, 1400 bp, Homo sapiens
tattcacatctgtccttaatcggtccattcacacagcctggctgatcctggaagagctaggccaggaatgggtgcctgtggaaagctcctggcgtctaaatgagcgtcactatggggccttgatcggtctcaacagggagcagatggctttgaatcatggtgaagaacaagtgaggctctggagaagaagctacaatgtaaccccgcctcccattgaggagtctcatccttactaccaagaaatctacaacgaccggaggtataaagtatgcgatgtgcccttggatcaactgccacggtcggaaagcttaaaggatgttctggagagactccttccctattggaatgaaaggattgctcccgaagtattacgtggcaaaaccattctgatatctgctcatggaaatagcagtagggcactcctaaaacacctggaaggtatctcagatgaagacatcatcaacattactcttcctactggagtccccattcttctggaattggatgaaaacctgcgtgctgttgggcctcatcagttcctgggtgaccaagaggcgatccaagcagccattaagaaagtagaagatcaaggaaaagtgaaacaagctaaaaaatagtctttctcaactgttggctaagaagaaatgcaaaagaagtggcataggagtgtgttatgggtgctgaactctctctctttttccccgattttccagagctaggctgtggagtagagtttgtataggtaactaggtaacttattgtggcccagataaggctttaggatgcctcagtgcttatgtcatagccttatgagttagctttcttgctagccccctagtcggtcaccaaactagtaactagtggggcttaatgaaggtcataagtttctgagatgggagagcaacaagtagagatgaagttaaaggtatttatcattcaagaaatcattattgagtcaccaattgacaggcactattctaatcagtagttcactttaatatttaataagattttctgggataacagtaagggatattagataatataccgtatgtatttattactagtcttttcctctaggaaaagggatactttgataattaaggccagaggcccattagttgagaaagtcacagatatatttctccaagaaagccaacaaccaccaccacaatgacagaaatgacaacaaggccctttaacttgtcttctagtttagagacatccttcatttgacatttagtagaattcctctttggccacaagaataagcagcaaataaacaactatggctgttgaggttctcattttggtttgttttaattttttgaactttgggtacctgtaattagtttaaaaataaagttcctgataataaagtgactgaaaatggcatcccc

SEQ ID NO: 5915 - DNA, 1400 bp, Homo sapiens
tgctgaaggaggacgcgctgcccggccagaaaacggagttcaaggtggactccgacgaccagtggggagagtactcctgcgtcttcctccccgagcccatgggcacggccaacatccagctccacgggcctcccagagtgaaggccgtgaagtcgtcagaacacatcaacgagggggagacggccatgctggtctgcaagtcagagtccgtgccacctgtcactgactgggcctggtacaagatcactgactctgaggacaaggccctcatgaacggctccgagagcaggttcttcgtgagttcctcgcagggccggtcagagctacacattgagaacctgaacatggaggccgaccccggccagtaccggtgcaacggcaccagctccaagggctccgaccaggccatcatcacgctccgcgtgcgcagccacctggccgccctctggcccttcctgggcatcgtggctgaggtgctggtgctggtcaccatcatcttcatctacgagaagcgccggaagcccgaggacgtcctggatgatgacgacgccggctctgcacccctgaagagcagcgggcagcaccagaatgacaaaggcaagaacgtccgccagaggaactcttcctgaggcaggtggcccgaggacgctccctgctccgcgtctgcgccgccgccggagtccactcccagtgcttgcaagattccaagttctcacctcttaaagaaaacccaccccgtagattcccatcatacacttccttcttttttaaaaaagttgggttttctccattcaggattctgttccttaggattttttccttctgaagtgtttcacgagagcccgggagctgctgccctgcggccccgtctgtggctttcagcctctgggtctgagtcatggccgggtgggcggcacagccttctccactggccggagtcagtgccaggtccttgccctttgtggaaagtcacaggtcacacgaggggccccgtgtcctgcctgtctgaagccaatgctgtctggttgcgccatttttgtgcttttatgtttaattttatgagggccacgggtctgtgttcgactcagcctcagggacgactctgacctcttggccacagaggactcacttgcccacaccgagggcgaccccgtcacagcctcaagtcactcccaagccccctccttgtctgtgcatccgggggcagctctggagggggtttgctggggaactggcgccatcgccgggactccagaaccgcagaagcctccccagctcacccctggaggacggccggctctctatagcaccagggctcacgtgggaacccccctcccacccaccgccacaataaagatcgcccccacctccaccctcaaaaaaaaaaaaaaaaaaaaaaa

SEQ ID NO: 5916 - DNA, 1400 bp, Homo sapiens
ctccgcaccaaggggctgacgagcgagcgacagctgcagaccttcagccagagcctgcaggagctgctggcagaacattataaacatcactggttcccagaaaagccatgcaagggatcgggttaccgttgtattcgcatcaaccataaaatggatcctctgattggacaggcagcacagcggattggactgagcagtcaggagctgttcaggcttctcccaagtgaactcacactctgggttgacccctatgaagtgtcctacagaattggagaggatggctccatctgtgtgctgtatgaagcctcaccagcaggaggtagcactcaaaacagcaccaacgtgcaaatggtagacagccgaatcagctgtaaggaggaacttctcttgggcagaacgagcccttccaaaaactacaatatgatgactgtatcaggttaagatatagtctgtggatggatcatctgatgatgatccataaatttgatttttgctttgggtgggctcctcttggggatggattatggaatttaaaccatgtcacagctgtgaagatctggcacaagatagaatggtaaaaaaaaaaaaaaattttaagtgacagtgccatagtttggacagtacctttcaatgattaattttaatagcctgtgagtccaagtaaatgatcactttatttgctagggagggaagtcctagggtggtttcagtttctcccagacatacctaaatttttacatcaatccttttaaagaaaatctgtatttcaaagaatctttctctgcagtaaatctcgcaggggaatttgcactattacacttgaaagttgttattgttaaccttttcggcagcttttaataggaaagttaaacgttttaaacatggtagtactggaaattttacaagacttttacctagcacttaaatatgtataaatgtacataaagacaaactagtaagcatgacctggggaaatggtcagaccttgtattgtgtttttggccttgaaagtagcaagtgaccagaatctgccatggcaacaggctttaaaaaagacccttaaaaagacactgtctcaactgtggtgttagcaccagccagctctctgtacatttgctagcttgtagttttctaagactgagtaaacttcttatttttagaaagtggaggtctggtttgtaactttccttgtacttaattgggtaaaagtcttttccacaaaccaccatctattttgtgaactttgttagtcatcttttatttggtaaattatgaactggtgtaaatttgtacagttcatgtatattgattgtggcaaagttgtacagatttctatattttggatgagaaatttttcttctctctataataaatcgtttcttatcttggcatttttaacc

SEQ ID NO: 5917 - DNA, 600 bp, Homo sapiens
ctgacaacgataccttctacgacctgggcttgatgggctatgtcagtggcttcggggtcatggaggagaagattgctcatgacctcaggtttgtccgtctgcccgtagctaatccacaggcctgtgagaactggctccggggaaagaataggatggatgtgttctctcaaaacatgttctgtgctggacacccatctctaaagcaggacgcctgccagggggatagtgggggcgtttttgcagtaagggacccgaacactgatcgctgggtggccacgggcatcgtgtcctggggcatcgggtgcagcaggggctatggcttctacaccaaagtgctcaactacgtggactggatcaagaaagagatggaggaggaggactgagcccagaattcactaggttcgaatccagagagcagtgtggaaaaaaaaaaacaaaaaacaactgaccagttgttgataaccactaagagtctctattaaaattactgatgcagaaagaccgtgtgtgaaattctctttcctgtagtcccattgatgtactttacctgaaacaaccaaagggcccctttctttcttctgaggattgcagaggatatag

SEQ ID NO: 5918 - DNA, 1400 bp, Homo sapiens
attccaaactgaaatgtcaacctgtggactgtggcattcctgaatccattgagaatggtaaagttgaagacccagagagcactttgtttggttctgtcatccgctacacttgtgaggagccatattactacatggaaaatggaggaggtggggagtatcactgtgctggtaacgggagctgggtgaatgaggtgctgggcccggagctgccgaaatgtgttccagtctgtggagtccccagagaaccctttgaagaaaaacagaggataattggaggatccgatgcagatattaaaaacttcccctggcaagtcttctttgacaacccatgggctggtggagcgctcattaatgagtactgggtgctgacggctgctcatgttgtggagggaaacagggagccaacaatgtatgttgggtccacctcagtgcagacctcacggctggcaaaatccaagatgctcactcctgagcatgtgtttattcatccgggatggaagctgctggaagtcccagaaggacgaaccaattttgataatgacattgcactggtgcggctgaaagacccagtgaaaatgggacccaccgtctctcccatctgcctaccaggcacctcttccgactacaacctcatggatggggacctgggactgatctcaggctggggccgaacagagaagagagatcgtgctgttcgcctcaaggcggcaaggttacctgtagctcctttaagaaaatgcaaagaagtgaaagtggagaaacccacagcagatgcagaggcctatgttttcactcctaacatgatctgtgctggaggagagaagggcatggatagctgtaaaggggacagtggtggggcctttgctgtacaggatcccaatgacaagaccaaattctacgcagctggcctggtgtcctgggggccccagtgtgggacctatgggctctacacacgggtaaagaactatgttgactggataatgaagactatgcaggaaaatagcaccccccgtgaggactaatccagatacatcccaccagcctctccaagggtggtgaccaatgcattaccttctgttccttatgatattctcattatttcatcatgactgaaagaagacacgagcgaatgatttaaatagaacttgattgttgagacgccttgctagaggtagagtttgatcatagaattgtgctggtcatacatttgtggtctgactccttggggtcctttccccggagtacctattgtagataacactatgggtggggcactcctttcttgcactattccacagggataccttaattctttgtttcctctttacctgttcaaaattccatttacttgatcattctcagtatccactgtctatgtacaataaaggatgtttataagc

SEQ ID NO: 5919 - DNA, 1128 bp, Homo sapiens; identical to SEQ ID NO: 684

SEQ ID NO: 5920 - DNA, 1221 bp, Homo sapiens; identical to SEQ ID NO: 685

SEQ ID NO: 5921 - DNA, 600 bp, Homo sapiens
agagacaggttttgtagaatattgattggtaatagtaaatcgttctccttacaatcaagttcttgaccctattcggccttatacatctggtcttacaaagaccaaagggatcctgcgcttgatcaactgaaccagtatgccaaaaccaggcatccaatttgtaaaccaattatgataaaggacaaaataagctgtttgccacctcaaaactttatgaacttcaccaccactagtgtctgtccatggagttagaggggacatcacttagaagttcttatagaaaggacacaagtttgtttcctggctttaccttgggaaaatgctagcaacattatagaaattttgccttgttgccttatcttcttccaaatgtactgttaaataaaaataaagggttaccccatgcaatcacaccatgccatgttttccttcctggagggcagccccacaggacggtttatgagcacacaattatagcttgtttctactttaacagggtatgctgcctctgtaaattcatgtattcaaaggaaaagacaccttgcctataattaaaatgtggaactataaaattttttaaaatccaaaaaaaaaaaaaaa

SEQ ID NO: 5922 - DNA, 1400 bp, Homo sapiens
ggacgctccgggaggcccgggagcggcagtggaaccgactcccagaactccggacgtgtgcggcgcagtgagtcgcagccatgttcctggttaactcgttcttgaagggcggcggcggcggcggcgggggaggcgggggcctgggtgggggcctgggaaatgtgcttggaggcctgatcagcggggccgggggcggcggcggcggcggcggcggcggcggcggtggtggaggcggcggtggcggtggaacggccatgcgcatcctaggcggagtcatcagcgccatcagcgaggcggctgcgcagtacaacccggagcccccgcccccacgcacacattactccaacattgaggccaacgagagtgaggaggtccggcagttccggagactctttgcccagctggctggagatgacatggaggtcagcgccacagaactcatgaacattctcaataaggttgtgacacgacaccctgatctgaagactgatggttttggcattgacacatgtcgcagcatggtggccgtgatggatagcgacaccacaggcaagctgggctttgaggaattcaagtacttgtggaacaacatcaaaaggtggcaggccatatacaaacagttcgacactgaccgatcagggaccatttgcagtagtgaactcccaggtgcctttgaggcagcagggttccacctgaatgagcatctctataacatgatcatccgacgctactcagatgaaagtgggaacatggattttgacaacttcatcagctgcttggtcaggctggacgccatgttccgtgccttcaaatctcttgacaaagatggcactggacaaatccaggtgaacatccaggagtggctgcagctgactatgtattcctgaactggagccccagacccgccccctcaccgccttgctataggagtcacctggagcctcggtctctcccagggccgatcctgtctgcagtcacatctttgtggggcctgctgacccacaagcttttgttctctcagtacttgttacccagcttctcaacatccagggcccaatttgccctgcctggagttccccctggctctaggacactctaacaagctctgtccacgggtctccccattcccaccaggccctgcacacacccactccgtaacctctcccctgtacctgtgccaagcctagcacttgtgatgcctccatgccccgagggcctctctcagttctgggaggatgactccagtccctgcacgccctggcacacccttcacggttgctacccaggcggccaagctccagaccgtgccagacccaggtgccccagtgcctttgtctatattctgctcccagcctgccaggccaggaggaaataaacatgccccagttgctgatctctaa

SEQ ID NO: 5923 - DNA, 600 bp, Homo sapiens
taagtgcaagaaggctgcttccagctccaaagcacctaagaatggaggtaaagcgaaggattcagcaaagacaacagaggaaacttccaagccaaaagatgactaaagaaatacaagttaaggtatctggtatctgcatgtaaaatcttcagctggtggatggtgacttttgaagaacaaaaggctttggcaacagaaaacaattgttctgggtgatttctagaatggtttttgttgagtctctgaacatcctaaatattggtttgttattcttttccagaaagaaaatgaatttgactggttcacctgtgtactgagtattgataaactttgaatttttttaattgccttcaattgggagagaaagctttatatttgtgtgaggacttctgcatcttacagtcagcacagaacacactgagacttgaatcaagtcagcaacagagcaaaataaaggttagataagtccttgtgtagcaaatttcgagcataagaaataaaatctaattaattcttagggtaaaaaaaaaaaaaaaaaaaaaaaaaaaaaaaaaaaaaaaaaaaaaaaaaaaaaaaaaaaaaaaaaaaaaaaaaaaaaaa

SEQ ID NO: 5924 - DNA, 1400 bp, Homo sapiens
caggaaagtacccctcctggactttttacatccaggtcatgacatttaatcaggcagaaacttttccatttaatccattcgatctcaccaaggtttggcctcacaaggactaccctctcatcccagttggtaaactggtcttaaaccggaatccagttaattactttgctgaggttgaacagatagccttcgacccaagcaacatgccacctggcattgaggccagtcctgacaaaatgcttcagggccgcctttttgcctatcctgacactcaccgccatcgcctgggacccaattatcttcatatacctgtgaactgtccctaccgtgctcgagtggccaactaccagcgtgatggcccgatgtgcatgcaggacaatcagggtggtgctccaaattactaccccaacagctttggtgctccggaacaacagccttctgccctggagcacagcatccaatattctggagaagtgcggagattcaacactgccaatgatgataacgttactcaggtgcgggcattctatgtgaacgtgctgaatgaggaacagaggaaacgtctgtgtgagaacattgccggccacctgaaggatgcacaaattttcatccagaagaaagcggtcaagaacttcactgaggtccaccctgactacgggagccacatccaggctcttctggacaagtacaatgctgagaagcctaagaatgcgattcacacctttgtgcagtccggatctcacttggcggcaagggagaaggcaaatctgtgaggccggggccctgcacctgtgcagcgaagcttagcgttcatccgtgtaacccgctcatcactggatgaagattctcctgtgctagatgtgcaaatgcaagctagtggcttcaaaatagagaatcccactttctatagcagattgtgtaacaattttaatgctatttccccaggggaaaatgaaggttaggatttaacagtcatttaaaaaaaaaatttgttttgacggatgattggattattcatttaaaatgattagaaggcaagtttctagctagaaatatgattttatttgacaaaatttgttgaaattatgtatgtttacatatcacctcatggcctattatattaaaatatggctataaatatataaaaagaaaagataaagatgatctactcagaaatttttatttttctaaggttctcataggaaaagtacatttaatacagcagtgtcatcagaagataacttgagcaccgtcatggcttaatgtttattcctgataataattgatcaaattcatttttttcactggagttacattaatgttaattcagcactgatttcacaacagatcaatttgtaattgcttacatttttacaataaataatctgtacgtaagaaca

SEQ ID NO: 5925 - DNA, 1400 bp, Homo sapiens
tactgccattcacttcataatccagtaggatccagtgatccttacaagttagaaaacataatcttctgccttctcatgatccaactaatgccttactcttcttgaaattttaacctatgatattttctgtgcctgaatatttgttatgtagataacaagacctcagtgccttcctgtttttcacattttccttttcaaatagggtctaactcagcaactcgctttaggtcagcagcctccctgaagaccaaaattagaatatccatgacctagttttccatgcgtgtttctgactctgagctacagagtctggtgaagctcacttctgggcttcatctggcaacatctttatccgtagtgggtatggttgacactagcccaatgaaatgaattaaagtggaccaatagggctgagctctctgtgggctggcagtcctggaagccagctttccctgcctctcatcaactgaatgaggtcagcatgtctattcagcttcgtttattttcaagaataatcacgctttcctgaatccaaactaatccatcaccggggtggtttagtggctcaacattgtgttcccatttcagctgatcagtgggcctccaaggaggggctgtaaaatggaggccattgtgtgagcctatcagagttgctgcaaacctgacccctgctcagtaaagcacttgcaaccgtctgttatgctgtgacacatggcccctccccctgccaggagctttggacctaatccaagcatccctttgcccagaaagaagatgggggaggaggcagtaataaaaagattgaagtattttgctggaataagttcaaattcttctgaactcaaactgaggaatttcacctgtaaacctgagtcgtacagaaagctgcctggtatatccaaaagctttttattcctcctgctcatattgtgattctgcctttggggacttttcttaaaccttcagttatgatttttttttcatacacttattggaactctgcttgatttttgcctcttccagtcttcctgacactttaattaccaacctgttacctactttgactttttgcatttaaaacagacactggcatggatatagttttacttttaaactgtgtacataactgaaaatgtgctatactgcatactttttaaatgtaaagatatttttatctttatatgaagaaaatcacttaggaaatggctttgtgattcaatctgtaaactgtgtattccaagacatgtctgttctacatagatgcttagtccctcatgcaaatcaattactggtccaaaagattgctgaaattttatatgcttactgatatattttacaattttttatcatgcatgtcctgtaaaggttacaagcctgcacaataaaaatgtttaacggtt

SEQ ID NO: 5926 - DNA, 1400 bp, Homo sapiens
gctatactggacaatgccactcctcctgtacacctgtcttctctggctgcccaccagcggcctctggaccgtccaggccatggatcctaacgctgcttatgtgaacatgagtaaccatcaccggggcctggcttcagccaacgttgactttgccttcagcctgtataagcacctagtggccttgagtcccaaaaagaacattttcatctcccctgtgagcatctccatggccttagctatgctgtccctgggcacctgtggccacacacgggcccagcttctccagggcctgggtttcaacctcactgagaggtctgagactgagatccaccagggtttccagcacctgcaccaactctttgcaaagtcagacaccagcttagaaatgactatgggcaatgccttgtttcttgatggcagcctggagttgctggagtcattctcagcagacatcaagcactactatgagtcagaggtcttggctatgaatttccaggactgggcaacagccagcagacagatcaacagctatgtcaagaataagacacaggggaaaattgtcgacttgttttcagggctggatagcccagccatcctcgtcctggtcaactatatcttcttcaaaggcacatggacacagccctttgacctggcaagcaccagggaggagaacttctatgtggacgagacaactgtggtgaaggtgcccatgatgttgcagtcgagcaccatcagttaccttcatgactcagagctcccctgccagctggtgcagatgaactacgtgggcaatgggactgtcttcttcatccttccggacaaggggaagatgaacacagtcatcgctgcactgagccgggacacgattaacaggtggtccgcaggcctgaccagcagccaggtggacctgtacattccaaaggtcaccatctctggagtctatgaccttggagatgtgctggaggaaatgggcattgcagacttgttcaccaaccaggcaaatttctcacgcatcacccaggacgcccagctgaagtcatcaaaggtggtccataaagctgtgctgcaactcaatgaggagggtgtggacacagctggctccactggggtcaccctaaacctgacgtccaagcctatcatcttgcgtttcaaccagcccttcatcatcatgatcttcgaccacttcacctggagcagccttttcctggcgagggttatgaacccagtgtaagagaccacccacccagagcctcagcactgtctgactttgggaaccagggatcccacagaaatgttttggagagcgggaggtttcccccaatctcctccaagttcttctccctccaaccagagttgtgtctaactttaggcatcttttaataaatgtcattgcgactctg

SEQ ID NO: 5927 - DNA, 600 bp, Homo sapiens
atgcattgctcattattcccaaggttcttgctcagaactctggttttgaccttcaggaaacattagttaaaattcaagcagaacattcagaatcaggtcagcttgtgggtgtggacctgaacacaggtgagccaatggtggcagcagaagtaggcgtatgggataactattgtgtaaagaaacagcttcttcactcctgcactgtgattgccaccaacattctcttggttgatgagatcatgcgagctggaatgtcttctctgaaaggttgaattgaagcttcctctgtatctgaatcttgaagactgcaaagtgatcctgaggattacagctgtggaatttttgtccaagcttcaaataattttgaaagaaattttcccatatgaaaaaaggagagaacactggcatctgttgaaatttggaagttctgaaattatagtatttttaaaaattgcactgaagtgtatacacataaagcaggtcttttatccagtgaacaggatgttttgctttagcagcagtgacataaaattccatgttagataagcatatgttacttaccttgttattaaatatttcttgaaaagcaggccacgaagg

SEQ ID NO: 5928 - DNA, 1192 bp, Homo sapiens; identical to SEQ ID NO: 693

SEQ ID NO: 5929 - DNA, 1040 bp, Homo sapiens; identical to SEQ ID NO: 694

SEQ ID NO: 5930 - DNA, 600 bp, Homo sapiens
tttgtgggctgctgcggggcctgcaaggagaactattgtcttatgatcacgtttgccatctttctgtctcttatcatgttggtggaggtggccgcagccattgctggctatgtgtttagagataaggtgatgtcagagtttaataacaacttccggcagcagatggagaattacccgaaaaacaaccacactgcttcgatcctggacaggatgcaggcagattttaagtgctgtggggctgctaactacacagattgggagaaaatcccttccatgtcgaagaaccgagtccccgactcctgctgcattaatgttactgtgggctgtgggattaatttcaacgagaaggcgatccataaggagggctgtgtggagaagattgggggctggctgaggaaaaatgtgctggtggtagctgcagcagcccttggaattgcttttgtcgaggttttgggaattgtctttgcctgctgcctcgtgaagagtatcagaagtggctacgaggtgatgtaggggtctggtctcctcagcctcctcatctgggggagtggaatagtatcctccaggtttttcaattaaacggattattttttcagaccg

SEQ ID NO: 5931 - DNA, 600 bp, Homo sapiens
gctacccgctgggcatctgtgctgaacggaccgctatccagaaggccgtctcagaagggtacaaggatttcagggcaattgctatcgccagtgacatgcaagatgattttatctctccatgtggggcctgcaggcaagtcatgagagagtttggcaccaactggcccgtgtacatgaccaagccggatggtacgtatattgtcatgacggtccaggagctgctgccctcctcctttgggcctgaggacctgcagaagactcagtgacagccagagaatgcccactgcctgtaacagccacctggagaacttcataaagatgtctcacagccctggggacacctgcccagtggccccagcctacagggactgggcaaagatgatgtttccagattacactccagcctgagtcagcacccctcctagcaacctgccttgggacttagaacaccgccgcccccctgccccacctttcctttccttcctgtgggccctctttcaaagtccagcctagtctggactgcttccccatcagccttcccaaggttctatcctgttccgagcaacttttctaattataaacatcacagaacatcctgga

SEQ ID NO: 5932 - DNA, 1400 bp, Homo sapiens
gaagcagaaaacttgcagctgtgacttataatggagttgataacaacaagaataaagggcagctgactaagagccctctggcacaaatggaagaagaaagaagggagcatgtagctaaaatgaagaagatggagatggagatggagcaggtgtttgagatgaaggtcaaagaaaaagttcaaaaactgaaggactctgaagctgagctccagcggcgccatgagcaaatgaaaaagaatttggaagcacagcacaaagaattggaggaaaaacgtcgtcagttcgaggatgagaaagcaaactgggaagctcaacaacgtattttagaacaacagaactcttcaagaaccttggaaaagaacaagaagaaagggaagatcttttaaactctctattgaccaccagttaacgtattagttgccaatatgccagcttggacatcagtgtttgttggatccgtttgaccaatttgcaccagttttatccataatgatggatttaacagcatgacaaaaattatttttttttttgttcttgatggagattaagatgccttgaattgtctagggtgttctgtacttagaaagtaagagctctaagtacctttcctacattttctttttttattaaacagatatcttcagtttaatgcaagagaacattttactgttgtacaatcatgttctggtggtttgattgtttacaggatattccaaaataaaaggactctggaagattttcattgaggataaattgccataatatgatgcaaactgtgcttctctatgataattacaatacaaaggttccattcagtgcagcatatacaataatgtaatttagtctaacacagttgaccctattttttgacacttccattgtttaaaaatacacatggaaaaaaaaaaaccctatatgcttactgtgcacctagagcttttttataacaacgtctttttgtttgtttgttttggattctttaaatatatattattctcatttagtgccctctttagccagaatctcattactgcttcatttttgtaataacatttaatttagatattttccatcatattggcactgctaaaatagaatatagcatctttcatatggtaggaaccaacaaggaaactttcctttaactccctttttacactttatggtaagtagcagggggggaaatgcatttatagatcatttctaggcaaaattgtgaagctaatgaccaacctgtttctacctatatgcagtctctttattttactagaaatgggaatcatggcctcttgaagagaaaaaagtcaccattctgcatttagctgtattcatatattgctatttctgtattttttgtttgtattgtaaaaaattcacataataaacgatggttgtgatgt

SEQ ID NO: 5933 - DNA, 1400 bp, Homo sapiens
ggcctacattctgaacgccggcctgagcacaggcgccctgatcgccatcctcgcctgcatcgtcattctcctggtcattgtagtattgtttgtgaccctgagaaggcaaaagaaagaaccactcattgtctttgaggaagaagatgtccgtgagaacatcattacttatgatgatgaagggggtggggaagaagacacagaagcctttgatattgccaccctccagaatcctgatggtatcaatggatttatcccccgcaaagacatcaaacctgagtatcagtacatgcctagacctgggctccggccagcgcccaacagcgtggatgtcgatgacttcatcaacacgagaatacaggaggcagacaatgaccccacggctcctccttatgactccattcaaatctacggttatgaaggcaggggctcagtggccgggtccctgagctccctagagtcggccaccacagattcagacttggactatgattatctacagaactggggacctcgttttaagaaactagcagatttgtatggttccaaagacacttttgatgacgattcttaacaataacgatacaaatttggccttaagaactgtgtctggcgttctcaagaatctagaagatgtgtaaacaggtatttttttaaatcaaggaaaggctcatttaaaacaggcaaagttttacagagaggatacatttaataaaactgcgaggacatcaaagtggtaaatactgtgaaataccttttctcacaaaaaggcaaatattgaagttgtttatcaacttcgctagaaaaaaaaaacacttggcatacaaaatatttaagtgaaggagaagtctaacgctgaactgacaatgaagggaaattgtttatgtgttatgaacatccaagtctttcttcttttttaagttgtcaaagaagcttccacaaaattagaaaggacaacagttctgagctgtaatttcgccttaaactctggacactctatatgtagtgcatttttaaacttgaaatatataatattcagccagcttaaacccatacaatgtatgtacaatacaatgtacaattatgtctcttgagcatcaatcttgttactgctgattcttgtaaatctttttgcttctactttcatcttaaactaatacgtgccagatataactgtcttgtttcagtgagagacgccctatttctatgtcatttttaatgtatctatttgtacaattttaaagttcttattttagtatacgtataaatatcagtattctgacatgtaagaaaatgttacggcatcacacttatattttatgaacattgtactgttgctttaatatgagcttcaatataagaagcaatctttgaaataaaaaaagatttttttttaaaaaaaa

SEQ ID NO: 5934 - DNA, 1400 bp, Homo sapiens
gcgggctgttaggctccctcgcccccagctccttggctcgctcagctcctccaccgcagcccagcagtgagacgcgcgcgcagccagctccccacgagatggaacagaccgaagtgctgaagccacggaccctggctgatctgatccgcatcctgcaccagctctttgccggcgatgaggtcaatgtagaggaggtgcaggccatcatggaagcctacgagagcgaccccatcgagtgggcaatgtacgccaagttcgaccagtacaggtatacccgaaatcttgtggatcaaggaaatggaaaatttaatctgatgattctctgttggggtgaaggacatggcagcagtattcatgatcataccaactcccactgctttctgaagatgctacagggaaatctaaaggagacattatttgcctggcctgacaaaaaatccaatgagatggtcaagaagtctgaaagagtcttgagggaaaaccagtgtgcctacatcaatgattccattggcttacatcgagtagagaacatcagccatacggaacctgctgtgagccttcacttgtacagtccaccttttgatacatgccatgcctttgatcaaagaacaggacataaaaacaaagtcacaatgacattccatagtaaatttggaatcagaactccaaatgcaacttcgggctcgctggagaacaactaaggggcaccaaaccctctgaggttttactttaaggttcgctgtatgtttgccttggacaaaaaggctacctaccacgtgctatccagtaatatacttaaataagccaatacttagatctactgtaaggcagatgctaattataaggcattaagtaagcaaatagtgccctcagctactgcagaagaaaagtcccactgaggaaaagaaagtcttgtgatttttaaaggcaagttttcaagtgctctcatagttctatcctctaattccattaaatccatactaggagcgtcagtgagggttttcatagcttttggaaatactttggtctctgaactgtaattagcaagaagtaaaaacagaaacgtcaaacgtcaaatgtttgctttgttacctggaggactaaatgtagatgtctttagtatactttgtatgttcttaaatattggaagataattttgtgaatctgtagattttattttttcagtcttaccttacaaatttcttttctatgaataatagaggaactcacggcactctgccacttgttaatgaaaggaagtgcagaggatttagaaaagtacatgatccccagaccacaacaaaccaaaacataaactcatgtctgtgtcccatggtcatagtcaaagattttgtactgctaaaattaccaaataatttaaataaagtggatttgaacac

SEQ ID NO: 5935 - DNA, 1400 bp, Homo sapiens
tgtttcaccggaaagaaggtgggaactgcctctgagaatgtgtatgtcaacacagcacaccttaagaattctcaggaaaagtattctaataggctctacaagtatgatcacaactttgtgaaagctatcaatgccattcagaagtcttggactgcaactacatacatggaatatgagactcttaccctgggagatatgattaggagaagtggtggccacagtcgaaaaatcccaaggcccaaacctgcaccactgactgctgaaatacagcaaaagattttgcatttgccaacatcttgggactggagaaatgttcatggtatcaattttgtcagtcctgttcgaaaccaagcatcctgtggcagctgctactcatttgcttctatgggtatgctagaagcgagaatccgtatactaaccaacaattctcagaccccaatcctaagccctcaggaggttgtgtcttgtagccagtatgctcaaggctgtgaaggcggcttcccataccttattgcaggaaagtacgcccaagattttgggctggtggaagaagcttgcttcccctacacaggcactgattctccatgcaaaatgaaggaagactgctttcgttattactcctctgagtaccactatgtaggaggtttctatggaggctgcaatgaagccctgatgaagcttgagttggtccatcatgggcccatggcagttgcttttgaagtatatgatgacttcctccactacaaaaaggggatctaccaccacactggtctaagagaccctttcaacccctttgagctgactaatcatgctgttctgcttgtgggctatggcactgactcagcctctgggatggattactggattgttaaaaacagctggggcaccggctggggtgagaatggctacttccggatccgcagaggaactgatgagtgtgcaattgagagcatagcagtggcagccacaccaattcctaaattgtagggtatgccttccagtatttcataatgatctgcatcagttgtaaaggggaattggtatattcacagactgtagactttcagcagcaatctcagaagcttacaaatagatttccatgaagatatttgtcttcagaattaaaactgcccttaattttaatatacctttcaatcggccactggccatttttttctaagtattcaattaagtgggaattttctggaagatggtcagctatgaagtaatagagtttgcttaatcatttgtaattcaaacatgctatattttttaaaatcaatgtgaaaacatagacttatttttaaattgtaccaatcacaagaaaataatggcaataattatcaaaacttttaaaatagatgctcatatttttaaaataaagttttaaaaataactgc

SEQ ID NO: 5936 - DNA, 1400 bp, Homo sapiens
ccaagaagaagaaagaggatgccctaaatgagaccagggaatcagagacaaagctgaaggagctcccaggagtgtgcaatgagaccatgatggccctctgggaagagtgtaagccctgcctgaaacagacctgcatgaagttctacgcacgcgtctgcagaagtggctcaggcctggttggccgccagcttgaggagttcctgaaccagagctcgcccttctacttctggatgaatggtgaccgcatcgactccctgctggagaacgaccggcagcagacgcacatgctggatgtcatgcaggaccacttcagccgcgcgtccagcatcatagacgagctcttccaggacaggttcttcacccgggagccccaggatacctaccactacctgcccttcagcctgccccaccggaggcctcacttcttctttcccaagtcccgcatcgtccgcagcttgatgcccttctctccgtacgagcccctgaacttccacgccatgttccagcccttccttgagatgatacacgaggctcagcaggccatggacatccacttccacagcccggccttccagcacccgccaacagaattcatacgagaaggcgacgatgaccggactgtgtgccgggagatccgccacaactccacgggctgcctgcggatgaaggaccagtgtgacaagtgccgggagatcttgtctgtggactgttccaccaacaacccctcccaggctaagctgcggcgggagctcgacgaatccctccaggtcgctgagaggttgaccaggaaatacaacgagctgctaaagtcctaccagtggaagatgctcaacacctcctccttgctggagcagctgaacgagcagtttaactgggtgtcccggctggcaaacctcacgcaaggcgaagaccagtactatctgcgggtcaccacggtggcttcccacacttctgactcggacgttccttccggtgtcactgaggtggtcgtgaagctctttgactctgatcccatcactgtgacggtccctgtagaagtctccaggaagaaccctaaatttatggagaccgtggcggagaaagcgctgcaggaataccgcaaaaagcaccgggaggagtgagatgtggatgttgcttttgcaccttacgggggcatcttgagtccagctccccccaagatgagctgcagccccccagagagagctctgcacgtcaccaagtaaccaggccccagcctccaggcccccaactccgcccagcctctccccgctctggatcctgcactctaacactcgactctgctgctcatgggaagaacagaattgctcctgcatgcaactaattcaataaaactgtcttgtgagctgaaaaaaaaaaaaaaaaaaaaaaaaaaggaattc

SEQ ID NO: 5937 - DNA, 600 bp, Homo sapiens
aaattttgtggtggtttccttataagacggaactttgtgctgacggctgctcattgtgcaggaaggtctataacagtcacccttggagcccataacataacagaggaagaagacacatggcagaagcttgaggttataaagcaattccgtcatccaaaatataacacttctactcttcaccacgatatcatgttactaaagttgaaggagaaagccagcctgaccctggctgtggggacactccccttcccatcacaattcaactttgtcccacctgggagaatgtgccgggtggctggctggggaagaacaggtgtgttgaagccgggctcagacactctgcaagaggtgaagctgagactcatggatccccaggcctgcagccacttcagagactttgaccacaatcttcagctgtgtgtgggcaatcccaggaagacaaaatctgcatttaagggagactctgggggccctcttctgtgtgctggggtggcccagggcatcgtatcctatggacggtcggatgcaaagccccctgctgtcttcacccgaatctcccattaccggccctggatcaaccagatcctgcaggcaaattaa

SEQ ID NO: 5938 - DNA, 600 bp, Homo sapiens
aggatggctgcacgaaacataccggtaagtggggcaagactgttatcgagtaccggtcacagaagacctcacgcctccccatcattgacattgcacccatggacataggagggcccgagcaggaattcggtgtggacatagggccggtctgcttcttgtaaaaacctgaacccagaaacaacacaatccgttgcaaacccaaaggacccaagtactttccaatctcagtcactctaggactctgcactgaatggctgacctgacctgatgtccattcatcccaccctctcacagttcggacttttctcccctctctttctaagagacctgaactgggcagactgcaaaataaaatctcggtgttctatttatttattgtcttcctgtaagaccttcgggtcaaggcagaggcaggaaactaactggtgtgagtcaaatgccccctgagtgactgcccccagcccaggccagaagacctcccttcaggtgccgggcgcaggaactgtgtgtgtcctacacaatggtgctattctgtgtcaaacacctctgtattttttaaaacatcaattgatattaaaaatgaaaagattattggaaagt

SEQ ID NO: 5939 - DNA, 1400 bp, Homo sapiens
tcgctgcagttcctgcagaactacacggccctggccagtgccgtcgatgccatggactttatcaacgacgccaccgacgtcaacgatgccctgggctatgtgacccgcttctaccgcgaggcctcgtccggcgctgccaagaagaggctgctgctcttctcagatggcaactcgcagggcgccacgcccgctgccatcgagaaggccgtgcaggaagcccagcgggcaggcatcgagatcttcgtggtggtcgtgggccgccaggtgaatgagccccacatccgcgtcctggtcaccggcaagacggccgagtacgacgtggcctacggcgagagccacctgttccgtgtccccagctaccaggccctgctccgcggtgtcttccaccagacagtctccaggaaggtggcgctgggctagcccaccctgcacgccggcaccaaaccctgtcctcccacccctccccactcatcactaaacagagcccaagcttggaaagccaggacacaacgctgctgcctgctttgtgcagggtcctccggggctcagccctgagttggcatcacctgcgcagggccctctggggctcagctctgagctagtgtcacctgcacagggccctctgaggctcagccctgagctggcgtcacctgtgcagggccctctggggctcagccctgagctggcctcacctgggttccccaccccgggctctcctgccctgccctcctgcccgccctccctcctgcctgcgcagctccttccctaggcacctctgtgctgcatcccaccagcctgagcaagacgcctctcggggcctgtgccgcactagcctccctctcctctgtccccatagctggtttttcccaccaatcctcacctaacagttactttacaattaaactcaaagcaagctcttctcctcagcttggggcagccattggcctctgtctcgttttgggaaaccaaggtcaggaggccgttgcagacataaatctcggcgactcggccccgtctcctgagggtcctgctggtgaccggcctggaccttggccctacagccctggaggccgctgctgaccagcactgaccccgacctcagagagtactcgcaggggcgctggctgcactcaagaccctcgagattaacggtgctaaccccgtctgctcctccctcccgcagagactggggcctggactggacatgagagccccttggtgccacagagggctgtgtcttactagaaacaacgcaaacctctccttcctcagaatagtgatgtgttcgacgttttatcaaaggccccctttctatgttcatgttagttttgctccttctgtgtttttttctgaaccatatccatgttgctgacttttccaaataaaggttttcactcctc

SEQ ID NO: 5940 - DNA, 1400 bp, Homo sapiens
cagggacgcgtgtgggcgtggtgcagtacagccacgagggcacctttgaggccatccagctggacgacgaacatatcgactccctgtcgagcttcaaggaggctgtcaagaacctcgagtggattgcgggcggcacctggacaccctcagccctcaagtttgcctacgaccgcctcatcaaggagagccggcgccagaagacacgtgtgtttgcggtggtcatcacggacgggcgccacgaccctcgggacgatgacctcaacttgcgggcgctgtgcgatcgcgacgtcacagtgacggccatcggcatcggggacatgttccacgagaagcacgagagtgaaaacctctactccatcgcctgcgacaagccacagcaggtgcgcaacatgacgctgttctccgacctggtcgctgagaagttcatcgatgacatggaggacgtcctctgcccggaccctcagatcgtgtgcccagaccttccctgccaaacagagctgtccgtggcacagtgcacgcagcggcccgtggacatcgtcttcctgctggacggctccgagcggctgggtgagcagaacttccacaaggcccggcgcttcgtggagcaggtggcgcggcggctgacgctggcccggagggacgacgaccctctcaacgcacgcgtggcgctgctgcagtttggtggccccggcgagcagcaggtggccttcccgctgagccacaacctcactgccatccacgaggcgctggagaccacacaatacctgaactccttctcgcacgtgggcgcaggcgtggtgcacgccatcaatgccatcgtgcgcagcccgcgtggcggggcccggaggcacgcagagctgtccttcgtgttcctcacggacggcgtcacgggcaacgacagtctgcacgagtcggcgcactccatgcgcaagcagaacgtggtacccaccgtgctggccttgggcagcgacgtggacatggacgtgctcaccacgctcagcctgggtgaccgcgccgccgtgttccacgagaaggactatgacagcctggcgcaacccggcttcttcgaccgcttcatccgctggatctgctagcgccgccgcccgggccccgcagtcgagggtcgtgagcccaccccgtccatggtgctaagcgggcccgggtcccacacggccagcaccgctgctcactcggacgacgccctgggcctgcacctctccagctcctcccacggggtccccgtagccccggcccccgcccagccccaggtctccccaggccctccgcaggctgcccggcctccctccccctgcagccatcccaaggctcctgacctacctggcccctgagctctggagcaagccctgacccaataaaggctttgaacccaaaaaaaaaaa

SEQ ID NO: 5941 - DNA, 1400 bp, Homo sapiens
gacccaggggtggccggcctccccggagagaaaggcgagaagggcgagtccggcgagccggggcccaagggacagcaaggagtacgtggagaacccggctaccctggccccagcggggatgcgggcgccccaggggttcagggctaccctggtccccccggccctcgaggactggccgggaaccgaggcgtgccaggacagcccgggagacagggcgtggagggccgggatgccactgaccagcacatcgtggatgtggcgctgaagatgctgcaagagcaactggcagaggtcgccgtgagtgccaagcgggaagccctgggtgcggtgggcatgatgggtcctccaggacctcctgggccccctgggtacccaggcaagcagggcccccatgggcaccctggccctcggggcgttcctggcatcgtgggagccgtgggtcagatcggcaacacggggcccaagggaaaacgtggagagaagggtgatccaggagaagtgggacgggggcaccccgggatgcctgggcccccagggatcccaggactccctggccggcctggccaggcaatcaacggcaaggatggagatcgagggtccccaggggctccaggagaggcaggtcgacctggcctgccaggccccgtggggctgccgggcttctgtgaacctgccgcctgccttggagcttcggcctatgcctctgcccgccttacagagcctggatccatcaaggggccttgagcatcaggcccagacagagcctggaggcatcctggcgggaaggaccaggtcccctctggtggacatgcacccatccccagtccaggaaaccatctcccccaggaccttctgtctgggactcaggagtcctaaggaaaaggaattctaaaacatgggggaaggggaggtagagcactgatgggtgaaaaagtgaggccaacacacagggcaagtggtgtcgatggagtcgaagcgctgaaggaatagggcggctttccttccagcgagcatcattcggctgttaccaaaacaaacatcttaatctgcaccttcctccactggccatcttgtccttgggtcagtgggacatgggcacctcgggaggcccgggccctgcccagctacagttccacccctcagcttgaggaccaatactgaggtctatgccagttcctgatcccatctcactctctggacctactaggtgactgctgctggggtgactcccctgaggcggctatacccttaagccagccccactacttccttccctgcctcccagctcagtatttaaacatcatctcccttctctttctcgcataactccccacccctttctccccgatccacccaggcctttctgtaaataaaagctcccaagttgggtacaaaccagg

SEQ ID NO: 5942 - DNA, 1400 bp, Homo sapiens
gcccctctggagagccaggcgtccctggagatgctggcatgcctggggagcgcggtgaggctggccaccggggctcagcgggggccctcggcccacaaggccctcccggagcccctggtgtccgaggcttccagggccagaagggcagcatgggagaccccggccttccaggcccccagggcctccgaggtgacgtgggcgaccggggtccgggaggtgccgcaggccctaagggagaccagggtattgcaggttccgacggtcttcctggggataaaggagaactgggtcccagcggcctggtcggacccaaaggagagtctggcagtcgaggggagctgggccccaaaggcacccagggtcccaacggcaccagcggtgttcagggtgtccccgggccccccggtcctctgggcctgcagggcgtcccgggtgttcctggcatcacggggaagccgggagttccggggaaggaggccagcgagcagcgcatcagggagctgtgtggggggatgatcagcgaacaaattgcacagttagccgcgcacctaaggaagcctttggcacccgggtccattggtcggcccggtccagctggcccccctgggcccccaggacccccaggctccattggtcaccctggcgctcgaggaccccctggataccgcggtcccactggggagctgggagaccccgggcccagaggaaaccagggtgacagaggagacaaaggcgcggcaggagcagggctggacgggcctgaaggagaccaggggccccaaggaccccaaggcgtgcccggcaccagcaaggacggccaggacggtgctcccggcgagcctgggcctcccggagatcctgggcttccaggtgccattggggcccaggggacaccggggatctgcgacacctcagcctgccaaggagccgtgttaggaggggtcggggagaaatcaggctctcgaagctcataaaattcaacgtgaggaagcaagtgacaaggacgcccgaagcacagtggacggtcatgaaggagcgggggtgtggcaggcgggtgacgtccaggagagggagcgcccctggctgcccctcggccgccgactggacgcgcgggccttgccagcgagcaccctcatcgggctgtcgcctgacagcatacctcaaaaggccctagctaataaacctgtaagcccagcatttgagagaaggtagggtgtgtatatataaaaggttgtgtacaactccacgaggtgaaaaatattcagtaacttgtttacatagcatttgtgtaaagactatgatctcatcccaataaaatgatatattaaaccttcagattaatgactggctacagagtaacaaaaaataaagaatttaatgtacagtaaattctctcccat

SEQ ID NO: 5943 - DNA, 1400 bp, Homo sapiens
gcctccaggtccacctggtgaagtcattcagcctttaccaatcttgtcctccaaaaaaacgagaagacatactgaaggcatgcaagcagatgcagatgataatattcttgattactcggatggaatggaagaaatatttggttccctcaattccctgaaacaagacatcgagcatatgaaatttccaatgggtactcagaccaatccagcccgaacttgtaaagacctgcaactcagccatcctgacttcccagatggtgaatattggattgatcctaaccaaggttgctcaggagattccttcaaagtttactgtaatttcacatctggtggtgagacttgcatttatccagacaaaaaatctgagggagtaagaatttcatcatggccaaaggagaaaccaggaagttggtttagtgaatttaagaggggaaaactgctttcatacttagatgttgaaggaaattccatcaatatggtgcaaatgacattcctgaaacttctgactgcctctgctcggcaaaatttcacctaccactgtcatcagtcagcagcctggtatgatgtgtcatcaggaagttatgacaaagcacttcgcttcctgggatcaaatgatgaggagatgtcctatgacaataatccttttatcaaaacactgtatgatggttgtacgtccagaaaaggctatgaaaagactgtcattgaaatcaatacaccaaaaattgatcaagtacctattgttgatgtcatgatcaatgactttggtgatcagaatcagaagttcggatttgaagttggtcctgtttgttttcttggctaagattaagacaaagaacatatcaaatcaacagaaaatataccttggtgccaccaacccattttgtgccacatgcaagttttgaataaggatggtatagaaaacaacgctgcatatacaggtaccatttaggaaataccgatgcctttgtgggggcagaatcacatggcaaaagctttgaaaatcataaagatataagttggtgtggctaagatggaaacagggctgattcttgattcccaattctcaactctccttttcctatttgaatttctttggtgctgtagaaaacaaaaaaagaaaaatatatattcataaaaaatatggtgctcattctcatccatccaggatgtactaaaacagtgtgtttaataaattgtaattattttgtgtacagttctatactgttatctgtgtccatttccaaaacttgcacgtgtccctgaattccatctgactctaattttatgagaattgcagaactctgatggcaataaatatatgtattatgaaaaaataaagttgtaatttctgatgactctaagtccctttctttggttaataataaaatgcctttgtatat

SEQ ID NO: 5944 - DNA, 600 bp, Homo sapiens
agattctgccactgcatccttcagacagttatatcctccttttaaaccattgttgttgagtgtaagatgtccttcatgttttcttataaagtcagtgtttagaaatgttaccctttctaagttatatacagatcaaatgcttttttctttcacgtacatccatcatttgcaactgctgttcgtacacagaaacaggactgctcaaatgatcctatttgtattttctgatgctatcagactctaatgtttttttccctaaaatattattgccatcatgctttaggaatttttatatttttacacaatcatattttagtatggtgtctgtttatgtaactctgacttgctggaaaagttgaaactccaaataatctgaaactagaaaagaaatagcacataattactaccttccccttggcggctctcctcccccaacccccaccccacaattttatgacttccatttggcaattgttgaattataactgcgactgaaacaaacaggttcatagagatgaattttctgagaaacatatatctacatgttgtataattggattttttttccatgtaagtgaacataaaaacatcttttccggg

SEQ ID NO: 5945 - DNA, 1400 bp, Homo sapiens
ggactcaagatagcccgagagagcctgctgcgtaagtcacaagtcagcattcgctacaattccatgcctgtcccaggaccaaatggaaccatccttatggagacacacaaaactgttgggcaacagatgctgagctttcctcacctcctgcaaacagtgctgcacatcatccaggtggtcataagctacttcctcatgctcatcttcatgacctacaacgggtacctctgcattgcagtagcagcaggggccggtacaggatacttcctcttcagctggaagaaggcagtggtagtggatatcacagagcattgccattgacatcaaactctatggcgtggccttatcgattgcagtgggaagttgttgaagacttgaagacgtgattcctgctccaatcatcccttcttgctcctctttgtgcacgtacacacacacacacacacacacacacacacacacacccctgctcaacagaggtttagtttacagtctctgaactaaagtagtaacctcccaaattgttttttctaataagctgagattcccatttctcttaaggagaagccacccatgagatgtcttttccttctccatcatcttagagccaagttatatgttcttgtctaatccatgtagctttttgttcaatgacttgatcatctgcttcctttttgaatttttaacagatagtaagtaaatttggtggttttttcccctgggtcagtgatggaaaggggttaacttcagccaggattgatggcagctgagggaaattcttgcccaactaaacccagaactcaaacttaacattagaaaataaggtccagggccggacacagtggcccatgcctgtaatcccagcactttggggggccaaggcaggctggatcacctgaggacaggagttcgagaccagtctggccaacatggggaaaccccgtctctactaaaaatacaaaaattagccgggcatggtggtgggcgcctgtaatcccagctactcagaaggctgaggcaggagaatcacttgaacctaggaggcggaggttgcagtgagccaagatggcgccattgcactccagcctgggtgacaagagtgaaactccatctcaaaaaaaaagaaaagaaggtccagcttttggattcaatgagtgggaaatacattgtgcctttctctagatgtgatacgttataccaaaatctttgtagtgtgcagagcggtggtttgagactaaatacaggcttagaacttgcagagtgtgtattcttggatggctgatgcatcgacttgcattcccacttaacactttgattagccatgaacttgccaatcaaaaaatgacaatcaatttgagaaaatagaaatagatatttttaaataaaaccattcacagttt

SEQ ID NO: 5946 - DNA, 802 bp, Homo sapiens; identical to SEQ ID NO: 711

SEQ ID NO: 5947 - DNA, 578 bp, Homo sapiens; identical to SEQ ID NO: 712

SEQ ID NO: 5948 - DNA, 448 bp, Homo sapiens; identical to SEQ ID NO: 713

SEQ ID NO: 5949 - DNA, 1380 bp, Homo sapiens; identical to SEQ ID NO: 714

SEQ ID NO: 5950 - DNA, 600 bp, Homo sapiens
cggaagacccggtccaaggtatctggaagcctctgtgttggtgtggatcctaaccggaactgggatgcaggttttggaggacctggagccagcagcaacccttgctctgattcataccacggacccagtgccaactctgaagttgaagtgaaatccatagtggacttcatcaagagtcatggaaaagtcaaggccttcattatcctccacagctattcccagctgctgatgttcccctatgggtacaaatgtaccaagttagatgactttgatgagctgagtgaagtggcccaaaaggctgcccaatctctgagaagcctgcatggcaccaagtacaaagtgggaccaatctgctctgtcatctaccaagccagtggaggaagcattgactggtcctatgattatggcatcaagtactcatttgcctttgaactgagagacacagggcgctacggcttcctcttgccagcccgtcagatcctgcccacagccgaggagacctggcttggcttgaaggcaatcatggagcatgtgcgagaccacccctattagggccctggggaagaaacaagagccattaaaatctctttggtttgaagc

SEQ ID NO: 5951 - DNA, 1400 bp, Homo sapiens
tcccaagccatccagtctgccttggatcaaaataaaatgcactatgaaatcttgattcatgatctacaagaagagattgagaaacagtttgatgttaaagaagatatcccaggcaggcacagctacgcaaaatacaataattgggaaaagattgtggcttggactgaaaagatgatggataagtatcctgaaatggtctctcgtattaaaattggatctactgttgaagataatccactatatgttctgaagattggggaaaagaatgaaagaagaaaggctatttttatggattgtggcattcacgcacgagaatgggtctccccagcattctgccagtggtttgtctatcaggcaaccaaaacttatgggagaaacaaaattatgaccaaactcttggaccgaatgaatttttacattcttcctgtgttcaatgttgatggatatatttggtcatggacaaagaaccgcatgtggagaaaaaatcgttccaagaaccaaaactccaaatgcatcggcactgacctcaacaggaattttaatgcttcatggaactccattcctaacaccaatgacccatgtgcagataactatcggggctctgcaccagagtccgagaaagagacgaaagctgtcactaatttcattagaagccacctgaatgaaatcaaggtttacatcaccttccattcctactcccagatgctattgtttccctatggatatacatcaaaactgccacctaaccatgaggacttggccaaagttgcaaagattggcactgatgttctatcaactcgatatgaaacccgctacatctatggcccaatagaatcaacaatttacccgatatcaggttcttctttagactgggcttatgacctgggcatcaaacacacatttgcctttgagctccgagataaaggcaaatttggttttctccttccagaatcccggataaagccaacgtgcagagagaccatgctagctgtcaaatttattgccaagtatatcctcaagcatacttcctaaagaactgccctctgtttggaataagccaattaatccttttttgtgcctttcatcagaaagtcaatcttcagttatccccaaatgcagcttctatttcacctgaatccttctcttgctcatttaagtcccatgttactgctgtttgcttttacttactttcagtagcaccataacgaagtagctttaagtgaaaccttttaactacctttctttgctccaagtgaagtttggacccagcagaaagcattattttgaaaggtgatatacagtggggcacagaaaacaaatgaaaaccctcagtttctcacagattttcaccatgtggcttcatcaatttatgtgctaatacaataaaataaaatgcactt

SEQ ID NO: 5952 - DNA, 600 bp, Homo sapiens
gctccacccatactggatctagcattggcacagaccccaacagaaattttgatgctggttggtgtgaaattggagcctctcgaaacccctgtgatgaaacttactgtggacctgccgcagagtctgaaaaggagaccaaggccctggctgatttcatccgcaacaaactctcttccatcaaggcatatctgacaatccactcgtactcccaaatgatgatctacccttactcatatgcttacaaactcggtgagaacaatgctgagttgaatgccctggctaaagctactgtgaaagaacttgcctcactgcacggcaccaagtacacatatggcccgggagctacaacaatctatcctgctgctgggggctctgacgactgggcttatgaccaaggaatcagatattccttcacctttgaacttcgagatacaggcagatatggctttctccttccagaatcccagatccgggctacctgcgaggagaccttcctggcaatcaagtatgttgccagctacgtcctggaacacctgtactagttgagaaagctgatggccttgtttcaaaattctcatttttcatttcttttctttcttg

SEQ ID NO: 5953 - DNA, 1400 bp, Homo sapiens
tcttattcaacagcagatttccaacgacacagtcagcccccgagcctccgcatcgtactatgaacagtatcactcactaaatgaaatctattcttggatagaatttataactgagaggcatcctgatatgcttacaaaaatccacattggatcctcatttgagaagtacccactctatgttttaaaggtttctggaaaagaacaaacagccaaaaatgccatatggattgactgtggaatccatgccagagaatggatctctcctgctttctgcttgtggttcataggccatataactcaattctatgggataatagggcaatataccaatctcctgaggcttgtggatttctatgttatgccggtggttaatgtggacggttatgactactcatggaaaaagaatcgaatgtggagaaagaaccgttctttctatgcgaacaatcattgcatcggaacagacctgaataggaactttgcttccaaacactggtgtgaggaaggtgcatccagttcctcatgctcggaaacctactgtggactttatcctgagtcagaaccagaagtgaaggcagtggctagtttcttgagaagaaatatcaaccagattaaagcatacatcagcatgcattcatactcccagcatatagtgtttccatattcctatacacgaagtaaaagcaaagaccatgaggaactgtctctagtagccagtgaagcagttcgtgctattgagaaaactagtaaaaataccaggtatacacatggccatggctcagaaaccttatacctagctcctggaggtggggacgattggatctatgatttgggcatcaaatattcgtttacaattgaacttcgagatacgggcacatacggattcttgctgccggagcgttacatcaaacccacctgtagagaagcttttgccgctgtctctaaaatagcttggcatgtcattaggaatgtttaatgcccctgattttatcattctgcttccgtattttaatttactgattccagcaagaccaaatcattgtatcagattatttttaagttttatccgtagttttgataaaagattttcctattccttggttctgtcagagaacctaataagtgctactttgccattaaggcagactagggttcatgtctttttaccctttaaaaaaaattgtaaaagtctagttacctactttttctttgattttcgacgtttgactagccatctcaagcaactttcgacgtttgactagccatctcaagcaagtttaatcaaagatcatctcacgctgatcattggatcctactcaacaaaaggaagggtggtcagaagtacattaaagatttctgctccaaattttcaataaatttctgcttgtgcctttagaaataca

SEQ ID NO: 5954 - DNA, 1400 bp, Homo sapiens
cttgtggccaattatccatatgatgagacgcggagtggtagtgctcacgaatacagctcctccccagatgacgccattttccaaagcttggcccgggcatactcttctttcaacccggccatgtctgaccccaatcggccaccatgtcgcaagaatgatgatgacagcagctttgtagatggaaccaccaacggtggtgcttggtacagcgtacctggagggatgcaagacttcaattaccttagcagcaactgttttgagatcaccgtggagcttagctgtgagaagttcccacctgaagagactctgaagacctactgggaggataacaaaaactccctcattagctaccttgagcagatacaccgaggagttaaaggatttgtccgagaccttcaaggtaacccaattgcgaatgccaccatctccgtggaaggaatagaccacgatgttacatccgcaaaggatggtgattactggagattgcttatacctggaaactataaacttacagcctcagctccaggctatctggcaataacaaagaaagtggcagttccttacagccctgctgctggggttgattttgaactggagtcattttctgaaaggaaagaagaggagaaggaagaattgatggaatggtggaaaatgatgtcagaaactttaaatttttaaaaaggcttctagttagctgctttaaatctatctatataatgtagtatgatgtaatgtggtcttttttttagattttgtgcagttaatacttaacattgatttattttttaatcatttaaatattaatcaactttccttaaaataaatagcctcttaggtaaaaatataagaacttgatatatttcattctcttatatagtattcattttcctacctatattacacaaaaaagtatagaaaagatttaagtaattttgccatcctaggcttaaatgcaatattcctggtattatttacaatgcagaattttttgagtaattctagctttcaaaaattagtgaagttcttttactgtaattggtgacaatgtcacataatgaatgctattgaaaaggttaacagatacagctcggagttgtgagcactctactgcaagacttaaatagttcagtataaattgtcgtttttttcttgtgctgactaactataagcatgatcttgttaatgcatttttgatgggaagaaaaggtacatgtttacaaagaggttttatgaaaagaataaaaattgacttcttgcttgtacatataggagcaatactattatattatgtagtccgttaacactacttaaaagtttagggttttctcttggttgtagagtggcccagaattgcattctgaatgaataaaggttaaaaaaaaatccccagtgaaaaaaaa

SEQ ID NO: 5955 - DNA, 600 bp, Homo sapiens
ctctagtgggaccttgactggagaaactccacgatcttcctgaagaagagaaatggatgtttccaaattccacaataagcaatatgtggtgataatgaaaagaatgattcagtcttgacggtgaatggaagacacttacctaacaagtactgctcatttacactcaaattaatcttgaagtagtcttaaaatgtgtaagaagttaaaacttgagaagcaaaaaatgcctgcaaaaagaagatcattttgtatacagagaaccggatgaatataagcaatgaagatgaacatttattgatcttctacatacaagacttcaccataaggccaggagcagtgctcacgccttgtaatcccagcactttgggaggccaaggtgggcggatcaccttgaggtcaggagttcaagaccagcctgaccaacatggtgaaaccctgtctctactaaatattagcggggtgtggtggcgggcacctgtagtcgcagcctttcgggaggctgagacaggagaatcgcttgaaccctagaggcggagtttgcagtgagccgagatagtgccattgtactccagcttgggcaacagagtaagactctgtctc

SEQ ID NO: 5956 - DNA, 600 bp, Homo sapiens
gatcagaagctccaagttcctgtcttctgttttatagaaattgatcttccctgggggactttaactcttgacctgtatgcagctgttggagtaattccaggtctcttgaaaaaaaagaggaagataatggagaatgagaacatatatatatatatattaagccccaggctgaatacccagggacagcaattcacagcctgcctctggttctataaacaagtcattctacctctttgtgccctgctgtttattctgtaaggggaaggtggcaatgggacccagctccatcagacacttgtcaagctagcagaaactccattttcaatgccaaagaagaactgtaatgctgttttggaatcatcccaaggcatcccaaaacaccatatcttcccatttcaagcactgcctgggcacaccccaacatcccaggctgtggtggctcctgtgggaactacctagatgaagagagtatcatttataccttctaggagctcctattgggagacatgaaacatatgtaattgactaccatgtaatagaacaaaccctgccaagtgctgctttggaaagtcatggaggtaaaagaaagacccgaaattc

SEQ ID NO: 5957 - DNA, 600 bp, Homo sapiens
agctgtacgacgcctggcggggcgggctggactggtgcaatgccggctggctcagtgatggctctgtgcaatatcccatcacaaagcccagagagccctgtgggggccagaacacagtgcccggagtcaggaactacggattttgggataaagataaaagcagatatgatgttttctgttttacatccaatttcaatggccgtttttactatctgatccaccccaccaaactgacctatgatgaagcggtgcaagcttgtctcaatgatggtgctcagattgcaaaagtgggccagatatttgctgcctggaaaattctcggatatgaccgctgtgatgcgggctggttggcggatggcagcgtccgctaccccatctctaggccaagaaggcgctgcagtcctactgaggctgcagtgcgcttcgtgggttttccagataaaaagcataagctgtatggtgtctactgcttcagagcatacaactgaatgtgcccttagagcgcactagttttaaagtcattaagaacatgtgaaaggtgttttttttttccaatatgaactcatgcaagttaccaaaactgtgataacccttttttac

SEQ ID NO: 5958 - DNA, 981 bp, Homo sapiens; identical to SEQ ID NO: 723

SEQ ID NO: 5959 - DNA, 600 bp, Homo sapiens
ttgttaaaaccttttgttttgaactatactgctttgagatctcatttcagaagaacggcatgaacagtcttcagccacagttgtgatggttgttaaatgctcacaattgtgcattcttagggtttttccatccctggggtttgcaagttgttcacttaaaacattcttaaaatggttggcttcttgtctgcaagccagctgatatggtagcaaccaaagattccagtgtttgagcatatgaaagactctgcctgcttaattgtgctagaaataacagcatctaaagtgaagacttaagaaaaacttagtgactactagattatccttaggactctgcattaactctataatgttcttggtattaaaaaaaaagcatatttgtcacagaaatttagttaacatcttacaactgaacatgtatgtatgttgcttagataaatgtaatcactgtaaacatctatatgatctgggattttgtttttattttgaaatgggagcttttttgtttacaagttcattaaaaactaaaaactgtttctgtaaaaaaaaaaaaaaaaaaaaaaaaaaaaaaaaaaaaaaaaaaaaaaaaaaaaaaaaaaa

SEQ ID NO: 5960 - DNA, 600 bp, Homo sapiens
ggctgcaccgcggggcccccgtcaacatctcctcgtccgacctcacaggccgacaagatacctctcgcatgtccacctcacagattcctggtcgggtggcttccagtggtcttcagtctgtcgtgcaccgatgagaactctccttattgctgtgaagggcagacaatgcatggctgatctactctgttaccaatggctttactagtgacacgtcccccggtctaggatcgaaatgttaacaccgggagctctccaggccactcacccagcgacgctcgtgggggaaacatactaaacggacagactccaagagctgccaccgctggggctgcactgcggccccccacgtgaactcggttgtaacggggctgggaagaaaagcagagagagaattgcagagaatcagactccttttccagggcctcagctccctccagtggtggccgccctgtactccctgacgattccactgtaactaccaatcttctacttggttaagacagttttgtatcattttgctaaaaattattggcttaaatctgtgtaaagaaaaaaaaaaaaaaaaaaaaaaaaaaaaaaaaaaaaaaaaaaaaaaaaaaa

SEQ ID NO: 5961 - DNA, 600 bp, Homo sapiens
  misc_feature (116)..(116): n is a, c, g, or t
cgcgcctgacccaggctgctaagagggcaaggagaaggaagtaccctggggagggaagggacagaggaagctattcctggcttttctactccaacccaggccaccctttgtctctnccccagagttgagaaaaaaacttcctcccctggttttttagggagatggtatcccctggagtagagggcaagaggagagagcgcctccagtctagaaggcataagccaataggataatatattcagggtgcagggtgggtaggttgctctggggatgggtttatttaagggagattgcaaggaagctatttaacatggtgctgagctagccaggactgatggagcccctgggggtgtgggatggaggagggtctgcagccagttcattcccagggccccatcttgatgggccaagggctaaacatgcatgtgtcagtggctttggagcaggctaggctggggctcatcgagggtctcaggccgaggccactgtagtgccagtgcccccctgaggactagggcaggcagctgggggcacttggttccatggagcctggataaacagtgctttggaggctctggaaaaaaaaaaaaaaaaaaaaaa

SEQ ID NO: 5962 - DNA, 1400 bp, Homo sapiens
catccgtactcccaaaatctccaagcctatcaagtttgagctttctggctgcaccagcatgaagacataccgagctaaattctgtggagtatgtaccgacggccgatgctgcaccccccacagaaccaccaccctgccggtggagttcaagtgccctgacggcgaggtcatgaagaagaacatgatgttcatcaagacctgtgcctgccattacaactgtcccggagacaatgacatctttgaatcgctgtactacaggaagatgtacggagacatggcatgaagccagagagtgagagacattaactcattagactggaacttgaactgattcacatctcatttttccgtaaaaatgatttcagtagcacaagttatttaaatctgtttttctaactgggggaaaagattcccacccaattcaaaacattgtgccatgtcaaacaaatagtctatcttccccagacactggtttgaagaatgttaagacttgacagtggaactacattagtacacagcaccagaatgtatattaaggtgtggctttaggagcagtgggagggtaccagcagaaaggttagtatcatcagatagctcttatacgagtaatatgcctgctatttgaagtgtaattgagaaggaaaattttagcgtgctcactgacctgcctgtagccccagtgacagctaggatgtgcattctccagccatcaagagactgagtcaagttgttccttaagtcagaacagcagactcagctctgacattctgattcgaatgacactgttcaggaatcggaatcctgtcgattagactggacagcttgtggcaagtgaatttcctgtaacaagccagattttttaaaatttatattgtaaatattgtgtgtgtgtgtgtgtgtgtatatatatatatatatgtacagttatctaagttaatttaaagttgtttgtgcctttttatttttgtttttaatgctttgatatttcaatgttagcctcaatttctgaacaccataggtagaatgtaaagcttgtctgatcgttcaaagcatgaaatggatacttatatggaaattctctcagatagaatgacagtccgtcaaaacagattgtttgcaaaggggaggcatcagtgtccttggcaggctgatttctaggtaggaaatgtggtagctcacgctcacttttaatgaacaaatggcctttattaaaaactgagtgactctatatagctgatcagttttttcacctggaagcatttgtttctactttgatatgactgtttttcggacagtttatttgttgagagtgtgaccaaaagttacatgtttgcacctttctagttgaaaataaagtatattttttctaaaaaaaaaaaaaaacgacagcaacggaattc

SEQ ID NO: 5963 - DNA, 600 bp, Homo sapiens
gtccaggtggtgaattttccaagaacatagtttaagttgattaaaaatgcttttagaatgcaggagcctacttctagctgtattttttgtatgcttaaataaaataaaattcataaccaagagatccacattagcttgttagtaatgctctgaccaagccgagatgccattctcttagtgatggcggcgttaggtttgagagaaggaattggctcaacttcagttgagagggtgcagtccagacagcttgactgcttttaaatgaccaaagatgacctgtggtaagcaacctggcatcttaggaagcagtccttgagaaggcatgttccagaaaggtctctgaggacaaactcactcagtaaaacataatgtatcatgaagaaaactgattctctatgacatgaaatgaaaattttaatgcattgttataattactaatgtacgctgctgcaggacattaataaagttgcttttttaggctacagtgtctcgatgccataatcagaacacactttttttcctctttctcccagcttcaaatgcacaattcatcattgggctcacttctaataactgcagtgtttccgccttgcgttgcag

SEQ ID NO: 5964 - DNA, 600 bp, Homo sapiens
gtcgtggctggggagtttgaccagggctctgacgaggagaacatccaggtcctgaagatcgccaaggtcttcaagaaccccaagttcagcattctgaccgtgaacaatgacatcaccctgctgaagctggccacacctgcccgcttctcccagacagtgtccgccgtgtgcctgcccagcgccgacgacgacttccccgcggggacactgtgtgccaccacaggctggggcaagaccaagtacaacgccaacaagacccctgacaagctgcagcaggcagccctgcccctcctgtccaatgccgaatgcaagaagtcctggggcaggaggatcaccgacgtgatgatctgtgccggggccagtggcgtctcctcctgcatgggcgactctggcggtcccctggtctgccaaaaggatggagcctggaccctggtgggcattgtgtcctggggcagcgacacctgctccacctccagccctggcgtgtacgcccgtgtcaccaagctcataccttgggtgcagaagatcctggctgccaactgagcccgcggctccctccgaccctgctccccacagagcctcagtaaacccatggaacac

SEQ ID NO: 5965 - DNA, 1184 bp, Homo sapiens; identical to SEQ ID NO: 730

SEQ ID NO: 5966 - DNA, 1400 bp, Homo sapiens
atgctgtggcagcatgtgtggggacggctgtaatggtggctatcctgctgaagcttggaacttctggacaagaaaaggcctggtttctggtggcctctatgaatcccatgtagggtgcagaccgtactccatccctccctgtgagcaccacgtcaacggctcccggcccccatgcacgggggagggagatacccccaagtgtagcaagatctgtgagcctggctacagcccgacctacaaacaggacaagcactacggatacaattcctacagcgtctccaatagcgagaaggacatcatggccgagatctacaaaaacggccccgtggagggagctttctctgtgtattcggacttcctgctctacaagtcaggagtgtaccaacacgtcaccggagagatgatgggtggccatgccatccgcatcctgggctggggagtggagaatggcacaccctactggctggttgccaactcctggaacactgactggggtgacaatggcttctttaaaatactcagaggacaggatcactgtggaatcgaatcagaagtggtggctggaattccacgcaccgatcagtactgggaaaagatctaatctgccgtgggcctgtcgtgccagtcctgggggcgagatcggggtagaaatgcattttattctttaagttcacgtaagatacaagtttcaggcagggtctgaaggactggattggccaaacatcagacctgtcttccaaggagaccaagtcctggctacatcccagcctgtggttacagtgcagacaggccatgtgagccaccgctgccagcacagagcgtccttccccctgtagactagtgccgtgggagtacctgctgcccagctgctgtggccccctccgtgatccatccatctccagggagcaagacagagacgcaggatggaaagcggagttcctaacaggatgaaagttcccccatcagttcccccagtacctccaagcaagtagctttccacatttgtcacagaaatcagaggagagatggtgttgggagccctttggagaacgccagtctccaggtccccctgcatctatcgagtttgcaatgtcacaacctctctgatcttgtgctcagcatgattctttaatagaagttttatttttcgtgcactctgctaatcatgtgggtgagccagtggaacagcgggagcctgtgctggtttgcagattgcctcctaatgacgcggctcaaaaggaaaccaagtggtcaggagttgtttctgacccactgatctctactaccacaaggaaaatagtttaggagaaaccagcttttactgtttttgaaaaattacagcttcaccctgtcaagttaacaaggaatgcctgtgccaataaaaggtttctccaacttga

SEQ ID NO: 5967 - DNA, 600 bp, Homo sapiens
gctgatccagagcacagatctgtttcgtgcattggaagaccccacccaagcttggcagccgagctcgtgtatcctggggctcccttcatctccagggagtcccctccccggccctaccagcgcccgctgggctgagcccctaccccacaccaggccgtcctcccgggccctcccttggaaacctgccctgcctgagggcccctctgcccagcttgggcccagctgggctctgccaccctacctgttcagtgtcccgggcccgttgaggatgaggccgctagaggcctgaggatgagctggaaggagtgagaggggacaaaacccaccttgttggagcctgcagggtggtgctgggactgagccagtcccaggggcatgtattggcctggaggtggggttgggattgggggctggtgccagccttcctctgcagctgacctctgttgtcctccccttgggcggctgagagccccagctgacatggaaatacagttgttggcctccggcctcccctcaaaaaaaaaaaaaaaaaaaaaaaaaaaaaaaaaaaaaaaaaaaaaaaaaaaaaaaaaaaaaaaaaaaaaaaaaaaaaaaaaaaaa

SEQ ID NO: 5968 - DNA, 600 bp, Homo sapiens
aagcagagatcatggtataataaatccctttgcaactccactcagccctgacaacccatccacacacggccaggcctgtttatctacactgctgcccactcctctctccagctccacatgctgtacctggatcattctgaagcaaattccgagcattacatcattttgtccataaatatttctaacatccttaaatatacaatcggaattcaagcatctcccattgtcccacaaatgtttggctgtttttgtagttggattgtttgtattaggattcaagcaaggcccatatattgcatttatttgaaatgtctgtaagtctctttccatctacagagtttagcacatttgaacgttgctggttgaaatcccgaggtgtcatttgacatggttctctgaacttatctttcctataaaatggtagttagatctggaggtctgattttgtggcaaaaatacttcctaggtggtgctgggtacttcttgttgcatcctgtcaggaggcagataatgctggtgcctctctattggtaatgttaagactgctgggtgggtttggagttcttggctttaatcattcattacaaagttcagcatttt

SEQ ID NO: 5969 - DNA, 857 bp, Homo sapiens; identical to SEQ ID NO: 734

SEQ ID NO: 5970 - DNA, 1400 bp, Homo sapiens
tgctggccttgaggtggggaagccggggagggcagttgaggaccccgcggaggcgcgtgactggttgagcgggcaggccagcctccgagccgggtggacacaggttttaaaacatgaatcctacactcatccttgctgccttttgcctgggaattgcctcagctactctaacatttgatcacagtttagaggcacagtggaccaagtggaaggcgatgcacaacagattatacggcatgaatgaagaaggatggaggagagcagtgtgggagaagaacatgaagatgattgaactgcacaatcaggaatacagggaagggaaacacagcttcacaatggccatgaacgcctttggagacatgaccagtgaagaattcaggcaggtgatgaatggctttcaaaaccgtaagcccaggaaggggaaagtgttccaggaacctctgttttatgaggcccccagatctgtggattggagagagaaaggctacgtgactcctgtgaagaatcagggtcagtgtggttcttgttgggcttttagtgctactggtgctcttgaaggacagatgttccggaaaactgggaggcttatctcactgagtgagcagaatctggtagactgctctgggcctcaaggcaatgaaggctgcaatggtggcctaatggattatgctttccagtatgttcaggataatggaggcctggactctgaggaatcctatccatatgaggcaacagaagaatcctgtaagtacaatcccaagtattctgttgctaatgacaccggctttgtggacatccctaagcaggagaaggccctgatgaaggcagttgcaactgtggggcccatttctgttgctattgatgcaggtcatgagtccttcctgttctataaagaaggcatttattttgagccagactgtagcagtgaagacatggatcatggtgtgctggtggttggctacggatttgaaagcacagaatcagataacaataaatattggctggtgaagaacagctggggtgaagaatggggcatgggtggctacgtaaagatggccaaagaccggagaaaccattgtggaattgcctcagcagccagctaccccactgtgtgagctggtggacggtgatgaggaaggacttgactggggatggcgcatgcatgggaggaattcatcttcagtctaccagcccccgctgtgtcggatacacactcgaatcattgaagatccgagtgtgatttgaattctgtgatattttcacactggtaaatgttacctctattttaattactgctataaataggtttatattattgattcacttactgactttgcattttcgtttttaaaaggatgtataaatttttacctgtttaaataaaatttaatttcaaatgt

SEQ ID NO: 5971 - DNA, 600 bp, Homo sapiens
ggtgtgatgacttgtaactgtaatcccagttataggggaggctgaagcaggaggatcacttgaggccaggagtttgagaccagcctgggcaacatagtgagatcccatctcaaaaaacattatttttaaaattagcctggtggctcacgcctgtaatcccagcactttgggaggccgaggtggccagatcacctgaggtcaggagttcgagaccaccctggccaacatggtgaaaccccatctctacagttttgtaaaaatacaaaaattacctgggcctggtgcacaggcctgtagtcccagctacttgggaggctgaggcaggagaattgcttgagcccaagaggtggaggttacagtgagcagagatcacaccactgcactccagcctgggtggcagagcaacacttcgtctcagaaaaaaaaaaaaaaaccaaaaaccaaaaagccaagtgtggtggtgtgcacctatagtcccagctactcaggaagctgagacaagaggatcaattgagcccaggagttcaaagctgtagtgagctgtcattgtgccactatcctccagtatgggtgacagagtgagacctggtctctaaaaat

SEQ ID NO: 5972 - DNA, 600 bp, Homo sapiens
acaccaaaaaggcttcttattcgggtgtgagtcttttcagcaacccggtccagtactgggagatacagccatccaccttcagatgtgtctacgtgcgctctgccattcaactcggaaactataagtaattctcaagaaagccctcatttttataacctggcaaaatcttgttaatgtcattgctaaaaaataaataaaagctagatactggaaacctaactgcaatgtggatgttttacccacatgacttattatgcataaagccaaatttccagtttaagtaattgcctacaataaaaagaaattttgcctgccattttcagaatcatcttttgaagctttctgttgatgttaactgagctactagagatattcttatttcactaaatgtaaaatttggagtaaatatatatgtcaatatttagtaaagcttttcttttttaatttccaggaaaaaataaaaagagtatgagtcttctgtaattcattgagcagttagctcatttgagataaagtcaaatgccaaacactagctctgtattaatccccatcattactggtaaagcctcatttgaatgtgtgaattcaatacaggctatg

SEQ ID NO: 5973 - DNA, 1400 bp, Homo sapiens
cactacaacaacatcatggccctctacctgaagaccaagggcgacttcatcctggtgggcgaccttatgcgctcagtgctgctgcttgcctacaagcccatggaaggaaactttgaagagattgctcgagactttaatcccaactggatgagtgctgtggaaatcttggatgatgacaattttctgggggctgaaaatgcctttaacttgtttgtgtgtcaaaaggatagcgctgccaccactgacgaggagcggcagcacctccaggaggttggtcttttccacctgggcgagtttgtcaatgtcttttgccacggctctctggtaatgcagaatctgggtgagacttccacccccacacaaggctcggtgctcttcggcacggtcaacggcatgatagggctggtgacctcactgtcagagagctggtacaacctcctgctggacatgcagaatcgactcaataaagtcatcaaaagtgtggggaagatcgagcactccttctggagatcctttcacaccgagcggaagacagaaccagccacaggtttcatcgacggtgacttgattgagagtttcctggatattagccgccccaagatgcaggaggtggtggcaaacctacagtatgacgatggcagcggtatgaagcgagaggccactgcagacgacctcatcaaggttgtggaggagctaactcggatccattagccaagggcagggggcccctttgctgaccctccccaaaggctttgccctgctgccctccccctcctctccaccatcgtcttcttggccatgggaggcctttccctaagccagctgcccccagagccacagttcccctatgtggaagtggggcgggcttcatagagacttgggaatgagctgaaggtgaaacattttctccctggatttttaccagtctcacatgattccagccatcaccttagaccaccaagccttgattggtgttgccagttgtcctccttccggggaaggattttgcagttctttggctgaaaggaagctgtgcgtgtgtgtgtgtgtatgtgtgtgtgtgtatgtgtatctcacactcatgcattgtcctctttttatttagattggcagtgtagggagttgtgggtagtggggaagagggttaggagggtttcattgtctgtgaagtgagaccttccttttacttttcttctattgcctctgagagcatcaggcctagaggcctgactgccaagccatgggtagcctgggtgtaaaacctggagatggtggatgatccccacgccacagcccttttgtctctgcaaactgccttcttcggaaagaagaaggtgggaggatgtgaattgttagtttctgagttttaccaaataaagtagaatataagaagaaaaaaa

SEQ ID NO: 5974 - DNA, 600 bp, Homo sapiens
agcctgcagcacgtgctcttgccagtgctggaccgcgccacctgcaaccggcgcacgcaccacgacggcgccatcaccgagcgcttgatgtgcgcggagagcaatcgccgggacagctgcaagggtgactccgggggcccgctggtgtgcgggggcgtgctcgagggcgtggtcacctcgggctcgcgcgtttgcggcaaccgcaagaagcccgggatctacacccgcgtggcgagctatgcggcctggatcgacagcgtcctggcctagggtgccggggcctgaaggtcagggtcacccaagcaacaaagtcccgagcaatgaagtcatccactcctgcatctggttggtctttattgagcacctactatatgcagaaggggaggccgaggtgggaggatcattggatctcaggagttggagatcagcatgggccacgtagcgcgactccatctctacaaataaataaaaattagctgggcaattggcgggcatggaggtgggtgcttgtagttccagctactcaggaggctgaggtgggaggatgacttgaacgcaggaggctgaggctgcagtgagttgtgattgcaccactgccct

SEQ ID NO: 5975 - DNA, 767 bp, Homo sapiens; identical to SEQ ID NO: 740

SEQ ID NO: 5976 - DNA, 1400 bp, Homo sapiens
gtgttcaagtgtggaatagccgtggcgcctgtatcccggtgggagtactatgactcagtgtacacagaacgttacatgggtctcccaactccagaagacaaccttgaccattacagaaattcaacagtcatgagcagagctgaaaattttaaacaagttgagtacctccttattcatggaacagcagatgataacgttcactttcagcagtcagctcagatctccaaagccctggtcgatgttggagtggatttccaggcaatgtggtatactgatgaagaccatggaatagctagcagcacagcacaccaacatatatatacccacatgagccacttcataaaacaatgtttctctttaccttagcacctcaaaataccatgccatttaaagcttattaaaactcatttttgttttcattatctcaaaactgcactgtcaagatgatgatgatctttaaaatacacactcaaatcaagaaacttaaggttacctttgttcccaaatttcatacctatcatcttaagtagggacttctgtcttcacaacagattattaccttacagaagtttgaattatccggtcgggttttattgtttaaaatcatttctgcatcagctgctgaaacaacaaataggaattgtttttatggaggctttgcatagattccctgagcaggattttaatctttttctaactggactggttcaaatgttgttctcttctttaaagggatggcaagatgtgggcagtgatgtcactagggcagggacaggataagagggattagggagagaagatagcagggcatggctgggaacccaagtccaagcataccaacacgagcaggctactgtcagctcccctcggagaagagctgttcacagccagactggcacagttttctgagaaagactattcaaacagtctcaggaaatcaaatatgcaaagcactgacttctaagtaaaaccacagcagttgaaaagactccaaagaaatgtaagggaaactgccagcaacgcaggcccccaggtgccagttatggctataggtgctacaaaaacacagcaagggtgatgggaaagcattgtaaatgtgcttttaaaaaaaaatactgatgttcctagtgaaagaggcagcttgaaactgagatgtgaacacatcagcttgccctgttaaaagatgaaaatatttgtatcacaaatcttaacttgaaggagtccttgcatcaatttttcttatttcatttctttgagtgtcttaattaaaagaatattttaacttccttggactcattttaaaaaatggaacataaaatacaatgttatgtattattattcccattctacatactatggaatttctcccagtcatttaataaatgtgccttcattttttc

SEQ ID NO: 5977 - DNA, 600 bp, Homo sapiens
tgggtgaatttgaatcggcaaggcttcagctaccagtgtccccaggggcaggtgatagtggccgtgaggagcatcttcagtaagaaggaaggttctgacagacaatggaactacgcctgcatgcccacgccacagagcctcggggaacccacggagtgctggtgggaggagatcaacagggctggcatggaatggtaccagacgtgctccaacaatgggctggtggcaggattccagagccgctacttcgagtcagtgctggatcgggagtggcagttttactgttgtcgctacagcaagaggtgcccatattcctgctggctaacaacagaatatccaggtcactatggtgaggaaatggacatgatttcctacaattatgattactatatccgaggagcaacaaccactttctctgcagtggaaagggatcgccagtggaagttcataatgtgccggatgactgaatacgactgtgaatttgcaaatgtttagatttgccacataccaaatctgggtgaaaggaaaggggccctccagctttccactgcagagaaagtggttgttgctcctcggtatatgtaatcataattgtagatc

SEQ ID NO: 5978 - DNA, 1400 bp, Homo sapiens
ccttatttggagtgagaaatcaaggagacagagctgactgcatgatgagtctgaaggcatttgcaggatgagcctgaactggttgtgcagaacaaacaaggcattcatgggaattgttgtattccttctgcagccctccttctgggcactaagaaggtctatgaattaaatgcctatctaaaattctgatttattcctacattttctgttttctaatttgaccctaaaatctatgtgttttagacttagactttttattgccccccccccctttttttttgagacggagtctcgctctgacgcacaggctggagtgcagtggctccgatctctgctcactgaaagctccgcctcccgggttcatgccattctcctgcctcagcctcctgagtagctgggactacaggcgcccaccaccacgcccggctaattttttgtatttttaatagagacggggtttcactgtgttagccaggatggtctcgatctcctgacctcgtgatccgcctgcctcggcctcccaaagtgctgggattacaggcatgacccaccgctcccggccttgttttccgtttaaagtcgtcttcttttaatgtaatcattttgaacatgtgtgaaagttgatcatacgaattggatcaatcttgaaatactcaaccaaaagacagtcgagaagccagggggagaaagaactcagggcacaaaatattggtctgagaatggaattctctgtaagcctagttgctgaaatttcctgctgtaaccagaagccagttttatctaacggctactgaaacacccactgtgttttgctcactccctcactcaccgatcaaaacctgctacctccccaagactttactagtgccgataaactttctcaaagagcaaccagtatcacttccctgtttataaaacctctaaccatctctttgttctttgaacatgctgaaaaccacctggtctgcatgtatgcccgaatttgtaattcttttctctcaaatgaaaatttaattttagggattcatttctatattttcacatatgtagtattattatttccttatatgtgtaaggtgaaatttatggtatttgagtgtgcaagaaaatatatttttaaagctttcatttttcccccagtgaatgatttagaattttttatgtaaatatacagaatgttttttcttacttttataaggaagcagctgtctaaaatgcagtggggtttgttttgcaatgttttaaacagagttttagtattgctattaaaagaagttactttgcttttaaagaaacttggctgcttaaaataagcaaaaattggatgcataaagtaatatttacagatgtggggagatgtaataaaacaatattaacttggaaaaaaaaaaaaaaaaaaa

SEQ ID NO: 5979 - DNA, 600 bp, Homo sapiens
cagcttctaccttggtagatcagccttatgctaatgaaggtacagttgtggtcactgaaagagtaatacagcctcatgggggtggatcgaatcctctggaaggcactcagcatcttcaagatgtaccttacgtcatggtgagggaaagagagagcttccttgcccccagctcaggtgtgcagcctactctggccatgcctaatatagcagtaggacagaatgtgacagtgacagaaagagttctagcacctgcttccactctgcaatccagttaccagattcccactgaaaattctatgacggctaggaacaccacggtgtctggagctggagtccctggccctctgccagattttggtttagaggaatctggtcattctaattctaccataaccacatcttccaccagagtcaccaagcatagcactgtacagcattcttactcctaaacagcagtcagccacaaactgacccagagtttaattagcagtgactaatttcatgtttccaatgtacctgatttttcatgagccttacagacacacagagacacatacacattgatcttaaaatttttctcagtcactgatatgcaaagga

SEQ ID NO: 5980 - DNA, 1006 bp, Homo sapiens; identical to SEQ ID NO: 745

SEQ ID NO: 5981 - DNA, 961 bp, Homo sapiens; identical to SEQ ID NO: 746

SEQ ID NO: 5982 - DNA, 1400 bp, Homo sapiens
aggacctggaggaggaccacgcctgcatccccatcaagaaatctgacccggtcgtctcgtaccgcgagacggtcagtgaagagtcgaacgtgctctgcctctccaagtcccccaacaagcacaaccggctgtacatgaaggcgcggcccttccccgacggcctggccgaggacatcgataaaggcgaggtgtccgcccgtcaggagctcaagcagcgggcgcgctacctggccgagaagtacgagtgggacgtggctgaggcccgcaagatctggtgctttgggcccgacggcaccggccccaacatcctcaccgacatcaccaagggtgtgcagtacctcaacgagatcaaggacagtgtggtggccggcttccagtgggccaccaaggagggcgcactgtgtgaggagaacatgcggggtgtgcgcttcgacgtccacgacgtcaccctgcacgccgacgccatccaccgcggagggggccagatcatccccacagcacggcgctgcctctatgccagtgtgctgaccgcccagccacgcctcatggagcccatctaccttgtggagatccagtgtccagagcaggtggtcggtggcatctacggggttttgaacaggaagcggggccacgtgttcgaggagtcccaggtggccggcacccccatgtttgtggtcaaggcctatctgcccgtcaacgagtcctttggcttcaccgctgacctgaggtccaacacgggcggccaggcgttcccccagtgtgtgtttgaccactggcagatcctgcccggagaccccttcgacaacagcagccgccccagccaggtggtggcggagacccgcaagcgcaagggcctgaaagaaggcatccctgccctggacaacttcctggacaaattgtaggcggcccttcctgcagcgcctgccgccccggggactcgcagcacccacagcaccacgtcctcgaattctcagacgacacctggagactgtcccgacacagcgacgctcccctgagaggtttctggggcccgctgcgtgccatcactcaaccataacacttgatgccgtttctttcaatatttatttccagagtccggaggcagcagacacgccctcttagtagggacttaatgggccggtcggggagggggaggcgggatgggacacccaacactttttccatttcttcagagggaaactcagatgtccaaactaattttaacaaacgcattaagaggtttatttgggtacatggcccgcagtggcttttgccccagaaaggggaaaggaacacgcgggtagatgatttctagcaggcaggaagtcctgtgcggtgtcaccatgagcactcagctgtactagtgccattggaataataaatttgataaggtgtgaaaa

SEQ ID NO: 5983 - DNA, 1400 bp, Homo sapiens
gtggcttcccctccccgtcggtggccaccacgtactcctctgttccccctgctttcccggcccaggtcagcagcttcccttcctcagctgtcaccaactccttcagcgcctccacagggctttcggacatgacagcaaccttttctcccaggacaattgaaatttgctaaagggaaaggggaaagaaagggaaaagggagaaaaagaaacacaagagacttaaaggacaggaggaggagatggccataggagaggagggttcctcttaggtcagatggaggttctcagagccaagtcctccctctctactggagtggaaggtctattggccaacaatcctttctgcccacttccccttccccaattactattccctttgacttcagctgcctgaaacagccatgtccaagttcttcacctctatccaaagaacttgatttgcatggattttggataaatcatttcagtatcatctccatcatatgcctgaccccttgctcccttcaatgctagaaaatcgagttggcaaaatggggtttgggcccctcagagccctgccctgcacccttgtacagtgtctgtgccatggatttcgtttttcttggggtactcttgatgtgaagataatttgcatattctattgtattatttggagttaggtcctcacttgggggaaaaaaaaaaaaaaaagccaagcaaaccaatggtgatcctctattttgtgatgatgctgtgacaataagtttgaacctttttttttgaaacagcagtcccagtattctcagagcatgtgtcagagtgttgttccgttaacctttttgtaaatactgcttgaccgtactctcacatgtggcaaaatatggtttggtttttcttttttttttttgaaagtgttttttcttcgtccttttggtttaaaaagtttcacgtcttggtgccttttgtgtgatgccccttgctgatggcttgacatgtgcaattgtgagggacatgctcacctctagccttaaggggggcagggagtgatgatttgggggaggctttgggagcaaaataaggaagagggctgagctgagcttcggttctccagaatgtaagaaaacaaaatctaaaacaaaatctgaactctcaaaagtctatttttttaactgaaaatgtaaatttataaatatattcaggagttggaatgttgtagttacctactgagtaggcggcgatttttgtatgttatgaacatgcagttcattattttgtggttctattttactttgtacttgtgtttgcttaaacaaagtgactgtttggcttataaacacattgaatgcgctttattgcccatgggatatgtggtgtatatccttccaaaaaattaaaacgaaaataaagtagctgcgattggg

SEQ ID NO: 5984 - DNA, 1400 bp, Homo sapiens
tgaagcaccacatattgttgttggtacacccgggagagtgtttgatatgttaaacagaagatacctttctccaaaatggatcaaaatgtttgttttggatgaagcagatgaaatgttgagccgtggttttaaggatcaaatctatgagattttccaaaaactaaacacaagtattcaggttgtgtttgcttctgccacaatgccaactgatgtgttggaagtgaccaaaaaattcatgagagatccaattcgaattctggtgaaaaaggaagaattgacccttgaaggaatcaaacagttttatattaatgttgagagagaggaatggaagttggatacactttgtgacttgtacgagacactgaccattacacaggctgttatttttctcaatacgaggcgcaaggtggactggctgactgagaagatgcatgccagagacttcacagtttctgctctgcatggtgacatggaccagaaggagagagatgttatcatgagggaattccggtcagggtcaagtcgtgttctgatcactactgacttgttggctcgcgggattgatgtgcaacaagtgtctttggttataaattatgatctacctaccaatcgtgaaaactatattcacagaattggcagagggggtcgatttgggaggaaaggtgtggctataaactttgttactgaagaagacaagaggattcttcgtgacattgagactttctacaatactacagtggaggagatgcccatgaatgtggctgaccttatttaattcctgggatgagagttttggatgcagtgctcgctgttgctgaataggcgatcacaacgtgcattgtgcttctttctttgggaatatttgaatcttgtctcaatgctcataacggatcagaaatacagattttgatagcaaagcgacgttagtcgtgagctcttgtgaggaaagtcattggctttatcctctttagagttagactgttggggtgggtataaaagatggggtctgtaaaatctttctttcttagaaatttatttcctagttctgtagaaatggttgtattagatgttctctatcatttaataatatacttgtggactaaaagatataagtgctgtataaaatcagccaattatgttaaactagcatatctgcctttattgtgtttgtcattagcctgagtagaaaggcctttaaaatttttttagaaagcatttgaatgcattttgtttggtattgtatttattcaataaagtatttaattagtgctaagtgtgaactggaccctgttgctaagccccagcaagcaatcctaggtagggtttaatccccagtaaaattgccatattgcacatgtcttaatgaagtttgaatgttaaataaattgtatattcacttt

SEQ ID NO: 5985 - DNA, 1400 bp, Homo sapiens
agtcaacatggttgacgttgcaaaggcgcttaatcggcctccaacgtatcccaccaaatattttggttgtgagctgggagcacagacccagtttgatgttaagaatgaccgttacattgtcaatggatctcatgaggcgaataagctgcaagacatgttggatggattcattaaaaaatttgttctctgtcctgaatgtgagaatcctgaaacagatttgcatgtcaatccaaagaagcaaacaataggtaattcttgtaaagcctgtggctatcgaggcatgcttgacacacatcataaactctgcacattcattctcaaaaacccacctgagaatagtgacagtggtacaggaaagaaagaaaaagaaaagaaaaacagaaagggcaaagacaaggaaaatggctccgtatccagcagtgagacaccaccaccaccaccaccaccaaatgaaattaatcctcctccacatacaatggaagaagaggaggatgatgactcgggagaagatacaactgaggaagctcaaaggcgtcgaatggatgaaatcagtgaccatgcaaaagttctgacactcagtgatgatttggaaagaacaattgaggagagggtcaatatcctctttgattttgttaagaaaaagaaagaagagggtgttattgattcatctgacaaagaaatcgttgctgaagcagaaagactggatgtaaaagccatgggccctcttgttctaactgaagttctttttaatgagaagattagagaacagattaagaaatacaggcgccatttcctacgattttgtcacaacaacaaaaaagcccaacggtaccttcttcatggtttggagtgtgtggtagcaatgcatcaagctcagcttatctccaagattccacatatcttgaaggagatgtacgatgcagaccttttagaagaagaggtcatcatcagctggtcggaaaaggcctctaagaaatatgtctccaaagaacttgccaaagagattcgtgtcaaagcagaaccatttataaaatggttgaaggaggcagaggaagaatcttctggtggcgaagaagaagatgaagatgagaacattgaggtggtgtattcgaaggctgccagtgtaccgaaagttgagactgtaaagtcagacaacaaggatgacgacatcgatattgatgccatttaaagggatggatgcaacctagcttaacagtataatgctgcaaattttcctccattatcagccagaagtgcaacatgtatgtgcaaaagctaaaatggcttaacatcatgctacactttacactaaaaatctattactgtgagtgtgaaaaactagtggtggacacatttggatcacatttatacagttataaaaataaaggtttgattttggt

SEQ ID NO: 5986 - DNA, 1299 bp, Homo sapiens; identical to SEQ ID NO: 751

SEQ ID NO: 5987 - DNA, 600 bp, Homo sapiens
acagctgctcactgcgtggattaccagaagactttccgcgtggtggctggagaccataacctgagccagaatgatggcactgagcagtacgtgagtgtgcagaagatcgtggtgcatccatactggaacagcgataacgtggctgccggctatgacatcgccctgctgcgcctggcccagagcgttaccctcaatagctatgtccagctgggtgttctgccccaggagggagccatcctggctaacaacagtccctgctacatcacaggctggggcaagaccaagaccaatgggcagctggcccagaccctgcagcaggcttacctgccctctgtggactatgccatctgctccagctcctcctactggggctccactgtgaagaacaccatggtgtgtgctggtggagatggagttcgctctggatgccagggtgactctgggggccccctccattgcttggtgaatggcaagtattctctccatggagtgaccagctttgtgtccagccggggctgtaatgtctccaggaagcctacagtcttcacccaggtctctgcttacatctcctggataaataatgtcatcgcctccaactga

SEQ ID NO: 5988 - DNA, 920 bp, Homo sapiens; identical to SEQ ID NO: 753

SEQ ID NO: 5989 - DNA, 600 bp, Homo sapiens
atgggactgtaagccttcccgtaaatctcaggcttctggtgtatcggtatgggatgcagaactctggcaatgagatttcatggaactacactcttgagcaataccagaaaacttcattagctcaagaaaaagaaaaactgctgtatggattagcatcagtgaagaacgttactcttttgtcaaggtatttggatttgctcaaggacacgaaccttattaaaactcaggatgtgtttacagtcattcgatatatctcatataacagctatgggaagaacatggcctggaattggatacaactcaactgggactatctagtcaacagatatacactcaataacagaaaccttggccgaattgtcacaatagcagagccattcaacactgaactgcaactgtggcagatggagagcttttttgcaaaatatccacaagctggagcaggagaaaaacctagggaacaagtgctggaaacagtgaaaaacaatatagagtggctaaaacaacatagaaacaccatcagagaatggttttttaatttacttgagagtggttaatgtattcaaatgttagagtttaattttgtgaatctattgtttc

SEQ ID NO: 5990 - DNA, 852 bp, Homo sapiens; identical to SEQ ID NO: 755

SEQ ID NO: 5991 - DNA, 600 bp, Homo sapiens
caaatgttttgctcaatagattgctcaaatcaggttttcttttaagaatcaatcatgtcagtctgcttagaaataacagaagaaaatagaattgacattgaaatctaggaaaattattctataatttccatttacttaagacttaatgagactttaaaagcattttttaacctcctaagtatcaagtatagaaaatcttcatggaattcacaaagtaatttggaaattaggttgaaacatatctcttatcttacgaaaaaatggtagcattttaaacaaaatagaaagttgcaaggcaaatgtttatttaaaagagcaggccaggcgcggtggctcacgcctgtaatcccagcactttgggaggctgaggcgggtggatcacgaggtcaggagatcgagaccatcctggctaacacggtgaaacccgtctctactaaaaatgcaaaaaaaattagccgggcgtggtggcaggcacctgtagtcccagctactcgggaggctgaggcaggagactggcgtgaacccaggaggcggaccttgtagtgagccgagatcgcgccactgtgctccagcctgggcaacagagcaagactccatctc

SEQ ID NO: 5992 - DNA, 1400 bp, Homo sapiens
gtggataaaggagaaaactactgtttcagtgttcaagcagtgattccctcccgaacagttaaccggaagagtacagacagcccggtagagtgtatgggccaggagaaaggggaattcagagaaatattctacatcattggagctgtggtatttgtggtcatcatccttgtcatcatcctggctatatctctacacaagtgtagaaaggcaggagtggggcagagctggaaggagaactccccactgaatgtttcataaaggaagcactgttggagctactgcaaatgctatattgcactgtgaccgagaacttttaagaggatagaatacatggaaacgcaaatgagtatttcggagcatgaagaccctggagttcaaaaaactcttgatatgacctgttattaccattagcattctggttttgacatcagcattagtcactttgaaatgtaacgaatggtactacaaccaattccaagttttaatttttaacaccatggcaccttttgcacataacatgctttagattatatattccgcacttaaggattaaccaggtcgtccaagcaaaaacaaatgggaaaatgtcttaaaaaatcctgggtggacttttgaaaagcttttttttttttttttttttgagacggagtcttgctctgttgcccaggctggagtgcagtagcacgatctcggctcacttgcaccctccgtctctcgggttcaagcaattgtctgcctcagcctcccgagtagctgggattacaggtgcgcactaccacgccaagctaatttttgtattttttagtagagatggggtttcaccatcttggccaggctggtcttgaattcctgacctcagtgatccacccaccttggcctcccaaagatgctagtattatgggcgtgaaccaccatgcccagccgaaaagcttttgaggggctgacttcaatccatgtaggaaagtaaaatggaaggaaattgggtgcatttctaggacttttctaacatatgtctataatatagtgtttaggttcttttttttttcaggaatacatttggaaattcaaaacaattgggcaaactttgtattaatgtgttaagtgcaggagacattggtattctgggcagcttcctaatatgctttacaatctgcactttaactgacttaagtggcattaaacatttgagagctaactatatttttataagactactatacaaactacagagtttatgatttaaggtacttaaagcttctatggttgacattgtatatataattttttaaaaaggtttttctatatggggattttctatttatgtaggtaatattgttctatttgtatatattgagataatttatttaatatactttaaataaaggtgactgggaattgtt

SEQ ID NO: 5993 - DNA, 574 bp, Homo sapiens; identical to SEQ ID NO: 758

SEQ ID NO: 5994 - DNA, 1400 bp, Homo sapiens
tggagaaataatattggtatcaaacaaatacattgatttgtcatgatacacattgaatttgatccaatagtttaaggaataggtaggaaaatttggtttctatttttcgatttcctgtaaatcagtgacataaataattcttagcttattttatatttccttgtcttaaatactgagctcagtaagttgtgttaggggattatttctcagttgagactttcttatatgacattttactatgttttgacttcctgactattaaaaataaatagtagaaacaattttcataaagtgaagaattatataatcactgctttataactgactttattatatttatttcaaagttcatttaaaggctactattcatcctctgtgatggaatggtcaggaatttgttttctcatagtttaattccaacaacaatattagtcgtatccaaaataacctttaatgctaaactttactgatgtatatccaaagcttctccttttcagacagattaatccagaagcagtcataaacagaagaataggtggtatgttcctaatgatattatttctactaatggaataaactgtaatattagaaattatgctgctaattatatcagctctgaggtaatttctgaaatgttcagactcagtcggaacaaattggaaaatttaaatttttattcttagctataaagcaagaaagtaaacacattaatttcctcaacatttttaagccaattaaaaatataaaagatacacaccaatatcttcttcaggctctgacaggcctcctggaaacttccacatatttttcaactgcagtataaagtcagaaaataaagttaacataactttcactaacacacacatatgtagatttcacaaaatccacctataattggtcaaagtggttgagaatatattttttagtaattgcatgcaaaatttttctagcttccatcctttctccctcgtttcttctttttttgggggagctggtaactgatgaaatcttttcccaccttttctcttcaggaaatataagtggttttgtttggttaacgtgatacattctgtatgaatgaaacattggagggaaacatctactgaatttctgtaatttaaaatattttgctgctagttaactatgaacagatagaagaatcttacagatgctgctataaataagtagaaaatataaatttcatcactaaaatatgctattttaaaatctatttcctatattgtatttctaatcagatgtattactcttattatttctattgtatgtgttaatgattttatgtaaaaatgtaattgcttttcatgagtagtatgaataaaattgattagtttgtgttttcttgtctcccgaaaaaaaaaaaaaaaaaaaaaaaaaaaaaa

SEQ ID NO: 5995 - DNA, 600 bp, Homo sapiens
gtgagcagtaaatcaatggaacatcccaagaagaggataaggatgcttaaaatggaaatcattctccaacgatatacaaattggacttgttcaactgctggatatatgctaccaataaccccagccccaacttaaaattcttacattcaagctcctaagagttcttaatttataactaattttaaaagagaagtttcttttctggttttagtttgggaataatcattcattaaaaaaaatgtattgtggtttatgcgaacagaccaacctggcattacagttggcctctccttgaggtgggcacagcctggcagtgtggccaggggtggccatgtaagtcccatcaggacgtagtcatgcctcctgcatttcgctacccgagtttagtaacagtgcagattccacgttcttgttccgatactctgagaagtgcctgatgttgatgtacttacagacacaagaacaatctttgctataattgtataaagccataaatgtacataaattatgtttaaatggcttggtgtctttcttttctaattatgcagaataagctctttattaggaattttttgtgaagctattaaatacttgagttaa

SEQ ID NO: 5996 - DNA, 1400 bp, Homo sapiens
aagtggcatgggcaatagtatataaccatacttttctaacaatccctggctgtctgtgagcagcacttgacagctctccctctgtgctgggctggtcgtgcagttactctgggctcccatttgttgcttctcaaaatatacctcttgcccagctgcctcttctgaaatccacttcacccactccactttcctccacagatgcctcttctgtgccttaagcagagtcaggagaccccaaggcatgtgagcatctgcccagcaacctgtggagacaacccacactgtgtctgagggtgaaaggacaccaggagtcacttctatacctccctaacctcacccctggaaagccaccagattggaggtcaccagcatgatgataatattcatgacctgatgtgggaggagacagccaacctcaggcttagatcaatgtatagggctatattttggcagctgggtagctctttgaaggtggataagacttcagaagaggaaaggccagactttgcttaccatcagcatctgcaatgggccaaacacacctcaaattggctgagttgagaaagcagccccagtagttccattcttgcccagcactttctgcattccaaacagcatcctacctgggtttttatccacaaaggtagcggccacatggtttttaaagtatgagaaacacagtttgtcctctccttttatccaagcaggaagattctatatcctgatggtagagacagactccaggcagccctggacttgctagcccaaagaaggaggatgtggttaatctgtttcacctggtttgtcctaaggccatagttaaaaagtaccagctctggctggggtccgtgaagcccaggccaggcagccaaatcttgcctgtgctgggcatacaaccctctgctttcacatctctgagctatatcctcattagtgaaggtggcttttgctttatagtttggctggggagcacttaattcttcccatttcaaaaggtaatgttgcctggggcttaacccacctgccctttgggcaaggttgggacaaagccatctgggcagtcaggggcaaggactgttggaggagagttagcccaagtataggctctgcccagatgccatcacatccctgatactgtgtatgctttgaagcaccttccctgagaagggaagaggggatctttggactacgttcttggctccagacctggaatccacaaaagccaaaccagctcatttcaacaaaggagctccgatgtgaggggcaaggctgccccctgccccagggctcttcagaaagcatctgcatgtgaacaccatcatgcctttataaaggatccttattacaggaaaagcatgagtggtggctaacctgaccaataaagttattttatgattgcc

SEQ ID NO: 5997 - DNA, 801 bp, Homo sapiens; identical to SEQ ID NO: 762

SEQ ID NO: 5998 - DNA, 1283 bp, Homo sapiens; identical to SEQ ID NO: 763

SEQ ID NO: 5999 - DNA, 600 bp, Homo sapiens
gagaaggagatgaacagagaacattcttcagtttccctgctgtagttgctccattcaaatgttccgtcctcccactgagccaaaaccaggagttcatgccatttgtcaaggaattatcggaagccctgaccaggcatggagtatctcacaaagtagacgattcctctgggtcaatcggaaggcgctatgccaggactgatgagattggcgtggcttttggtgtcaccattgactttgacacagtgaacaagaccccccacactgcaactctgagggaccgtgactcaatgcggcagataagagcagagatctctgagctgcccagcatagtccaagacctagccaatggcaacatcacatgggctgatgtggaggccaggtatcctctgtttgaagggcaagagactggtaaaaaagagacaatcgaggaatgaggacaattttgacaacttttgaccacttgcgctaataaaaaaaaaaaaactactcttatgtccactttacaaaagaaaacagcattgtgattactcccagggaccgtattttatcttcagtggctgcctgattttacccccacaattaaagttgaaggaatcctga

SEQ ID NO: 6000 - DNA, 600 bp, Homo sapiens
tgcactgccatgtatgaaagtctctttatgatgtttgtttttttgtcatttttgttctttacatcaagaaattttatgtttaaatatgcggagaatgtatattgcctctgctcctatcagggttgctaaaccctggtacatcgtatataaaatgtattaaaactggggtttgttaccagttgctgtactttgtatatagaatttttataaattgtatgcttcagaaataatttatttttaaaaagaaattaaaagttttaaactcacatccatattacacctttcccccctgaaatgtatagaatccatttgtcatcaggaatcaaaacccacagtccattgtgaagtgtgctatatttagaacagtcttaaaatgtacagtgtattttatagaattgaagttaacattcttattttcaagagaatttatggacgttgtagaaatgtacaaatgcatttccaaactgccttaaacgttgtatttttatagacatgtttttttaaaaatcctaagtttttaaataactatggatttgtgtattttttttggttatttgttttattaaaacatgtacatcagtaaagagttttaaacaatga

SEQ ID NO: 6001 - DNA, 600 bp, Homo sapiens
gtctatgagcaataatgtgatttctggacattgcccatgtataatcctcactgatgatttcaagctaaagcaaaccaccttatacagagatctagaatctctttatgttctccagaggaaggtggaagaaaccatgggcaggagtaggaattgagtgataaacaattgggctaatgaagaaaacttctcttattgttcagttcatccagattataacttcaatgggacactttagaccattagacaattgacactggattaaacaaattcacataatgccaaatacacaatgtatttatagcaacgtataatttgcaaagatggactttaaaagatgctgtgtaactaaactgaaataattcaattacttattatttagaatgttaaagcttatgatagtcttttctaattcttaacactcatacttgaaatctttccgagtttccccagaagagaatatgggattttttttgacatttttgacccatttaataatgctcttgtgtttacctagtatatgtagactttgtcttatgtgtcaaaagtcctaggaaagtggttgatgtttcttatagcaattaaaaattatttttgaactga

SEQ ID NO: 6002 - DNA, 600 bp, Homo sapiens
aatatgtttctaaaaattggtacttgtttcaccatacttcattcagaccagtgaaagagtagtgcatttaattggagtatctaaagccagtggcagtgtatgctcatacttggacagttagggaagggtttgccaagttttaagagaagatgtgatttattttgaaatttgtttctgttttgtttttaaatcaaactgtaaaacttaaaactgaaaaattttattggtaggatttatatctaagtttggttagccttagtttctcagacttgttgtctattatctgtaggtggaagaaatttaggaagcgaaatattacagtagtgcattggtgggtctcaatccttaacatatttgcacaattttatagcacaaactttaaattcaagctgctttggacaactgacaatatgattttaaatttgaagatgggatgtgtacatgttgggtatcctactactttgtgttttcatctcctaaaagtgttttttatttccttgtatctgtagtcttttattttttaaatgactgctgaatgacatattttatcttgttctttaaaatcacaacacagagctgctattaaattaatattgatat

SEQ ID NO: 6003 - DNA, 600 bp, Homo sapiens
aagccctgttccggaccatcatcacctacccctggttccagaactcctccgtcatcctcttcctcaacaagaaggacctgctggaggacaagatcctgtactcgcacctggtggactacttccccgagttcgatggtccccagcgggagccccaggcggcgcgggagttcatcctgaagatgttcgtggacctgaaccccgacagcgacaagatcatctactcacacttcacgtgtgccaccgacacggagaacatccgcttcgtgttcgcggccgtgaaggacaccatcctgcagctcaacctcaaggagtacaacctggtctgagcgccccaggcccagggagacgggatggagacacggggcaggaccttccttccacggagcctgcgctgccgggcgggtggcgctgccgagtccgggccggggctctgccgcgggaggagattttttttttttcatatttttaacaaatggtttttatttcacagttatcaggggatgtacatctctccctccgtacacttcgcgcaccttctcaccttttgtcaacggcaaaggcagcctttttctggccttgacttatggctcgcttttttct

SEQ ID NO: 6004 - DNA, 600 bp, Homo sapiens
ccaccgacaccaagaacgtgcagttcgtgtttgacgccgtcaccgatgtcatcatcaagaacaacctgaaggactgcggcctcttctgaggggcagcggggcctggcgggatgggccaccgccgaatttgtaccccccaacccctgaggaagatgggggcaagaagatcacgctccccgcctgttcccccgccgcttttctcctctttcctctctttgttctcagctccccctgtcccctcagctccaaacgtaggggaggggttcgcacaggcctccctgtttgaagcctgcccttgtctgagatgctggtaatggccatggtacccccttctgggcatctgttctggtttttaaccattgtcttgttctgtgatgaggggaggggggcacatgctgagtctcccaaggctgcgtctggaggggcccctgcttctccagcctggacccccagctttgcccaacaccagcccctgccccagcccaagtccaaatgtttacgggagcctcctgcccagtcccccaaccccagccgctcggaggccccaaaggaaaaagcacaagaagcgtgagacgccaccattcctggaaaccacagtcc

SEQ ID NO: 6005 - DNA, 600 bp, Homo sapiens
gtgtaccatctgtgtgcctgcagctgtgtagtgctggacagtgacaaccctttctctccagttctccactccaatgataatagttcacttatacctaaacccaaaggaaaaaccagctctaggtccaattgttctgctctaactgatacctcaaccttggggccagcatctcccactgcctccaaatattagtaactatgactgacgtccccagaagtttctgggtctaccacactccccaaccccccactcctacttcctgaagggccctcccaaggctacatccccaccccacagttctccctgagagagatcaacctccctgagatcaaccaaggcagatgtgacagcaagggccacggaccccatggcaggggtggcgtcttcatgagggaggggcccaaagcccttgtgggcggacctcccctgagcctgtctgaggggccagcccttagtgcattcaggctaaggcccctgggcagggatgccacccctgctccttcggaggacgtgccctcacccctcactggtccactggcttgagactcaccccgtctgcccagtaaaagcctttctgcagcaaaaaaaaaaaaaaaaaaa

SEQ ID NO: 6006 - DNA, 896 bp, Homo sapiens; identical to SEQ ID NO: 771

SEQ ID NO: 6007 - DNA, 1109 bp, Homo sapiens; identical to SEQ ID NO: 772

SEQ ID NO: 6008 - DNA, 1109 bp, Homo sapiens; identical to SEQ ID NO: 772

SEQ ID NO: 6009 - DNA, 1400 bp, Homo sapiens
ctgctccgatcacctgcactgctgcccccaagacactgtgtgtgacctgatccagagtaagtgcctctccaaggagaacgctaccacggacctcctcactaagctgcctgcgcacacagtgggggatgtgaaatgtgacatggaggtgagctgcccagatggctatacctgctgccgtctacagtcgggggcctggggctgctgcccttttacccaggctgtgtgctgtgaggaccacatacactgctgtcccgcggggtttacgtgtgacacgcagaagggtacctgtgaacaggggccccaccaggtgccctggatggagaaggccccagctcacctcagcctgccagacccacaagccttgaagagagatgtcccctgtgataatgtcagcagctgtccctcctccgatacctgctgccaactcacgtctggggagtggggctgctgtccaatcccagaggctgtctgctgctcggaccaccagcactgctgcccccagggctacacgtgtgtagctgaggggcagtgtcagcgaggaagcgagatcgtggctggactggagaagatgcctgcccgccgggcttccttatcccaccccagagacatcggctgtgaccagcacaccagctgcccggtggggcagacctgctgcccgagcctgggtgggagctgggcctgctgccagttgccccatgctgtgtgctgcgaggatcgccagcactgctgcccggctggctacacctgcaacgtgaaggctcgatcctgcgagaaggaagtggtctctgcccagcctgccaccttcctggcccgtagccctcacgtgggtgtgaaggacgtggagtgtggggaaggacacttctgccatgataaccagacctgctgccgagacaaccgacagggctgggcctgctgtccctaccgccagggcgtctgttgtgctgatcggcgccactgctgtcctgctggcttccgctgcgcagccaggggtaccaagtgtttgcgcagggaggccccgcgctgggacgcccctttgagggacccagccttgagacagctgctgtgagggacagtactgaagactctgcagccctcgggaccccactcggagggtgccctctgctcaggcctccctagcacctccccctaaccaaattctccctggaccccattctgagctccccatcaccatgggaggtggggcctcaatctaaggccttccctgtcagaagggggttgtggcaaaagccacattacaagctgccatcccctccccgtttcagtggaccctgtggccaggtgcttttccctatccacaggggtgtttgtgtgtgtgcgcgtgtgcgtttcaataaagtttgtacactttcaaaaaaaaaaaaaaaaaaaaaaaaaaaaaa

SEQ ID NO: 6010 - DNA, 1400 bp, Homo sapiens
taggtatattgaactgttcctgaattcatgtccaaaaggaaaataagactctaggggctccagataataagggtgaagcaagaagcatttcatttgcacatctttcttggacttgggatatacagttccagtttattagcagcaactgctagggaaatgattttggtgttttgggttaattgcttctaagaaaagtttcatagtggactgtttagaagaagaaatgaaagatccagtttgggattatgaaataaaccacaaattaaaatttttgtttaaactgtccaggatctgatttaaaaatatggtctttgttttatatgattaaatggtttgttttcatagatgatatgttactcattgtaaagaccacatatttttattcagcagtgttctttaaacggtttcatttaaaaagtaactttttttttttgcctgtgaattgagtgctctgatgtaaaacttctcatggagtgaaacagtgatttattttaaccaaacattcaccaaagcaaagaacggtttcagacctttgaactggtatggtttggcagaatagttttaaattttgctgtatttgattacttagagataggaatttttaaaaatcaaaacaaaaaataccacagcttagtgtaaatgacaatttggcggttttatgtctttagaaatgttttgcctttctaagccttgtgctaaaggcgtataacggtggtgcctatctacttaagggggcattctagtcttaacttaaaagttgtctaaactgtccctccctggctttttttggtttggggtagacctaagggtgtttgttagtctcaaaactgtgaagtgacatgtcagaacagtccagactggtaagaaaattaatggcttcacttgaatttaaaccagctctagataggaaaaaaatcagtctcctcatttgctttttaaatggagtagtacatcccatattttagaacaagtaggggtgccttgcttaaataaaaatagcatttaatgtataattgtgtgaagggtttatggataaagctgtacttctgtcacaatgtggcagtactttctgctttaatattaaacagcttgttatttaaatattggacaaaatggctggcttcaaaatatagtcattaataaactaactttatgtgcacctgtgtaggagaatcaaaatcctgtatgctttctttgccttgttcctgttctcagggtgacgactgccaccaggagatgcagttctagttcttaaaattaaatttgcccaggtttctgacaggtgatacctggaagagagactatgtcttctcttacttaatacataaccatctttgattaccagctaagatgcgaaatcactgtactgtagtcaataaatgaagacttgtttcaggctg

SEQ ID NO: 6011 - DNA, 1400 bp, Homo sapiens
gctggtaatctcagccaggaaaggagagtttgaaactggatttgaaaaaggaggacagacaagagaacatgcaatgttggcaaagacagcaggtgtaaaacacctaattgtgctaattaataagatggatgatccaacagtaaattggagcaatgagagatatgaagaatgtaaggagaaactagtgccatttttgaaaaaagttggcttcaatcccaaaaaggacattcactttatgccctgctcaggacttactggagcaaatctcaaagagcagtcggatttctgtccttggtacattggattaccgtttattccatatctggataatttgccgaacttcaatagatcagttgatggaccaatcaggctgccaattgtggataagtacaaggatatgggcactgtggtcctgggaaagctggaatcaggatctatttgtaaaggccagcagcttgtgatgatgccaaacaagcacaacgtggaagttcttggaatactttccgatgatgtagagactgataccgtagccccaggtgaaaacctcaaaatcagactgaaaggaattgaagaagaggagattcttccagggtttatactttgtgatcctaataatctttgtcattctggacgcacatttgatgcccagatagtgattatagagcacaaatccatcatctgcccaggctataatgcggtgctgcatattcatacctgtattgaggaggtggaaataacagccttaatctgcttggtagacaaaaaatcaggagaaaaaagtaagacccgaccccgttttgtgaaacaagatcaagtatgcattgctcgcttaaggacagcaggaaccatctgccttgagacctttaaagacttccctcagatgggtcgtttcaccttaagagatgagggtaagaccattgcaattggaaaagttctgaaactggttccagagaaagactaagcattttcttgatgaccctgcacaatactgtgaggaaaattgactgcagaagcctacttcacaccgccttctcttattttctgcccattgataaacctctccccatattttgcaaagaggaaattcacagcaaaagtccacattatgtcagctttctcatattgagagctctgctatgccactgttgaatttttcccaagattcctgtccctagccctcacttcaaactctgcttccttggacagatttggcaatagctttgtaagtgatgtggacataattgcctacaataatgaaaacctacaggaatttttttatttttcattttccccttaggcatatttagtatttttcccccaggccagatcattcgtgagtgtgcgagtgtgtgtgcacatgttacaaaggcaactaccatgttaataaaatattcaatttg

SEQ ID NO: 6012 - DNA, 600 bp, Homo sapiens
tttgtggcaaaaacatggacggaacttctgaaacatgtgagagaaacccataaagaggaaatactatgtgaagtatgccggaaaacatttaaacgcaaagattaccttaagcaacacatgaaaactcatgccccagaaagggatgtatgtcgctgtccaagagaaggctgtggaagaacctatacaactgtgtttaatctccaaagccatatcctctccttccatgaggaaagccgcccttttgtgtgtgaacatgctggctgtggcaaaacatttgcaatgaaacaaagtctcactaggcatgctgttgtacatgatcctgacaagaagaaaatgaagctcaaagtcaaaaaatctcgtgaaaaacgggagtttggcctctcatctcagtggatatatcctcccaaaaggaaacaagggcaaggcttatctttgtgtcaaaacggagagtcacccaactgtgtggaagacaagatgctctcgacagttgcagtacttacccttggctaagaactgcactgctttgtttaaaggactgcagaccaaggagtcgagctttctctcagagcatgcttttctttattaaaattactgatgcag

SEQ ID NO: 6013 - DNA, 600 bp, Homo sapiens
tctagccctccctggctgtcagagccaggctctgcctggaggatccctccatccggctcctgtcatcccctacactttggccaagcaagaggtggtagaaccacttggctgctcattccttctggaggacacacagtctcagtccagatgccttcctgtctttctggtcctttctggaccagatcctactcttcctttctaaatctgagatctccctccagggaatccgcctgcagaggacagagctggctgtcttcccccacccctaacctggcttattcccaactgctctgcccactgtgaaaccactaggttctaggtcctggcttctagatctggaaccttaccacgttactgcatactgatccctttcccatgatccagaactgaggtcactgggttctagaacccccacatttacctcgaggctcttccatccccaaactgtgccctgccttcagctttggtgaaagggagggcccctcatgtgtgctgtgctgtgtctgcaccgcttggtttgcagttgagaggggagggcaggaggggtgtgattggagtgtgtccggagatgagatgaaaaaaatacatctatatttaaga

SEQ ID NO: 6014 - DNA, 1040 bp, Homo sapiens; identical to SEQ ID NO: 779

SEQ ID NO: 6015 - DNA, 600 bp, Homo sapiens
cgagagccggcggccctgaaggtgagtgaggccctcggcagctgcagccggggtgtctggtacccccccggcgtggtgcttagcccaggactttcagacggccgctggccgggaggctttggtgggagagacgcgatcgccgatttcggtctggcgccccttctgcggccgggacccaggcctttcacatcagctctccctccatcttcattcataggtctgcgctggggccgggacgaagcacttggtaacaggcacatcttcctcccgagtgactgcctcctaggaggacatttaggggagggcagaggcctgcagtttggcttcacggctggctatgtggacagcaagagtcgttttgcggaacgcgactggcagccaggcctgtcgggcccccgacgccgccccatttcccttccagcaaactcaactcggcaatccaagcacctagataccagcacaagtcggttaatccctgtctggactgagcctccgttggcttctgaactggaattctgcagctaacccttccacgactagaaccttaggcattggggagttttagatggactaattttattaaaggattgtttttttttt

SEQ ID NO: 6016 - DNA, 873 bp, Homo sapiens; identical to SEQ ID NO: 781

SEQ ID NO: 6017 - DNA, 600 bp, Homo sapiens
gtgctatccatgccaaacgtgtaacaattatgccaaaagacatccagctagcacgccgcatacgtggagaacgtgcttaagaatccactatgatgggaaacatttcattctcaaaaaaaaaaaaaaaatttctcttcttcctgttattggtagttctgaacgttagatattttttttccatggggtcaaaggtacctaagtatatgattgcgagtggaaaaataggggacagaaatcaggtattggcagtttttccattttcatttgtgtgtgaatttttaatataaatgcggagacgtaaagcattaatgcaagttaaaatgtttcagtgaacaagtttcagcggttcaactttataataattataaataaacctgttaaatttttctggacaatgccagcatttggatttctttaaaacaagtaaatttcttattgatggcaactaaatggtgtttgtagcatttttatcatacagtagattccatccattcactatacttttctaactgagttgtcctacatgcaagtacatgtttttaatgttgtctgtcttctgtgctgttcctgtaagtttgctattaaaatacattaaactat

SEQ ID NO: 6018 - DNA, 600 bp, Homo sapiens
aaccacctcaatgcaaagattctacgggaaaatgtgggccccctccacctattgacaatggggacattacttcattcccgttgtcagtatatgctccagcttcatcagttgagtaccaatgccagaacttgtatcaacttgagggtaacaagcgaataacatgtagaaatggacaatggtcagaaccaccaaaatgcttacatccgtgtgtaatatcccgagaaattatggaaaattataacatagcattaaggtggacagccaaacagaagctttatttgagaacaggtgaatcagctgaatttgtgtgtaaacggggatatcgtctttcatcacgttctcacacattgcgaacaacatgttgggatgggaaactggagtatccaacttgtgcaaaaagatagaatcaatcataaaatgcacacctttattcagaactttagtattaaatcagttcttaatttaatttttaagtattgttttactcctttttattcatacgtaaaattttggattaatttgtgaaaatgtaattataagctgagaccggtggctctcttcttaaaagcaccatattaaaacttggaaaactggaaaact

SEQ ID NO: 6019 - DNA, 600 bp, Homo sapiens
catccccatcgtgggcatcattgctggcctggttctccttggagctgtgatcactggagctgtggtcgctgccgtgatgtggaggaggaagagctcagatagaaaaggagggagttacactcaggctgcaagcagtgacagtgcccagggctctgatgtgtctctcacagcttgtaaagtgtgagacagctgccttgtgtgggactgagaggcaagagttgttcctgcccttccctttgtgacttgaagaaccctgactttgtttctgcaaaggcacctgcatgtgtctgtgttcgtgtaggcataatgtgaggaggtggggagagcaccccacccccatgtccaccatgaccctcttcccacgctgacctgtgctccctctccaatcatctttcctgttccagagaggtggggctgaggtgtctccatctctgtctcaacttcatggtgcactgagctgtaacttcttccttccctattaaaattagaacctgagtataaatttactttctcaaattcttgccatgagaggttgatgagttaattaaaggagaagattcctaaaatttgagagacaaaattaatggaacgcatgagaac

SEQ ID NO: 6020 - DNA, 600 bp, Homo sapiens
ttattaggaacggtgactggaccttccagatcctggtgatgctggaaatgactccccagcgtggagacgtctacacctgccacgtggagcaccccagcctccagaaccccatcatcgtggagtggcgggctcagtctgaatctgcccagagcaagatgctgagtggcattggaggcttcgtgctggggctgatcttcctcgggctgggccttattatccatcacaggagtcagaaagggctcctgcactgactcctgagactattttaactgggattggttatcacttttctgtaacgcctgcttgtccctgcccagaattcccagctgcctgtgtcagcctgtcccccgagatcagagtcctaccgtggctgtcacgcagccaccaggtcatctcctttcatccccacctcaaggctgatggctgtgaccctgcttcctgcactgacccagagcctctgcctgtgcacggccagctgcgtctactgaggccccaaggggtttctgtttctattctctcctcagactgctcaagagaagcacatgaaaaccattacctgactttagagcttttttacataattaaacatgatcctgagtt

SEQ ID NO: 6021 - DNA, 600 bp, Homo sapiens
caggcctgatccagaatggagattggaccttccagaccctggtgatgctggaaacagttcctcggagtggagaggtttacacctgccaagtggagcacccaagtgtgacgagccctctcacagtggaatggagagcacggtctgaatctgcacagagcaagatgctgagtggagtcgggggcttcgtgctgggcctgctcttccttggggccgggctgttcatctacttcaggaatcagaaaggacactctggacttcagccaacaggattcctgagctgaaatgcagatgaccacattcaaggaagaaccttctgtcccagctttgcagaatgaaaagctttcctgcttggcagttattcttccacaagagagggctttctcaggacctggttgctactggttcggcaactgcagaaaatgtcctcccttgtggcttcctcagctcctgcccttggcctgaagtcccagcattgatgacagcgcctcatcttcaacttttgtgctcccctttgcctaaaccgtatggcctcccgtgcatctgtactcaccctgtacgacaaacacattacattattaaatgtttctcaaagatggagtt

SEQ ID NO: 6022 - DNA, 1400 bp, Homo sapiens
aggccagttctcacaccctccagtggatgattggctgcgacctggggtccgacggacgcctcctccgcgggtatgaacagtatgcctacgatggcaaggattacctcgccctgaacgaggacctgcgctcctggaccgcagcggacactgcggctcagatctccaagcgcaagtgtgaggcggccaatgtggctgaacaaaggagagcctacctggagggcacgtgcgtggagtggctccacagatacctggagaacgggaaggagatgctgcagcgcgcggacccccccaagacacacgtgacccaccaccctgtctttgactatgaggccaccctgaggtgctgggccctgggcttctaccctgcggagatcatactgacctggcagcgggatggggaggaccagacccaggacgtggagctcgtggagaccaggcctgcaggggatggaaccttccagaagtgggcagctgtggtggtgccttctggagaggagcagagatacacgtgccatgtgcagcatgaggggctgccggagcccctcatgctgagatggaagcagtcttccctgcccaccatccccatcatgggtatcgttgctggcctggttgtccttgcagctgtagtcactggagctgcggtcgctgctgtgctgtggagaaagaagagctcagattgaaaaggagggagctactctcaggctgcaagtaagtatgaaggaggctgatccctgagatccttgggatcttgtgtttgggagccatgggggagctcacccaccccacaattcctcctctggccacatctcctgtggtctctgaccaggtgctgtttttgttctactctaggcagtgacagtgcccagggctctaatgtgtctctcacggcttgtaaatgtgacaccccggggggcctgatgtgtgtgggttgttgaggggaacaggggacatagctgtgctatgaggtttctttgacttcaatgtattgagcatgtgatgggctgtttaaagtgtcacccctcactgtgactgatatgaatttgttcatgaatatttttctgtagtgtgaaacagctgccctgtgtgggactgagtggcaagtccctttgtgacttcaagaaccctgacttctctttgtgcagagaccagcccacccctgtgcccaccatgaccctcttcctcatgctgaactgcattccttccccaatcacctttcctgttccagaaaaggggctgggatgtctccgtctctgtctcaaatttgtggtccactgagctataacttacttctgtattaaaattagaatctgagtgtaaatttactttttcaaattatttccaagagagattgatgggttaattaaaggagaagattcctgaaatttgagagacaaaataaa

SEQ ID NO: 6023 - DNA, 600 bp, Homo sapiens
gctgaaaaaagcaagaaaaagaaggaagaggaggaagatgaggaagatgaagaggatgaggaggaggaggaagatgaagaagatgaagatgaagaagaagatgatgatgatgaataagttggttctagcgcagtttttttttcttgtctataaagcatttaacccccctgtacacaactcactccttttaaagaaaaaaattgaaatgtaaggctgtgtaagatttgtttttaaactgtacagtgtctttttttgtatagttaacacactaccgaatgtgtctttagatagccctgtcctggtggtattttcaatagccactaaccttgcctggtacagtatgggggttgtaaattggcatggaaatttaaagcaggttcttgttggtgcacagcacaaattagttatatatggggatggtagttttttcatcttcagttgtctctgatgcagcttatacgaaataattgttgttctgttaactgaataccactctgtaattgcaaaaaaaaaaaaagttgcagctgttttgttgacattctgaatgcttctaagtaaatacaattttttttattaaaaaaaaaaaaaaaaaaaaaaaaa

SEQ ID NO: 6024 - DNA, 1277 bp, Homo sapiens; identical to SEQ ID NO: 789

SEQ ID NO: 6025 - DNA, 1400 bp, Homo sapiens
ctgtctccagagaagattctcaaagaccaggtgcccacttaactgtgaaaaagatatttgttggtggcattaaagaagacactgaagaacatcacctaagagattattttgaacagtatggaaaaattgaagtgattgaaatcatgactgaccgaggcagtggcaagaaaaggggctttgcctttgtaacctttgacgaccatgactccgtggataagattgtcattcagaaataccatactgtgaatggccacaactgtgaagttagaaaagccctgtcaaagcaagagatggctagtgcttcatccagccaaagaggtcgaagtggttctggaaactttggtggtggtcgtggaggtggtttcggtgggaatgacaacttcggtcgtggaggaaacttcagtggtcgtggtggctttggtggcagccgtggtggtggtggatatggtggcagtggggatggctataatggatttggcaatgatggaagcaattttggaggtggtggaagctacaatgattttgggaattacaacaatcagtcttcaaattttggacccatgaagggaggaaattttggaggcagaagctctggcccctatggcggtggaggccaatactttgcaaaaccacgaaaccaaggtggctatggcggttccagcagcagcagtagctatggcagtggcagaagattttaattaggaaacaaagcttagcaggagaggagagccagagaagtgacagggaagctacaggttacaacagatttgtgaactcagccaagcacagtggtggcagggcctagctgctacaaagaagacatgttttagacaaatactcatgtgtatgggcaaaaaactcgaggactgtatttgtgactaattgtataacaggttattttagtttctgttctgtggaaagtgtaaagcattccaacaaagggttttaatgtagatttttttttttgcaccccatgctgttgattgctaaatgtaacagtctgatcgtgacgctgaataaatgtcttttttttaatgtgctgtgtaaagttagtctactcttaagccatcttggtaaatttccccaacagtgtgaagttagaattccttcagggtgatgccaggttctatttggaatttatatacaacctgcttgggtggagaagccattgtcttcggaaaccttggtgtagttgaactgatagttactgttgtgacctgaagttcaccattaaaagggattacccaagcaaaatcatggaatggttataaaagtgattgttggcacatcctatgcaatatatctaaattgaataatggtaccagataaaattatagatgggaatgaagcttgtgtatccattatcatgtgtaatcaataaacgatttaattctcttgaa

SEQ ID NO: 6026 - DNA, 1400 bp, Homo sapiens
caagaggatttggttttgtaactttttcatccatggctgaggttgatgctgccatggctgcaagacctcattcaattgatgggagagtagttgagccaaaacgtgctgtagcaagagaggaatctggaaaaccaggggctcatgtaactgtgaagaagctgtttgttggcggaattaaagaagatactgaggaacatcaccttagagattactttgaggaatatggaaaaattgataccattgagataattactgataggcagtctggaaagaaaagaggctttggctttgttacttttgatgaccatgatcctgtggataaaatcgtattgcagaaataccataccatcaatggtcataatgcagaagtaagaaaggctttgtctagacaagaaatgcaggaagttcagagttctaggagtggaagaggaggcaactttggctttggggattcacgtggtggcggtggaaatttcggaccaggaccaggaagtaactttagaggaggatctgatggatatggcagtggacgtggatttggggatggctataatgggtatggaggaggacctggaggtggcaattttggaggtagccccggttatggaggaggaagaggaggatatggtggtggaggacctggatatggcaaccagggtgggggctacggaggtggttatgacaactatggaggaggaaattatggaagtggaaattacaatgattttggaaattataaccagcaaccttctaactacggtccaatgaagagtggaaactttggtggtagcaggaacatggggggaccatatggtggaggaaactatggtccaggaggcagtggaggaagtgggggttatggtgggaggagccgatactgagcttcttcctatttgccatgggcttcactgtataaataggagaggatgagagcccagaggtaacagaacagcttcaggttatcgaaataacaatgttaaggaaactcttatctcagtcatgcataaatatgcagtgatatggcagaagacaccagagcagatgcagagagccattttgtgaatggattggattatttaataacattaccttactgtggaggaaggattgtaaaaaaaaatgcctttgagacagtttcttagctttttaattgttgtttctttctagtggtctttgtaagagtgtagaagcattccttctttgataatgttaaatttgtaagtttcaggtgacatgtgaaaccttttttaagatttttctcaaagttttgaaaagctattagccaggatcatggtgtaataagacataacgtttttcctttaaaaaaatttaagtgcgtgtgtagagttaagaagctgttgtacatttatgatttaataaaataattctaaaggaaaaaa

SEQ ID NO: 6027 - DNA, 1400 bp, Homo sapiens
gaccaggagccgctgtacccagtgcaggtcagctctgcggacgctcggctcatggtctttgacaagacggaagggacgtggcggctgctgtgctcctcgcgctccaacgccagggtagccggactcagctgcgaggagatgggcttcctcagggcactgacccactccgagctggacgtgcgaacggcgggcgccaatggcacgtcgggcttcttctgtgtggacgaggggaggctgccccacacccagaggctgctggaggtcatctccgtgtgtgattgccccagaggccgtttcttggccgccatctgccaagactgtggccgcaggaagctgcccgtggaccgcatcgtgggaggccgggacaccagcttgggccggtggccgtggcaagtcagccttcgctatgatggagcacacctctgtgggggatccctgctctccggggactgggtgctgacagccgcccactgcttcccggagcggaaccgggtcctgtcccgatggcgagtgtttgccggtgccgtggcccaggcctctccccacggtctgcagctgggggtgcaggctgtggtctaccacgggggctatcttccctttcgggaccccaacagcgaggagaacagcaacgatattgccctggtccacctctccagtcccctgcccctcacagaatacatccagcctgtgtgcctcccagctgccggccaggccctggtggatggcaagatctgtaccgtgacgggctggggcaacacgcagtactatggccaacaggccggggtactccaggaggctcgagtccccataatcagcaatgatgtctgcaatggcgctgacttctatggaaaccagatcaagcccaagatgttctgtgctggctaccccgagggtggcattgatgcctgccagggcgacagcggtggtccctttgtgtgtgaggacagcatctctcggacgccacgttggcggctgtgtggcattgtgagttggggcactggctgtgccctggcccagaagccaggcgtctacaccaaagtcagtgacttccgggagtggatcttccaggccataaagactcactccgaagccagcggcatggtgacccagctctgaccggtggcttctcgctgcgcagcctccagggcccgaggtgatcccggtggtgggatccacgctgggccgaggatgggacgtttttcttcttgggcccggtccacaggtccaaggacaccctccctccagggtcctctcttccacagtggcgggcccactcagccccgagaccacccaacctcaccctcctgacccccatgtaaatattgttctgctgtctgggactcctgtctaggtgcccctgatgatgggatgctctttaaataataaagatggttttgatt

SEQ ID NO: 6028 - DNA, 1400 bp, Homo sapiens
ctcttgaaattgccaatgctcaccgtaagcctttggtcataatcgctgaagatgttgatggagaagctctaagtacactcgtcttgaataggctaaaggttggtcttcaggttgtggcagtcaaggctccagggtttggtgacaatagaaagaaccagcttaaagatatggctattgctactggtggtgcagtgtttggagaagagggattgaccctgaatcttgaagacgttcagcctcatgacttaggaaaagttggagaggtcattgtgaccaaagacgatgccatgctcttaaaaggaaaaggtgacaaggctcaaattgaaaaacgtattcaagaaatcattgagcagttagatgtcacaactagtgaatatgaaaaggaaaaactgaatgaacggcttgcaaaactttcagatggagtggctgtgctgaaggttggtgggacaagtgatgttgaagtgaatgaaaagaaagacagagttacagatgcccttaatgctacaagagctgctgttgaagaaggcattgttttgggagggggttgtgccctccttcgatgcattccagccttggactcattgactccagctaatgaagatcaaaaaattggtatagaaattattaaaagaacactcaaaattccagcaatgaccattgctaagaatgcaggtgttgaaggatctttgatagttgagaaaattatgcaaagttcctcagaagttggttatgatgctatggctggagattttgtgaatatggtggaaaaaggaatcattgacccaacaaaggttgtgagaactgctttattggatgctgctggtgtggcctctctgttaactacagcagaagttgtagtcacagaaattcctaaagaagagaaggaccctggaatgggtgcaatgggtggaatgggaggtggtatgggaggtggcatgttctaactcctagactagtgctttacctttattaatgaactgtgacaggaagcccaaggcagtgttcctcaccaataacttcagagaagtcagttggagaaaatgaagaaaaaggctggctgaaaatcactataaccatcagttactggtttcagttgacaaaatatataatggtttactgctgtcattgtccatgcctacagataatttattttgtatttttgaataaaaaacatttgtacattcctgatactgggtacaagagccatgtaccagtgtactgctttcaacttaaatcactgaggcatttttactactattctgttaaaatcaggattttagtgcttgccaccaccagatgagaagttaagcagcctttctgtggagagtgagaataattgtgtacaaagtagagaagtatccaattatgtgacaacctttgtgtaataaaaatttgtttaa

SEQ ID NO: 6029 - DNA, 538 bp, Homo sapiens; identical to SEQ ID NO: 794

SEQ ID NO: 6030 - DNA, 1400 bp, Homo sapiens
cactacacagccaagatccaggcactcaatgggcccctgaggagcaatatgatccagaccatcttcaccacaattggactcctgtaccccttccccaaggactgctcccaagcaatgctgaatggagacacgacctctggcctctacaccatttatctgaatggtgataaggctcaggcgctggaagtcttctgtgacatgacctctgatgggggtggatggattgtgttcctgagacgcaaaaacggacgcgagaacttctaccaaaactggaaggcatatgctgctggatttggggaccgcagagaagaattctggcttgggctggacaacctgaacaaaatcacagcccaggggcagtacgagctccgggtggacctgcgggaccatggggagacagcctttgctgtctatgacaagttcagcgtgggagatgccaagactcgctacaagctgaaggtggaggggtacagtgggacagcaggtgactccatggcctaccacaatggcagatccttctccacctttgacaaggacacagattcagccatcaccaactgtgctctgtcctacaaaggggctttctggtacaggaactgtcaccgtgtcaacctgatggggagatatggggacaataaccacagtcagggcgttaactggttccactggaagggccacgaacactcaatccagtttgctgagatgaagctgagaccaagcaacttcagaaatcttgaaggcaggcgcaaacgggcataaattggagggaccactgggtgagagaggaataaggcggcccagagcgaggaaaggattttaccaaagcatcaatacaaccagcccaaccatcggtccacacctgggcatttggtgagaatcaaagctgaccatggatccctggggccaacggcaacagcatgggcctcacctcctctgtgatttctttctttgcaccaaagacatcagtctccaacatgtttctgttttgttgtttgattcagcaaaaatctcccagtgacaacatcgcaatagttttttacttctcttaggtggctctgggatgggagaggggtaggatgtacaggggtagtttgttttagaaccagccgtattttacatgaagctgtataattaattgtcattatttttgttagcaaagattaaatgtgtcattggaagccatccctttttttacatttcatacaacagaaaccagaaaagcaatactgtttccattttaaggatatgattaatattattaatataataatgatgatgatgatgatgaaaactaaggatttttcaagagatctttctttccaaaacatttctggacagtacctgattgtattttttttttaaataaaagcacaagtacttttgaaaaaaaaccggaattc

SEQ ID NO: 6031 - DNA, 600 bp, Homo sapiens
aggcggcagcggcggcctgagcttcagggcagccagctcctcccggtctcgccttcctcgcggtcagcatgaaagccttcagtcccgtgaggtccgttaggaaaaacagcctgtcggaccacagcctgggcatctcccggagcaaaacccctgtggacgacccgatgagcctgctatacaacatgaacgactgctactccaagctcaaggagctggtgcccagcatcccccagaacaagaaggtgagcaagatggaaatcctgcagcacctcatcgactacatcttggacctgcagatcgccctggactcgcatcccactattgtcagcctgcatcaccagagacccgggcagaaccagcgctccaggacgccgctgaccaccctcaacacggatatcagcatcctgtccttgcaggcttctgaattcccttctgagttaatgtcaaatgacagcaaagcactgtgtggctgaataagcggtgttcatgatttcttttattctttgcacaacaacaacaacaacaaattcacggaatcttttaagtgctgaacttatttttcaaccatttcacaaggaggacaagttgaatggacctttt

SEQ ID NO: 6032 - DNA, 982 bp, Homo sapiens; identical to SEQ ID NO: 797

SEQ ID NO: 6033 - DNA, 952 bp, Homo sapiens; identical to SEQ ID NO: 798

SEQ ID NO: 6034 - DNA, 600 bp, Homo sapiens
aacctcaaatcgtgctgtgtgcccaccaagctgagacccatgtccatgttgtactatgatgatggtcaaaacatcatcaaaaaggacattcagaacatgatcgtggaggagtgtgggtgctcatagagttgcccagcccagggggaaagggagcaagagttgtccagagaagacagtggcaaaatgaagaaatttttaaggtttctgagttaaccagaaaaatagaaattaaaaacaaaacaaaacaaaaaaaaaaacaaaaaaaaacaaaagtaaattaaaaacaaacctgatgaaacagatgaaacagatgaaggaagatgtggaaatcttagcctgccttagccagggctcagagatgaagcagtgaagagacagattgggagggaaagggagaatggtgtaccctttatttcttctgaaatcacactgatgacatcagttgtttaaacggggtattgtcctttccccccttgaggttcccttgtgagcttgaatcaaccaatctgatctgcagtagtgtggactagaacaacccaaatagcatctagaaagccatgagtttgaaagggcccatcacaggcactttcctagcctaat

SEQ ID NO: 6035 - DNA, 600 bp, Homo sapiens
agcactgagggtctggtgccaatcctgtaggcacaaaaccagaagtttctacattctctatttttgttaatcatcttctctttttccagaatttggaagctagaatggtgggaatgtcagtagtgccagaaagagagaaccaagcttgtctttaaagttactgatcacaggacgttgctttttcactgtttcctattaatcttcagctgaacacaagcaaaccttctcaggaggtgtctcctaccctcttattgttcctcttacgctctgctcaatgaaaccttcctcttgagggtcattttcctttctgtattaattataccagtgttaagtgacatagataagaactttgcacacttcaaatcagagcagtgattctctcttctctccccttttccttcagagtgaatcatccagactcctcatggataggtcgggtgttaaagttgttttgattatgtaccttttgatagatccacataaaaagaaatgtgaagttttcttttactatcttttcatttatcaagcagagacctttgttgggaggcggtttgggagaacacatttctaatttgaatgaaatgaaatctattttcagtg

SEQ ID NO: 6036 - DNA, 600 bp, Homo sapiens
agtctgcttctgcaccttatcttaaagcacttacagataggccttcttgtgatcttgctctatctcacagcacactcagcacccccttctctgcccattccccagcctctcttcctatcccatcccatcccatcccatcccatcccatcccatcccgctcttttcctacttttccttccctcaaagcttccattccacatccggaggagaagaaggaaatgaatttctctacagatgtcccattttcagactgctttaaaaaaaatccttctaatctgctatgcttgaatgccacgcggtacaaaggaaaaagtatcatggaaatattatgcaaattcccagatttgaagacaaaaatactctaattctaaccagagcaagcttttttattttttatacaggggaatattttattcaaggtaaaattctaaataaaatataattgttttttatcttttctacagcaaatttataattttaagattccttttcttgtttatcagcagttgttattacatccttgtggcacatttttttttaattttgtaaaggtgaaaaaagcttttatgagctcatctagcaatcagattttcctgtgga

SEQ ID NO: 6037 - DNA, 600 bp, Homo sapiens
tgcagcctcgtgaacgtccacggtgctgtgctgtacgacaagttcatccggcctgagggagagatcaccgattacagaacccgggtcagcggggtcacccctcagcacatggtgggggccacaccatttgccgtggccaggctagagatcctgcagctcctgaaaggcaagctggtggtgggtcatgacctgaagcacgacttccaggcactgaaagaggacatgagcggctacacaatctacgacacgtccactgacaggctgttgtggcgtgaggccaagctggaccactgcaggcgtgtctccctgcgggtgctgagtgagcgcctcctgcacaagagcatccagaacagcctgcttggacacagctcggtggaagatgcgagggcaacgatggagctctatcaaatctcccagagaatccgagcccgccgagggctgccccgcctggctgtgtcagactgaagccccatccagcccgttccgcagggactagaggctttcggctttttgggacagcaactaccttgcttttggaaaatacatttttaatagtaaagtggctctatattttctctacgcaaaaaaaaaaaaaaaaaa

SEQ ID NO: 6038 - DNA, 1400 bp, Homo sapiens
caacaagagagccaaagtctgcagttgcatttccgagtctgggccaagactttcttgcagcgggagcaccagccatttagcctgcagtgtgaggctgtgtacaaagccctgaagatgccctaccgaatcctgcctcggcagctgccccaaaaagagcgtcaggtggccacagctgtgcaatggaccaaggcagaaggcagctatggcgtcccactgtggatcatcatcctagccatcctgtttggcctcctgctcctaggtctactcatctacatcctctacaagcttggattcttcaaacgctccctcccatatggcaccgccatggaaaaagctcagctcaagcctccagccacctctgatgcctgagtcctcccaatttcagactcccattcctgaagaaccagtccccccaccctcattctactgaaaaggaggggtctgggtacttcttgaaggtgctgacggccagggagaagctcctctccccagcccagagacatacttgaagggccagagccaggggggtgaggagctggggatccctcccccccatgcactgtgaaggacccttgtttacacataccctcttcatggatgggggaactcagatccagggacagaggcccagcctccctgaagcctttgcattttggagagtttcctgaaacaactggaaagataactaggaaatccattcacagttctttgggccagacatgccacaaggacttcctgtccagctccaacctgcaaagatctgtcctcagccttgccagagatccaaaagaagcccccagtaagaacctggaacttggggagttaagacctggcagctctggacagccccaccctggtgggccaacaaagaacactaactatgcatggtgccccaggaccagctcaggacagatgccacaaggatagatgctggcccagggccagagcccagctccaaggggaatcagaactcaaatggggccagatccagcctggggtctggagttgatctggaacccagactcagacattggcaccaatccaggcagatccaggactatatttgggcctgctccagacctgatcctggaggcccagttcaccctgatttaggagaagccaggaatttcccaggacctgaaggggccatgatggcaacagatctggaacctcagcctggccagacacaggccctccctgttccccagagaaaggggagcccactgtcctgggcctgcagaatttgggttctgcctgccagctgcactgatgctgcccctcatctctctgcccaacccttccctcaccttggcaccagacacccaggacttatttaaactctgttgcaagtgcaataaatctgacccagtgcccccactgaccagaactagaaaaaaaaa

SEQ ID NO: 6039 - DNA, 600 bp, Homo sapiens
aattcagagagttaggaaggaaaaaccaatagctttaaaacctgtgtgccattttaagagttacttaatgtttggtaacttttatgccttcactttacaaattcaagccttagataaaagaaccgagcaattttctgctaaaaagtccttgatttagcactatttacatacaggccatactttacaaagtatttgctgaatggggaccttttgagttgaatttattttattatttttattttgtttaatgtctggtgctttctatcacctcttctaatcttttaatgtatttgtttgcaattttggggtaagacttttttatgagtactttttctttgaagttttagcggtcaatttgcctttttaatgaacatgtgaagttatactgtggctatgcaacagctctcacctacgcgagtcttactttgagttagtgccataacagaccactgtatgtttacttctcaccatttgagttgcccatcttgtttcacactagtcacattcttgttttaagtgcctttagttttaacagttcactttttacagtgctatttactgaagttatttattaaatatgcctaaaatacttaaatcgga

SEQ ID NO: 6040 - DNA, 600 bp, Homo sapiens
taggaagctactgtgtcttcagcaatcagggagggctggtgcatcccaagacttcaattgaagaccaggatgagctgtcctctcttcttcaagtcccccttgtggcggggactgtgaaccgaggcagtgaggtgattgctgctgggatggtggtgaatgactggtgtgccttctgtggcctggacacaaccagcacagagctgtcagtggtggagagtgtcttcaagctgaatgaagcccagcctagcaccattgccaccagcatgcgggattccctcattgacagcctcacctgagtcaccttccaagttgttccatgggctcctggctctggactgtggccaaccttctccacattccgcccaatctgtaccggatgctggcagggaggtggcagagagctcactgggactgaggggctgggcacccaacccttttccacctgtgcttatcgcctggatctatcattactgcaaaaacctgctctgttgtgctggctggcaggccctgtggctgctggctgagggttctgctgtcctgtgccaccccattaaagtgcagttcctccggaaaaaaaaaaaaaaaaaaaaaaaaaaaaaa

SEQ ID NO: 6041 - DNA, 600 bp, Homo sapiens
taggcaccacagagaagaccttctagtgagcctgggccaggagcccacagtgcctgtacaggaaggtgcctggccatgtcacctggctgctaggccagagccatgccaggctgcgtccctccgagcttgggataaagcaaggggaccttggcactctcagctttccctgccacatccagcttgttgtcccaatgaaatactgagatgctgggctgtctctcccttccaggaatgctgggcccccagcctggccagacaagacgactgtcaggaagggtcggagtctgtaaaaccagcatacagtttggcttttttcacattgatcatttttatatgaaataaaaagatcctgcatttatggtgtagttctgagtcctgagacttttccgcgtgatggctatgccttgcacacaggtgttggtgatggggctgttgagatgcctgttgaaggtacatcgtttgcaaatgtcagtttcctctcctgtccgtgtttgtttagtacttttataatgaaaagaaacaagattgtttgggattggaagtaaagattaaaaccaaaagaatttgtgtttgtctgataaaaaaaaaaaaaaaaaaaaa

SEQ ID NO: 6042 - DNA, 600 bp, Homo sapiens
accaagctgtgctgcggcaggacggggtggtggtgaccatcaacaagaagaggaacctggtggtgtctgtggacgacggtggcacctttgaggttgttttgcaccgagtgtggaaggggagctcggtccaccaggacttcctgggcttctatgtgctggacagtcatcggatgtcagcccggacgcacgggctgctggggcaatttttccaccccatcggttttgaagtgtctgacatccacccaggctccgaccccacaaagccagatgccacgatggtggtgaggaaccgccggctcacggtcaccaggggtttgcaaaaagactacagcaaggacccgtggcatggggccgaggtgtcctgctggttcattcacaacaatggggctggactcatcgatggtgcctacactgattatatcgtccccgacatcttctgagccctctggccagcacgcctgtcctcccccggggccaaggcagaggaggaggacgacatcctgacctgctgctgaggctgtacctccttgactaagctggttccttgtgtcaaagcacctcatgccttccattaaagagaggccgtgtccaaaaaaaaaa

SEQ ID NO: 6043 - DNA, 1400 bp, Homo sapiens
agcgttatcacggcgacttcggctaacacgcagttagtcttggagaccctggcccagatggacgacttgcaggattttctatcgaaagacaagcatgcagatcccgatttcaccaggaaactgtgggcctatctaaccatcaaccaactgctagctgaacgaagcctggctcctacagctgccgccaagagaagaattacaagatcgatcctgcagatgtctctagaccaccacattgtgactccgctgacctcgctggtgatcgagaacgaggctggggatgagcgcatgctggcggatgccccaccgcaggatccctcctgctgctcaggggccctgtattacggcagcaaagtggttccagattccaccccgtcttgggccaatccttcaccaacgcccgtgatctccatgctggcacaaggatctcaggtgctagagtccacgccacccccacatgtgatgagagttgaaaatgacccacatttcatcatttatctaccaaaaagccaaaagaacatttgtttcaatattgactcagaacctggaaaaatcctcaacctggtttctgacccagaatcaggaattgtagtcaacggtcagcttgttggtgccaagaagcccaacaatggaaaactaagcacctattttggaaaactgggattttatttccaaagtgaagacataaaaatagaaatcagcactgagaccatcaccctgagccatggttctagcacattctccttgtcctggtccgacacggctcaagtcacgaatcagagggtgcagatctcagtgaagaaagaaaaagtggtaactatcaccctggataaagagatgtccttttctgttttacttcatcgtgtttggaagaagcatcccgtcaatgttgactttctgggaatctacataccccctacaaacaagttctcacctaaagcccacggactaataggccagttcatgcaggaaccaaagatacacatcttcaatgagagaccaggaaaggaccctgagaagccagaggccagcatggaagtgaaggggcagaagctgatcatcaccaggggcttacagaaagactacagaacggatctagtgtttggaacggacgttacctgctggtttgtgcacaacagtggaaaaggattcattgacgggcattacaaggattacttcgtgcctcagctctacagctttctcaaacggccttaaaggtttatagtttgggaaattatatatattaatatacatctttcccctgtcacttttgcagatattcttcggtttgaataattaaaatgaaccagatatcagggtggttaattaaaatgaaccagatatcagggtggtttataaagcctgtaaacacacctaagaaaataaacattttacaaatg

SEQ ID NO: 6044 - DNA, 1400 bp, Homo sapiens
tggccaacccactgctgacgggtgtggagatggagtaccccgagaacgctatcctggacctcacccagaacacttaccagcacttctacgatggctctgagatcgtggtggccgggcgcctggtggacgaggacatgaacagctttaaggcagatgtgaagggccatggggccaccaacgacctgaccttcacagaggaggtggacatgaaggagatggagaaggccctgcaggagcgggactacatcttcgggaattacattgagcggctctgggcctacctcaccattgagcagctgctggagaagcgcaagaacgcccatggcgaggagaaggagaacctcacggcccgggccctggacctgtccctcaagtatcactttgtgactccactgacctcaatggtggtgaccaagcctgaggacaacgaggatgagagggccattgccgacaagcctggggaagatgcagaagccacaccggtgagccccgccatgtcctacctgaccagctaccagcctcctcaaaacccctactactatgtggacggggatccccacttcatcatccaaattccggagaaagacgatgccctctgcttcaacatcgatgaagccccaggcacagtgctgcgccttattcaggatgcagtcacaggcctcacagttaatgggcagatcactggcgacaagagaggcagccctgactccaagaccagaaagacttactttggaaaactgggcattcgcaatgctcagatggacttccaggtggaggtgacaacggagaagatcacctgtggaacaggccgtgcgagcactttcagctggctggacacagtcacagtcacgcaggatgggctgtccatgatgatcaacaggaagaacatggtggtctcctttggagatggggttaccttcgtggtcgtcctacaccaggtgtggaagaaacatcctgtccaccgtgactttctaggcttctacgtggtggacagtcaccggatgtcagcacagacgcatgggctgctggggcaattcttccaaccctttgactttaaagtgtctgacatccggccaggctctgaccccacaaagccagatgccacattggtggtgaagaaccatcagctgattgtcaccaggggctcccagaaagactacagaaaggatgccagcatcggcacgaaggttgtctgctggttcgtccacaacaacggagaagggctgattgatggtgtccacactgactacattgtccccaacctgttttgagtagacacaccagctcctgttgggatggatggcccggattttatggcatctggaacatgggcacagagaggggcctgtgggaggggctgggaaaataaagtccaaggtcgagccagaaaaaaaaaaaaa

SEQ ID NO: 6045 - DNA, 1400 bp, Homo sapiens
gggaagctgcctacacagaacatcactttccaaacggagtccagtgtggcagagcaggaggcggagttccagagccccaagtatatcttccacaacttcatggagaggctctgggcatacctgactatccagcagctgctggagcaaactgtctccgcatccgacgctgatcagcaggccctccggaaccaagcgctgaatttatcacttgcctacagctttgtcacgcctctcacatctatggtagtcaccaaacccgatgaccaagagcagtctcaagttgctgagaagcccatggaaggcgaaagtagaaacaggaatgtccactcaggttccactttcttcaaatattatctccagggagcaaaaataccaaaaccagaggcttccttttctccaagaagaggatggaatagacaagctggagctgctggctcccggatgaatttcagacctggggttctcagctccaggcaacttggactcccaggacctcctgatgttcctgaccatgctgcttaccaccccttccgccgtctggccatcttgcctgcttcagcaccaccagccacctcaaatcctgatccagctgtgtctcgtgtcatgaatatgaaaatcgaagaaacaaccatgacaacccaaaccccagcccccatacaggctccctctgccatcctgccactgcctgggcagagtgtggagcggctctgtgtggaccccagacaccgccaggggccagtgaacctgctctcagaccctgagcaaggggttgaggtgactggccagtatgagagggagaaggctgggttctcatggatcgaagtgaccttcaagaaccccctggtatgggttcacgcatcccctgaacacgtggtggtgactcggaaccgaagaagctctgcgtacaagtggaaggagacgctattctcagtgatgcccggcctgaagatgaccatggacaagacgggtctcctgctgctcagtgacccagacaaagtgaccatcggcctgttgttctgggatggccgtggggaggggctccggctccttctgcgtgacactgaccgcttctccagccacgttggagggacccttggccagttttaccaggaggtgctctggggatctccagcagcatcagatgacggcagacgcacgctgagggttcagggcaatgaccactctgccaccagagagcgcaggctggattaccaggaggggcccccgggagtggagatttcctgctggtctgtggagctgtagttctgatggaaggagctgtgcccaccctgtacacttggcttccccctgcaactgcagggccgcttctggggcctggaccaccatggggaggaagagtcccactcattacaaataaagaaaggtggtgtgagcctggg

SEQ ID NO: 6046 - DNA, 600 bp, Homo sapiens
ctctgatgatatcaacaagtttctttggatggtccggattggagggagcacagatacaggcaaacatatcaaggagaatgactattatactccaactggggagttccgtgtggaccgtgaaggttctccagtgctgctcaactgcctcatgtacaagatgtgttactatcgctttggacaggtttacacagaagccaagcgtcctccaggctttgaccgtgtccgaaatgctgagattgggaataaagactttgagcttgatgtcctggaggaaggctataccacagaacattggctggtcaggatatacaaggtaaaggacctggataatcgaggcttgtcaaggacataaatgtcacgtccagctctgatatcttcgcactgagcacatcacatttaggacgttgaagattttttttttttttttttttttaatatgcagtttgtaagaacaaaactggatggcatccgaattgtctggaagttttgtcttgggcatgatgggctgggccaaatgaaatgatttttataattctaaacaggttaccaaatgaaatgtcatggctttactttggtcaattaaaggggggaattttttta

SEQ ID NO: 6047 - DNA, 1400 bp, Homo sapiens
gaaccatgggctacgcaacggtggtggcgtgggcgacattctccgcaagccctccaaagatgagtctctcttcccagcccgagtggtctatgacctcctgttcttcttcatcgtcatcatcattgtgctgaacctcatctttggggtaatcatcgacaccttcgctgacctgcgtagtgagaagcagaagaaggaggagattcttaagacgacatgcttcatctgtggtctggagagggacaagtttgataacaagacagtgtcatttgaggaacacatcaagctggagcacaacatgtggaactacttgtacttcattgtgctggtccgcgtgaagaacaagaccgactacacgggccctgagagctacgtggcccagatgatcaagaacaagaacctggactggttcccccggatgcgggccatgtcccttgtcagcaatgagggcgagggggagcagaatgagattcggattctccaggacaagctcaactccaccatgaagctggtgtcccacctcactgcccagctcaacgagctcaaggagcagatgacggagcagcggaaacgcaggcaacgcctaggctttgtggatgtccagaactgcattagccgctgaggagagccaccgaaggccccaacaggggatgctcatcactggagactgcgactgggaagaacactgccccctccctcgggttgggtggcccagccagctggccagcctccactcccactctgccagacaccctgacacccacccaggctttgaagagcatggagggggagcctcagagctgacagtcctgcttagagcccttaaaaagacttgaaagttcactgggactcagtttaccttaatgccttagcagaagataaatcctacctagagacctttgttccttaaagcaataactgacaactctttgtagtcctccttgtgggtagttaagagtggggtcacccctttaactccaagcactacattttggcggctgcggcctctgggggaggtggcagttatgctgttactagtgattttagggctttgttatttaacttatttcaagggtgctgtgctcagccctgcccatggctgtgcagctccctccgtgcctcagatctgctgtagccagtgcagacctcactgtcgtgtccatgccacccccggcatggctccaggtggcctggtgactccatgatggacgatcttgctcccaggacctgcctcttcccaggcttcctggggaagagttgtacgcccaggcaacaagggctgagctgcgcttgcgtggctgtttcatgaccgcttgtttttctccttttggtgtaatgttttacaaatcctttggcctgagaactaatatgttaattgccttaaataaattaatagaaatcta

SEQ ID NO: 6048 - DNA, 1400 bp, Homo sapiens
tggcgtccacggccaacatgctcagggaacaggtggcacagcttaaacagaaagtcatgaaccacgttaacagtgggtgccaactcatgctaacgcagcagttgcaaacattttgaagagagaccgtcgggggctgaggggcaacgaagaaaaaaaataacacagagagacagacttgagaacttgacaagttgcgacggagagaaaaaagaagtgtccgagaactaaagccaagggtatccaagttggactgggttcggtctgacggcgcccccagtgtgcacgagtgggaaggacttggtcgcgccctcccttggcgtggagccagggagcggccgcctgcgggctgccccgctttgcggacgggctgtccccgcgcgaacggaacgttggactttcgttaacattgaccaagaactgcatggacctaacattcgatctcattcagtattaaaggggggagggggagggggttacaaactgcaatagagactgtagattgcttctgtagtactccttaagaacacaaagcggggggagggttggggaggggcggcaggagggaggtttgtgagagcgaggctgagcctacagatgaactctttctggcctgctttcgttaactgtgtatgtacatatatatattttttaatttgattaaagctgattactgtcaataaacagcttcatgcctttgtaagttatttcttgtttgtttgtttgggtatcctgcccagtgttgtttgtaaataagagatttggagcactctgagtttaccatttgtaataaagtatataatttttttatgttttgtttctgaaaattccagaaaggatatttaagaaaatacaataaactattggaaagtactcccctaacctcttttctgcatcatctgtagatcctagtctatctaggtggagttgaaagagttaagaatgctcgataaaatcactctcagtgcttcttactattaagcagtaaaaactgttctctattagacttagaaataaatgtacctgatgtacctgatgctatgtcaggcttcatactccacgctcccccagcgtatctatatggaattgcttaccaaaggctagtgcgatgtttcaggaggctggaggaaggggggttgcagtggagagggacagcccactgagaagtcaaacatttcaaagtttggattgcatcaagtggcatgtgctgtgaccatttataatgttagaaattttacaataggtgcttattctcaaagcaggaattggtggcagattttacaaaagatgtatccttccaatttggaatcttctctttgacaattcctagataaaaagatggcctttgtcttatgaatatttataacagcattctgtcacaataaatgtattcaaataccaat

SEQ ID NO: 6049 - DNA, 600 bp, Homo sapiens
cctcctccgggagcaggtggcccagctcaaacagaaggtcatgacccacgtcagcaacggctgtcagctgctgcttggggtcaagggacacgccttctgaacgtcccctgcccctttacggacaccccctcgcttggacggctgggcacacgcctcccactggggtccagggagcaggcggtgggcacccaccctgggacctaggggcgccgcaaaccacactggactccggcccccctaccctgcgcccagtccttccacctcgacgtttacaagcccccccttccacttttttttgtatgttttttttctgctggaaacagactcgattcatattgaatataatatatttgtgtatttaacagggaggggaagagggggcgatcgcggcggagctggccccgccgcctggtactcaagcccgcggggacattgggaaggggacccccgccccctgccctcccctctctgcaccgtactgtggaaaagaaacacgcacttagtctctaaagagtttattttaagacgtgtttgtgtttgtgtgtgtttgttctttttattgaatctatttaagtaaaaaaaaaattggttctttattaa

SEQ ID NO: 6050 - DNA, 600 bp, Homo sapiens
atatgctttgttttggaatttaccggctgagagatgctcacctcagcacccccagtcagtgcacaaagaggtatgtcatcaccaacccgccctatgagtttgagctcgtgccgacggacctgatcttctgcttaatgcagtttgaccacaatgccggccagtcccgggccagcctgtcccattcctcccactcgtcgcagtcctccagcaagaagagctcctctgttcactccatcccatccacagcaaaccgacagaaccggcccaagtccagggagtcccgggacaaacagaagtacgtgcaggaagagcggctttgatatgtgtatccaccgccactgtgtgaaactgtatctgccactcatttccccagttggtgtttccaacaaagtaactttccctgttttcccctgtagtccccccctttttttttacacatatttgcatatgtatgatagtgtgcatgtggttgtcatttttatttcaccaccataaaacccttgagcacaacagcaaataagcaggacgggcccaaagttatttatgattctggggggaaaataacccaaaggcatgctccagacataaatagctcactgc

SEQ ID NO: 6051 - DNA, 600 bp, Homo sapiens
acttgtttgacgacgaaaacacagcccagtttgttcatgtcagtgagagcttcccacaccctggcttcaacatgagcctcctggagaaccacacccgccaagcagacgaggactacagccacgacctcatgctgctccgcctgacagagcctgctgataccatcacagatgctgtgaaggtcgtggagttgcccaccgaggaacccgaagtggggagcacctgtttggcttccggctggggcagcatcgaaccagagaatttctcatttccagatgatctccagtgtgtggacctcaaaatcctgcctaatgatgagtgcaaaaaagcccacgtccagaaggtgacagacttcatgctgtgtgtcggacacctggaaggtggcaaagacacctgtgtgggtgattcagggggcccgctgatgtgtgatggtgtgctccaaggtgtcacatcatggggctacgtcccttgtggcacccccaataagccttctgtcgccgtcagagtgctgtcttatgtgaagtggatcgaggacaccatagcggagaactcctgaacgcccagccctgtcccctacccccagtaaaatcaaatgtgcatcc

SEQ ID NO: 6052 - DNA, 1400 bp, Homo sapiens
tctgggacatcagaacaaaccaaggctgtggtagatggaggtgccatcccagcattcatttctctgttggcatctccccatgctcacatcagtgaacaagctgtctgggctctaggaaacattgcaggtgatggctcagtgttccgagacttggttattaagtacggtgcagttgacccactgttggctctccttgcagttcctgatatgtcatctttagcatgtggctacttacgtaatcttacctggacactttctaatctttgccgcaacaagaatcctgcacccccgatagatgctgttgagcagattcttcctaccttagttcggctcctgcatcatgatgatccagaagtgttagcagatacctgctgggctatttcctaccttactgatggtccaaatgaacgaattggcatggtggtgaaaacaggagttgtgccccaacttgtgaagcttctaggagcttctgaattgccaattgtgactcctgccctaagagccatagggaatattgtcactggtacagatgaacagactcaggttgtgattgatgcaggagcactcgccgtctttcccagcctgctcaccaaccccaaaactaacattcagaaggaagctacgtggacaatgtcaaacatcacagccggccgccaggaccagatacagcaagttgtgaatcatggattagtcccattccttgtcagtgttctctctaaggcagattttaagacacaaaaggaagctgtgtgggccgtgaccaactataccagtggtggaacagttgaacagattgtgtaccttgttcactgtggcataatagaaccgttgatgaacctcttaactgcaaaagataccaagattattctggttatcctggatgccatttcaaatatctttcaggctgctgagaaactaggtgaaactgagaaacttagtataatgattgaagaatgtggaggcttagacaaaattgaagctctacaaaaccatgaaaatgagtctgtgtataaggcttcgttaagcttaattgagaagtatttctctgtagaggaagaggaagatcaaaacgttgtaccagaaactacctctgaaggctacactttccaagttcaggatggggctcctgggacctttaacttttagatcatgtagctgagacataaatttgttgtgtactacgtttggtattttgtcttattgtttctctactaagaactctttcttaaatgtggtttgttactgtagcactttttacactgaaactatacttgaacagttccaactgtacatacatactgtatgaagcttgtcctctgactaggtttctaatttctatgtggaatttcctatcttgcagcatcctgtaaataaacattcaagtccacccttaaaaaaaa

SEQ ID NO: 6053 - DNA, 600 bp, Homo sapiens
tcatttaaatacgcagaatatttcttaagaccaatgctccaatatgtatgtgacaacagcccagaagtcaggcaagcagctgcatatggcctgggagtcatggcacagtacggtggagataattatcgccctttttgtacagaagcacttcccctgctggtaagagttattcagtctgcggattctaagaccaaagaaaatgtcaatgctacagagaactgcatctcagcagtagggaaaatcatgaagttcaagcctgactgtgtaaacgttgaagaggtccttccacactggttgtcttggcttccactacatgaagataaagaagaagctgttcagactttcaattatctgtgtgacctgattgaaagtaatcatccaattgttcttggcccaaacaataccaatctgcccaaaatatttagtataattgcggaaggagaaatgcacgaggcaattaaacatgaagatccttgtgccaaacgtctggccaatgtcgttcgccaagtacagacttctggaggactgtggactgagtgcatagcacagctcagtcctgagcagcaggccgccattcaggagctcctgaactctgcgtga

SEQ ID NO: 6054 - DNA, 1400 bp, Homo sapiens
ccccggccctcacccggcggcgccctcctcctgggggcccaggccccgccgctacacggtgctgagcgtgggtcccggaggcctgcgcagcgggaggctgcccctgcagccccgcgtccagctggatgagcgcggccggcagcgcggggacttctcgctatggctgcgcccagcccggcgcgcggacgccggcgagtaccgcgccgcggtgcacctcagggaccgcgccctctcctgccgcctccgtctgcgcctgggccaggcctcgatgactgccagccccccaggatctctcagagcctccgactgggtcattttgaactgctccttcagccgccctgaccgcccagcctctgtgcattggttccggaaccggggccagggccgagtccctgtccgggagtccccccatcaccacttagcggaaagcttcctcttcctgccccaagtcagccccatggactctgggccctggggctgcatcctcacctacagagatggcttcaacgtctccatcatgtataacctcactgttctgggtctggagcccccaactcccttgacagtgtacgctggagcaggttccagggtggggctgccctgccgcctgcctgctggtgtggggacccggtctttcctcactgccaagtggactcctcctgggggaggccctgacctcctggtgactggagacaatggcgactttacccttcgactagaggatgtgagccaggcccaggctgggacctacacctgccatatccatctgcaggaacagcagctcaatgccactgtcacattggcaatcatcacagtgactcccaaatcctttgggtcacctggatccctggggaagctgctttgtgaggtgactccagtatctggacaagaacgctttgtgtggagctctctggacaccccatcccagaggagtttctcaggaccttggctggaggcacaggaggcccagctcctttcccagccttggcaatgccagctgtaccagggggagaggcttcttggagcagcagtgtacttcacagagctgtctagcccaggtgcccaacgctctgggagagccccaggtgccctcccagcaggccacctcctgctgtttctcacccttggtgtcctttctctgctccttttggtgactggagcctttggctttcacctttggagaagacagtggcgaccaagacgattttctgccttagagcaagggattcaccctccgcaggctcagagcaagatagaggagctggagcaagaaccggagccggagccggagccggaaccggagcccgagcccgagcccgagccggagcagctctgacctggagctgaggcagccagcagatctcagcagcccagtccaaataaacgtcctgtctagcagc

SEQ ID NO: 6055 - DNA, 1400 bp, Homo sapiens
gagaaatacaatgatggcctgtggcatgatgtgatatttattcgagaaaggagcagtggccgactggtaattgatggtctccgagtcctagaagaaagtcttcctcctactgaagctacctggaaaatcaagggtcccatttatttgggaggtgtggctcctggaaaggctgtgaaaaatgttcagattaactccatctacagttttagtggctgtctcagcaatctccagctcaatggggcctccatcacctctgcttctcagacattcagtgtgaccccttgctttgaaggccccatggaaacaggaacttacttttcaacagaaggaggatacgtggttctagatgaatctttcaatattggattgaagtttgaaattgcatttgaagtccgtcccagaagcagttccggaaccctggtccacggccacagtgtcaatggggagtacctaaatgttcacatgaaaaatggacaggtcatagtgaaagtcaataatggcatcagagatttttccacctcagtaacacccaagcagagtctctgtgatggcagatggcacagaattacagttattagagattctaatgtggttcagttggatgtggactctgaagtgaaccatgtggttggacccctgaatccaaaaccaattgatcacagggagcctgtgtttgttggaggtgttccagaatctctactgacaccacgcttggcccccagcaaacccttcacaggctgcatacgccactttgtgattgatggacacccagtgagcttcagtaaagcagccctggtcagcggcgccgtaagcatcaactcctgtccagcagcctgacatgacagagcacagctgcccaaatacaaagttctttagagcactgaaagaaacacaaagccagccaggaggaacagtaactcttccttcgggtggaagctttcatcgagttgaacaggacttaaacgaatcatcagggaccggatatttcttatttctcatttggattcttaaccttgaatccaaagtgtctgcaatggacaacaattgaaggagaggcaaacttacttgtattgagagcacacgcaattcctactggtgaaattactgtttctgtttctaataaaatagaagggattccaaataaacacttgcacacatttttgaagtgcggctagattctcagattcacctttcttccagggaagataactttcaatctatataaaaatctctgtcctaaaactacctttctttattttgaagagacttactaacttacatataatctaaattagatgatagatttctttttagcccttttgtttggtctatcagtataagaagaatattttaggtttatagctgaagttatcaaggtttaataaagtaaatttctaaca

SEQ ID NO: 6056 - DNA, 1400 bp, Homo sapiens
atgctcagaaggaggacttcaacagcaaacacatggccaaccagcgggcacttggcaagctctctgcccatacccacaccctgagcctgacagacataaatgagctggtgtgtggggcaccaggggatgcaccctgtgctacaagcccttgtgggggtgccggctgtcgagatgaggatgggcagccgcgctgtgggggcctcagctgcaatggggcagcggctacagcagacctagcactgggccgggcccggcacacacaggcagagctgcagcgggcactggcagaaggtggtagcatcctcagcagagtggctgagactcgtcggcaggcaagcgaggcacagcagcgggcccaggcagccctggacaaggctaatgcttccaggggacaggtggaacaggccaaccaggaacttcaagaacttatccagagtgtgaaggacttcctcaaccaggagggggctgatcctgatagcattgaaatggtggccacacgggtgctagagctctccatcccagcttcagctgagcagatccagcacctggcgggcgcgattgcagagcgagtccggagcctggcagatgtggatgcgatcctggcacgtactgtaggagatgtgcgtcgtgccgagcagctactgcaggatgcacggcgggcaaggagctgggctgaggatgagaaacagaaggcagagacagtacaggcagcactggaggaggcccagcgggcacagggtattgcccagggtgccatccggggggcagtggctgacacacgggacacagagcagaccctgtaccaggtacaggagaggatggcaggtgcagagcgggcactgagctctgcaggtgaaagggctcggcagttggatgctctcctggaggctctgaaattgaaacgggcaggaaatagtctggcagcctctacagcagaagaaacggcaggcagtgcccagggtcgtgcccaggaggctgagcagctgctacgcggtcctctgggtgatcagtaccagacggtgaaggccctagctgagcgcaaggcccaaggtgtgctggctgcacaggcaagggcagaacaactgcgggatgaggctcgggacctgttgcaagccgctcaggacaagctgcagcggctacaggaattggaaggcacctatgaggaaaatgagcgggcactggagagtaaggcagcccagttggacgggttggaggccaggatgcgcagcgtgcttcaagccatcaacttgcaggtgcagatctacaacacctgccagtgacccctgcccaaggcctaccccagttcctagcactgccccacatgcatgtctgcctatgcactgaagagctcttggcccggcagggcccccaataaaccagtgtgaacccccaaaaaaaaa

SEQ ID NO: 6057 - DNA, 1400 bp, Homo sapiens
ttgacagcgtctcattttcctacaacactggtgataacacaacatttcctgatgctgaagataaaggaattcttactgttgatgaacttttggccatcagaattccattgaatgacctttttagatgcaatagtttatcaactttggaaaagaatgatgttgtccaacactactgggatgttcttgtacaagcttttgtccaaaatggcacagtgagcacaaatgagttcctgtgtgataaagacaaaacttcaacagtggcacccaccatacacaccactgtgccatctcctactacaacacctactccaaaggaaaaaccagaagctggaacctattcagttaataatggcaatgatacttgtctgctggctaccatggggctgcagctgaacatcactcaggataaggttgcttcagttattaacatcaaccccaatacaactcactccacaggcagctgccgttctcacactgctctacttagactcaatagcagcaccattaagtatctagactttgtctttgctgtgaaaaatgaaaaccgattttatctgaaggaagtgaacatcagcatgtatttggttaatggctccgttttcagcattgcaaataacaatctcagctactgggatgcccccctgggaagttcttatatgtgcaacaaagagcagactgtttcagtgtctggagcatttcagataaatacctttgatctaagggttcagcctttcaatgtgacacaaggaaagtattctacagctcaagactgcagtgcagatgacgacaacttccttgtgcccatagcggtgggagctgccttggcaggagtacttattctagtgttgctggcttattttattggtctcaagcaccatcatgctggatatgagcaattttagaatctgcaacctgattgattatataaaaatacatgcaaataacaagattttcttacctctcagttgttgaaacactttgcttcttaaaattgatatgttgaaactttaattcttttatcaatcccagcattttgagatcagtctttattaataaaacctgttctctttaatcagcttaaaatccaaagtgtcatatttactggtcctggagacaaacttgttcaaaagaacatcaacgtgcaatgttttaaggtctatcttaagaagccctggccaaattttgatcctaaccttgaagtatgccttgaacttattaacatggccattataagaataaaatatgtagttgtgtcttaatggaattaataaatgtcatttcactactggtgttctgttttcaatgtataaggactatagtgatttaaactcatcaatgtgcctttgcataaagttgattaaataaatattgatgtggtataaatgcccatcagatatgct

SEQ ID NO: 6058 - DNA, 1039 bp, Homo sapiens; identical to SEQ ID NO: 823

SEQ ID NO: 6059 - DNA, 600 bp, Homo sapiens
acagggagttccctgagatgaatctggaatcggtgacacccatgaccctcacgaccctggaagggggcaacctggaagccaaggtcaccatgctgataagtggccggtgccaggaggtgaaggccgtcctggagaaaactgacgagccgggaaaatacacggccgacgggggcaagcacgtggcatacatcatcaggtcgcacgtgaaggaccactacatcttttactgtgagggcgagctgcacgggaagccggtccgaggggtgaagctcgtgggcagagaccccaagaacaacctggaagccttggaggactttgagaaagccgcaggagcccgcggactcagcacggagagcatcctcatccccaggcagagcgaaacctgctctccagggagcgattaggggcaggggacaccttggctcctcagcagccaaggacggcaccatccagcacctccgtcattcacagggacatggaaaaagctccccacccctgcagaacgcggctggctgcaccccttcctaccaccccccgccttccccctgccctgcgccccctctcctggttctccataaagagcttcagcagttaaaaaaa

SEQ ID NO: 6060 - DNA, 1400 bp, Homo sapiens
tgcctctgacccctcacctgtgccaagatgtttaaagtgtgatggttcaaaattcaaaaaaaaaaaaaaaaaactcgagaccggcgccggaggagacgcacgcagctgactttgtcttctccgcacgactgttacagaggtctccagagccttctctctcctgtgcaaaatggcaactcttaaggaaaaactcattgcaccagttgcggaagaagaggcaacagttccaaacaataagatcactgtagtgggtgttggacaagttggtatggcgtgtgctatcagcattctgggaaagtctctggctgatgaacttgctcttgtggatgttttggaagataagcttaaaggagaaatgatggatctgcagcatgggagcttatttcttcagacacctaaaattgtggcagataaagattattctgtgaccgccaattctaagattgtagtggtaactgcaggagtccgtcagcaagaaggggagagtcggctcaatctggtgcagagaaatgttaatgtcttcaaattcattattcctcagatcgtcaagtacagtcctgattgcatcataattgtggtttccaacccagtggacattcttacgtatgttacctggaaactaagtggattacccaaacaccgcgtgattggaagtggatgtaatctggattctgctagatttcgctaccttatggctgaaaaacttggcattcatcccagcagctgccatggatggattttgggggaacatggcgactcaagtgtggctgtgtggagtggtgtgaatgtggcaggtgtttctctccaggaattgaatccagaaatgggaactgacaatgatagtgaaaattggaaggaagtgcataagatggtggttgaaagtgcctatgaagtcatcaagctaaaaggatataccaactgggctattggattaagtgtggctgatcttattgaatccatgttgaaaaatctatccaggattcatcccgtgtcaacaatggtaaaggggatgtatggcattgagaatgaagtcttcctgagccttccatgtatcctcaatgcccggggattaaccagcgttatcaaccagaagctaaaggatgatgaggttgctcagctcaagaaaagtgcagataccctgtgggacatccagaaggacctaaaagacctgtgactagtgagctctaggctgtagaaatttaaaaactacaatgtgattaactcgagcctttagttttcatccatgtacatggatcacagtttgctttgatcttcttcaatatgtgaatttgggctcacagaatcaaagcctatgcttggtttaatgcttgcaatctgagctcttgaacaaataaaattaactattgtagtgtgaaaaaaaaaaaaaaaaaaaaaaaaaa

SEQ ID NO: 6061 - DNA, 526 bp, Homo sapiens; identical to SEQ ID NO: 826

SEQ ID NO: 6062 - DNA, 914 bp, Homo sapiens; identical to SEQ ID NO: 827

SEQ ID NO: 6063 - DNA, 1400 bp, Homo sapiens
gcagccgctgtctcgaaggggcctgtgtggtcaacaagcagagtggggatgtcacctgcaactgcacggatggccgggtggcccccagctgtctgacctgcgtcggccactgcagcaatggcggctcctgtaccatgaacagcaaaatgatgcctgagtgccagtgcccaccccacatgacagggccccggtgtgaggagcacgtcttcagccagcagcagccaggacatatagcctccatcctaatccctctgctgttgctgctgctgctggttctggtggccggagtggtattctggtataagcggcgagtccaaggggctaagggcttccagcaccaacggatgaccaacggggccatgaacgtggagattggaaaccccacctacaagatgtacgaaggcggagagcctgatgatgtgggaggcctactggacgctgactttgccctggaccctgacaagcccaccaacttcaccaaccccgtgtatgccacactctacatggggggccatggcagtcgccactccctggccagcacggacgagaagcgagaactcctgggccggggccctgaggacgagataggggaccccttggcatagggccctgccccgtcggactgcccccagaaagcctcctgccccctgccggtgaagtccttcagtgagcccctccccagccagcccttccctggccccgccggatgtataaatgtaaaaatgaaggaattacattttatatgtgagcgagcaagccggcaagcgagcacagtattatttctccatcccctccctgcctgctccttggcacccccatgctgccttcagggagacaggcagggagggcttggggctgcacctcctaccctcccaccagaacgcaccccactgggagagctggtggtgcagccttcccctccctgtataagacactttgccaaggctctcccctctcgccccatccctgcttgcccgctcccacagcttcctgagggctaattctgggaagggagagttctttgctgcccctgtctggaagacgtggctctgggtgaggtaggcgggaaaggatggagtgttttagttcttgggggaggccaccccaaaccccagccccaactccaggggcacctatgagatggccatgctcaacccccctcccagacaggccctccctgtctccagggcccccaccgaggttcccagggctggagacttcctctggtaaacattcctccagcctcccctcccctggggacgccaaggaggtgggccacacccaggaagggaaagcgggcagccccgttttggggacgtgaacgttttaataatttttgctgaattctttacaactaaataacacagatattcttataaataaaattgtaaaaaaaaaaa

SEQ ID NO: 6064 - DNA, 600 bp, Homo sapiens
accagaagcagctggagattgcgcacgagaagctgaggcacgcagagagcgtgggcgacggcgagcgtgtgagccgcagccgcgagaagcacgccctgctggaggggcggaccaaggagctgggctacacggtgaagaagcatctgcaggacctgtccggcaggatctccagagctcggcacaacgaactctgaaggcactggggagcccagcccggcagggaagaggccagcgtgaaggacctgggctcttggccgtggcatttccgtggacagcccgccgtcagggtggctggggctggcacgggtgtcgaggcaggaaggattgtttctggtgactgcagccgctgccgtcgcgacacagggcttggtggtggtagcatttgggtctgagatcggcccagctctgactgaaggggcttggcttccactcagcatcagcgtggcagtcaccaccccagtgaggacctcgatgtccagctgctgtcaggtctgatagtcctctgctaaaacaacacgatttacataaaaaatcttacacatctgccaccggaaataccatgcacagagtccttaaaaaatagagtgcagtatttaaacc

SEQ ID NO: 6065 - DNA, 1400 bp, Homo sapiens
aggcagcttcaggcccaggacgaggagggaggcggccatgtccccgagcggccgaagcaggagatgctcctcagcctgaagccctcggaggcccctgaactggatgaggacgagggctttggcgactggtcccagaggccagagcagcggcagcagcacgagggggcgcagggcgccttggacagcggagagcccccccagtgcaggagtcctgagggggagcaagaggacaggcccggcctgcatgcctacgaaaaggaggacagtgatgaagtccacctggaggagttgagtctgagcaaggaggggccaggcccagaggacactgtccaggacaacctgggggccgcaggggctgaggaggaacaggaggagcaccagaaatgtcagcagcccaggacacccagccccttggtcttggaggggaccatcgaacagagctcgcctcccctgagccctaccaccaaactcatcgacaggaccgagtccctaaaccgctccatagagaagagtaacagtgtgaagaaatcccagccagacttgcccatctccaagattgatcagtggctggaacaatacacccaggccatcgagaccgctggccggacccccaagctagcccgccaggcctccatagagctgcccagcatggctgtggccagtaccaagagtcggtgggagacgggtgaggtacaggctcagtctgcggccaagactccgtcctgcaaggatattgtggctggagacatgagcaagaaaagcctctgggagcagaagggaggctccaagacctcatcaacaattaagagcaccccatctgggaagaggtataagtttgtggccaccgggcatgggaagtatgagaaggtgcttgtggaagggggcccggctccctaggcgtcccatctcgcttcctgggtctgcaggtccagccggctggcaccctccatgtacccaggggagattccagccagacacccgccccccggccctggctaagaagttgcttcctgttgccagcatgacctaccctcgcctctttgatgccatccgctgccacctccttttgctcctggaccctttagcctctctgcccttccactctctgaccaccgcccccgccctccccacccagctccgcttcttgttacttgggggaggaaagaaactcctgatcattggccaaagggacttacccctggagaggccaagtgccttctaggaagttaggaggttgaggcacagcctgtgcagagagggtgggtcacccccccagatccaaggggaaactgcaggtcaagggctgataacggccatgcaggatgcttgatgctgcgtcccccgctgcttgccgccccccaccccgccattttgtataataaagctccctgtgtattctc

SEQ ID NO: 6066 - DNA, 600 bp, Homo sapiens
ggaaataacaatgaggcatgggctaaggatttgaagctggcagactttgcgctgctgtgcctcgatggcaaacggaagcctgtgactgaggctagaagctgccatcttgccatggccccgaatcatgccgtggtgtctcggatggataaggtggaacgcctgaaacaggtgctgctccaccaacaggctaaatttgggagaaatggatctgactgcccggacaagttttgcttattccagtctgaaaccaaaaaccttctgttcaatgacaacactgagtgtctggccagactccatggcaaaacaacatatgaaaaatatttgggaccacagtatgtcgcaggcattactaatctgaaaaagtgctcaacctcccccctcctggaagcctgtgaattcctcaggaagtaaaaccgaagaagatggcccagctccccaagaaagcctcagccattcactgcccccagctcttctccccaggtgtgttggggccttggctcccctgctgaaggtggggattgcccatccatctgcttacaattccctgctgtcgtcttagcaagaagtaaaatgagaaattttgttgatattcaaaaaaaa

SEQ ID NO: 6067 - DNA, 1400 bp, Homo sapiens
tgaccatattgatgaaaaggcctttgagaatgtaactgatctgcagtggctcattctagatcacaaccttctagaaaactccaagataaaagggagagttttctctaaattgaaacaactgaagaagctgcatataaaccacaacaacctgacagagtctgtgggcccacttcccaaatctctggaggatctgcagcttactcataacaagatcacaaagctgggctcttttgaaggattggtaaacctgaccttcatccatctccagcacaatcggctgaaagaggatgctgtttcagctgcttttaaaggtcttaaatcactcgaataccttgacttgagcttcaatcagatagccagactgccttctggtctccctgtctctcttctaactctctacttagacaacaataagatcagcaacatccctgatgagtatttcaagcgttttaatgcattgcagtatctgcgtttatctcacaacgaactggctgatagtggaatacctggaaattctttcaatgtgtcatccctggttgagctggatctgtcctataacaagcttaaaaacataccaactgtcaatgaaaaccttgaaaactattacctggaggtcaatcaacttgagaagtttgacataaagagcttctgcaagatcctggggccattatcctactccaagatcaagcatttgcgtttggatggcaatcgcatctcagaaaccagtcttccaccggatatgtatgaatgtctacgtgttgctaacgaagtcactcttaattaatatctgtatcctggaacaatattttatggttatgtttttctgtgtgtcagttttcatagtatccatattttattactgtttattacttccatgaattttaaaatctgagggaaatgttttgtaaacatttattttttttaaagaaaagatgaaaggcaggcctatttcatcacaagaacacacacatatacacgaatagacatcaaactcaatgctttatttgtaaatttagtgtttttttatttctactgtcaaatgatgtgcaaaaccttttactggttgcatggaaatcagccaagttttataatccttaaatcttaatgttcctcaaagcttggattaaatacatatggatgttactctcttgcaccaaattatcttgatacattcaaatttgtctggtaaaaaaataggtggtagatattgaggccaagaatattgcaaaatacatgaagcttcatgcacttaaagaagtatttttagaataagaatttgcatacttacctagtgaaacttttctagaattatttttcactctaagtcatgtatgtttctctttgattatttgcatgttatgtttaataagctactagcaaaataaaacatagcaaatggc

SEQ ID NO: 6068 - DNA, 600 bp, Homo sapiens
tgcccagatgagctctatgacattatgaaaatgtgctggaaagaaaaggcagaagagagaccaacgtttgactacttacagagcgtcctggatgatttctacacagccacggaagggcaataccagcagcagccttagagcacagggagacccgtccatttggcaggggtggctgcctcatttagagaggaaaagtaaccatcactggttgcacttatgatttcatgtgcggggatcatctgccgtgcctggatcctgaaatagaggctaaattactcaggaagaacaccctctaaatgggaaagtattctgtactcttagatggattctccactcagttgcaacttggacttgtcctcagcagctggtaatcttgctctgcttgacaacatctgagtgcagccgtttgagaagaaaacatctattctctccaaaaatgcacccaactagctctatgtttacaaatggacataggactcaaagtttcagagaccattgcaatgaatccccaataattgcagaactaaactcatttataaagctaaaataaccggatatatacatagcatgacatttctttgtgctttggcttacttgttt

SEQ ID NO: 6069 - DNA, 1400 bp, Homo sapiens
ccagcgccgccgcctgcgaggccccctccgccgccgggcccggcgcgcccccggagcaggaggcagcccccgcggaggagcccgcggccgccgcagcctcgtcagcctgcgcagccccctcacaggaggcccagcccgagtgcagtccagaagcccccccagcggaggcggcagagtaaaagagcaagcttttgtgagataatcgaagaacttttctcccccgtttgtttgttggagtggtgccaggtactgttttggagaacttgtctacaaccagggattgattttaaagatgtctttttttattttacttttttttaagcaccaaattttgttgtttttttttttctcccctccccacagatcccatctcaaatcattctgttaaccaccattccaacaggtcgaggagagcttaaacaccttcttcctctgccttgtttctcttttattttttattttttcgcatcagtattaatgtttttgcatactttgcatctttattcaaaagtgtaaactttctttgtcaatctatggacatgcccatatatgaaggagatgggtgggtcaaaaagggatatcaaatgaagtgataggggtcacaatggggaaattgaagtggtgcataacattgccaaaatagtgtgccactagaaatggtgtaaaggctgtctttttttttttttttaaagaaaagttattaccatgtattttgtgaggcaggtttacaacactacaagtcttgagttaagaaggaaagaggaaaaaagaaaaaacaccaatacccagatttaaaaaaaaaaaaacgatcatagtcttaggagttcatttaaaccataggaacttttcacttatctcatgttagctgtaccagtcagtgattaagtagaactacaagttgtataggctttattgtttattgctggtttatgaccttaataaagtgtaattatgtattaccagcagggtgtttttaactgtgactattgtataaaaacaaatcttgatatccagaagcacatgaagtttgcaactttccaccctgcccatttttgtaaaactgcagtcatcttggaccttttaaaacacaaattttaaactcaaccaagctgtgataagtggaatggttactgtttatactgtggtatgtttttgattacagcagataatgctttcttttccagtcgtctttgagaataaaggaaaaaaaatcttcagatgcaatggttttgtgtagcatcttgtctatcatgttttgtaaatactggagaagctttgaccaatttgacttagagatggaatgtaactttgcttacaaaaattgctattaaactcctgcttaaggtgttctaattttctgtgagcacactaaaagcgaaaaataaatgtgaataaaatgt

SEQ ID NO: 6070 - DNA, 600 bp, Homo sapiens
ctcccgagtggccacaggctcgcgggctgggaaggattcactctctttagccccaggggagcagctcagcttagcccagcatgaagagatgggctctgctctgagagtagggcgggcttgaaggccctgatgggtggaccaccagcctgggcgcagtggtgctgggggcgtgcagctgggcccaggggctgtgcactcaggcctgacccgttgcactgaacaagaccaaatcgctggttgtgcgcttaacgtgagggtgggtccagtgtgccctgcgatgggtcccgtgtcactgtttacatgacctatttgtgtggttatatagccctttatttaaaagagagaagttccttttacaaagttattaaattaattatatgtttaaaagttaaagaaaaaagagctgcagagtatttataaaactgtcttttagaaaaaaaacaagcaagaagaccatttgaccatatgaatggaaaagggaagaaagtataatagaaactttgctagttaaaaaaaaaagaaaaaaaaagaaaaaaaatcccttcttgtaaacttacggacacctctttgtggctgttggagtttagtttttatatacgg

SEQ ID NO: 6071 - DNA, 600 bp, Homo sapiens; identical to SEQ ID NO: 6070

SEQ ID NO: 6072 - DNA, 600 bp, Homo sapiens
ggaggtggattccgagtggtgacaggacgctgaccgtggagcttaagccactgcctctccctctggtcccacaaatgggcgcccccccctccccatgcaggtggtgtcgggcccttcttgctgccctgccccaagttgggggtcagtgctgcctgtccccatgcttaacatacccgcctagctgctgtcacatttttcttgttttgtccttttatttttttctaataacctaaaaactggcaaaatagttctgcaggttgaagccatgtctacatgaaagtcctcagtaagtgttagagggaacagggcggagatatccttatgccacccccgctggaggatgtgggcagcttagggccctggaggcggtgcggcagggaagaggggtgcagaggctgtggctggtgagccggtcaggcacacaaggggcccttggagcgtggactggttggttttgccattttgttgtgtgtatgctgcttttcttttctaaccaagaggctggttttggcatctctgtcccattccctgggatctggtggtcagccctaggataaaaagccagggctggagaacaagaaagggccaggagatgaattc

SEQ ID NO: 6073 - DNA, 600 bp, Homo sapiens
ccagaaccttgcaaacgaagaagtaagaaaattaacacagcgcttagaagaaatgacacagagaatggaagccctggaaaatcgcctgagatacagatgaagattagaaatcgcgacacatttgtagtcattgtatcacggattacaatgaacgcagtgcagagccccaaagctcaggctattgttaaatcaataatgttgtgaagtaaaacaatcagtactgagaaacctggtttgccacagaacaaagacaagaagtatacactaacttgtataaatttatctaggaaaaaaatccttcagaattctaagatgaatttaccaggtgagaatgaataagctatgcaaggtattttgtaatatactgtggacacaacttgcttctgcctcatcctgccttagtgtgcaatctcatttgactatacgataaagtttgcacagtcttacttctgtagaacactggccataggaaatgctgtttttttgtactggactttaccttgatatatgtatatggatgtatgcataaaatcataggacatatgtacttgtggaacaagttggattttttatacaatattaaaattcaccacttcagag

SEQ ID NO: 6074 - DNA, 600 bp, Homo sapiens
tttaacactttttgttttttgcttattttgttggagtattattgaagatgtgatcaatagattgtaatacacatatctaaaaatagttaacacagatcaagtgaacattacattgccatttttaattcattctggtctttgaaagaaatgtactactaaagagcactagttgtgaatttagggtgttaaactttttaccaagtacaaaaatcccaaattcactttattattttgcttcaggatccaagtgacaaagttatatatttataaaattgctataaatcgacaaaatctaatgttgtctttttaatgttagtgatccacctgcctcagcctcccaaagtgctgggattacaggcttgaaagtctaacttttttttacttatatatttgatacatataattcttttggctttgaaacttgcaactttgagaacaaaacagtcctttaaattttgcactgctcaattctgtttttcgtttgcattgtctttaatataataaaagttattacctttacatattatcatgtctatttttgatgactcatcaattttgtctattaaagatatttctttaaattaaaaaaaaaaaaaaaaa

SEQ ID NO: 6075 - DNA, 600 bp, Homo sapiens
aatcccacttgcccctgttacctaattagagcagatgacccctcccctaatgcctgcggagttgtgcacgtagtagggtcaggccacggcagcctaccggcaatttccggccaacagttaaatgagaacatgaaaacagaaaacggttaaaactgtccctttctgtgtgaagatcacgttccttcccccgcaatgtgcccccagacgcacgtgggtcttcagggggccaggtgcacagacgtccctccacgttcacccctccacccttggactttcttttcgccgtggctgcggcacccttgcgcttttgctggtcactgccatggaggcacacagctgcagagacagagaggacgtgggcggcagagaggactgttgacatccaagcttcctttgtttttttttcctgtccttctctcacctcctaaagtagacttcatttttcctaacaggattagacagtcaaggagtggcttactacatgtgggagcttttggtatgtgacatgcgggctgggcagctgttagagtccaacgtggggcagcacagagagggggccacctccccaggccgtggctgcccacacaccccaattagctg

SEQ ID NO: 6076 - DNA, 1400 bp, Homo sapiens
caggacacccagatttatgagaagcatgacaaccttctacatgggaccaagaagaaaaaggagaagatggtgagtgcagcattcatgaagaagtacatccatgtggccaaaatcatcaagcctgtcctgacacaggagtcggccacctacattgcagaagagtattcacgcctgcgcagccaggatagcatgagctcagacaccgccaggacatctccagttacagcccgaacactggaaactctgattcgactggccacagcccatgcgaaggcccgcatgagcaagactgtggacctgcaggatgcagaggaagctgtggagttggtccagtatgcttactttaagaaggttctggagaaggagaagaaacgtaagaagcgaagtgaggatgaatcagagacagaagatgaagaggagaaaagccaagaggaccaggagcagaagaggaagagaaggaagactcgccagccagatgccaaagatggggattcatacgacccctatgacttcagtgacacagaggaggaaatgcctcaagtacacactccaaagacggcagactcacaggagaccaaggaatcccagaaagtggagttgagtgaatccaggttgaaggcattcaaggtggccctcttggatgtgttccgggaagctcatgcgcagtcaatcggcatgaatcgcctcacagaatccatcaaccgggacagcgaagagcccttctcttcagttgagatccaggctgctctgagcaagatgcaggatgacaatcaggtcatggtgtctgagggcatcatcttcctcatctgaggaggcctcgtctctgaacttgggttgtgccgagagagtttgttctgtgtttcccaccctctccctgacccaagtctttgcctctactcccttaacagtgttgaattcaactgaaggcgaggaatgttggtgatgaagctgagttcaggactcggtggaccctttgggaatgggtcatgaaagctgccatggggtgaggaaagaggagacagtgggagaggacaatgactattgcatcttcattgcaaaagcactggctcatccgccctacttcccatcccacacaaacccaattgtaaataacatatgacttctgagtacttttgggggcacaactgttttctgtttgctgtttttttgttttgttttttttctccagagcactttggtctagactaggctttgggtggttccaattggtggagagaagctctgaggcacgtcatgcaggtcaagaaagctttctttgcagtagcaccagttaaggtgaatatgtattgtatcacaaaacaaacccaatatccagatgaatatccgagatgttgaataaacttagccatttcgtacaaaaaaaggggggcccggtaaac

SEQ ID NO: 6077 - DNA, 1400 bp, Homo sapiens
agtgcagtaagcaggacgtgctgtgtggcttcctcctctgtgtcaacatctctggagctcctcggctaggggacctggtgggagacatcagtagtgtcaccttctaccaccagggcaaggagctggactgcaggggaggccacgtgcagctggcggacggctctgacctgagctatgtggaggatggcacagcctgcgggcctaacatgttgtgcctggaccatcgctgcctgccagcttctgccttcaacttcagcacctgccccggcagtggggagcgccggatttgctcccaccacggggtctgcagcaatgaagggaagtgcatctgtcagccagactggacaggcaaagactgcagtatccataaccccctgcccacgtccccacccacgggggagacggagagatataaaggtcccagcggcaccaacatcatcattggctccatcgctggggctgtcctggttgcagccatcgtcctgggcggcacgggctggggatttaaaaacattcgccgaggaaggtccggaggggcctaagtgccaccctcctccctccaagcctggcacccaccgtctcggccctgaaccacgaggctgcccccatccagccacggagggaggcaccatgcaaatgtcttccaggtccaaacccttcaactcctggctccgcaggggtttgggtgggggctgtggccctgcccttggcaccaccagggtggaccaggcctggagggcacttcctccacagtcccccacccacctcctgcggctcagccttgcacacccactgccccgtgtgaatgtagcttccacctcatggattgccacagctcaactcgggggcacctggagggatgcccccaggcagccaccagtggacctagcctggatggcccctccttgcaaccaggcagctgagaccagggtcttatctctctgggacctagggggacggggctgacatctacattttttaaaactgaatcttaatcgatgaatgtaaactcgggggtgctggggccagggcagatgtggggatgttttgacatttacaggaggccccggagaaactgaggtatggccatgccctagaccctccccaaggatgaccacacccgaagtcctgtcactgagcacagtcaggggctgggcatcccagcttgcccccgcttagccccgctgagcttggaggaagtatgagtgctgattcaaaccaaagctgcctgtgccatgcccaaggcctaggttatgggtacggcaaccacatgtcccagatcgtctccaattcgaaaacaaccgtcctgctgtccctgtcaggacacatggattttggcagggcgggggggggttctagaaaatataggttcctataataaaatggcaccttcccccttt

SEQ ID NO: 6078 - DNA, 1264 bp, Homo sapiens; identical to SEQ ID NO: 843

SEQ ID NO: 6079 - DNA, 561 bp, Homo sapiens; identical to SEQ ID NO: 844

SEQ ID NO: 6080 - DNA, 1400 bp, Homo sapiens
atcgggacaactctccttttgatggacctggaggaaatcttgctcatgcttttcaaccaggcccaggtattggaggggatgctcattttgatgaagatgaaaggtggaccaacaatttcagagagtacaacttacatcgtgttgcggctcatgaactcggccattctcttggactctcccattctactgatatcggggctttgatgtaccctagctacaccttcagtggtgatgttcagctagctcaggatgacattgatggcatccaagccatatatggacgttcccaaaatcctgtccagcccatcggcccacaaaccccaaaagcgtgtgacagtaagctaacctttgatgctataactacgattcggggagaagtgatgttctttaaagacagattctacatgcgcacaaatcccttctacccggaagttgagctcaatttcatttctgttttctggccacaactgccaaatgggcttgaagctgcttacgaatttgccgacagagatgaagtccggtttttcaaagggaataagtactgggctgttcagggacagaatgtgctacacggataccccaaggacatctacagctcctttggcttccctagaactgtgaagcatatcgatgctgctctttctgaggaaaacactggaaaaacctacttctttgttgctaacaaatactggaggtatgatgaatataaacgatctatggatccaggttatcccaaaatgatagcacatgactttcctggaattggccacaaagttgatgcagttttcatgaaagatggatttttctatttctttcatggaacaagacaatacaaatttgatcctaaaacgaagagaattttgactctccagaaagctaatagctggttcaactgcaggaaaaattgaacattactaatttgaatggaaaacacatggtgtgagtccaaagaaggtgttttcctgaagaactgtctattttctcagtcatttttaacctctagagtcactgatacacagaatataatcttatttatacctcagtttgcatatttttttactatttagaatgtagccctttttgtactgatataatttagttccacaaatggtgggtacaaaaagtcaagtttgtggcttatggattcatataggccagagttgcaaagatcttttccagagtatgcaactctgacgttgatcccagagagcagcttcagtgacaaacatatcctttcaagacagaaagagacaggagacatgagtctttgccggaggaaaagcagctcaagaacacatgtgcagtcactggtgtcaccctggataggcaagggataactcttctaacacaaaataagtgttttatgtttggaataaagtcaaccttgtttctactgtttt

SEQ ID NO: 6081 - DNA, 1400 bp, Homo sapiens
attatacaccagatttgccaaaagatgctgttgattctgctgttgagaaagctctgaaagtctgggaagaggtgactccactcacattctccaggctgtatgaaggagaggctgatataatgatctcttttgcagttagagaacatggagacttttacccttttgatggacctggaaatgttttggcccatgcctatgcccctgggccagggattaatggagatgcccactttgatgatgatgaacaatggacaaaggatacaacagggaccaatttatttctcgttgctgctcatgaaattggccactccctgggtctctttcactcagccaacactgaagctttgatgtacccactctatcactcactcacagacctgactcggttccgcctgtctcaagatgatataaatggcattcagtccctctatggacctccccctgactcccctgagacccccctggtacccacggaacctgtccctccagaacctgggacgccagccaactgtgatcctgctttgtcctttgatgctgtcagcactctgaggggagaaatcctgatctttaaagacaggcacttttggcgcaaatccctcaggaagcttgaacctgaattgcatttgatctcttcattttggccatctcttccttcaggcgtggatgccgcatatgaagttactagcaaggacctcgttttcatttttaaaggaaatcaattctgggccatcagaggaaatgaggtacgagctggatacccaagaggcatccacaccctaggtttccctccaaccgtgaggaaaatcgatgcagccatttctgataaggaaaagaacaaaacatatttctttgtagaggacaaatactggagatttgatgagaagagaaattccatggagccaggctttcccaagcaaatagctgaagactttccagggattgactcaaagattgatgctgtttttgaagaatttgggttcttttatttctttactggatcttcacagttggagtttgacccaaatgcaaagaaagtgacacacactttgaagagtaacagctggcttaattgttgaaagagatatgtagaaggcacaatatgggcactttaaatgaagctaataattcttcacctaagtctctgtgaattgaaatgttcgttttctcctgcctgtgctgtgactcgagtcacactcaagggaacttgagcgtgaatctgtatcttgccggtcatttttatgttattacagggcattcaaatgggctgctgcttagcttgcaccttgtcacatagagtgatctttcccaagagaaggggaagcactcgtgtgcaacagacaagtgactgtatctgtgtagactatttgcttatttaataaagacgatttgtcagttgtttt

SEQ ID NO: 6082 - DNA, 1127 bp, Homo sapiens; identical to SEQ ID NO: 847

SEQ ID NO: 6083 - DNA, 600 bp, Homo sapiens
aatatgtttggaatattccactatttgcagaggcttattcagttcttacacattccatcttacattagtgattccatcaaagagaaggaaagtaagcctttttgtcacctcaatatttactatttcaatacttacatatctgacttctaggatttattgttatattacttgcctatctgacttcatacatccctcagtttcttaaaatgtcctatgtatatcttctacatgcaatttagaactagattttggttagaagtaaggattataaacaacctagacagtacccttggcctttacagaaaatatggtgctgttttctacccttggaaagaaatgtagatgatatgtttcgtgggttgaattgtgtcccccataaaagatatgttgaagttctaaccccaggtacccatgaatgtgagcttaccagggtctttgcagatgtaattagttaagttaaggtgagatcacactgaattagggtgggctctaaatccattatgactgttgttcttataagaagaagagagcatagccacctaggggaggaggccgtgtgaagacagaggcagagattggagtgacgcatctccaagccaa

SEQ ID NO: 6084 - DNA, 1400 bp, Homo sapiens
tggaggaaaacccaccttacatacaggattgtgaattatacaccagatttgccaagagatgctgttgattctgccattgagaaagctctgaaagtctgggaagaggtgactccactcacattctccaggctgtatgaaggagaggctgatataatgatctctttcgcagttaaagaacatggagacttttactcttttgatggcccaggacacagtttggctcatgcctacccacctggacctgggctttatggagatattcactttgatgatgatgaaaaatggacagaagatgcatcaggcaccaatttattcctcgttgctgctcatgaacttggccactccctggggctctttcactcagccaacactgaagctttgatgtacccactctacaactcattcacagagctcgcccagttccgcctttcgcaagatgatgtgaatggcattcagtctctctacggacctccccctgcctctactgaggaacccctggtgcccacaaaatctgttccttcgggatctgagatgccagccaagtgtgatcctgctttgtccttcgatgccatcagcactctgaggggagaatatctgttctttaaagacagatatttttggcgaagatcccactggaaccctgaacctgaatttcatttgatttctgcattttggccctctcttccatcatatttggatgctgcatatgaagttaacagcagggacaccgtttttatttttaaaggaaatgagttctgggccatcagaggaaatgaggtacaagcaggttatccaagaggcatccataccctgggttttcctccaaccataaggaaaattgatgcagctgtttctgacaaggaaaagaagaaaacatacttctttgcagcggacaaatactggagatttgatgaaaatagccagtccatggagcaaggcttccctagactaatagctgatgactttccaggagttgagcctaaggttgatgctgtattacaggcatttggatttttctacttcttcagtggatcatcacagtttgagtttgaccccaatgccaggatggtgacacacatattaaagagtaacagctggttacattgctaggcgagatagggggaagacagatatgggtgtttttaataaatctaataattattcatctaatgtattatgagccaaaatggttaatttttcctgcatgttctgtgactgaagaagatgagccttgcagatatctgcatgtgtcatgaagaatgtttctggaattcttcacttgcttttgaattgcactgaacagaattaagaaatactcatgtgcaataggtgagagaatgtattttcatagatgtgttattacttcctcaataaaaagttttattttgggcctgttcctt

SEQ ID NO: 6085 - DNA, 1400 bp, Homo sapiens
cctgacatgaaccgtgaggatgttgactacgcaatccggaaagctttccaagtatggagtaatgttacccccttgaaattcagcaagattaacacaggcatggctgacattttggtggtttttgcccgtggagctcatggagacttccatgcttttgatggcaaaggtggaatcctagcccatgcttttggacctggatctggcattggaggggatgcacatttcgatgaggacgaattctggactacacattcaggaggcacaaacttgttcctcactgctgttcacgagattggccattccttaggtcttggccattctagtgatccaaaggctgtaatgttccccacctacaaatatgtcgacatcaacacatttcgcctctctgctgatgacatacgtggcattcagtccctgtatggagacccaaaagagaaccaacgcttgccaaatcctgacaattcagaaccagctctctgtgaccccaatttgagttttgatgctgtcactaccgtgggaaataagatctttttcttcaaagacaggttcttctggctgaaggtttctgagagaccaaagaccagtgttaatttaatttcttccttatggccaaccttgccatctggcattgaagctgcttatgaaattgaagccagaaatcaagtttttctttttaaagatgacaaatactggttaattagcaatttaagaccagagccaaattatcccaagagcatacattcttttggttttcctaactttgtgaaaaaaattgatgcagctgtttttaacccacgtttttataggacctacttctttgtagataaccagtattggaggtatgatgaaaggagacagatgatggaccctggttatcccaaactgattaccaagaacttccaaggaatcgggcctaaaattgatgcagtcttctattctaaaaacaaatactactatttcttccaaggatctaaccaatttgaatatgacttcctactccaacgtatcaccaaaacactgaaaagcaatagctggtttggttgttagaaatggtgtaattaatggtttttgttagttcacttcagcttaataagtatttattgcatatttgctatgtcctcagtgtaccactacttagagatatgtatcataaaaataaaatctgtaaaccataggtaatgattatataaaatacataatatttttcaattttgaaaactctaattgtccattcttgcttgactctactattaagtttgaaaatagttaccttcaaagcaagataattctatttgaagcatgctctgtaagttgcttcctaacatccttggactgagaaattatacttacttctggcataactaaaattaagtatatatattttggctcaaataaaattg

SEQ ID NO: 6086 - DNA, 1400 bp, Homo sapiens
atgctgtctatgagaaaaatggttatatctattttttcaacggacccatacagtttgaatacagcatctggagtaaccgtattgttcgcgtcatgccagcaaattccattttgtggtgttaagtgtctttttaaaaattgttatttaaatcctgaagagcatttggggtaatacttccagaagtgcggggtaggggaagaagagctatcaggagaaagcttggttctgtgaacaagcttcagtaagttatctttgaatatgtagtatctatatgactatgcgtggctggaaccacattgaagaatgttagagtaatgaaatggaggatctctaaagagcatctgattcttgttgctgtacaaaagcaatggttgatgatacttcccacaccacaaatgggacacatggtctgtcaatgagagcataatttaaaaatatatttataaggaaattttacaagggcataaagtaaatacatgcatataatgaataaatcattcttactaaaaagtataaaatagtatgaaaatggaaatttgggagagccatacataaaagaaataaaccaaaggaaaatgtctgtaataatagactgtaacttccaaataaataattttcattttgcactgaggatattcagatgtatgtgcccttcttcacacagacactaacgaaatatcaaagtcattaaagacaggagacaaaagagcagtggtaagaatagtagatgtggcctttgaattctgtttaattttcacttttggcaatgactcaaagtctgctctcatataagacaaatattcctttgcatattataaaggataaagaaggatgatgtctttttattaaaatatttcaggttcttcagaagtcacacattacaaagttaaaattgttatcaaaatagtctaaggccatggcatccctttttcataaattatttgattatttaagactaaaagttgcattttaaccctattttacctagctaattatttaattgtccggtttgtcttggatatataggctattttctaaagacttgtatagcatgaaataaaatatatcttataaagtggaagtatgtatattaaaaaagagacatccaaatttttttttaaagcagtctactagattgtgatcccttgagatatggaaggatgcctttttttctctgcatttaaaaaaatcccccagcacttcccacagtgcctattgatacttggggagggtgcttggcacttattgaatatatgatcggccatcaagggaagaactattgtgctcagagacactgttgataaaaactcaggcaaagaaaatgaaatgcatatttgcaaagtgtattaggaagtgtttatgttgtttataataaaaatatattttcaacagaaaaaaaa

SEQ ID NO: 6087 - DNA, 1400 bp, Homo sapiens
gcccccaggtaggggcccctctcagccctcacacaccctgtctgccccgccctcattatttatgtccaggtgtttgttttgttttgtttttggcaccttacttgaccatttgtttctgtttccccgactggggcagggtgtttagaattttctaaatgtagttctgctccagacagggaattaggcccccatcatcctctggcttggccacagccaggggagcagaggggcagaggcccacattggaagagcagcacctcctcagcctgaaccccagggctgtaactgccaggctctctttgcccagttggagactgtctggcccccctggtcccctccttcccaagtgagtctctctgggccttaggaagagccttccacccaggggcagccccaggccaaaggggacctggaagggaggtgggccgtggcccttgagtccccattgaggcttggttccttcccaatccagtggacttcgcagtccacttctgacagcctcagtgaccctggctccttgtgccagagaacccagcccacccccggcagcagcccccagctcccacctccccttgggcccacaccttcttccctctctggagaaagggccctgggcctgcctcaccacggaccaaagggagtctgccagggcccctctccccagggaagcagcagcctcgcccctggcagagatgcctccctgagctagaaccctctgttccttccctgtgcctcctccctccctcccgactcacaccactagcctcaggggtctgagctccagctcctttgggcttcagctgccagtgtcctgagccccagggagagggggctggtgggtgcctaggcctgggcagtggatggccgtgaatgggtgcccacagtgtcaggcactgggcatgaggggttcctcccctccagctccctgtgcccccagggtcctgggaggagagacactggtggggataggccagccgcgcatcagactgtgaaccccacgaaggagcccattgtggcctaagaggctgccctcctgtgctcagccctgaggacagatgcctccttcctcttttccttcccaaagcaagcaagaggccgtggctgctgtgggaaatggtactgtacagctggctctacttccccatggccctgagcgagtggagtctgccacccaggatccccaaggcacttgagggggaaggattctgctggcctctgcgagtggtttcttgtgcactggcaccaagtgcgggtccggcagcttctgccccctgcagaaccggagagccagctaaggggtggggctgcgggggttccgtgtccacccccatacatttatttctgtaaataatgtgcactgaataaattgtacagccggcaaaaaaaaaaaaaaaaaaaaa

SEQ ID NO: 6088 - DNA, 1400 bp, Homo sapiens
tgagaagtgctcccctaactcagatcccctaacttagatttggcccccaactccatttcctgtctgtcttagacagcccttccaactgtgtcatctcttctctggaggtcaatggtggagggagatgcctgggtcctgttcttcctacataaaatgcaagaaaacagcatggccagtaaactgagcaagggccttggaatccttgagaatcacatttatgtgcttatgattacgggcaagctaattaaccttgttgaatctcagattccccatttgcaacattaggttaagaccagtactgcaggattgttgcactaaatgaaatactgtatgtgaagtgcctggcacagtgtctggtacatttgtgtttaataaaagctaactccatgttcataagagaggactgaacagctcttcctctagctgtctggctgtataactcttacagtagtctgtataataagggcatctctattagatctttaggggacagaggatttgtcaagatggttagctctttgttttggggtgcagagaaagaaaagagcagcaacagcagaggctggactccctggttcagtatttaatgccattttattcacatgctcccatgttctccctccctcccattgtagccttgctgcccaggggagggatatgtcttcctttatgcatctgggaaaccaggaacagaccctgcgcaggagagtcagagggggaagagttagaatgggtcagtggctggaacaaagttctggttaaggaggaaattagtgccacccacggtgagaagcagagaaggcacttgcatcctatgcagccctgaagaccaggctcctttgggcaaaaggcaagactctggcaggtgggtcaatgctctctccttggagcaagaagccagcttttggggaaggcaggtcctgaggcaggcactgccctgtggtcttccccaggttgaggagagaagtggaagccccatggaagacagtgctcccagctgaggtaggaggcggaggtgggggtgggggtagtttaagcctatggggcccagggggaaaggccaaacagaaacccaactaccccctaatgaagggcctggaggttggggtatcttggagctcctcagagcccttcttcccatcaaaaaggtatcaaatgccttggaagctccctgatcctacaaaacaaaaaaatgcttatttttaccactgtgaggcaagctgaggtgaacatttaaaaggctatttcaagacgaggtgcggtggctataatcctagcactttgggaggctgaagcaggaggatcacttgagcccaggagttcaagaccagcttgggcaacatagggagaccctgtctctgcaaaaaaataaaaacgaatacataaaaattaaaaaaaaa

SEQ ID NO: 6089 - DNA, 1108 bp, Homo sapiens; identical to SEQ ID NO: 854

SEQ ID NO: 6090 - DNA, 600 bp, Homo sapiens
tctgcaacgtggtggcgtgctcttcattggggccaatgagagtgtctcactgaagcttactgagccgaaggacctgctgatattccgtgcctgctgtctgctgtaaaggctgcagcctccccagctctcctctgccagccaccctaaattccagccaacctcacctcctcgggcccagctcaagcccccttccttgctctggaccccttaggtataccctggaagagctggggtgggggaggagggagcgtgaaggtagtgactcctgaacacacccaggtggaaccatctttggggaggagaggcccgtgtgaggggtctgatactccctttgtcttccctctctactcctcgctacacctgagccaggctcttgccaactctgttccagcctatggctttaggctagctgttaaatatgtgacccagcattagctcagcatctgtcagagcaagagaccaggtaatttctaagaacagggttctagcgatgggactgcccatttcctcagctgcagaggaggaaagggaaagggtaggcctgtagactaacgctgtttacacccttgttctgtcaaagcaattaaagatcacttgtgt

SEQ ID NO: 6091 - DNA, 1400 bp, Homo sapiens
tatttcatcagagatgtgaaatccttaaccctgtttgtcacccattatccgccagtttgtgaactagaaaaaaattactcacaccaggtggggaattaccacatgggattcttggtcagtgaggatgaaagcaaactggatccaggcgcagcagaacaagtccctgattttgtcaccttcctttaccaaataactagaggaattgcagcaaggagttatggattaaatgtggctaaactagcagatgttcctggagaaattttgaagaaagcagctcacaagtcaaaagagctggaaggattaataaatacgaaaagaaagagactcaagtattttgcaaagttatggacgatgcataatgcacaagacctgcagaagtggacagaggagttcaacatggaagaaacacagacttctcttcttcattaaaatgaagactacatttgtgaacaaaaaatggagaattaaaaataccaactgtacaaaataactctccagtaacagcctatctttgtgtgacatgtgagcataaaattatgaccatggtatattcctattggaaacagagaggtttttctgaagacagtctttttcaagtttctgtcttcctaacttttctacgtataaacactcttgaatagacttccactttgtaattagaaaattttatggacagtaagtccagtaaagccttaagtggcagaatataattcccaagcttttggagggtgatataaaaatttacttgatatttttatttgtttcagttcagataattggcaactgggtgaatctggcaggaatctatccattgaactaaaataattttattatgcaaccagtttatccaccaagaacataagaattttttataagtagaaagaattggccaggcatggtggctcatgcctgtaatcccagcactttgggaggccaaggtaggcagatcacctgaggtcaggagttcaagaccagcctggccaacatggcaaaaccccatctttactaaaaatataaagtacatctctactaaaaatacgaaaaaattagctgggcatggtggcgcacacctgtagtcccagctactccggaggctgaggcaggagaatctcttgaacctgggaggcggaggttgcaatgagccgagatcacgtcactgcactccagcttgggcaacagagcaagactccatctcaaaaaagaaaaaagaaaagaaatagaattatcaagcttttaaaaactagagcacagaaggaataaggtcatgaaatttaaaaggttaaatattgtcataggattaagcagtttaaagattgttggatgaaattatttgtcattcattcaagtaataaatatttaatgaatacttgctataaaaaaaaaaaaaaaaaaaaaaaaaa

SEQ ID NO: 6092 - DNA, 1400 bp, Homo sapiens
gatgggggaaatggtgccttcaagaccttcaccaaacatactagaagggcattggccattctattgtggcaaggctgagtagaagatcctaccccaattccttgtaggagtataggccggtctaaagtgagctctatgggcagatctaccccttacttattattccagatctgcagtcacttcgtgggatctgcccctccctgcttcaatacccaaatcctctccagctataacagtagggatgagtacccaaaagctcagccagccccatcaggactcttgtgaaaagagaggatatgttcacacctagcgtcagtattttccctgctaggggttttaggtctcttcccctctcagagctacttgggccatagctcctgctccacagccatcccagccttggcatctagagcttgatgccagtaggctcaactagggagtgagtgcaaaaagctgagtatggtgagagaagcctgtgccctgatccaagtttactcaaccctctcaggtgaccaaaatccccttctcatcactcccctcaaagaggtgactgggccctgcctctgtttgacaaacctctaacccaggtcttgacaccagctgttctgtcccttggagctgtaaaccagagagctgctgggggattctggcctagtcccttccacacccccaccccttgctctcaacccaggagcatccacctccttctctgtctcatgtgtgctcttcttctttctacagtattatgtactctactgatatctaaatattgatttctgccttccttgctaatgcaccattagaagatattagtcttggggcaggatgattttggcctcattactttaccacccccacacctggaaagcatatactatattacaaaatgacattttgccaaaattattaatataagaagctttcagtattagtgatgtcatctgtcactataggtcatacaatccattcttaaagtacttgttatttgtttttattattactgtttgtcttctccccagggttcagtccctcaaggggccatcctgtcccaccatgcagtgccccctagcttagagcctccctcaattccccctggccaccaccccccactctgtgcctgaccttgaggagtcttgtgtgcattgctgtgaattagctcacttggtgatatgtcctatattggctaaattgaaacctggaattgtggggcaatctattaatagctgccttaaagtcagtaacttacccttagggaggctgggggaaaaggttagattttgtattcaggggttttttgtgtactttttgggtttttaaaaaattgtttttggaggggtttatgctcaatccatgttctatttcagtgccaataaaatttaggtgacttcaaaaaaaaaaaa

SEQ ID NO: 6093 - DNA, 643 bp, Homo sapiens; identical to SEQ ID NO: 858

SEQ ID NO: 6094 - DNA, 600 bp, Homo sapiens
atcaacaccgacctgaacctggagcgcagccacgcccagaagaacgagaatgctcggcagcagctggaacgccagaacaaggagcttaaggtcaagctgcaggagatggagggcactgtcaagtccaagtacaaggcctccatcaccgccctcgaggccaagattgcacagctggaggagcagctggacaacgagaccaaggagcgccaggcagcctgcaaacaggtgcgtcggaccgagaagaagctgaaggatgtgctgctgcaggtggatgacgagcggaggaacgccgagcagtacaaggaccaggccgacaaggcatctacccgcctgaagcagctcaagcggcagctggaggaggccgaagaggaggcccagcgggccaacgcctcccgccggaaactgcagcgcgagctggaggacgccactgagacggccgatgccatgaaccgcgaagtcagctccctaaagaacaagctcaggcgcggggacctgccgtttgtcgtgccccgccgaatggcccggaaaggcgccggggatggctccgacgaagaggtagatggcaaagcggatggggctgaggccaaacctgccgaataa

SEQ ID NO: 6095 - DNA, 518 bp, Homo sapiens; identical to SEQ ID NO: 860

SEQ ID NO: 6096 - DNA, 1049 bp, Homo sapiens; identical to SEQ ID NO: 861

SEQ ID NO: 6097 - DNA, 441 bp, Homo sapiens; identical to SEQ ID NO: 862

SEQ ID NO: 6098 - DNA, 670 bp, Homo sapiens; identical to SEQ ID NO: 863

SEQ ID NO: 6099 - DNA, 1347 bp, Homo sapiens; identical to SEQ ID NO: 864

SEQ ID NO: 6100 - DNA, 1400 bp, Homo sapiens
tatatacgtttccatctaatttcaccgttgatacagaaatctgcagcaaatgtggtcctctttgatatctttgtcaatatccttacgcataaccttgcggaaccagcttatgaagcagatgtggcacagctggagtataaactggcagctggagaacatggtttaattattcgagtgaaaggatttaaccacaaactacctctactgtttcagctcattattgactacttagctgagttcaattccacaccagctgtctttacaatgataactgagcagttgaagaagacctactttaacatcctcatcaagcctgagactttggccaaagatgtacggcttttaatcttggaatatgcccgttggtctatgattgacaagtaccaggctttgatggacggcctttcccttgagtctctgctgagcttcgtcaaagaattcaaatcccagctctttgtggagggcctggtacaagggaatgtcacaagcacagaatctatggatttcctgaaatatgttgttgacaaactaaacttcaagcctctggagcaggagatgcctgtgcagttccaggtggtagagctgcccagtggccaccatctatgcaaagtgaaagctctgaacaagggtgatgccaactctgaagtcactgtgtactaccagtcaggtaccaggagtctaagagaatatacgcttatggagctgcttgtgatgcacatggaagaaccttgttttgacttccttcgaaccaagcagacccttgggtaccatgtctaccctacctgtaggaacacatccgggattctaggattttctgtcactgtggggactcaggcaaccaaatacaattctgaagttgttgataagaagatagaagagtttctttctagctttgaggagaagattgagaacctcactgaagaggcattcaacacccaggtcacagctctcatcaagctgaaggagtgtgaggatacccaccttggggaggaggtggataggaactggaatgaagtggttacacagcagtacctctttgaccgccttgcccacgagattgaagcactgaagtcattctcaaaatcagacctggtcaactggttcaaggctcatagagggccaggaagtaaaatgctcagcgttcatgttgttgggtatgggaagtatgaactggaagaggatggatccccttctagtgaggattcaaattcttcttgtgaagtgatgcagctgacctacctgccaacctctcctctgctggcagattgtatcatccccattactgatatcagggctttcacaacaacactcaaccttctcccctaccataaaatagtcaaataaataaactgcagtcacgttggcctgaaaaaaaaaaaaaaaaaaaaaaaaaaaaaaaa

SEQ ID NO: 6101 - DNA, 1400 bp, Homo sapiens
gtctcatttgatatccacaacttatttttggtaggaaagagagatgtttttcccacctgtcagatgaaaaaactgaagctcaaaaagggttgacttgaccatacagctaatgctgacagatccaagacctagacctaggtcttttgaactcaagtccagcattctcaactatatcaagttactgttcagaatacttaatatctcctctcttcataattatcaatagccccaagctcatggatgacaaatctctgctttatttcttgtctctattttttcactttatagctcctgttataatagcaagtttaatggtataaacacaggataccatcctctcttgcaacacccatgtgcctttgatgagtcaggtagcaagctgtagtagataatgagaaaggccagaggctgcaaagacagtcaaaggacacgagagaaaggaaggggaagaacaggactccaggactgttttatattatagaaaagcaagagctaaagagcatttacacatgttaaacagatacttgttaagcatagtgcctgacacacggcattagctgttattttatgagattccatcagctctgcctctgtcctctttcttctaacatgaaggtatcatgagaagagaaccttctaacataagctgtaattctaaacctgcacttgtccctctccagcaagaggctagcactgaattcattctactcatactacacacccagttatggaatgtccagagttctcgaagaaaataaatgactttaggaagaggtatacattttttaagtcgctctgcctccaaatctgaacagtcactgtaaatcattcttaagcccagatatgagaacttctgctggaaagtgggaccctctgagtgggtggtcagaaaatacccatgctgatgaaatgacctatgcccaaagaacaaatacttaacgtgggagtggaaccacatgagcctgctcagctctgcataagtaattcaagaaatgggaggcttcaccttaaaaacagtgtgcaaatggcagctagaggttttgataggaagtatgtttgtttcttagtgtttacaaatattaagtactcttgatacaaaatatacttttaaacttcataacctttttataaaagttgttgcagcaaaataatagcctcggttctatgcatatatggattgctataaaaaatgtcaataagattgtacaaggaaaattagagaaagtcacatttagggtttattttttacacttggccagtaaaatagggtaaatcctattagaaattttttaaagaactttttttaagtttcctaaatctgtgtgtgtattgtgaagtggtataagaaatgactttgaaccactttgcaattgtagattcccaacaataaaattgaagat

SEQ ID NO: 6102 - DNA, 600 bp, Homo sapiens
tgtcttggtagacaatttgcctggcaccaaagtaaacgcagagagtgtagagaggataaaacggcaacacagctcacaagaacagactttccagctgctgaagttatggaaacatcaaaacaaagcccaagatatagtcaagaagatcatccaagatattgacctctgtgaaaacagcgtgcagcggcacattggacatgctaacctcaccttcgagcagcttcgtagcttgatggaaagcttaccgggaaagaaagtgggagcagaagacattgaaaaaacaataaaggcatgcaaacccagtgaccagatcctgaagctgctcagtttgtggcgaataaaaaatggcgaccaagacaccttgaagggcctaatgcacgcactaaagcactcaaagacgtaccactttcccaaaactgtcactcagagtctaaagaagaccatcaggttccttcacagcttcacaatgtacaaattgtatcagaagttatttttagaaatgataggtaaccaggtccaatcagtaaaaataagctgcttataactggaaatggccattgagctgtttcctcacaattggcgagatcccatggatgataa

SEQ ID NO: 6103 - DNA, 1400 bp, Homo sapiens
tttgccacactgtggtaggtgtttgaacagaggccacattactagagttggcatgactcttgactcttgcctgcctaacaaaatattgaaaggcaaacatttgaaggagggagggggtgcaggttcagtttatatggaaatgcaaactgggctggaagatattcctgagttaggctttctcttcatattcagcttgcacatttggtaatgtttttaaaatgatcatctaattttattttgtgaagtgaaggatttgtgttttagttggcagttgttaagtccttggcttgccatttttcaaaaagtaaaaaggtcctcacaggtgtctccatacttcgccaaggttgtagcatgggcagtttcagtttcagcctaagagactggtgacatccacaaatgcagttttagaagcagaaaaggtcttggtgcctctgcagtacttgatgtattggggtcaaatctctacaaatttttctgtggtgatagcaaaatcaagagatggcttacaaaaagaaatattgaatttttatttttgaagtttttgttttttaaaaggttgggggtgttcagccactgagggacaaaacttagcatctaatttcaattatagtgtcatgcagagtatttctaaagtaattggttatcatgggaaagtattctcttttcaagaagttctttgattctgtaataactagaacaaataaagtagtaaaagaagaaatagttctgtgactaggaaaaaattgcttttgagagaacatagatcaattatactacttctaaggtagctgcagataagtggccttgacacattacaagcctggaaaaaaacatcagaaataataaaaaatttcagagagaatcaagatacctttttttttcttttttttttcttttttttattatactctaagttttagggtacatgtgcacattgtgcaggttagttacatatgtatacatgtgccatgctggtgcgctgcacccactaatgtgtcatctagcattaggtatatctcccagtgctatccctcccccctcccccgaccccaccacagtccccagagtgtgatattccccttcctgtgtccatgtgatctcattgttcaattcccacctatgagtgagaatatgcggtgtttggttttttgttcttgcgatagtttactgagaatgatggtttccaatttcatccatgtccctacaaaggatatgaactcatcattttttatggctgcatagtattccatggtgtatatgtgccacattttcttaatccagtctatcattgttggacatttgggttggttccaagtctttgctattgtgaatagtgccgcaataaacatacgtgtgcatgtgtctttatagcagcatgatttatactcatttgggtatat

SEQ ID NO: 6104 - DNA, 1400 bp, Homo sapiens
tcgcctctgtcgcccgcgcctggcctaccgcggcactcccggctgcacgctctgcttggcctcgccatgccggtggacctcagcaagtggtccgggcccttgagcctgcaagaagtggacgagcagccgcagcacccgctgcatgtcacctacgccggggcggcggtggacgagctgggcaaagtgctgacgcccacccaggttaagaatagacccaccagcatttcgtgggatggtcttgattcagggaagctctacaccttggtcctgacagacccggatgctcccagcaggaaggatcccaaatacagagaatggcatcatttcctggtggtcaacatgaagggcaatgacatcagcagtggcacagtcctctccgattatgtgggctcggggcctcccaagggcacaggcctccaccgctatgtctggctggtttacgagcaggacaggccgctaaagtgtgacgagcccatcctcagcaaccgatctggagaccaccgtggcaaattcaaggtggcgtccttccgtaaaaagtatgagctcagggccccggtggctggcacgtgttaccaggccgagtgggatgactatgtgcccaaactgtacgagcagctgtctgggaagtagggggttagcttggggacctgaactgtcctggaggccccaagccatgttccccagttcagtgttgcatgtataatagatttctcctcttcctgccccccttggcatgggtgagacctgaccagtcagatggtagttgagggtgacttttcctgctgcctggcctttataattttactcactcactctgatttatgttttgatcaaatttgaacttcattttggggggtattttggtactgtgatggggtcatcaaattattaatctgaaaatagcaacccagaatgtaaaaaagaaaaaactggggggaaaaagaccaggtctacagtgatagagcaaagcatcaaagaatctttaagggaggtttaaaaaaaaaaaaaaaaaaaaagattggttgcctctgcctttgtgatcctgagtccagaatggtacacaatgtgattttatggtgatgtcactcacctagacaaccagaggctggcattgaggctaacctccaacacagtgcatctcagatgcctcagtaggcatcagtatgtcactctggtccctttaaagagcaatcctggaagaagcaggagggagggtggctttgctgttgttgggacatggcaatctagaccggtagcagcgcctcgctgacagcttgggaggaaacctgagatctgtgttttttaaattgatcgttcttcatgggggtaagaaaagctggtctggagttgctgaatgttgcattaattgtgctgtttgcttgtagttgaataaaaacccg

SEQ ID NO: 6105 - DNA, 1400 bp, Homo sapiens
caatcactagtgcaaaggttatgatggagggtggtcgcagcaaagggtttggttttgtatgtttctcctccccagaagaagccactaaagcagttacagaaatgaacggtagaattgtggccacaaagccattgtatgtagctttagctcagcgcaaagaagagcgccaggctcacctcactaaccagtatatgcagagaatggcaagtgtacgagctgttcccaaccctgtaatcaacccctaccagccagcacctccttcaggttacttcatggcagctatcccacagactcagaaccgtgctgcatactatcctcctagccaagttgctcaactaagaccaagtcctcgctggactgctcagggtgccagacctcatccattccaaaatatgcccggtgctatccgcccagctgctcctagaccaccatttagtactatgagaccagcttcttcacaggttccacgagtcatgtcaacacagcgtgttgctaacacatcaacacagacaatgggtccacgtcctgcagctgcagccgctgcagctactcctgctgtccgcaccgttccacagtataaatatgctgcaggagttcgcaatcctcagcaacatcttaatgcacagccacaagttacaatgcaacagcctgctgttcatgtacaaggtcaggaacctttgactgcttccatgttggcatctgcccctcctcaagagcaaaagcaaatgttgggtgaacggctgtttcctcttattcaagccatgcaccctactcttgctggtaaaatcactggcatgttgttggagattgataattcagaacttcttcatatgctcgagtctccagagtcactccgttctaaggttgatgaagctgtagctgtactacaagcccaccaagctaaagaggctgcccagaaagcagttaacagtgccaccggtgttccaactgtttaaaattgatcagggaccatgaaaagaaacttgtgcttcaccgaagaaaaatatctaaacatcgaaaaacttaaatattatggaaaaaaaacattgcaaaatataaaataaataaaaaaaggaaaggaaactttgaaccttatgtaccgagcaaatgccaggtctagcaaacataatgctagtcctagattacttattgatttaaaaacaaaaaaacacaaaaaatagtaaaatataaaaacaaattaatgttttatagaccctgggaaaaagaattttcagcaaagtacaaaaatttaaagcattcctttctttaattttgtaattctttactgtggaatagctcagaatgtcagttctgttttaagtaacagaattgataactgagcaaggaaacgtaatttggattataaaattcttgctttaataaaaattccttaaacagtg

SEQ ID NO: 6106 - DNA, 600 bp, Homo sapiens
gctcctccctggctgccctggccctgaggtgtgggggctgcagcatgttgctgaggagtgaggaatagttgagccccaagtcctgaagaggcgggccagccaggcgggctcaaggaaagggggtcccagtgggaggggcaggctgacatctgtgtttcaagtggggctcgccatgccgggggttcataggtcactggctctccaagtgccagaggtgggcaggtggtggcactgagcccccccaacactgtgccctggtggagaaagcactgacctgtcatgcccccctcaaacctcctcttctgacgtgccttttgcacccctcccattaggacaatcagtcccctcccatctgggagtccccttttcttttctaccctagccattcctggtacccagccatctgcccaggggtgccccctcctctcccatccccctgccctcgtggccagcccggctggttttgtaagatgctgggttggtgcacagtgatttttttcttgtaatttaaacaggcccagcattgctggttctatttaatggacatgagataatgttagaggttttaaagtgattaaacgtgcagactatgcaaaccag

SEQ ID NO: 6107 - DNA, 1400 bp, Homo sapiens
agtccaaccggctgtgcgaacggaagctcttcattcagttctgctgccgcacgtgcctcctggccgggtaagggtgcctagctgcccacagagggcaggcactcccatccatccatccgtccaccttcctccagactgtcggccagagtctgtttcaggagcggcgccctgcacctgacagctttatctccccaggagcagcatctctgagcacccaagccaggtgggtggtggctcttaaggaggtgttcctaaaatggtgatatcctctcaaatgctgcttgttggctccagtcttccgacaaactaacaggaacaaaatgaattctgggaatccacagctctggctttggagcagcttctgggaccataagtttactgaatcttcaagaccaaagcagaaaagaaaggcgcttggcatcacacatcactcttctccccgtgcttttctgcggctgtgtagtaaatctccccggcccagctggcgaaccctgggccatcctcacatgtgacaaagggccagcagtctacctgctcgttgcctgccactgagcagtctggggacggtttggtcagactataaataagataggtttgagggcataaaatgtatgaccactggggccggagtatctatttctacatagtcagctacttctgaaactgcagcagtggcttagaaagtccaattccaaagccagaccagaagattctatcccccgcagcgctctcctttgagcaagccgagctctccttgttaccgtgttctgtctgtgtcttcaggagtctcatggcctgaacgaccacctcgacctgatgcagagccttctgaggagaggcaacaggaggcattctgtggccagccaaaaggtaccccgatggccaagcaattcctctgaacaaaatgtaaagccagccatgcattgttaatcatccatcacttcccattttatggaattgcttttaaaatacatttggcctctgcccttcagaagactcgtttttaaggtggaaactcctgtgtctgtgtatattacaagcctacatgacacagttggatttattctgccaaacctgtgtaggcattttataagctacatgttctaatttttaccgatgttaattattttgacaaatatttcatatattttcattgaaatgcacagatctgcttgatcaattcccttgaatagggaagtaacatttgccttaaattttttcgacctcgtctttctccatattgtcctgctcccctgtttgacgacagtgcatttgccttgtcacctgtgagctggagagaacccagatgttgtttattgaatctacaactctgaaagagaaatcaatgaagcaagtacaatgttaaccctaaattaataaaagagttaacatcccatggc

SEQ ID NO: 6108 - DNA, 600 bp, Homo sapiens
aacaaggaggactgggacccatgaacattcctttggtatcagacccgaagcgcaccattgctcaggattatggggtcttaaaggctgatgaaggcatctcgttcaggggcctttttatcattgatgataagggtattcttcggcagatcactgtaaatgacctccctgttggccgctctgtggatgagactttgagactagttcaggccttccagttcactgacaaacatggggaagtgtgcccagctggctggaaacctggcagtgataccatcaagcctgatgtccaaaagagcaaagaatatttctccaagcagaagtgagcgctgggctgttttagtgccaggctgcggtgggcagccatgagaacaaaacctcttctgtattttttttttccattagtaaaacacaagacttcagattcagccgaattgtggtgtcttacaaggcaggcctttcctacagggggtggagagaccagcctttcttcctttggtaggaatggcctgagttggcgttgtgggcaggctactggtttgtatgatgtattagtagagcaacccattaatcttttgtagtttgtattaaacttgaactgag

SEQ ID NO: 6109 - DNA, 1400 bp, Homo sapiens
actctgtcagaaatattactcctcagaaccccaggcagtagacttcctagaatgtgcagaagaagctagaaaaaagattaattcctgggtcaagactcaaaccaaaggcaaaatcccaaacttgttacctgaaggttctgtagatggggataccaggatggtcctggtgaatgctgtctacttcaaaggaaagtggaaaactccatttgagaagaaactaaatgggctttatcctttccgtgtaaactcggctcagcgcacacctgtacagatgatgtacttgcgtgaaaagctaaacattggatacatagaagacctaaaggctcagattctagaactcccatatgctggagatgttagcatgttcttgttgcttccagatgaaattgccgatgtgtccactggcttggagctgctggaaagtgaaataacctatgacaaactcaacaagtggaccagcaaagacaaaatggctgaagatgaagttgaggtatacataccccagttcaaattagaagagcattatgaactcagatccattctgagaagcatgggcatggaggacgccttcaacaagggacgggccaatttctcagggatgtcggagaggaatgacctgtttctttctgaagtgttccaccaagccatggtggatgtgaatgaggagggcactgaagcagccgctggcacaggaggtgttatgacagggagaactggacatggaggcccacagtttgtggcagatcatccttttctttttcttattatgcataagataaccaactgcattttatttttcggcagattttcctcaccctaaaactaagcgtgctgcttctgcaaaagatttttgtagatgagctgtgtgcctcagaattgctatttcaaattgccaaaaatttagagatgttttctacatatttctgctcttctgaacaacttctgctacccactaaataaaaacacagaaataattagacaattgtctattataacatgacaaccctattaatcatttggtcttctaaaatgggatcatgcccatttagattttccttactatcagtttatttttataacattaacttttactttgttatttattattttatataatggtgagtttttaaattattgctcactgcctatttaatgtagctaataaagttatagaagcagatgatctgttaatttcctatctaataaatgcctttaattgttctcataatgaagaataagtaggtaccctccatgcccttctgtaataaatatctggaaaaaacattaaacaataggcaaatatatgttatgtgcatttctagaaatacataacacatatatatgtctgtatcttatattcaattgcaagtatataataaataaacctgcttccaaacaac

SEQ ID NO: 6110 - DNA, 600 bp, Homo sapiens
gaaccccacacgggtagagagagttgtctgcactgctggtctcaagtggtatcctcaccctgctctgattcactgtgtcaaaggctgtgagcccttcatgggagacaattattgtgatgccatcaacaaccgagccttttgcaactatgacggtggggattgctgcacctccacagtgaagaccaaaaaggtcaccccattccctatgtcctgtgacctacaaggtgactgtgcttgtcgggacccccaggcccaagaacacagccggaaagacctccggggatacagccatggctaaggaaggacaagaagttgtcaaagaattcccaacgccaggacccacatccctttggtattgatttcacagtcagctgctcaacggaatggcctctccacaccagggatccttagcacccaaccggtctgcctttaattttacccaggaaggactcacattggggcgaatgaaccaagtttcgccatgctggatgatgaaatggattcccatcccaaagtctgagatggattgcatatacagtgtgcagtcccagagcctcctaaaattctagccatttgtcacacaaccacagcaaaaaaaaa

SEQ ID NO: 6111 - DNA, 1400 bp, Homo sapiens
ctccctcctggggcccctcctcactgcctgcgccctgctgccttttgcccagggccagacccccaactacaccagacccgtgttcctgtgcggaggggatgtgaagggggaatcaggttacgtggcaagtgaggggttccccaactcctacccccctaataaggagtgcatctggaccataacggtccccgagggccagactgtgtccctctcattccgagtcttcgacctggagctgcaccccgcctgccgctacgatgctctggaggtcttcgctgggtctgggacttccggccagcggctcggacgcttttgtgggaccttccggcctgcgcccctagtcgcccccggcaaccaggtgaccctgaggatgacgacggatgagggcacaggaggacgaggcttcctgctctggtacagcgggcgggccacctcgggctctgagcaccaattttgcggggggcggctggagaaggcccagggaaccctgaccacgcccaactggcccgagtccgattaccccccgggcatcagctgttcctggcacatcatcgcgcccccggaccaggtcatcgcgctgaccttcgagaagtttgacctggagccggacacctactgccgctatgactcggtcagcgtcttcaacggagccgtgagcgacgactcccggaggctggggaagttctgcggcgacgcagtcccgggctccatctcctccgaagggaatgaactcctcgtccagttcgtctcagatctcagtgtcaccgctgatggcttctcagcctcctacaagaccctgccgcggggcactgccaaagaagggcaagggcccggccccaaacggggaactgagcctaaagtcaagctgccccccaagtcccaacctccggagaaaacagaggaatctccttcagcccctgatgcacccacctgcccaaagcagtgccgccggacaggcaccttgcagagcaacttctgtgccagcagccttgtggtgactgcgacagtgaagtccatggttcgggagccaggggagggccttgccgtgactgtcagtcttattggtgcttataaaactggaggactggacctgccaactccacccactggtgcctccctgaagttttacgtgccttgcaagcagtgcccccccatgaagaaaggagtcagttatctgctgatgggccaggtagaagagaacagaggccccgtccttcctccagagagctttgtggttctccaccggcccaaccaggaccagatcctcaccaacctaagcaagaggaagtgcccctctcaacctgtgcgggctgctgcgtcccaggactgagacgcaggccagccccggcccctagccctcaggcctctcttcttatccaaataaatgtttcttaatgaaa

SEQ ID NO: 6112 - DNA, 1400 bp, Homo sapiens
aggggcacgtttgaagatgcgagcgctatcttcacatagttctccagttgtatggagcctcttctgccaagagagggccatgcaattcatcccagaggaacctgaggcctgaaggaggtgagagaagacctctgtgaggaaagcacacagtcaccttctcggcaactaagcagtccctgagaccatttaacatgcaacccgaaggttatggtcaatcccaaaagtcaccactccattcccaactagacattaccaaagtgacctacccagagattgcttctcatccccagtcccaatgcacatccattcccaagaaatgctttgtcttcagcctctccaggcaccatctcccttcctgtgggagcagagagcttagcctggagcacctttccttcaagccagcaacacagagcactaggttcaattccctgaaggtggccactttaagagagaaatctgaaaaccccatttgctttcttttctcccatattggcatggatttctgtcttctctaacaccttgtgaccttctctatatcatgctttaaagtgtaataatatgattttttaaaagaaatttattacttgttgcaaaggtctttttaaaccagtttagatttcaagaaaaaataaatggaaatcatcgaaaattcatttcacattaatggtctaaaaataaaccaaaggacattatgtgtgcatgtgtgtataagtgcacacagaaatatatatacatatgtagactatatacatgtgtgtatatatgtgtatatatacatacacttgtataaatgtatatacacatatacctataatgtgtgtatgtgtatttattgaagaaacagataccatactcatttctaaaagaatattcagagaatatcaagatgattctggctgaaaaaggccagtggaaattcaggtgaaaatgttcatcaattcccattgcatcacctctgtaatttttcagctctctgtataaacattaaatgtcttatatagcagcaaaaatataaaatagttgtccatattttcacaggtgtggtgtaatttataaaattagaaagcaacttatcagctacttaagagaaatggcaagttttgatatgagtatacaatatataaaaatatatatagtgctatatatataaatatttggtctctatttcattttttgcatcagtattaatactaaaatatgtctcgctagtgatgtttttatgatatccctgatcctaactgaagagacagttatttatagtcatttattttaaaaaatgaaaataagtgaataataattaggttaacattgttgctccctgtgacaaaattttataagcaaatttcaaaagacatgttgtaaattaggaggctcaacaataaaacattatgctccagaaa

SEQ ID NO: 6113 - DNA, 600 bp, Homo sapiens
atcatagaaacaaagttttttgacgacgatcttcttgtaagcacatccagagtgagacttttctatgtttgaaagaagaatgtgtgtacatttcaagaatttgggttttttggagggaggaggaaactgtttacttttttcctccacacgtttgatttttgacacatacacccctaattccctcaacagcagaacctacctgcagccaccaggggaccagctctgtgtaggtaaccagatggctctttttcccaagccgccatcttccagctgaccagactaaactcccaaccccagaccagggcaggggacaggtctcaagtccttcccagcatacacacagggaaacaaacacataccacaaaccggtaactgtacctgtcaccctccttgtctcctccttgggccctacaggctacacatctacctttggcccctggttttggaaaaattccgtgttcctgacccatgtttagttttttcctaccatttctatttcatacattctcatacatttaacttgtaaaatagactgtgatattattacataatgtaattaaaaatatgaattaaaatattcctacagtcaaaaaaaaaaaa

SEQ ID NO: 6114 - DNA, 1400 bp, Homo sapiens
gggcccggggctgcgcgccgccggcttcagccgcagcttcagctcggactcgggctccagcccggcgtccgagcgcggcgttccgggccaggtggacttctacgcgcgcttctcgccgtccccgctctccatgaagcagttcctggacttcggatcagtgaatgcttgtgaaaagacctcatttatgtttctgcggcaagagttgcctgtcagactggcaaatataatgaaagaaataagtctccttccagataatcttctcaggacaccatccgttcaattggtacaaagctggtatatccagagtcttcaggagcttcttgattttaaggacaaaagtgctgaggatgctaaagctatttatgactttacagatactgtgatacggatcagaaaccgacacaatgatgtcattcccacaatggcccagggtgtgattgaatacaaggagagctttggggtggatcctgtcaccagccagaatgttcagtactttttggatcgattctacatgagtcgcatttcaattagaatgttactcaatcagcactctttattgtttggtggaaaaggcaaaggaagtccatctcatcgaaaacacattggaagcataaatccaaactgcaatgtacttgaagttattaaagatggctatgaaaatgctaggcgtctgtgtgatttgtattatattaactctcccgaactagaacttgaagaactaaatgcaaaatcaccaggacagccaatacaagtggtttatgtaccatcccatctctatcacatggtgtttgaacttttcaagaatgcaatgagagccactatggaacaccatgccaacagaggtgtttacccccctattcaagttcatgtcacgctgggtaatgaggatttgactgtgaagatgagtgaccgaggaggtggcgttcctttgaggaaaattgacagacttttcaactacatgtattcaactgcaccaagacctcgtgttgagacctcccgcgcagtgcctctggctggttttggttatggattgcccatatcacgtctttacgcacaatacttccaaggagacctgaagctgtattccctagagggttacgggacagatgcagttatctacattaaggctctgtcaacagactcaatagaaagactcccagtgtataacaaagctgcctggaagcattacaacaccaaccacgaggctgatgactggtgcgtccccagcagagaacccaaagacatgacgacgttccgcagtgcctagacacactggggacatcggaaaatccaaatgtggcttttgtattaaatttggaaggtatggtgttcagaactatattataccaagtactttatttatcgttttcacaaaactatttgagtagaataaatggaaa

SEQ ID NO: 6115 - DNA, 1199 bp, Homo sapiens; identical to SEQ ID NO: 880

SEQ ID NO: 6116 - DNA, 600 bp, Homo sapiens
ctagactccattctgggaccatctccaggagtccatgagaggctttcttctcctatgtcccaattctcagaactcagatgtggctagaccaaccagtgggaaactgccccagcttctcccaccatagggggccggacccccatcaccagcctaggatccaggggctgcctctggcctcttagggagcagagagcagaactccgcagcccagcccagaggagtgtcacctcccacctttggagaggaatccttccctcccctggacaaagttgctgacaagctgctgaagtggcctctccatattccagctgagcctgaatctgactcttgagggttggggctgcacttatttattgcggggagacagctctctctcccacctcctccccagatgggaggagagcctgaggcccaagcaggacccgggggttccagcccctagctgctctggagtgggggaggttggtggaccatggagtccctggtgctgcccctcaggtgggacccaggggttctcagctgtaccctctgccgatggcatttgtgtttttgatatttgtgtctgttactacttttttaatacaaaaagataaaaacgcc

SEQ ID NO: 6117 - DNA, 1400 bp, Homo sapiens
atggtattcacgccctgctggtggtcggtgggtttgaggcctatgaaggggtgctgcagctggtggaggctcgcgggcgctacgaggagctctgcatcgtcatgtgtgtcatcccagccaccatcagcaacaacgtccctggcaccgacttcagcctgggctccgacactgctgtaaatgccgccatggagagctgtgaccgcatcaaacagtctgcctcggggaccaagcgccgtgtgttcatcgtggagaccatggggggttactgtggctacctggccaccgtgactggcattgctgtgggggccgacgccgcctacgtcttcgaggaccctttcaacatccacgacttaaaggtcaacgtggagcacatgacggagaagatgaagacagacattcagaggggcctggtgctgcggaacgagaagtgccatgactactacaccacggagttcctgtacaacctgtactcatcagagggcaagggcgtcttcgactgcaggaccaatgtcctgggccacctgcagcagggtggcgctccaaccccctttgaccggaactatgggaccaagctgggggtgaaggccatgctgtggttgtcggagaagctgcgcgaggtttaccgcaagggacgggtgttcgccaatgccccagactcggcctgcgtgatcggcctgaagaagaaggcggtggccttcagccccgtcactgagctcaagaaagacactgatttcgagcaccgcatgccacgggagcagtggtggctgagcctgcggctcatgctgaagatgctggcacaataccgcatcagtatggccgcctacgtgtcaggggagctggagcacgtgacccgccgcaccctgagcatggacaagggcttctgaggccagccatgcccgagctgcccctccccagcccccacccatgccagcgcacgcgccagggctcagatggggcctgggctgttgtgtctggagcctgcaggcaggtgggggctgcgtccctgctcagcccatcccctgcctctactccctggccacctgccaggcctccctccggctggtgtcttgagaccagcctgccaggcctccagcaggaggacagagtgccctggggcatccaccttcctgcccaggggacgtggcgctgtcggtgtttggaggctgctgccccctggctttggcgccccatgggccctcagcgtctccccatgctgggctcactacatgggccagcccttgctctacctggccggtaggctgctggcgcctaggttgtgttgagagggggatgcccctggccctgcctcactgtgacctgctcctgcccacgtgcagcacctgtcaccttttctagaaataaaatcaccctgactgtggggtgccatcggtctccggaga

SEQ ID NO: 6118 - DNA, 600 bp, Homo sapiens
gtattcagaagagggcaaaggcgtgtttgactgcaggaagaacgtgctgggtcacatgcagcagggtggggcaccctctccatttgatagaaactttggaaccaaaatctctgccagagctatggagtggatcactgcaaaactcaaggaggcccggggcagaggaaaaaaatttaccaccgatgattccatttgtgtgctgggaataagcaaaagaaacgttatttttcaacctgtggcagagctgaagaagcaaacggattttgagcacaggattcccaaagaacagtggtggctcaagctacggcccctcatgaaaatcctggccaagtacaaggccagctatgacgtgtcggactcaggccagctggaacatgtgcagccctggagtgtctgacccagtcccgcctgcatgtgcctgcagccaccgtggactgtctgtttttgtaacacttaagttattttatcagcactttatgcacgtattattgacattaatacctaatcggcgagtgcccatctgccccaccagctccagtgcgtgctgtctgtggagtgtgtctcatgctttcagatgtgcatatgagcagaattaattaa

SEQ ID NO: 6119 - DNA, 1400 bp, Homo sapiens
gggtctaaccggtctcaataaagcagaaactgctgcaaagcatggtgaggcccaggtgaagatctggaggcgctcctatgatgtcccaccacctccgatggagcccgaccatcctttctacagcaacatcagtaaggatcgcaggtatgcagacctcacagaagatcagctaccctcctgtgagagtctgaaggatactattgccagagctctgcccttctggaatgaagaaatagttccccagatcaaggaggggaaacgtgtactgattgcagcccatggcaacagcctccggggcattgtcaagcatctggagggtctctctgaagaggctatcatggagctgaacctgccgactggtattcccattgtctatgaattggacaagaacttgaagcctatcaagcccatgcagtttctgggggatgaagagacggtgcgcaaagccatggaagctgtggctgcccagggcaaggccaagaagtgaaggccggcggggaggatactgtccccaggagcaccctccctgcccgtcttgtccctctgcccctcccacctgcacatgtcacactgaccacatctgtagacatcttgagttgtagctgcagacggggaccagtggctcccattttcattttagccattttgtcgcctgcacccactcccttcatacaatctagtcagaatagcagttctagagcacaggttctcagtctaagctatggaaaagctccccttatccaacagagtttaaaagtagtgacttgggtttttgcgagtgctttgtttactaaggactttggggaggaaccatgctaagccatgaccagtgaggagaagcaacagagcctgtctgtccccatgagcggagtctgtcctctgctcttctgcagtcaggtcactgcctactgcctgggggctctagtcattccagtggaagacgaatgtaacctgcgtggtgatgtgacaactgtttcctccctgaccccagaggatctggctctaggttgggatcaatcctgaatttcgttatgtgttaatttacttttattaaaaaagtatagtatatataatacaaaacaataacccttctggggtttcttgtggcggttgaaatagtcccacatgtggtcatcagaaatagcattcctcataccaatataggatcagctccttgacctctgaggggtcaggagtgcttcctggtgtgtgtattagaatcccttcctgccttgtttcatggcagtgaaatgcctcttggtcctgtccagtgtatctttcactgatttctgaatcatgttctagttgcttgaccctgccacatgggtccagtgttcatctgagcataactgtactaaatcctttttccatatcagtataataaaggagtgatgtgcaat

SEQ ID NO: 6120 - DNA, 1366 bp, Homo sapiens; identical to SEQ ID NO: 885

SEQ ID NO: 6121 - DNA, 1400 bp, Homo sapiens
tttgatggagatggggatcgaaacatgattctgggcaagcatgggttctttgtgaacccttcagactctgtggctgtcattgctgccaacatcttcagcattccgtatttccagcagactggggtccgcggctttgcacggagcatgcccacgagtggtgctctggaccgggtggctagtgctacaaagattgctttgtatgagaccccaactggctggaagttttttgggaatttgatggacgcgagcaaactgtccctttgtggggaggagagcttcgggaccggttctgaccacatccgtgagaaagatggactgtgggctgtccttgcctggctctccatcctagccacccgcaagcagagtgtggaggacattctcaaagatcattggcaaaagcatggccggaatttcttcaccaggtatgattacgaggaggtggaagctgagggcgcaaacaaaatgatgaaggacttggaggccctgatgtttgatcgctcctttgtggggaagcagttctcagcaaatgacaaagtttacactgtggagaaggccgataactttgaatacagcgacccagtggatggaagcatttcaagaaatcagggcttgcgcctcattttcacagatggttctcgaatcgtcttccgactgagcggcactgggagtgccggggccaccattcggctgtacatcgatagctatgagaaggacgttgccaagattaaccaggacccccaggtcatgttggccccccttatttccattgctctgaaagtgtcccagctgcaggagaggacgggacgcactgcacccactgtcatcacctaagaagacaggcctgatgtggtacgtccctccacccccggacccatccaagtcatctgattgaagagcatgacagaaacaaaatgtattcaccaagcattttaggatttgactttttcactaaccagttgacgagcagtgcatttacaaggcactgccaaacaagatgcccttgggagctgtgagggaaagaggacctgcgggcttagatcaatctcaattccttttcatgccctcctgcattgctgctgcgtgggtatttgtctccttagccatcaggtacagtttacactacaatgtaagctataggtggagcatcagcagtgagtgaggccattcttcatccttaggatgtggcaatgaaatgatggtgcaagttcctttctcttttgtgaatctttccccccatttcctgtttacatgtaacccaacaaaatgcaatttctagtgccttctgtccaatcagttctttcctctgagtgagacgtacttggctacagatttctgccttgttttgcgacattgtcccattcacacagatattttgggataataaaggaaaataagctaca

SEQ ID NO: 6122 - DNA, 1400 bp, Homo sapiens
gctgccgtccatcacaactgagatcctcaagtcagtggtggctcgctttgatgctggagaactaatcacccagagagagctggtctccaggcaggtgagcgacgaccttacagagcgagccgccacctttgggctcatcctggatgacgtgtccttgacacatctgaccttcgggaaggagttcacagaagcggtggaagccaaacaggtggctcagcaggaagcagagagggccagatttgtggtggaaaaggctgagcaacagaaaaaggcggccatcatctctgctgagggcgactccaaggcagctgagctgattgccaactcactggccactgcaggggatggcctgatcgagctgcgcaagctggaagctgcagaggacatcgcgtaccagctctcacgctctcggaacatcacctacctgccagcggggcagtccgtgctcctccagctgccccagtgagggcccaccctgcctgcacctccgcgggctgactgggccacagccccgatgattcttaacacagccttccttctgctcccaccccagaaatcactgtgaaatttcatgattggcttaaagtgaaggaaataaaggtaaaatcacttcagatctctaattagtctatcaaatgaaactctttcattcttctcacatccatctacttttttatccacctccctaccaaaaattgccaagtgcctatgcaaaccagctttaggtcccaattcggggcctgctggagttccggcctgggcaccagcatttggcagcacgcaggcggggcagtatgtgatggactggggagcacaggtgtctgcctagatccacgtgtggcctccgtcctgtcactgatggaaggtttgcggatgagggcatgtgcggctgaactgagaaggcaggcctccgtcttcccagcggttcctgtgcagatgctgctgaagagaggtgccggggaggggcagagaggaagtggtctgtctgttaccataagtctgattctctttaactgtgtgaccagcggaaacaggtgtgtgtgaactgggcacagattgaagaatctgcccctgttgaggtgggtgggcctgactgttgccccccagggtcctaaaacttggatggacttgtatagtgagagaggaggcctggaccgagatgtgagtcctgttgaagacttcctctctaccccccaccttggtccctctcagatacccagtggaattccaacttgaaggattgcatcctgctggggctgaacatgcctgccaaagacgtgtccgacctacgttcctggccccctcgttcagagactgcccttctcacgggctctatgcctgcactgggaaggaaacaaatgtgtataaactgctgtcaataaatgacacccagaccttcc

SEQ ID NO: 6123 - DNA, 1400 bp, Homo sapiens
cagagttactgttactgtggtggccctggggagtggaacctgaaaatgctgcagtgccggagctgcctgcagtggttccatgaggcctgcacccagtgtctgagcaagcccctcctctatggggacaggttctatgaatttgaatgctgtgtgtgtcgcgggggccctgagaaagtccggagactacagcttcgctgggtggatgtggcccatcttgtcctgtatcacctcagtgtttgctgtaagaagaaatactttgattttgatcgtgagatcctccccttcacttctgagaattgggacagtttgctcctgggggagctttcagacacccccaaaggagaacgttcttccaagctcctctctgctcttaacagccacaaggaccgtttcatttcagggagagagattaagaagaggaaatgtttgtttggtctccatgctcggatgcctccccctgtggagccccctactggagatggagcactcaccagggcagggccctgggggaggggtctcacgtcccctggggaagcgccggaggccggagccagagcccctgaggaggaggcagaaggggaaagtggaggagctggggccaccctcagcagtgcgcaatcagcccgagccccaggagcagagggagcgggctcatctgcagagggcactgcagcagccccatccggatgtttgcttccttccacccttctgccagcaccgcagggacctctggggacagtggacccccagacaggtcacccctggaacttcacattggtttccccacagacatccctaaaagtgccccccactcgatgactgcctcatcttcctcagtttcatccccatccccaggtcttcctagacgctcagcacccccttctcccctgtgccgtagtttgtctcctgggactgggggaggagtccgaggtggggttggttacctgtcccgaggggaccctgtccgggtccttgctcggagagtacggcctgatggctctgtgcagtacctggttgagtggggaggagggggcatcttctgaacagcctgcctctgcccagctccccattcacacacaccggcactttcataccctgacctctgacctcacctacagctgggatgtacctggagagatagsgggtagttctccctactgcccaggctggaatccaagagtggggagtggggaagaggccctcttctctaccctccttcatgattcctgacccctcccatccttcccatttcctttgatgttattttgttacagctttttaaatattttttaaaattatttaacccctgggggcagagactgaggagggaggatgataagggatcccggactctgtatgattgaaataaagagaaataaacaaaaaaaaaaaaaaaaaaa

SEQ ID NO: 6124 - DNA, 631 bp, Homo sapiens; identical to SEQ ID NO: 889

SEQ ID NO: 6125 - DNA, 1400 bp, Homo sapiens
aaacatcattttctttggcaaattctgttctccttaagtggcatagcccatgttaagtcctccctgacttttctgtggatgccgatttctgtaaactctgcatccagagattcattttctagatacaataaattgctaatgttgctggatcaggaagccgccagtacttgtcatatgtagccttcacacagatagacctttttttttttccaattctatcttttgtttccttttttcccataagacaatgacatacgcttttaatgaaaaggaatcacgttagaggaaaaatatttattcattatttgtcaaattgtccggggtagttggcagaaatacagtcttccacaaagaaaattcctataaggaagatttggaagctcttcttcccagcactatgctttccttctttgggatagagaatgttccagacattctcgcttccctgaaagactgaagaaagtgtagtgcatgggacccacgaaactgccctggctccagtgaaacttgggcacatgctcaggctactataggtccagaagtccttatgttaagccctggcaggcaggtgtttattaaaattctgaattttggggattttcaaaagataatattttacatacactgtatgttatagaacttcatggatcagatctggggcagcaacctataaatcaacaccttaatatgctgcaacaaaatgtagaatattcagacaaaatggatacataaagactaagtagcccataaggggtcaaaatttgctgccaaatgcgtatgccaccaacttacaaaaacacttcgttcgcagagcttttcagattgtggaatgttggataaggaattatagacctctagtagctgaaatgcaagaccccaagaggaagttcagatcttaatataaattcactttcatttttgatagctgtcccatctggtcatgtggttggcactagactggtggcaggggcttctagctgactcgcacagggattctcacaatagccgatatcagaatttgtgttgaaggaacttgtctcttcatctaatatgatagcgggaaaaggagaggaaactactgcctttagaaaatataagtaaagtgattaaagtgctcacgttaccttgacacatagtttttcagtctatgggtttagttactttagatggcaagcatgtaacttatattaatagtaatttgtaaagttgggtggataagctatccctgttgccggttcatggattacttctctataaaaaatatatatttaccaaaaaattttgtgacattccttctcccatctcttccttgacatgcattgtaaataggttcttcttgttctgagattcaatattgaatttctcctatgctattgacaataaaatattattgaactacc

SEQ ID NO: 6126 - DNA, 1325 bp, Homo sapiens; identical to SEQ ID NO: 891

SEQ ID NO: 6127 - DNA, 576 bp, Homo sapiens; identical to SEQ ID NO: 892

SEQ ID NO: 6128 - DNA, 600 bp, Homo sapiens
gttgttcctgtgccgtgatggaccccagagcccctcctccagcccctgtcccacccccttcccccagcccatccattaggccagcaacgcttgtagaactcactctgggctgtaacgtggcactggtaggttgggacaccagggaagaagatcaacgcctcactgaaacatggctgtgtttgcagcctgctctagtgggacagcccagagcctggctgccccatcatgtggccccacccaatcaagggaagaaggaggaatgctggactggaggcccctggagccagatggcaagagggtgacagcttcctttcctgtgtgtactctgtccagttcctttagaaaaaatggatgcccagaggactcccaaccctggcttggggtcaagaaacagccagcaagagttaggggccttagggcactgggctgttgttccattgaagccgactctggccctggcccttacttgcttctctagctctctaggcctctccagtttgcacctgtccccaccctccactcagctgtcctgcagcaaacactccaccctccaccttccattttcccccactactgcagcacctccaggcctgttgccgc

SEQ ID NO: 6129 - DNA, 1400 bp, Homo sapiens
gccttgctgaagatccgttccaaggagggcaggtgtgcgcagccatcccggactatacagaccatctgcctgccctcgatgtataacgatccccagtttggcacaagctgtgagatcactggctttggaaaagagaattctaccgactatctctatccggagcagctgaaaatgactgttgtgaagctgatttcccaccgggagtgtcagcagccccactactacggctctgaagtcaccaccaaaatgctatgtgctgctgacccccaatggaaaacagattcctgccagggagactcagggggacccctcgtctgttccctccaaggccgcatgactttgactggaattgtgagctggggccgtggatgtgccctgaaggacaagccaggcgtctacacgagagtctcacacttcttaccctggatccgcagtcacaccaaggaagagaatggcctggccctctgagggtccccagggaggaaacgggcaccacccgctttcttgctggttgtcatttttgcagtagagtcatctccatcagctgtaagaagagactgggaagataggctctgcacagatggatttgcctgtggcaccaccagggtgaacgacaatagctttaccctcacggataggcctgggtgctggctgcccagaccctctggccaggatggaggggtggtcctgactcaacatgttactgaccagcaacttgtctttttctggactgaagcctgcaggagttaaaaagggcagggcatctcctgtgcatgggctcgaagggagagccagctcccccgaccggtgggcatttgtgaggcccatggttgagaaatgaataatttcccaattaggaagtgtaagcagctgaggtctcttgagggagcttagccaatgtgggagcagcggtttggggagcagagacactaacgacttcagggcagggctctgatattccatgaatgtatcaggaaatatatatgtgtgtgtatgtttgcacacttgttgtgtgggctgtgagtgtaagtgtgagtaagagctggtgtctgattgttaagtctaaatatttccttaaactgtgtggactgtgatgccacacagagtggtctttctggagaggttataggtcactcctggggcctcttgggtcccccacgtgacagtgcctgggaatgtacttattctgcagcatgacctgtgaccagcactgtctcagtttcactttcacatagatgtccctttcttggccagttatcccttccttttagcctagttcatccaatcctcactgggtggggtgaggaccactccttacactgaatatttatatttcactatttttatttatatttttgtaattttaaataaaagtgatcaataaaatgtgatttttctga

SEQ ID NO: 6130 - DNA, 1180 bp, Homo sapiens; identical to SEQ ID NO: 895

SEQ ID NO: 6131 - DNA, 945 bp, Homo sapiens; identical to SEQ ID NO: 896

SEQ ID NO: 6132 - DNA, 600 bp, Homo sapiens
gatagcctggaccaggacagcttcgacaccatccacttctttgggaacgagactagccctggtgggaacgactttgagatctttgccgacccccggactgttggccacagcgtggtgtctcctcaggacacggtgcagcgatgccgggagattttcttcccagagacagctcatgaggcgtgaccggggcccacatctgtgtgtcgtgacttctgaagagtttggcctaggcctaaagagaggtcctggtgttggatagatgccagggcccctcctctggcccaggacgcctgctgcaagcccacccagatggggccagagtctgtgtggacaaccgtccccagccagtctgctcctagtggcactggcttcgtcctcccagggcccagagtgttccccatgctccacctggtgccccaggccacagctgctgcttgtatttcggtacagaagaggtttctttctgcaccaggaggaggcgtgctcaagtatcggtacgagatctagcctgccctgcctgcctgccctgggcgatgaggtacggtggggaaggtgcctattttagagaactttgtcacagtattaaagttccctcgtgcc

SEQ ID NO: 6133 - DNA, 600 bp, Homo sapiens
tggcccaggtacaagtacaaaaagactctaaagaagctgtcaagaagaaggcagctgagcaaacagctgcccgggaacaggcaaaggaggcgtgcaaagctgcagcagaacaggccatctccgtccgacagcaggtcgtgctagaaaatgctgcaaagaagagagagcgagcaacaagcgacccaaggaccacagaacagaaacaagagaagaaacgactcaaaatttccaagaagccaaaggacccagagccaccagaaaaagagtttacgccttacgactacagccagtcagacttcaaggcttttgctggaaacagcaaatccaaagtttcttctcagtttgatccaaataaacagaccccgtctggcaagaaatgcattgcagccaaaaaaattaaacagtcggtgggaaacaaaagcatgtcctttccaactggaaagtcagacagaggcttcaggtacaactggccacagagatagtcctggaagacacgtggcgcctgtggaccggaagcaccaaatgctggtgctgcttttgtacatacatatttttaaaccattaaaattcttcctgaagaaaaaaaaaaaaaaaaaaaaa

SEQ ID NO: 6134 - DNA, 600 bp, Homo sapiens
agagatccgcctcccttgcccttcccccgcccccggacggtcacagcacccaaaccgcaggccctgctctggcaggcaggcaaagctaggcagaagaggattcccaggatcctgggtctgttccctgccccagtgctgcagaacggacttgggagccctcctttgcctgctcccgcgggtcacccagcgagtgctgagaccccattttctgtcgaggcgggccgagtcttcccttatccccagacgcctagcgggcagggttgggctgaatcaaatgggagccctccagacataaggaggccagaggctgcaaggagcggggtcgtgaccgcttacaccccttctccacagcccggcccgacctggagggcccccggggcactgggcggtgagccacctcctggcaactctcggtgccgtcccctgccctcgctcgaggcctcttctccccagcaccgctgtggtgtgccgggatcctgagcctaggcctcccgatgttcccacccgcatgatcccttcccgccacacgatgctccgttttcttccgttgtgaatgccgcgtcctgtcctggtgacaggagaacaatgttggtgaacgtc

SEQ ID NO: 6135 - DNA, 1238 bp, Homo sapiens; identical to SEQ ID NO: 900

SEQ ID NO: 6136 - DNA, 1400 bp, Homo sapiens
gttgttgtttgtttttagatccacagtacatgagaatccttttttgacaagccttggaaagctgacactgtctctttttcctccctctatacgaaggatgtatttaaatgaatgctggtcagtgggacattttgtcaactatgggtattgggtgcttaactgtctaatattgccatgtgaatgttgtatacgattgtaaggcttatgtcactaaagatttttattctgattttttcataatcaaaggtcatatgatactgtatagacaagctttgtagtgaagtatagtagcaataatttctgtacctgatcaagtttattgcagcctttcttttcctatttcttttttttaagggttagtattaacaaatggcaatgagtagaaaagttaacatgaagattttagaaggagagaacttacaggacacagatttgtgattctttgactgtgacactattggatgtgattctaaaagcttttattgagcattgtcaaatttgtaagcttcatagggatggacatcatatctataatgcccttctatatgtgctaccatagatgtgacatttttgaccttaatatcgtctttgaaaatgttaaattgagaaacctgttaacttacattttatgaattggcacattgtattacttactgcaagagatatttcattttcagcacagtgcaaaagttctttaaaatgcatatgtctttttttctaattccgttttgttttaaagcacattttaaatgtagttttctcatttagtaaaagttgtctaattgatatgaagcctgactgattttttttttccttacagtgagacatttaagcacacattttattcacatagatactatgtccttgacatattgaaatgattcttttctgaaagtattcatgatctgcatatgatgtattaggttaggtcacaaaggttttatctgaggtgatttaaataacttcctgattggagtgtgtaagctgagcgatttctaataaaattttagttgtacacttttagtagtcatagtgaagcaggtctagaaaataagcctttggcagggaaaaagggcaatgttgattaatctcagtattaaaccacattaatctgtatcccattgtctggcttttgtaaattcatccaggtcaagactaagtatgttggttaataggaatccttttttttttttaaagactaaatgtgaaaaaataatcactacttaagctaattaatattggtcattaaatttaaaggatggaaatttatcatgtttaaaaattattcaagcactcttaaaaccacttaaacagcctccagtcataaaaatgtgttctttacaaatatttgcttggcaacacgacttgaaataaataaaactttgtttcttaggagaaaa

SEQ ID NO: 6137 - DNA, 600 bp, Homo sapiens
gtccattgtggcgcccctttccagtgtttgacagtgtgccattcgacaacacattgttatagctacatggagaaagctctgtggattcatcactgtggtgttctccatgtctgctagccatttaggtaagggtagggcacttttaatttaaatgacttcttgcaccatcttgcctaatggactagattggactgtatcaacattgatttactccactttttatgccttccattgtgatgacgtcaaacacagtgaaagccttcagtcatgctatgggatttaattgtgtatcctcattactgtatcatttgtggggtacaccccttccccctttttttaaattaaatacagctcattcttactgtggcttgtagcattcctcctcttctggcctcctggactgctccccttcatctcttacccttgccccctccacccggtcttggtggtggtatattaaaaaaagaaagaatgaaagcacacaaaatgagtcagtttggggtcagtggtataaagggggtatatgttgcaaacaaatgttttagtaacagttggctgtaatcactcctcgccgtgtctggcactgaaaataaggaaaag

SEQ ID NO: 6138 - DNA, 600 bp, Homo sapiens
tgacagacaggggactccccaagaactcctttaatatctccaacctgcttgtgctccacctgtcccacaacaggatcagcagtgtgcccgccatcaacaacaggctggaacacctgtacctcaacaacaatagcatcgagaaaatcaacggaacccagatttgccccaacgacctagtggcgttccatgacttctcctcggacctggagaacgtgccacacctgcgctacctgcggctggatggaaactacttgaagccgcccatcccgctggacctcatgatgtgcttccgcctcctgcagtccgtggtcatctaggccctactccgccaccggatctgctctgaccgcacttgaaggctggggcccaggcacctgtgccggccattcgttttctctctctccccttctttctcccagctttgcctcccttatcccaccctcgaggcagggaaaagccatctattcttctgcagcctcaggagcgagacttcaaggactcagtttggttccacccagttgaaagacaaccagtgcacacccaaactcctggccttctgtggtttccctttgctccagaaacacagatgtgtctaaaaaa

SEQ ID NO: 6139 - DNA, 600 bp, Homo sapiens
cagcgacagaaaacctcaagggctttcccacgttgacaccaagaaaccactgggcataatgcttccccacgggaacattattcctggactgacaggctacagttgaacagaactgccgtgggaattttatcttttttaggcttctcctttttagcaaggccttggtgtttctttttccaccctgtctaggcacatgtggttttttggtgttttttttaagggcatgttgggataaatagctaaatggcaacaaacacattgtgaatattagattgctgaattaaggatcatagtcgggcatacttatctatatccataacctctatatctttaaataaatgtgagaactgttctcatggagaagacttctttgcaacaataataaatgttatttaagaatgacagggatttacttccggtttcttcatattgaggggcaactccagaagtggagttttctgtgagaataaagcatttcacctttctgcaacaagttagttttcaagcagttaagtcatagaatgtttgttagctgtgaaaataagttgttcatccaaaaaaaaaaaaaaaaaaaaaaaaaaaaaaaaaaaaaaggaattc

SEQ ID NO: 6140 - DNA, 600 bp, Homo sapiens
aagaattttatagaaatttttaaacatctgaaaaagaagcttaagttttatcatccttttttttctcatgaattcttaaaggattatgctttaatgctgttatctatcttattgttcttgaaaatacctgcattttttggtatcatgttcaaccaacatcattatgaaattaattagattcccatggccataaaatggctttaaagaatatatatatatttttaaagtagcttgagaagcaaattggcaggtaatatttcatacctaaattaagactctgacttggattgtgaattataatgatatgccccttttcttataaaaacaaaaaaaaaataatgaaacacagtgaatttgtagagtgggggtatttgacatattttacagggtggagtgtactatatactattacctttgaatgtgtttgcagagctagtggatgtgtttgtctacaagtatgattgctgttacataacaccccaaattaactcccaaattaaaacacagttgtgctgtcaatacctcatactgctttacctttttttcctggatatctgtgtattttcaaatgttactatatattaaagcagaaatataacc

SEQ ID NO: 6141 - DNA, 1400 bp, Homo sapiens
ttattattaagcttctttatgaaaaaggcatcagcctcagggcctccttcatcttcatctctgtctgcagtacctggcatgtagcacgcactttcctcctgatgccccgggggcacatcccatacccactgccccccaactacagcataggcctgtgccctgggaatggcaccacaaaggaagagaaggaaacagctgagcatgaaaacagggagctacagtcaaaggagttcctttcagcgaaggaagagacccaggggcagggcagaagcaggaactccgctccttctggagctacgctttctctcggcgctttgcctggcacctggtgtggctgtctgtgatacagttgtggcactacctcttcattggcactctcaactccttgctgccaacatggccggtgggacatggcacgagtcagcacctacacaaatgcctttgccttcactcagttcggagtgctgtgtgccccctggaatggcctgctcatggaccggcttaaacagaagtaccagaaggaagcaagaaagacagggtcttttaacatccgaggaccacattctttatactttccaaatcatcacctgccccatgcaacttacagggataaagccaagatgaaactccccttacttctggctcttctatttggggcagtttctgctcttcatctaaggtctgagacttccacctttgagacccctttgggtgctaagacgctgcctgaggatgaggagacaccagagcaggagatggaggagaccccttgcagggagctggaggaagaggaggagtggggctctggaagtgaagatgcctccaagaaagatggggctgttgagtctatctcagtgccagatatggtggacaaaaaccttacgtgtcctgaggaagaggacacggtaaaagtggtgggcatccctgggtgccagacctgccgctacctcctggtgagaagtcttcagacgtttagtcaagcttggtttacttgccggaggtgctacaggggcaacctggtttccatccacaacttcaatattaattatcgaatccagtgttctgtcagcgcgctcaaccagggtcaagtctggattggaggcaggatcacaggctcgggtcgctgcagacgctttcagtgggttgacggcagccgctggaactttgcgtactgggctgctcaccagccctggacccgcggtggtcactgcgtggccctgtgtacccgaggaggctactggcgtcgagcccactgcctcagaagacttcctttcatctgttcctactgagctggtcccagccagcagttcagagctgccctctcctgggcagctgcctcccctcctctgcttgccatccctccctccacctccctgcaataaaatgggttttactgaaaa

SEQ ID NO: 6142 - DNA, 600 bp, Homo sapiens
tgctgaaagtcctgctttcctatctagcatttattcctctggcaaacttttctttcttttcttttttaaagtaaacttgtgtattgagtcttaactgtatttcagtattttccagccttatgtgttacattattccaatgatacccaacagtttatttttattatttttttaaacaaaatttcacagttctgtaatgtaggcacttttattttcattgtgatttatatataaggtaatgtagggttatatttgggagtgactgcaagcatttttccatctgtgtgcaactaactgactctgttattgatcccttctcctgccctttcccaggtaatttaaattggtcatggtagatttttttcatagatttgaaaaacttttaggttgttaccaagtatgaagtataaatctggggaagaggttttatttacattttagggtgggtaagaaagccaccttgttacaaattttttaatttccaaaataatctatattaaatgagggtttctgatctgtactttgtgtttagctacctttttatatttaaaaaattaaaaatgaaaattatgttcttacaagcttaaagcttgatttgatct

SEQ ID NO: 6143 - DNA, 600 bp, Homo sapiens
gcacattctgtgggaccccggagttcctggcccctgaggtgctgacggacacgtcgtacacgcgagctgtggactggtggggactgggtgtgctgctctacgagatgctggttggcgagtccccattcccaggggatgatgaggaggaggtcttcgacagcatcgtcaacgacgaggttcgctacccccgcttcctgtcggccgaagccatcggcatcatgagaaggctgcttcggaggaacccagagcggaggctgggatctagcgagagagatgcagaagatgtgaagaaacagcccttcttcaggactctgggctgggaagccctgttggcccggcgcctgccaccgccctttgtgcccacgctgtccggccgcaccgacgtcagcaacttcgacgaggagttcaccggggaggcccccacactgagcccgccccgcgacgcgcggcccctcacagccgcggagcaggcagccttcctggacttcgacttcgtggccgggggctgctagccccctcccctgcccctgcccctgcccctgcccgagagctcttagtttttaaaaaggcctttgggatttgccggaaaaaaaaaaaaaa

SEQ ID NO: 6144 - DNA, 1400 bp, Homo sapiens
agatgctgcggacagtgaaggaggaagctgagaagccagagagagaggccaaagagcagcaccagaagctgtgggaagagcagctggctgctgccaaggcccaacaggagcaggagctggcggctgatgccttcaaggagctggatgatgacatggacgggacggtctcggtgactgagctgcagactcacccggagctggacacagatggggatggggcgttgtcagaagcggaagctcaggccctcctcagtggggacacacagacagacgccacctctttctacgaccgcgtctgggccgccatcagggacaagtaccggtccgaggcactgcccaccgaccttccagcaccttctgcccctgacttgacggagcccaaggaggagcagccgccagtgccctcgtcgcccacagaggaggaggaggaggaggaggaggaggaagaagaggctgaagaagaggaggaggaggaggattccgaggaggccccaccgccactgtcacccccgcagccggccagccctgctgaggaagacaaaatgccgccctacgacgagcagacgcaggccttcatcgatgctgcccaggaggcccgcaacaagttcgaggaggccgagcggtcgctgaaggacatggaggagtccatcaggaacctggagcaagagatttcttttgactttggccccaacggggagtttgcttacctgtacagccagtgctacgagctcaccaccaacgaatacgtctaccgcctctgccccttcaagcttgtctcgcagaaacccaaactcgggggctctcccaccagccttggcacctggggctcatggattggccccgaccacgacaagttcagtgccatgaagtatgagcaaggcacgggctgctggcagggccccaaccgctccaccaccgtgcgcctcctgtgcgggaaagagaccatggtgaccagcaccacagagcccagtcgctgcgagtacctcatggagctgatgacgccagccgcctgcccggagccaccgcctgaagcacccaccgaagacgaccatgacgagctctagctggatgggcgcagagaacctcaagaaggcatgaagccagcccctgcagtgccgtccacccgcccctctgggcctgcctgtggctctgttgccctcctctgtggcggcaggacctttgtggggcttcgtgccctgctctggggcccaggcggggctggtccacattcccaggccccaacagcctccaaagatgggtaaaggagcttgccctccctgggccccccaccttggtgactcgccccaccacccccagccctgtccctgccacccctcctagtggggactagtgaatgacttgacctgtgacctcaatacaataaatgtgatcccccaccc

SEQ ID NO: 6145 - DNA, 1400 bp, Homo sapiens
ccacagtttcacagtccagttgggtcaccacttaagtcaatacaggccacattaacaccttctgctatgaaatcttcccctcaaattcctcatcaaacatacagcagcattctgaaacatctgaactaaaacactcagcagacatttatctttgtattcttcatgaaatgtgttttgtctttttttattactagtgtttaagtcattttttacttgaatcagatggtgtcatttagtaaggattttatgagttcttgttttttaaaatccagactttctttttctacatgtgagatagttttcattttaactggcatgtcatttgcacacaaaaataaagactagagcaaaataatgcaacgcaggaggagaaaagaaatgcactaagacaagaacattctctcatagaacattgatctgttttacaggaaacaaaccttgccttgaaatttacacagtgagactgtacataattgcatgaaaatagctatttttttcctaagacatttttcattcatgaatattttcaagtttttcatactgtacacatttcttaaaacacatgataccagcagcaactgaaaatgaatgccgaatttggtacacatgtgttatctacctcaaggtaacaagagtatgtggcaaaacatataccacccatagtgcttcacaaaatgcacttctatttagccagcgtttattgtagtaaactattcttaataaaactcactcactgtttataaatgttctggtatgcattctttatagtgaagtgttaatacatcacatcttatttattttagcaaatcagtatattttctgtatttaattataaaaaattaacttagtttttaaaatttatttgcaaatatactttttccatttggcactatggtttgttgcctacctagctgcatctataatgtcagcttatcctaaggctgtccacgtacttaatttacttaagtgttcattttaagtaacgtgctcactgtgtataggaatttgtattttggaggtgcttgatctatctacaaagaaaaattaattaggaattactttattataaaatgctcctagaagtcttaattgtgtttattttttaaaaaaacaaatgttagacttgtgtgcatggaagtaattaaggtacatcattattgtagtttgaaagttgtacatgataagacattttgtttttactgtatgtttttactgaatgatctattccccatcccaaggcaagcatgaataaaattaggttaaacgtagcatgtggcatcgcagtctcttagaatttgtttcatctattttattttattgaatactgtctgtatctttggttatcctgtttgaagaaaaaggacaaataaaacatggccagcaaatacaaaaaaaaaaaa

SEQ ID NO: 6146 - DNA, 600 bp, Homo sapiens
tggctctgtggcgagccatttgtcccaagtgccaaagaagcagaccattggggctcccagccaggcccttgtcggccccaccagtgcctctccctgctgctcctaggacccgtctccagctgctgagatcctggactgagggggcctggatgccccctgtggatgctgctgcccctgcacagcaggctgccagtgcctgggtggatgggccaccgccttgcccagcctggatgccatccaagttgtatatttttttaatctctcgactgaatggactttgcacactttggcccagggtggccacacctctatcccggctttggtgcggggtacacaagaggggatgagttgtgtgaataccccaagactcccatgagggagatgccatgagccgcccaaggccttcccctggcactggcaaacagggcctctgcggagcacactggctcacccagtcctgcccgccaccgttatcggtgtcattcacctttcgtgttttttttaatttatcctctgttgattttttcttttgctttatgggtttggcttgtttttcttgcatggtttggagctgatcgcttctcccccaccccctagggg

SEQ ID NO: 6147 - DNA, 1400 bp, Homo sapiens
tctgtgactctgggcccacagcggggaggccaagaggggccctgtggactttcacccagcactgtgggggccttcagactctggggcagcagacatgctgcttcccatcagccagagggggtcagggctgccctgttgccaaacaactccctgaggcctctccgcaccacctcagcgggcaggaggtcccaccatgtggacagacatagcccaaggaggcaccacaggtctatgtgtgctgggggatgtcaggtgccacccaacgctgtcctggtggtatttacaatgacatcctcctcctccatcactccaggggtggtgtctcggccgcccctaccagctggctgagccccctggcctcctgcgctccctcacttccctcagttcccaaagctgcccagtccatggggacagaaccgtcactcagatccacattcaagtgtgcccaccctgcagtcttcatcctcactcagctgctgcctctggaggtgcctttggccacatgtgctgtgctgtttgtctcctcgacagggagcctgtccaccagcaggctgcggtcccagcgggtgcgtctgcagctcctccccttgggcaggctggttctcccggaggacctttccttggggccctgcttcatgacgatgctgcctgtgtcaccctctaccatctgtaaacaactgggtgccttccccgaccacaccccaatgccttcccagcttggaagccaaggcagctgatgaagggagctcaggagagccgtcttcagctgggctggggttggggctgctgtgaggaaaacctgccattgtggccctggagagtcaccagcagctcttgggaaggacttgctgggaggctgagagaggctttgggcacagcctgctgtcttttccatttcctaaagtttacttcattgtcttgaggcttccaggttttgtttttgtttttgccaaagtagaaaaggcaggtggtgggcggctggcagggagtgcgggtccccgcccctcttcagtcctgccctcccctcctcagtcctgcccaccccgtgcagcccatgctgaggctgcagtggtgtcgtgggtgttacgtgcaggaacgtggagaccctgacgtgggctcactgcatttggttttcttttcagaacttgggagcccccagggaggggctagtgttggtaggtcctagacgtggttccctccagcctccccaaaatcaaccctggtgttgagagaacgtccttctgtccatcgtgggtaacagccttggggagggtgcagagctctgcagagccatgggccaggtggggctgcctcagtcctgtccccttgggcactgaggagaggggcccattcacctttctcctagaatgctgttgtaaataaacaaatggatccctgga

SEQ ID NO: 6148 - DNA, 800 bp, Homo sapiens; identical to SEQ ID NO: 913

SEQ ID NO: 6149 - DNA, 802 bp, Homo sapiens; identical to SEQ ID NO: 914

SEQ ID NO: 6150 - DNA, 807 bp, Homo sapiens; identical to SEQ ID NO: 915

SEQ ID NO: 6151 - DNA, 600 bp, Homo sapiens
ttagcgcatttcttaaactaaacaggaaagtcgcattattttcccattctactctagaaagcatggaaattaagtgtttcgtacaaaaattttaaaaagttaccaaaggtttttattcttacctatgtcaatgaaatgctagggggccagggaaacaaaattttaaaaataataaaattcaccatagcaatacagaataactttaaaataccattaaatacatttgtatttcattgtgaacaggtatttcttcacagatctcatttttaaaattcttaatgattatttttattacttactgttgtttaaagggatgttattttaaagcatataccatacacttaagaaatttgagcagaatttaaaaaagaaagaaaataaattgtttttcccaaagtatgtcactgttggaaataaactgccataaattttctagttccagtttagtttgctgctattagcagaaactcaattgtttctctgtcttttctatcaaaattttcaacatatgcataaccttagtattttcccaaccaatagaaactatttattgtaagcttatgtcacaggcctggactaaattgattttacgttcctctt

SEQ ID NO: 6152 - DNA, 600 bp, Homo sapiens
tctccccatggctcagcgagcactgagctggccctacttccaggatggatgcatcacactcaaggacaggagcctggtccttccctgatggcctttggacccagggcctgacttgagccactccttccttcaggactctgcgggaggctggggccccatcttgatctttgagcccattcttctgggtgtgctttttgggaccatcactgagagtcaggagttttactgcctgtagcaatggccagagcctctggcccctcacccaccatggaccagcccattggccgagctcctggggagctcctgggacccttggctatgaaaatgagccctggctcccacctgtttctggaagactgctcccggcccgcctgcccagactgatgagcacatctctctgccctctccctgtgttctgggctggggccacctttgtgcagcttcgaggacaggaaaggccccaatcttgcccactggccgctgagcgcccccgagccctgactcctggactccggaggactgagcccccaccggaactgggctggcgcttggatctggggtgggagtaacagggcagaaatgattaaaatgtttgagcac

SEQ ID NO: 6153 - DNA, 1400 bp, Homo sapiens
tgtctccccggctggctggctcgctctctcctggggacacagaggtcggcaggcagcacacagagggacctacgggcagctgttccttcccccgactcaagaatccccggaggcccggaggcctgcagcaggagcggccatgaagaagctgatggtggtgctgagtctgattgctgcagcctgggcagaggagcagaataagttggtgcatggcggaccctgcgacaagacatctcacccctaccaagctgccctctacacctcgggccacttgctctgtggtggggtccttatccatccactgtgggtcctcacagctgcccactgcaaaaaaccgaatcttcaggtcttcctggggaagcataaccttcggcaaagggagagttcccaggagcagagttctgttgtccgggctgtgatccaccctgactatgatgccgccagccatgaccaggacatcatgctgttgcgcctggcacgcccagccaaactctctgaactcatccagccccttcccctggagagggactgctcagccaacaccaccagctgccacatcctgggctggggcaagacagcagatggtgatttccctgacaccatccagtgtgcatacatccacctggtgtcccgtgaggagtgtgagcatgcctaccctggccagatcacccagaacatgttgtgtgctggggatgagaagtacgggaaggattcctgccagggtgattctgggggtccgctggtatgtggagaccacctccgaggccttgtgtcatggggtaacatcccctgtggatcaaaggagaagccaggagtctacaccaacgtctgcagatacacgaactggatccaaaaaaccattcaggccaagtgaccctgacatgtgacatctacctcccgacctaccaccccactggctggttccagaacgtctctcacctagaccttgcctcccctcctctcctgcccagctctgaccctgatgcttaataaacgcagcgacgtgagggtcctgattctccctggttttaccccagctccatccttgcatcactggggaggacgtgatgagtgaggacttgggtcctcggtcttacccccaccactaagagaatacaggaaaatcccttctaggcatctcctctccccaacccttccacacgtttgatttcttcctgcagaggcccagccacgtgtctggaatcccagctccgctgcttactgtcggtgtccccttgggatgtacctttcttcactgcagatttctcacctgtaagatgaagataaggatgatacagtctccatcaggcagtggctgttggaaagatttaagatttcacacctatgacatacatgggatagcacctgggccgccatgcactcaataaagaatgtatttt

SEQ ID NO: 6154 - DNA, 600 bp, Homo sapiens
caggggtaatgaagatatcatgatcacagtgattcccgaagaaattgacccataggcagaggcatgagctggacttcatgtttccctcaaagactctcccgtggatgacggatgaggactctgggctgctggaataggacactcaagacttttgactgccattttgtttgttcagtggagactccctggccaacagaatccttcttgatagtttgcaggcaaaacaaatgtaatgttgcagatccgcaggcagaagctctgcccttctgtatcctatgtatgcagtgtgctttttcttgccagcttgggccattcttgcttagacagtcagcatttgtctcctcctttaactgagtcatcatcttagtccaactaatgcagtcgatacaatgcgtagatagaagaagccccacgggagccaggatgggactggtcgtgtttgtgcttttctccaagtcagcacccaaaggtcaatgcacagagaccccgggtgggtgagcgctggcttctcaaacggccgaagttgcctcttttaggaatctctttggaattgggagcacgatgactctgagtttgagctattaaagtacttcttacaaa

SEQ ID NO: 6155 - DNA, 600 bp, Homo sapiens
ctacacccagatctgcaaatacatgtcctggatcaataaagtcatacgctccaactgatccagatgctacgctccagctgatccagatgttatgctcctgctgatccagatgcccagaggctccatcgtccatcctcttcctccccagtcggctgaactctccccttgtctgcactgttcaaacctctgccgccctccacacctctaaacatctcccctctcacctcattcccccacctatccccattctctgcctgtactgaagctgaaatgcaggaagtggtggcaaaggtttattccagagaagccaggaagccggtcatcacccagcctctgagagcagttactggggtcacccaacctgacttcctctgccactccccgctgtgtgactttgggcaagccaagtgccctctctgaacctcagtttcctcatctgcaaaatgggaacaatgacgtgcctacctcttagacatgttgtgaggagactatgatataacatgtgtatgtaaatcttcatgtgattgtcatgtaaggcttaacacagtgggtggtgagttctgactaaaggttacctgttgtcgtgaaaaaaaaaaaaaa

SEQ ID NO: 6156 - DNA, 600 bp, Homo sapiens
ggagcccacaacgtgcggacgcaggagcccacccagcagcacttctcggtggctcaggtgtttctgaacaactacgacgcggagaacaaactgaacgacattctcctcatccagctgagcagcccagccaacctcagtgcgtccgtcacctcagtccagctgccacagcaggaccagccagtgccccacggcacccagtgcctggccatgggctggggccgcgtgggtgcccacgaccccccagcccaggtcctgcaggagctcaatgtcaccgtggtgaccttcttctgccggccacataacatttgcactttcgtccctcgccgcaaggccggcatctgcttcggagactcaggtggccccctgatctgtgatggcatcatccaaggaatagactccttcgtgatctggggatgtgccacccgccttttccctgacttcttcacgcgggtagccctctacgtggactggatccgttctacgctgcgccgtgtggaggccaagggccgcccctgaaccgcccctcccacagcgctggccgggaccccgagcctggctccaaaccctcgaggcggatctttggacagaagcagctcttgt

SEQ ID NO: 6157 - DNA, 1400 bp, Homo sapiens
ccagacccttaccagaagcagtgtgatcagtttgtggcagagtacgagcccgtgctgatcgagatcctggtggaggtgatggatccttccttcgtgtgcttgaaaattggagcctgcccctcggcccataagcccttgttgggaactgagaagtgtatatggggcccaagctactggtgccagaacacagagacagcagcccagtgcaatgctgtcgagcattgcaaacgccatgtgtggaactaggaggaggaatattccatcttggcagaaaccacagcattggtttttttctacttgtgtgtctgggggaatgaacgcacagatctgtttgactttgttataaaaatagggctcccccacctcccccatttctgtgtcctttattgtagcattgctgtctgcaagggagcccctagcccctagcccctggcagacatagctgcttcagtgccccttttctctctgctagatggatgttgatgcactggaggtcttttagcctgcccttgcatggcgcctgctggaggaggagagagctctgctggcatgagccacagtttcttgactggaggccatcaaccctcttggttgaggccttgttctgagccctgacatgtgcttgggcactggtgggcctgggcttctgaggtggcctcctgccctgatcagggaccctccccgctttcctgggcctctcagttgaacaaagcagcaaaacaaaggcagttttatatgaaagattagaagcctggaataatcaggctttttaaatgatgtaattcccactgtaatagcatagggattttggaagcagctgctggtggcttgggacatcagtggggccaagggttctctgtccctggttcaactgtgatttggctttcccgtgtctttcctggtgatgccttgtttggggttctgtgggtttgggtgggaagagggccatctgcctgaatgtaacctgctagctctccgaagccctgcgggcctggcttgtgtgagcgtgtggacagtggtggccgcgctgtgcctgctcgtgttgcctacatgtccctggctgttgaggcgctgcttcagcctgcacccctcccttgtctcatagatgctccttttgaccttttcaaataaatatggatggcgagctcctaggcctctggcttcctggtagagggcggcatgccgaagggtctgtctgggtgtggattggatgctgggggtgtgggggttggaagctgtctgtggcccacttgggcacccacgcttctgtccacttctggttgccaggagacagcaagcaaagccagcaggacatgaagttgctattaaatggacttcgtgatttttgttttgcactaaagtttctgtgatttaacaataaaattctgttagcccccccg

SEQ ID NO: 6158 - DNA, 1244 bp, Homo sapiens; identical to SEQ ID NO: 923

SEQ ID NO: 6159 - DNA, 600 bp, Homo sapiens
agcaggtttgttggcagatgctcgttctttagcagacatagcaagagaagaagcttccaacttcagatctaactttggctacaacattccactaaaacatcttgcagacagagtggccatgtatgtgcatgcatatacactctacagtgctgttagaccttttggctgcagtttcatgttagggtcttacagtgtgaatgacggtgcgcaactctacatgattgacccatcaggtgtttcatacggttattggggctgtgccatcggcaaagccaggcaagctgcaaagacggaaatagagaagcttcagatgaaagaaatgacctgccgtgatatcgttaaagaagttgcaaaaataatttacatagtacatgacgaagttaaggataaagcttttgaactagaactcagctgggttggtgaattaactaatggaagacatgaaattgttccaaaagatataagagaagaagcagagaaatatgctaaggaatctctgaaggaagaagatgaatcagatgatgataatatgtaacatttactccagcatctattgtattttaaatttctactccagtccaatgtaactatttagccctg

SEQ ID NO: 6160 - DNA, 1189 bp, Homo sapiens; identical to SEQ ID NO: 925

SEQ ID NO: 6161 - DNA, 959 bp, Homo sapiens; identical to SEQ ID NO: 926

SEQ ID NO: 6162 - DNA, 600 bp, Homo sapiens
gttacaaattaacagacaaaacagtcattggatgcagcggttttcatggagactgtcttacgctgacaaagattattgaagcaagactaaagatgtataagcattccaataataaggccatgactacgggggcaattgctgcaatgctgtctacaatcctgtattcaaggcgcttctttccatactatgtttacaacatcatcggtggacttgatgaagaaggaaagggggctgtatacagctttgatccagtagggtcttaccagagagactccttcaaggctggaggctcagcaagtgccatgctacagcccctgcttgacaaccaggttggttttaagaacatgcagaatgtggagcatgttccgctgtccttggacagagccatgcggctggtgaaagatgtcttcatttctgcggctgagagagatgtgtacactggggacgcactccggatctgcatagtgaccaaagagggcatcagggaggaaactgtttccttaaggaaggactgatctgtgtgctcttatcaccaatcagttcagacctggttgattttgtactttggaactgtaccttggatggttttgtttattaaaa

SEQ ID NO: 6163 - DNA, 925 bp, Homo sapiens; identical to SEQ ID NO: 928

SEQ ID NO: 6164 - DNA, 980 bp, Homo sapiens; identical to SEQ ID NO: 929

SEQ ID NO: 6165 - DNA, 1400 bp, Homo sapiens
tcacatcctctcatggcatctgatccagaaggctcaaacctgatctgagtactagtgtgttcctcctactcacttctgtttctattaactaataagtgtagtaatgaaagccagtattagggacaaattttacatgactttcttctcaaacctggacctttattgaacctctgcctccctttttcattagtatgaaagtatgtatcttaaagggttgctctacgaattaaatggatcagtaaatataaagaaagcgcctagcaaagtgcctagtacaaaataaacgcccaactgttattgttactattgttttaaattctagtttccttaccccttaacatacattttcagttatacaaaagttgaacgtttccctggagattgccaaaattctctgaacggtttcaagagatctgtcctattcttcacctacacacaaaaaagtactaatcatcacacacaggctacctaagccacctgaccttacctcccattagctgtccctgtaccatctaactaaaatgtacagatacatacttgtggccaggcacggtggctcacgcctgtaatcacagcactttgggaggccaaggcaggcggatcacctgaggtcaggagtttcagactagtctggccaacatggagaaaccccgtttctactaaaaatgcaaaaattagctgggcttggtggtgcacacctgtagtgccagctactcgcgagactgaggcaggagaattgcttgaacccgggaggcgggggttgcagtgagccgagatccggccactacactccagcctgggaaacagagcgatactctgtctcaaaaaaacagaaagacaaaaaaacggatacatactggaaccctgaaaactttttcagtagcatttagaccttctctcatatacagcattgtaaaatccattgctttgcttttagctgcactatgtgccccaatatcatcaaatggcatttggccttctctttacagactgaaaaggcacattacagatcttaaatatgctagtagtagatcaatgggcagtgtgttattcagaatacagtattctgtgatggttttctaatctcagtgacagtaggtggttaaattaaatgtttatggccaggtgcggtggctcacacctataatcccagcactttgggaggccaagccaaggtgggcagatcttttaaggtcaggagttcaagatcagcctgaccaatatggtgaaagcctgtctccactgaaaatacaaaaaattagctgggtgtggtggcgcacccctgtaatctcagctacccgggaggtagagtttgcagtgagcagagattgtgccactgcactccagtctggacgacagagtgagactccatctcaaaaataaaaaaaaaaaaaaaaaaa

SEQ ID NO: 6166 - DNA, 1400 bp, Homo sapiens
gcaaactgccactggtgacacctcacactcagtgccggttaaaattactgaagttagagagaattaaagactatcttctcatggaggaagaattcattagaaatcaggaacaaatgaaaccattagaagaaaagcaagaggaggaaagatcaaaagtggatgatctgagggggaccccgatgtcagtaggaaccttggaagagattattgatgacaatcatgccatcgtgtctacatctgtgggctcagaacactacgtcagcattctttcatttgtagacaaggatctgctggaacctggctgctcggtcctgctcaaccacaaggtgcatgccgtgataggggtgctgatggatgacacggatcccctggtcacagtgatgaaggtagaaaaggccccccaggagacctatgcagatattggggggttggacaaccaaattcaggaaattaaggaatctgtggagcttcctctcacccatcctgaatattatgaagagatgggtataaagcctcctaagggggtcattctctatggtccacctggcacaggtaaaaccttgttagccaaagcagtagcaaaccaaacctcagccactttcttgagagtggttggctctgaacttattcagaagtacctaggtgatgggcccaaactcgtacgggaattgttccgagttgctgaagaacatgcaccgtccatcgtgtttattgatgaaattgacgccattgggacaaaaagatatgactccaattctggtggtgagagagaaattcagcgaacaatgttggaactgctgaaccagttggatggatttgattctaggggagatgtgaaagttatcatggccacaaaccgaatagaaactttggatccagcacttatcagaccaggccgcattgacaggaagattgagttccccctgcctgatgaaaagacgaagaagcgcatctttcagattcacacaagcaggatgacgctggctgatgatgtaaccctggacgacctgatcatggctaaagatgacctctctggtgctgacatcaaggcaatctgtacagaagctggtctgatggccttaagagaacgtagaatgaaagtaacaaatgaagacttcaaaaaatctaaagaaaatgttctttataagaaacaggaaggcacccctgaggggctgtatctctaatgaaccatggctgtcatcaggaaaatggttgggagatttctcaatccctgaaagggatgaggttgggggagttgcccagaggaatccctgttcccactgatttttattagcaaaacatcctgtgtcttttggagtacgatgtgtaagtgcccattgggtggcctgttggtcactgtgcagcagtctgcttcccaataaagcgtgctctttcacaag

SEQ ID NO: 6167 - DNA, 1400 bp, Homo sapiens
ctcggtgccgatcagcggaagaccaaagaggatgagaaggacgacaagcccatccgagctctggatgagggggatattgccttgttgaaaacttatggtcagagcacttactctaggcagatcaagcaagttgaagatgacattcagcaacttctcaagaaaattaatgagctcactggtattaaagaatctgacactggcctggccccaccagcactctgggatttggctgcagataagcagacactccagagtgaacagcctttacaggttgccaggtgtacaaagataatcaatgctgattcggaggacccaaaatacattatcaacgtaaagcagtttgccaagtttgtggtggaccttagtgatcaggtggcacctactgacattgaagaagggatgagagtgggcgtggatagaaataaatatcaaattcacattccattgcctcctaagattgacccaacagttaccatgatgcaggtggaagagaaacctgatgtcacatacagtgatgttggtggctgtaaggaacagattgagaaactgcgagaagtagttgaaaccccattacttcatccagagaggtttgtgaaccttggcattgagcctcccaagggcgtgctgctctttggtccacccggtacaggcaagacactctgtgcgcgggcagttgctaatcggactgatgcgtgcttcattcgagttattggatctgagcttgtacagaaatacgtcggtgagggggctcgaatggttcgtgaactctttgaaatggccagaacaaaaaaagcctgccttatcttctttgatgaaattgatgctattggaggggctcgttttgatgatggtgctggaggtgacaatgaagtgcagagaacaatgttggaactgatcaatcagcttgatggttttgatcctcgaggcaatattaaagtgctgatggccactaacagacctgatactttggatccagcactgatgaggccagggagattggatagaaaaattgaatttagcttgcccgatctagagggtcggacccacatatttaagattcacgctcgttcaatgagtgttgaaagagatatcagatttgaactgttagcacgactgtgtccaaatagcactggtgctgagattagaagcgtctgcacagaggctggtatgtttgccatcagagcacggcgaaaaattgctaccgagaaggatttcttggaagctgtaaataaggtcattaagtcttatgccaaattcagtgctactcctcgttacatgacatacaactgaaccctgaaggctttcaagtgaaaactttaaattggaatcctaaccttatatagacttgttaataaccaattcataaacaaataaatggcttcaactttagagcacaatgg

SEQ ID NO: 6168 - DNA, 1341 bp, Homo sapiens; identical to SEQ ID NO: 933

SEQ ID NO: 6169 - DNA, 1271 bp, Homo sapiens; identical to SEQ ID NO: 934

SEQ ID NO: 6170 - DNA, 1400 bp, Homo sapiens
tcattgaatctctctgtcgtgacaaggacccaattcttcgaaggtctggaatgtatactgtagccatggcttattgtggctctggtaacaacaaagcaattcgacgcctgctacatgtggctgtaagtgatgtgaatgatgatgtcaggagtgcagcagtagaatcacttgggttcattctattcagaacccctgaacagtgcccaagtgttgtctctttgttgtcagagagttacaaccctcatgtgcgctacggagctgcaatggccttggggatatgctgtgctggtacaggaaacaaggaagccattaatttgctagaaccaatgacaaacgaccccgtgaactacgtgaggcaaggggcactcatagcttcagctctcatcatgatccagcagactgaaatcacttgtccaaaggtgaatcagttcagacagctgtattccaaagtcatcaatgataagcatgatgatgtcatggccaagtttggcgctattctggcccagggcatactggatgcaggtggtcataatgtcacaatctccttgcagtccaggactgggcatactcatatgccttctgtggttggcgtccttgtatttacccagttttggttctggtttcctctttcacacttcctgtcattggcttatacccctacctgtgtcattggccttaacaaggacttaaagatgccgaaagttcagtataaatcgaactgtaaaccatccacatttgcatatcctgcccctctggaagtaccaaaagaaaaagaaaaggaaaaggtttctactgctgtattatctataactgccaaggctaaaaagaaggaaaaagaaaaggaaaaaaaggaggaggagaaaatggaagtggatgaggcagagaaaaaggaggaaaaagagaagaaaaaagaacctgagccaaacttccagttattggataacccagcccgagttatgcctgcccagcttaaggtcctaaccatgccggagacctgtagataccagcctttcaaaccactctctattggaggcatcatcattctgaaggataccagtgaagacattgaggagctggtggaacctgtggcagcacatggcccaaaaatcgaggaggaggaacaagagccagaacccccagaaccatttgagtatattgatgattaaggaccagaggatctcacttgcttatctgaagaagattgtccaggctcatattgggaatgcttatgaggaaattcatgccgagacctgctattcaatgcatgtatcgttgcctctgcactgacctgaagaaccctgtctccaagtctttggttgaagagaagatatatgactgttgagtgtgctctttcacagaacttggttttcaaataaatataagatctccagatggacaag

SEQ ID NO: 6171 - DNA, 1400 bp, Homo sapiens
ttagcctgtggaatgatagcagtagggtcctgcaatggagatgtaacttccactatccttcagaccatcatggagaagtcagagactgagctcaaggatacttatgctcgttggcttcctcttggactgggtctcaaccacctggggaagggtgaggccatcgaggcaatcctggctgcactggaggttgtgtcagagccattccgcagttttgccaacacactggtggatgtgtgtgcatatgcaggctctgggaatgtgctgaaggtgcagcagctgctccacatttgtagcgaacactttgactccaaagagaaggaggaagacaaagacaagaaggaaaagaaagacaaggacaagaaggaagcccctgctgacatgggagcacatcagggagtggctgttctggggattgcccttattgctatgggggaggagattggtgcagagatggcattacgaacctttggccacttgctgagatatggggagcctacactccggagggctgtacctttagcactggccctcatctctgtttcaaatccacgactcaacatcctggataccctaagcaaattctctcatgatgctgatccagaagtttcctattactccatttttgccatgggcatggtgggcagtggtaccaataatgcccgtctggctgcaatgctgcgccagttagctcaatatcatgccaaggacccaaacaacctcttcatggtgcgcttggcacagggcctgacacatttagggaagggcacccttaccctctgcccctaccacagcgaccggcagcttatgagccaggtggccgtggctggactgctcactgtgcttgtctctttcctggatgttcgaaacattattctaggcaaatcacactatgtattgtatgggctggtggctgccatgcagccccgaatgctggttacgtttgatgaggagctgcggccattgccagtgtctgtccgtgtgggccaggcagtggatgtggtgggccaggctggcaagccgaagactatcacagggttccagacgcatacaaccccagtgttgttggcccacggggaacgggcagaattggccactgaggagtttcttcctgttacccccattctggaaggttttgttatccttcggaagaaccccaattatgatctctaagtgaccaccaggggctctgaactgcagctgatgttatcagcaggccatgcatcctgctgccaagggtggacacggctgcagacttctgggggaattgtcgcctcctgctcttttgttactgagtgagataaggttgttcaataaagacttttatccccaaggtcaaaaaaaaaaaaaaaaaaaaaaaaaaaaaaaaaaaaaaaaaaaaaaaaaaaaaaaaaaaaaaaaaa

SEQ ID NO: 6172 - DNA, 1313 bp, Homo sapiens; identical to SEQ ID NO: 937

SEQ ID NO: 6173 - DNA, 600 bp, Homo sapiens
ataaagataaggaaaagagtgatgtaaagaaagaggagaaaaaggagaaaaagtaaaacatgtattaaatagcttttttactttgtaaattaaaatcttacaaactaaatcagtgtgctgctagagggttctttttcacttgacatgcttattagaaagctgacccaacaagagctctctgcctccggtcactcttgctgtggtgctacgtggaagtgaatggagactgatctcaaatctgaactgcagctttccctcctgtgagttggggaaatgatagtcaactcagccttcagattgtatgagaaaaatgaagagaagccaccaaatattttggtactcttcattcatttatctctaaaaccaggagttgaattttcctcatcttgaaagactcttggggtctgtttctggtattttacaaaattgctaagtggaatgcatgaattgcattatgttctctggtaacacgtagagttcagacccttctgaactctgttgataataccacaccatgttctggacccatagctctggcatcctcaggggttgtgatccagctccatatattgtttaccttcaaagatacaattaaataac

SEQ ID NO: 6174 - DNA, 928 bp, Homo sapiens; identical to SEQ ID NO: 939

SEQ ID NO: 6175 - DNA, 1400 bp, Homo sapiens
aggcattcttaaaaacttaggcttggcctctttcacaaattaggccacggccctaaataggaattccctggattgtgggcaagtgggcggaagttattctggcaggtactggtgtgattattattattatttttaataaagagttttacagtgctgatatgaccctgttgtcaccccagctgaatttcttatgaccctcccaaaccaaagctcagatggggtcagaagagcttcatagaaagttgggcaaaacaggctagcaattgcaaagtcaggctttgaccaacatatttctttgcactgaggccttgctgctgtggatacggaaatggttaagtactgtgcttcctcagcagctgggctgtcagggccatagtagctccctttggagaacagggaaagcctggaggcttcccaggtggcccagcgtggtgtcctgtcagcttcctctttaggaacccaccagagggcagcaagctcctttcacttcgctagtaagaacccctccgtttttgtgtgtttttgtttttgttttctggagacaaggtcttgctttgtcacccaggctggagtgcagtgtcgtgatcaaggttcactgaagccttgacgctgtgggcactgcctcagccgcccaagtatctgggaccacaggcgtgcaccaccatgcatagctaatttattttttgtagagacagggtctccctgtgttgaccaggttggtctcgaactcctgggctcaagcagtcctcctgccttggcctcctaaagtgctgggatcacaggcgtgagccactgcgcccagcccactgctagtttgactttttataattgaacctcctggctatgccctgagatcagcgctattttgtaaaccgctgaggtatggataggaacgagtagatcagacctcttgaaaatgcttattcttcctcccttttattttttgtctcttttaagatggtaaaatggttctcagggattcctgccaatactttgaattattttttcctctccatggtatcagtgttcatttccccagttcttgcacaccgctttctgttttggcagttctgccaggcaagccctgtgttccttgggactggttttgctgtggttggatacagataccagcttgccttgatgggattggtattgctgtgtgcttccagccacaggttctcacactcaattccaaagccttcctattgggcgaattccctcaaactctatttgacctgacagccatacgtattcccctctggtagccacagacatgctgtgtttaccaatgtttgctgtttaaattgcatgttctaattccacgtattttccagtctcttttataaagtctcagactataataaacacagcttgcccagttaaaaaaaaaaaaaaaaaaa

SEQ ID NO: 6176 - DNA, 1400 bp, Homo sapiens
gcgggaagctggaagagttgaaggagagtattctggccgataaatccctggctactagaactgaccaggacagcagaactgcattgcactgggcatgctcagctggacatacagaaattgttgaatttttgttgcaacttggagtgccagtgaatgataaagacgatgcaggttggtctcctcttcatattgcggcttctgctggccgggatgagattgtaaaagcccttctgggaaaaggtgctcaagtgaatgctgtcaatcaaaatggctgtactcccttacattatgcagcttcgaaaaacaggcatgagatcgctgtcatgttactggaaggcggggctaatccagatgctaaggaccattatgaggctacagcaatgcaccgggcagcagccaagggtaacttgaagatgattcatatccttctgtactacaaagcatccacaaacatccaagacactgagggtaacactcctctacacttagcctgtgatgaggagagagtggaagaagcaaaactgctggtgtcccaaggagcaagtatttacattgagaataaagaagaaaagacacccctgcaagtggccaaaggtggcctgggtttaatactcaagagaatggtggaaggttaaacagcttggatttattcttactttgtatgttgtgttgttgtccccagtgtcctacaaactaatgtatttgtgcacaagacatcatctatgaatgatgaagttttctcaccttcaaagtcttataaacatgttgactcttgttcctgctgagttacttgttcgaagcttacagcttgttttccaggcatcgaataactgttgagattgttctactgttgtcgtatattcttctatattgaattctggttaatttggagtaactaattctgtggctgttgtgagtcttcagcaccctcccatgtaccttatatccctctctgaaacagaacagctccaatagcaacaagctagttgttctgccagatgtttctatgtggattctgtaatgttcctccatacagttaaaacatcctaacttgtttttcaagctcactcaggcctacgccaaacgtttctgttttttttaaccatgaggtttaatttatttttgtgataggagggatatttacatattttagtggaccacattttaagttggatggtgtgctctaaaatactgaaaaacaatagcccatatacctatgtatttgtttttgatgggttgtttactctgaaataaaatgtatggttttcttaaaaggaagttttaaagtacctattttgtgtcatcctgtattgaaaagaatgtcaagcttgttaaaatgacatgtaacaaaaatgtattttgatttgtatttcagaaactaaaaaataaaatgttgaaag

SEQ ID NO: 6177 - DNA, 1400 bp, Homo sapiens
tttttttttttttttttgctcttcttcctctcccctttctttatatgggtttaaatttaacataaagttgtttttataaggcttatttgtggctttaacttgtaagtctgattacatcattattgttccaaattcattatctctgtaggaacttttagttccattatatgaacactggataacctaattttttttaatgctttaaaaaaatggcaaaaagacgtcaggccaccctcatagtaagtggtgtagtattaaaatattttcacggaattaaaagtagcttgctgtcaaagaaacacctgagatgaattggtgtgaacgaattttgcaagtttaatttgatttatttcagagaaaatagaaaaaacaatgttagaaggttatttaaaatgatacttaaataaagaaagtgtgaggtctactttaaaaaaattcaaatgaagagaaaaagaaaaacagcattctagaaatggcatttctcctaattaattttccacttaatggaagattatcaattgtcctattttatgatcccaggactgaagacagttgtgggatatctgtcatatttatcctgtgagtcattgtgaataatgacatacagtactgaagtaatctgattttattctttggaaattcaatgcattggtcacactaataacatcaacatctgctatcacttatctttttaaaactaaccaaaaaaggctgggattacaggcatgagccactgcacccaactcctctttcgtctttctttaacacacactaggctctttgtgtattatgattcagtgctatttgtaactgtgtcccagtgaccaaattgcactcgactcgatcagctgttcatccatttcgtgttttttcctgtcaaacattaatccagcaaatatatgaggtatttaccaatttattttcttagtattacaaaataattcattagcataaagtacaatagtgaaatatttgagttgttcggaacctcaattaatcctgttttacatttcagacctaaagctggcaatcaggagaagaagcactttgttttaaatgtggagaagataacacttgattccatttcattgtcattagtgtattaaccagcaggagaggtgatgagccatttttcaaatgaaataccttttatttccatataatttttttattttagagttcaatagctgtttctatgattatcctcaatttccatatgttactgaatctgaaaaacatctttaaaattcaaacagttccattttctctcttgtaagtgttaaatgtgataaaagtacatattttaaattgttttcagctcttggatatagcagcaataaaaacactaatttgtgggtatttaagaaaacctggagaataaactcatactttaaaagatc

SEQ ID NO: 6178 - DNA, 1400 bp, Homo sapiens
ttcaggtgcttgattttgtgcaggatccgtgctttgcccaaggagatggtctcattaagctttatgaaaactttatcagtgaatttgaacacagggtgaaccctttgtccctcgtggaaatcattcttcatgtagttagacagatgactgatcctaatgtggctcttacttttctggaaaagactcgtgagaaggtgaaaagtagtgatgaggcagtgatcctgtgtaaaacagcaattggagctctaaaattaaacatcggggacctacaggttacaaaggaaacaattgaagatgttgaagaaatgctcaacaaccttcctggtgtgacatcggttcacagtcgtttctatgatctctccagtaaatactatcaaacaatcggaaaccacgcgtcctactacaaagatgctctgcggtttttgggctgtgttgacatcaaggatctaccagtgtctgagcagcaggagagagccttcacgctggggctagcaggacttctcggcgagggagtttttaactttggagaactcctcatgcaccctgtgctggagtccctgaggaatactgaccggcagtggctgattgacaccctctatgccttcaacagtggcaacgtagagcggttccagactctgaagactgcctggggccagcagcctgatttagcagctaatgaagcccagcttctgaggaaaattcagttgttgtgcctcatggagatgactttcacacgacctgccaatcacagacaactcacttttgaagaaattgccaaaagtgctaaaatcacagtgaatgaggtggagcttctggtgatgaaggccctttcggtggggctggtgaaaggcagtatagacgaggtggacaaacgagtccacatgacctgggtgcagccccgagtgttggatttgcaacagatcaagggaatgaaggaccgcctggagttctggtgcacggatgtgaagagcatggagatgctggtggagcaccaggcccatgacatcctcacctagggccccctggttccccgtcgtgtctcctttgactcacctgagagaggcgtttgcagccaatgaagctggctgctcagacggtcgacattgaatttgggtgggggttgggatcctgtctgaagtacagactgttcttgctctaaaaacaggactgtccctgatgggagccaggccacagggaggaggcttctttgtgggtctctcctgcagagggtgggggtctcagggtcttaggtgatacgggagagaaagaacgtgccaggcaggaggccccctgaagtctgtgtactccgaggtggatctccatccccatccacctgtacggacatcttttccgttgcggtttgagaatgttcctataataaacccctctgctttgttaac

SEQ ID NO: 6179 - DNA, 1400 bp, Homo sapiens
cttgctcaccctgcggtgacagggacagctcaggctcttggtgactgtggcagcgggagttcccggccctccacacccggggccagaccctcggggccatgccttggtggggcctgtgtcgggcgtggggcctgcaggtgggcgccccgaccacgacttggcttccttgtgccttaaaaaacctgccttcctgcagccacacacccacccggggtgtcctggggacccaaggggtgggggggtcacaccagagagaggcagggggcctggccggctcctgcaggatcatgcagctggggcgcggcggccgcggctgcgacaccccaaccccagccctctaatcaagtcacgtgattctcccttcaccccgcccccagggccttcccttctgcccccaggcgggctccccgctgctccagctgcggagctggtcgacataatctctgtattatatactttgcagttgcagacgtctgtgcctagcaatatttccagttgaccaaatattctaatcttttttcatttatatgcaaaagaaatagttttaagtaactttttatagcaagatgatacaatggtatgagtgtaatctaaacttccttgtggtattaccttgtatgctgttacttttattttattccttgtaattaagtcacaggcaggacccagtttccagagagcaggcggggccgcccagtgggtcaggcacagggagccccggtcctatcttagagcccctgagcttcagggaaggggcgggcgtgtcgccgcctctggcatcgcctccggttgccttacaccacgccttcacctgcagtcgcctagaaaacttgctctcaaacttcagggttttttcttccttcaaattttggaccaaagtctcatttctgtgttttgcctgcctctgatgctgggacccggaaggcgggcgctcctcctgtcttctctgtgctctttctaccgcccccgcgtcctgtcccgggggctctcctaggatcccctttccgtaaaagcgtgtaacaagggtgtaaatatttataattttttatacctgttgtgagacccgaggggcggcggcgcggttttttatggtgacacaaatgtatattttgctaacagcaattccaggctcagtattgtgaccgcggagccacaggggaccccacgcacattccgttgccttacccgatggcttgtgacgcggagagaaccgattaaaaccgtttgagaaactcctcccttgtctagccctgtgttcgctgtggacgctgtagaggcaggttggccagtctgtacctggacttcgaataaatcttctgtatcctcgctccgttccgccttaaaaaaaaaaaaaaaaaaaaaaaaaaaaaaaaaaaaaaaaaaaaaaaaaaaaaaaaaaa

SEQ ID NO: 6180 - DNA, 1147 bp, Homo sapiens; identical to SEQ ID NO: 945

SEQ ID NO: 6181 - DNA, 1400 bp, Homo sapiens
agagctgcaccaggccaggagcctcctgagcacatggcagagcttcagaggaatgagcaggagcagccgcttgggcagtggcacttgagcaagcgagacacaggggctgcattgctggctgagtccagggctgagaagaaccgcctctggggccctttggaggtcaggcgcgtgggccgcagctccaagcagctggtcgacatccctgagggccagctggaggcccgagctggacggggccgaggccagtggctgcaggtgctgggagggggcttctcttacctggacatcagcctctgtgtggggctctattccctgtccttcatgggcctgctggccatgtacacctacttccaggccaagataagggccctgaagggccatgctggccaccctgcagcctgaaccacctggggaggaggcgggagagggagctgccatctctaggcacctcaagccccctgaccccattccctcccctcccaccccttgctccttgtctggcctagaagtgtgggaaattcaggaaaacgagttgctccagtgaagcttcttggggttgctaggacagagagctcctttgacacaaaagacaggagcagggtccaggttcccctgctgtgcagggagggcagccccgggcagtgggcatagggcagctcagtccctggcctcttagcaccacattcctgtttttcagcttatttgaagtcctgcctcattctcactggagcctcagtctctcctgcttggtcttggccctcaactggggcaagtgaagccagaggagggtcccccagctgggtgggctggaatggaactcctcactagctgctggggctccgcccaccctgctcccttccggacaatgaagaagcctttgcaccctgggaggaaggaccaccccgggccctctatgcctggccagcctccagctcctcagacctcctgggtggggtttggcttcagggtggggtttggaagcttctggaagtcgtgctggtctcccaggtgaggcaagccatggttgctgggctgtagggtgagtggcttgcttggtgggacctgacgagttggtggcatgggaaggatgtgggtctctagtgccttgccctggcttagctgcaggagaagatggctgctttcacttccccccattgagctctgctccctctgagcctggtcttttgtccttttttattttggtctccaagatgaatgctcatctttggagggtgccaggtagaagctagggaggggagtgtcttctctctccaggtttcaccttccagtgtgcagaagttagaagggtctggcgggggcagtgccttacacatgcttgattcccacgctaccccctgccttgggaggtgtgtggaataaattatttttgttaaggc

SEQ ID NO: 6182 - DNA, 1400 bp, Homo sapiens
aaaatttacaacaaaatcccagggaccagcaacaatggattagaggaggagtttaagaagttaacatcaatcaaaatccagaatgacaagatgcggactggaaaccttccagccaacatgaagaagaaccgtgttttacagatcattccatatgaattcaacagagtgatcattccagttaagcggggcgaagagaatacagactatgtgaacgcatcctttattgatggctaccggcagaaggactcctatatcgccagccagggccctcttctccacacaattgaggacttctggcgaatgatctgggagtggaaatcctgctctatcgtgatgctaacagaactggaggagagaggccaggagaagtgtgcccagtactggccatctgatggactggtgtcctatggagatattacagtggaactgaagaaggaggaggaatgtgagagctacaccgtccgagacctcctggtcaccaacaccagggagaataagagccggcagatccggcagttccacttccatggctggcctgaagtgggcatccccagtgacggaaagggcatgatcagcatcatcgccgccgtgcagaagcagcagcagcagtcagggaaccaccccatcaccgtgcactgcagcgccggggcaggaaggacggggaccttctgtgccctgagcaccgtcctggagcgtgtgaaagcagaggggattttggatgtcttccagactgtcaagagcctgcggctacagaggccacacatggtccagacactggaacagtatgagttctgctacaaggtggtgcaggagtatattgatgcattctcagattatgccaacttcaagtaagcggcaacaagggtccgtggaccaggaggattgcctttaatattttgtaatattctgttttgttaatataccccaaattgtgtatatatcttataactgttttagaaattggtacataggcttctattacctattaggtggaaattttatatgtaaatgtgttagcactgatagtcctttttccaatgttttattggggaattaaatagtgtgatgtttggattgatatcgtgaaatcctcagccgagaaattgggctggattgtgctttggttaatacatctttccctaaagaagataaacacaaaatccattccaggtagctcggcaccaactaagaaaaaaagcacaaagttctcagagctctcgaggaaagtggttgtccccgtaccaccatgcactgtaaatatccctcccctctctccctggtcccctcccccatccccaccactgatatcatggggagtaataggaccagagcggtatctctggcaccacactagggactatcaggtaataaaagctttgactccctgaaaaaaaaaaaaa

SEQ ID NO: 6183 - DNA, 1400 bp, Homo sapiens; identical to SEQ ID NO: 6182

SEQ ID NO: 6184 - DNA, 600 bp, Homo sapiens
agcactcgcttttctgatggttaccgctttggactgggagctgaagtgggaatcagtacatcgagaatccacgcccggggaccagtaggacttgagggactgcttactactaagtggctgctgcgagggaaggaccacgtggtctcagatttctcagagcatggaagtttaaaatatcttcatgagaacctccctattcctcagagaaacaccaactgaaaagagccaggaaaacccgggaattttccaaaaggtcttcacgttaaacttgtcttatctcaggagagagcccgctcttgtctcccagttcctggtagggtctgcctgttggaaagtgtacctggatgcttctgggctccgtttggcaatagcaatcttggctgatgtgcacagtctggctcccagctcaccctttttttttaaagtaagaaaatagttgctaccgatagggactttgccaagtccaattatcttctaggattgaaaggtgcattttccccataaaaaaggcgaggaaaacccatggctgctttgtgtcacctcagtgacttacagtcccccttggcatttagttggtactagagccagtatccttaacaa

SEQ ID NO: 6185 - DNA, 600 bp, Homo sapiens
tgactcctgctgtgtcctgaggtgcatttcctgtttgttacacacaagggccaggctccattctccctccctttccaccagtgccacagcctcgtctggaaaaaggaccaggggtcccggaggaacccatttgtgctctgcttggacagcaggcctggcactgggaggtgggggtgagcccctcacagccttgcccctccccaaggctcgaacctgcctcccattgcccaagagagagggcagggaacaggctactgtccttccctgtggaattgccgagaaatctagcaccttgcatgctggatctgggctgcggggaggctctttttctccctggcctccagtgcccaccaggaggatctgcgcacggtgcacagcccaccagagcactacagccttttattgagtggggcaagtgctgggctgtggtcgtgccctgacagcatcttccccaggcagcggctctgtggaggaggccatactcccctagttggccactggggccaccaccctgaccaccactgtgcccctcattgttactgccttgtgagataaaaactgattaaacctttgtggctgtggttggctgaaaaaaaaaaa

SEQ ID NO: 6186 - DNA, 1400 bp, Homo sapiens
ttcattgatgaagcacacattacccaatctctcacgtggctctcccagatgcagaaggacaatggctgtttcaggagctctgggtcactgctcaacaatgccataaagggaggtgtagaagatgaagcgaccctctccgcctatgttactattgcccttctggaaattcctctcccagtcactaaccctattgttcgcaatgccctgttctgcctggagtcagcctggaatgtagcaaaggaggggacccatgggagccatgtctacaccaaggcattgctggcctatgctttttccctactgggaaagcaaaatcagaatagagaaatactgaactcacttgataaggaagctgtgaaagaagacaacctcgtccattgggagcgccctcagagacccaaggcaccagtggggcatctttaccaaacccaggctccctctgctgaggtggagatgacatcctatgtgctcctcgcttatctcacggcccagccagcccccacctcaggggacctgacctctgcaactaacattgtgaagtggatcatgaagcagcagaacgcccaaggtggtttctcctccacccaggacacagtggtggctctccatgccctgtccaggtatggagcagccactttcaccagaactgagaaaactgcacaggtcaccgttcaggattcacagaccttttctacaaatttccaagtagacaacaacaacctcctattactgcagcagatctcattgccagagctccctggagaatatgtcataacagtaactggggaaagatgtgtgtatcttcagacatccatgaaatacaatattcttccagagaaagaggactccccatttgctttaaaagtgcagactgtgccccagacttgcgatggacacaaagcccacaccagctttcagatctcactgaccatcagttacacaggaaaccgtcctgcttccaatatggtgattgttgatgtaaagatggtatctggttttattcccctgaaaccaacagtaaaaatgcttgaaagatctagctctgtgagccggacagaagtgagcaacaaccatgtcctcatttatgtggaacaggtgacaaatcagacgctaagtttttccttcatggttctgcaagacatcccagtaggagacttgaagccagcaattgttaaagtctatgattactatgagacagatgagtctgtggttgctgagtatatcgccccctgcagcacagatacagagcatggaaatgtttgaggaccatacaggctgtatattttggtggattctctgtcctatacatttacttagaaggaatggagttatttgtctctataaaatagacactaaaaatatttgctgaataaatatgtacttctggtcaaactaaaaaa

SEQ ID NO: 6187 - DNA, 600 bp, Homo sapiens
ttatgcttattggaaataaaagtgatttagaatctagaagagaagtaaaaaaagaagaaggtgaagcttttgcacgagaacatggactcatcttcatggaaacgtctgctaagactgcttccaatgtagaagaggcatttattaatacagcaaaagaaatttatgaaaaaattcaagaaggagtctttgacattaataatgaggcaaatggcattaaaattggccctcagcatgctgctaccaatgcaacacatgcaggcaatcagggaggacagcaggctgggggcggctgctgttgagtctgtttttactgtctagctgcccaacggggcctactcacttattctttcaccccctctcctcctgctcagctgagacatgaaactatttgaaatggctttatgtcacagaagactttaatccgtcaaattcttgtataactttgaataaatggttaatgttcacttaaaagacagattttggagattgtattcatatctatttgcatttgatttctaggtcaattgatgtgattatttttgttaaatgttgtcttgtgcccttaactacgaactgaattgtattaaacactacaaagtc

SEQ ID NO: 6188 - DNA, 600 bp, Homo sapiens
gggacatcttgctcaagtcaggaggccggagatcaggaaacggcaacaagcctcccagtactgacctgaaaacttgtgacaagaagaacaccaacaagtgctccctgggctgaggaccctttcttgcctccccaccccggaagctgaacctgagggagacaacggcagagggagtgagcaggggagaaatagcagaggggcttggagggtcacataggtagatggtaaagagaatgaggagaaaaaggagaaaagggaaaagcagaaaggaaaaaaaggaagagagaggaagggagaagggagaggaatgaattgaggaagtgaaagaaggcaaggaggtaggaagagagggaggaggaaaggaaggagagagatgcctcaggcttcagaccttacctgggttttcagggcaaacataaatgtaaatacactgatttattctgttactagatcaggttttagggtcctgcaaaaggctagctcggcactacactagggaatttgctcctgttctgtcacttgtcatggtctttcttggtattaaaggccaccatttgcacaaaaaaaaaaaaaaaccatggtacccggatcctcgaattc

SEQ ID NO: 6189 - DNA, 600 bp, Homo sapiens
gttatattgcagtaaaagttttaaaacaaccattgcatgtttgcttttgatgtatccctttgtgaaattagcacttttggggccaatggagaaatgcagcattcactctccctgtcttttccccttccctcagcagaaacgtgtttatcagcaagtcgtgagtcaaactgctgccttttaaaaaacccacaaaatgctgattcagttcaaaattaatgcaaatgtttcaaaactgggtttctgatatttgtaaatgtgtttctttattagataagagtgtattaccattaaagtcattagtataatattgctttcaaaaagaaatggtagacaaaactataatccagcatcttttattgcattggaaagactggcaaagtcttttggatgggttgggagatgtggctggaaagtactttggaaaatatacaatcaagatatctcatggcatattaaaagaaaaatcttaatagcagtgttggcttttatttggattttttcatctcagttttttctgtggaatctccttcattggcattgttatttaatcataaacggggcagatgtctacttgttcagtttttcaaatctgttttcctg

SEQ ID NO: 6190 - DNA, 600 bp, Homo sapiens
gaggaactttttaaaatgcgggcaaaactgttccgatttgcctctgagaacgatctcccagaatggaaggagcgaggcactggtgacgtcaagctcctgaagcacaaggagaaaggggccatccgcctcctcatgcggagggacaagaccctgaagatctgtgccaaccactacatcacgccgatgatggagctgaagcccaacgcaggtagcgaccgtgcctgggtctggaacacccacgctgacttcgccgacgagtgccccaagccagagctgctggccatccgcttcctgaatgctgagaatgcacagaaattcaaaacaaagtttgaagaatgcaggaaagagatcgaagagagagaaaagaaagcaggatcaggcaaaaatgatcatgccgaaaaagtggcggaaaagctagaagctctctcggtgaaggaggagaccaaggaggatgctgaggagaagcaataaatcgtcttattttattttcttttcctctctttcctttcctttttttaaaaaattttaccctgcccctctttttcggtttgtttttattctttcatttttacaagggacgttatataaagaactgaactc

SEQ ID NO: 6191 - DNA, 600 bp, Homo sapiens
ctgttttatatattatgtgaagaatttagatcttatattggtttgcacaagttccctggagaaaaaaattgctctgtgtatatctcttggaaaataagacaatagtatttctcctttgcaatagcagttataacagatgtgaaaatatacttgactctaatatgattatacaaaagagcatggatgcatttcaaatgttagatattgctactataatcaaatgatttcatattgatctttttatcatgatcctacctatcaagcactaaaaagttgaaccattatactttatatctgtaatgatactgattatgaaatgtcccctgaaactcattgcagcagataacttttttgagtcattgacttcattttatatttaaaaaattatggaatatcatctgtcattatattctaattaaaattgtgcataatgctttggaaaaatgggtcttttataggaaaaaaactgggataactgatttctatggctttcaaagctaaaatatataatatactaaaccaactctaatattgcttcttgtgttttactgtcagattaaattacagcttttatggatgattaaattttagtacattttc

SEQ ID NO: 6192 - DNA, 1400 bp, Homo sapiens
atgatgatgcacagtttgatgcttcccattgtgacagtgacaagggtgaatttggtggctttggttctgtaacaggaaaaattgaatgtgaaattaaaatcaatcacgaaggagaagtaaaccgtgctcgttacatgccgcagaatcctcacatcattgctacaaaaacaccatcttctgatgtgttggtttttgactatacaaaacaccctgctaaaccagacccaagtggagaatgtaatcctgatctcagattaagaggtcaccagaaggaaggctatggtctctcctggaattcaaatttgagtggacatctcctaagtgcatctgatgaccatactgtttgtctgtgggatataaacgcaggaccaaaagaaggcaaaattgtggatgctaaagccatctttactggccactcagctgttgtagaggatgtggcctggcacctgctgcacgagtcattgtttggatctgttgctgatgatcagaaacttatgatatgggacaccaggtccaataccacctccaagccgagtcacttggtggatgcgcacactgccgaagtcaactgcctctcattcaatccctacagcgaatttattctagccaccggctctgcggataagaccgtagctttatgggatctgcgtaacttaaaattaaaactccataccttcgaatctcataaagatgaaattttccaggtccactggtctccacataatgaaactattctggcttcaagtggtactgaccgccgcctgaatgtgtgggatttaagtaaaattggggaagaacaatcagcagaagatgcagaagatgggcctccagaactcctgtttattcatggaggacacactgctaagatttcagattttagctggaaccccaatgagccttgggtcatttgctcagtgtctgaggataacatcatgcagatatggcaaatggctgaaaatatttacaatgatgaagagtcagatgtcacgacatccgaactggagggacaaggatcttaaacccaaagtacgagaaatgtttctgttgaatgtaatgctacatgaatgcttgatttatcaagcgccaaaaaggcattgtatagtaggaaatgtaagtggggtggcttatggcttctttatcctctgattctagcactttcaagtgagctgttgcgtactgtatcatattgtagctattagggaagagaagaatgttgcttaagaaagaacatcaccattgattttaaatacaagtagcagggtattgcctttgattcaactgttttaagtcctcattttctcaaactaagtgcttgctgttcccaaatatgcaagaataacttttacactttttccttccaacacttcttgattggctttgcagaaataaagttttaaaat

SEQ ID NO: 6193 - DNA, 1400 bp, Homo sapiens
caccattacaagcttcatggggtgaacatcaacgtggaagccagcaagaataagagcaaaacctcaacaaagttgcatgtgggcaacatcagtcccacctgcaccaataaggagcttcgagccaagtttgaggagtatggtccggtcatcgaatgtgacatcgtgaaagattatgccttcgtacacatggagcgggcagaggatgcagtggaggccatcaggggccttgataacacagagtttcaaggcaaacgaatgcacgtgcagttgtccaccagccggcttaggactgcgcccgggatgggagaccagagcggctgctatcggtgcgggaaagaggggcactggtccaaagagtgtccgatagatcgttcaggccgcgtggcagacttgaccgagcaatataatgagcaatacggagcagtgcgtacgccttacaccatgagctatggggattcattgtattacaacaacgcgtacggagcgctcgatgcctactacaagcgctgccgtgctgcccggtcctatgaggcagtgcagctgcagctgcctccgtgtataattacgcagagcagaccctgtcccagctgccacaagtccagaatacagccatggccagtcacctcacctccacctctctcgatccctacgatagacacctgttgccgacctcaggagctgctgccacagctgctgctgcagcagcagccgctgctgctgttactgcagcttccacttcatattacgggcgggatcggagccccctgcgtcgcgctacagccccagtccccactgttggagagggctacggttacgggcatgagagtgagttgtcccaagcttcagcagccgcgcggaattctctgtacgacatggcccggtatgagcgggagcagtatgccgatcgggcgcggtactcagccttttaaagcttgaggtgggatgtgtgtgggctgaaattccgagctgcggttgtgcatgagaatacacccttcgtggtaccccatctccgggacgttctcggctctgtgcgttcagtccctcaggaaccgtggaccttaatttaccttgctaagttcagaccttctcttcctttcctttcctttcctctcctgcccattttcctgttcttctgtccttcaatacttctgtagcttcccattcatgttctcttctcccagcaggcctcattgtgtgcagaaactgtggtgggggctgtgctgtctcctccctgcctcctgcctcctgcggctgttggatttgggaatgaccttggtgagagtctcactgctccagggtctctttttggtccaaaggctagacctatagagttggatcactttttttctttccggtgaaataaatggtttttcaacttaaaaaaaaaaaaaaaaaaaaaa

SEQ ID NO: 6194 - DNA, 1400 bp, Homo sapiens
cctttccatagcccaggacatagtggctctgcgtgccaaggtgcccacggtgctgcagacggccgggaagctggtggctgataactatgcctctgccgagctgggggccaagatggccaccaaactgagcggtctgcagagccgctactccagggtgacctcagaagtggccctagccgagatcctgggggctgacctgcagatgctctccggagacccacacctgaaggcagcccatatccctgagaatgccaaggaccgcattcctggaattgtgcccatgcagatcccttcccctgaagtatttgaagagctgatcaagttttccttccacactaacgtgcttgaggacaacattggctacttgaggtttgacatgtttggggacggtgagctgctcacccaggtctccaggctgctggtggagcacatctggaagaagatcatgcacacggatgccatgatcatcgacatgaggttcaacatcggtggccccacatcctccattcccatcttgtgctcctacttctttgatgaaggccctccagttctgctggacaagatctacagccggcctgatgactctgtcagtgaactctggacacacgcccaggttgtaggtgaacgctatggctccaagaagagcatggtcattctgaccagcagtgtgacggccggcaccgcggaggagttcacctatatcatgaagaggctgggccgggccctggtcattggggaggtgaccagtgggggctgccagccaccacagacctaccacgtggatgacaccaacctctacctcactatccccacggcccgttctgtgggggcctcggatggcagctcctgggaaggggtgggggtgacaccccatgtggttgtccctgcagaagaggctctcgccagggccaaggagatgctccagcacaaccagctgagggtgaagcggagcccaggcctgcaggaccacctgtagggaagggccccataggcagagccccagggcagacagaacctctgggacacacaccaagggcactcctgcaggtggcccggcctgaggttcccaggagcagcaaaggggcctgctgagctctggttaggttacagctggaggtgtgtatatatacacacacacacgtgtatatacacatatatatgtgtatgtatatatatgtatatatatatggctttccaataaccacctaaattttaacaaaggttccttctaagtggtagaacttggggtggtatttttaccttccttcttcatactttgctctttttcttaaatactcattaatgtgcatatatcattattttcagatgcagctatcattattccaaaatacaaaataaagaagataaaataaattatatacccgagccattaaccacaa

SEQ ID NO: 6195 - DNA, 1400 bp, Homo sapiens
acggggatgggtttgtggatcaggatgagtatattgcggatatgttttcccatgaggagaatggccctgagccagactgggttttatcagaacgggagcagtttaacgaattccgggatctgaacaaggacgggaagttagacaaagatgagattcgccactggatcctccctcaagattatgatcacgcacaggctgaggccaggcatctggtatatgaatcagacaaaaacaaggatgagaagctaactaaagaggaaatattggagaactggaacatgtttgttggaagccaagctaccaattacggggaagatctcacaaaaaatcatgatgagctttgatagacactcaccagaatatggcagactgtcataggcattctgttattgtcttggattgttgctacaattgtctaattacagcagttgtgatcccacaaaaagcaagtttatacctcagattggggtataaaaattgtttttcgctcagtatttactggaaaatggacatcactagtctttcagtaagatttctctcaaaacacgtgaaaaccttggtaaattgcaattctttctggggatatattggtacaacatgacttaaaacttttttttttctattaaaacttaaaggggaacaaaacttgaaaaagccctgttcttcagaaggtgagtgggttgagggaggcagtaatatgaagtgactgctgtgtattttaactaccagatttttatatttgccactgttagatagttggaaaggggaaattctgtttaagcgaaagtggtatcatcctaggtaagcttatttcagaacaagtctaatatatcagattctttcttttcgactttatactctgagttattacttactgtaagtggtgtatatgaaacctccatgcattttccagtatggatctgctaatatgcacagtaaatccatgtctttgtttgtttttctattaagaagcaatcaagaaagataatgtgaaaaagaaaggaatttagaggtagggaaaagatgaatgtcagacatgtgaagaactatagtaaaaatgataaaccacctaaatatccttgaacctaccttaaaatgccaatgaggtaggcctgatctttgaatagtggctaggatacaatgcatttcctcagtgatcactgattagaatgagttggtgggatccttgggaagccaaacggagcggggttctggatcatgtcccatccagtccagtgaatccccgacccgcagacctgccccccccgcaacagcttataccatggaatgaggacaaggtgatactctgagctgtggactgaactggcagacacaacctgtacagattgaaatttcaccttgtaaggaggaagtgaatgaaataaaggatccccctaagg

SEQ ID NO: 6196 - DNA, 600 bp, Homo sapiens
tgtattttacactcttaagtcttaaccacagtcagaattatcttaatgtagaattataattttggctcttttaggaaaaaacaaaatctgatatttttccaaacgtattgagcaacaaaatattaatattgtgccatatgacaacaaagtctttcctaaatactccatctgtttagtactgtattgtggaatatttgagttctatttccagacttgaaaacatggaggattttagagatgcctgaacaatattatttaagtagtatgtgaccgagctataaattttttgtttttgttctaagtagatttaatttgggaactgacaggacaatgtttttaggtttagcattttgtttaaaaacctttaaagaaacctttagaaggacttagacctcacatattaatgttgagaagttctgcttaattttaaaatggtttctataaagggttttattgtatgaaatagaactttatatttttgcatatgtatagaggataattatatttaatgtataactatagcattatggtgagtggaatttgacattgtccaaacctttttcatttttgagtgattaaaaatgaaatgtcctttgtaaa

SEQ ID NO: 6197 - DNA, 600 bp, Homo sapiens
cctgaacggcgagcccctaggaaagggaatactctctatgtatatggagaagacatgacacccacccttctccgtggggccttctctccttttggaaacatcattgacctctccatggacccacccagaaactgtgccttcgtcacctatgaaaagatggagtcagcagatcaggccgttgctgagctcaacgggacccaggtggagtctgtacagctcaaagtcaacatagcccgaaaacagcccatgctggatgccgctactggcaagtctgtctggggctccctcgctgtccagaacagccctaagggttgccaccgggacaagaggacccagattgtctacagtgatgacgtctacaaggaaaaccttgtggatggcttctagggaacagagctggattccttgtgcctcatatgccccaatgctggtctcagtaaaacactgaggtggaagcttacacatctccctcagcctctggtttttcagcacttgggattggggttaagcctttaaaaacggctgtcaggtttgatctcagtgtaacgacatggccagtgcctgttccccactcccttgccccaaaaggatctggaacac

SEQ ID NO: 6198 - DNA, 1400 bp, Homo sapiens
tataattcataaccatagcctcgatcatcaagaaatactttcgaaatttcattttccttcagaatatcttaagagtgctaaatttttaactgcctttttgtcgagtcaaactgtgggattctgatttgtattaaaattgtaagctcctcactggtatactatcatcctggaggggtgttgtatggctgagcaagagagagagagaatgagagagagactgtgtgtgtgtgtgtgtgtgtgtgtactctgtgtgtgtatgagagagagagagaaatgctaaccttgtagcatgtgaagaatgtctgtaccttgatacgatagttacataatcagtatatttggtttctagatcactgtgcttattttgtttcaatctctgactaaaaatacttaaatttggtttgttaattcttattttagaaattataattttagtttatattaatttcggttatagcttactgaagaaatctttccagttagaaggaggttctaatattcacatgttctaatactttgtttattgtaaaacagctaaatttggagatacgtaaagccttgttttctctgtgtggttcagctactttccatttggtattacacagtcaaatttacatttatctattaaaattgccattttattaaacattttcatgcacagtagattcaagttgtgtctgaaaatatctcttgtgcttttttgattttgctgactttaaaaggattaatctgggcagacattatgtaaaagaaaggttgcgtttaatatattttttgaactttgtaggacaaaacatagctggttaaccttgaagtgactgttgtaccatggttgtgcacatgcttcagaatcctatggaagagaatattcctacttgcagtacatcaaaggaatggatggtggaccctactattcatgttttgagacataaatgttcactttaaagcaattgcataatagataaaaacctgaactttcattggatttttgttaattttcctcattttgaattatgtgcactaccatagctacatcagtttgatacagtattgaaaaattatcagttatattttgctgtttatgatctatttgtagattaggattaaaatggatttaatccatttttaaggctgtgtgaatttttctaaacaagaaccatttgcaatatggatttcttagagattaaaccaattataacttattagcagtcgcgagcacatgttcatatagtcaatgtaaaaatacactaatgagtatttggtaaatcccagtaggcttttaccattagcataattttgtgttgtacaattaagttacaattacatctctaattttggataatattcattggttaacaataaagtgacaaaagctcatgcaaaaaaaaaaaaaaaaaaaa

SEQ ID NO: 6199 - DNA, 1400 bp, Homo sapiens
gaagaggagggggagggtgagccgggcgcggctgtgtcagctgagtgacagtcacgggaccgcgaccaactctgtctggcttcctagaggagcaggagggcggggcaagggtctcccagcgcgacaggacatggagaaagagcgagagactctgcaggcctggaaggagcgcgtggggcaggagctggaccgcgtggtggctttctggatggagcactcccacgaccaggagcacgggggcttcttcacgtgccttggccgcgaggggcgggtgtatgatgacctcaagtatgtgtggctgcaggggaggcaggtatggatgtattgtcgcctgtaccgcactttcgagcgcttccgccatgctcagcttctggacgcagcaaaagcaggtggtgagttcttgctgcggtatgcccgggtggcacctcctggcaagaagtgtgcctttgtgctgactcgggacggccgcccggtcaaggtgcagcgaaccatcttcagtgagtgtttctacaccatggccatgaacgagctgtggagagccacaggggaagtgcggtaccagacggaagcggtggagatgatggatcagatcgtccactgggtgcaggaggacgcgtcgggactgggccggccccagctccagggggccccggctgcggagcccatggcggtgcccatgatgctactgaacctggtggagcagctcggggaggcagatgaggagctggcgggcaaatacgcagagctgggggactggtgcgcccggaggattctgcagcacgtgcagagggatggacaagctgtgctggagaatgtgtcagagggtggcaaggaacttcctggctgcctggggagacagcagaacccaggccacacgctggaagccggctggtttctgctccgtcattgcattcggaaaggcgaccccgaacttcgagcccacgtgattgacaagttcctattgttgcccttccactccggatgggaccctgaccacggaggcctcttttacttccaggatgctgataacttctgccccacccagctggagtgggccatgaagctctggtggccacacagtgaagccatgattgccttcctcatgggttacagtgacagtggggaccctgtgctgctgcgcctcttctaccaagtggctgagtacaccttccgccagtttcgcgatcccgagtacggggaatggtttggctacctgagccgagagggcaaggtggccctctccatcaagggaggtcctttcaaaggctgcttccacgtgccgcggtgcctagccatgtgcgaggagatgctgggcgccctgctgagccgccccgcccccgccccctcccccgcccccacccccgcctgccgaggcgcggaataaaggctgagtccgctcc

SEQ ID NO: 6200 - DNA, 1400 bp, Homo sapiens
ctgagactgaatgctacttactatattaccaagcaaatccttccacccttggcaagaatcttctcacttattggtattgatgtcttcagctggtatcatgaattaccaaggatccataaagctaccagctcctcgcgaagtgaacctgaagggcggaaaggcactatttcacaatattttactaccttacactgtcctgtgtgtgatgacctaactcagcatggcatctgtagtaaatgtcggagccaacctcagcatgttgcagtcatcctcaaccaagaaatccgggagttggaacgtcaacaggagcaacttgtaaagatatgcaagaactgtacaggttgctttgatcgacacatcccatgtgtttctctgaactgcccagtacttttcaaactctcccgagtaaatagagaattgtccaaggcaccatatctccggcagttattagaccagttttaaattgtcaatatcacagtattacaggtgctatttttttcagtgcttaccactaaactgttgtgcatggtgctttttaactttcatcgagtcaaggatgttcactgtctgttatctgaagactatgaagacttctatgctaaccgaattaaaatgtacttgttgatctctgaatagctcacttcttacaatgtacaaattcctcattctgtcaccttttaaacattgttttataatgcaggtgttggatttgctccagtatgtgtaccatcttgtaaattcatttgagtagatcatgtttacttcccagtggaaggagcactgaaaacctcttaaagaaaaagcatttgtgtgttttccttgaactgtctgtatcaagacgtgttacttcgagatatccattcactttataattttgactgcaaaatattttgtaaatacacttttttacttttcaaacgagtaaaataatgtgcaatgatttttatacaaatgattttcaagttgtttggtatatttcctctaggttttgcttgactcaaagtagatcgttattttgatcaaactgtgcaaacagtagtaccacgtgtagcattttgaaacattattttttaaaaaatgctgtcttgctttagctattaatggggcattgtgaggaactgtgcaaagacatttttgttacaaacctgtgggcctgttgcaatactttaaaaataaaaaattttattccatttgcttgttttgtatagacatttctattgcttctaaatatacttaaaatattttctttccttatgtactgtacagttaatcttatttgccatcatcttgaacacaaaatgtgtatttagaatatttgtataactgtgtaaaataaaaaaggaattatgtggtcagtgcattgttttttaaactggaaatcattttgttttaaaagttaa

SEQ ID NO: 6201 - DNA, 1400 bp, Homo sapiens
atcaagaaaaagacaaaatcttcaaagccttcaaaaccagaaaaagataaggagcccagaaaaggaaaaggaaaaagttcgaagaaatgaaaccatttttcactagcgacagccactttttactctccctcctgaccagtccagctggtctagagaaagccttgttttttcccagagcaaccatgttttagcataatgggatgacctggtgtcccattataaataaagggtggtatggctagaagggtatgagcagtaggcttatgtacacctcttatagaggttgataggactgcttgggtcctccactgtcctctgtcaatctagttagacgtgcttctgaatgactgtagaattggaactagaaactacacctgggctttggagtcagattttagttaacaataatgagcctggagcagtagtactaaggcgtcttttgtaggcttaagaatttatcctaatggcctttataggaccaatgctgattttttttaaaggcagttcctattatgtggtgaaattttgtaaataaatgattatacaaaacagtcaccacctagaactgggtattctttgtacattgtcagatatctttcaaagtataaattaggaataaaaatgttccacatgatatgtgtacaaattctttttaagattgtcatcttgtacagcaaaatattatgttggtatattacttccttattaatttgcaaatgattggattaaaaaagctcactgtattccttactaacctgttgtgtgaaacataacattggcagtcgaggagtcagaactcggattcccagcctcactccctctgtgtgtgttgaccacgtctctgctgtgaataggatttcatgcagtggtctgttatggggctttgcagcgtggggggctgcagaagattctcagacattcttatccttctggagtctcaacccatcaggttcagaccagtaggaaccaggctgggtcaggctcttaatttcactacggtgggggacaaaatgaacactggcttttgttcactttgcccctgagagatctagtcctgtcctgtgatggcttccacaaaccctgttggaagtttgggttattcctataactgtatgtgttgagtggccgtgacgtatggacctagcctggaatttagatgtctagctattttttaatcttgttggtaaatgctcagaggtctgtgctacctctgtgaggtatatactaaaatgaatgtaaaataaggatcgtattccctgctttaaggaactggtagtcttgtttgggtgatgagacaaagttcttgagacatttaaactgtatttaccagtgtgaaaaatgtcatttatggagattaattcattatggaaataaaacattgcctaagcccttgcctgctg

SEQ ID NO: 6202 - DNA, 1345 bp, Homo sapiens; identical to SEQ ID NO: 967

SEQ ID NO: 6203 - DNA, 600 bp, Homo sapiens
cttgtccggctccttctgcttgtcctgatactgctggtgctgggctgggtccagccttccctgggcaaggaatcccgggccaagaaattccagcggcagcatatggactcagacagttcccccagcagcagctccacctactgtaaccaaatgatgaggcgccggaatatgacacaggggcggtgcaaaccagtgaacacctttgtgcacgagcccctggtagatgtccagaatgtctgtttccaggaaaaggtcacctgcaagaacgggcagggcaactgctacaagagcaactccagcatgcacatcacagactgccgcctgacaaacggctccaggtaccccaactgtgcataccggaccagcccgaaggagagacacatcattgtggcctgtgaagggagcccatatgtgccagtccactttgatgcttctgtggaggactctacctaaggtcagagcagcgagataccccacctccctcaacctcatcctctccacagctgcctcttccctcttccttccctgctgtgaaagaagtaactacagttagggctcctattcaacacacacatgcttccctttcctgagccggaattc

SEQ ID NO: 6204 - DNA, 1400 bp, Homo sapiens
agatgcaaagcaggattcaaaagaacatctttgcgttttctaccggctccccatcatcgtactagggaggaagaagcgggtgagaaacaaaacttctttccattgtcctgcccgtttctgcggacttgttctgaggccgaggcacctctaagatactgatggctctgcagaggacccattcattgcttctgcttttgctgctgaccctgctggggctggggctggtccagccctcctatggccaggatggcatgtaccagcgattcctgcggcaacacgtgcaccctgaggagacaggtggcagtgatcgctactgcaacttgatgatgcaaagacggaagatgactttgtatcactgcaagcgcttcaacaccttcatccatgaagatatctggaacattcgtagtatctgcagcaccaccaatatccaatgcaagaacggcaagatgaactgccatgagggtgtagtgaaggtcacagattgcagggacacaggaagttccagggcacccaactgcagatatcgggccatagcgagcactagacgtgttgtcattgcctgtgagggtaacccacaggtgcctgtgcactttgacggttagatgccaccatgtagggattatcgcgagtggttgaccttacacttactccttaaatagcagtgagtaatgcatttgagctgccccaggctctgtctcctcagctcatttcttactctttttctctatataactcattctattaaatacattgcaccaaagagatatggagacataaacctgtaatgaatgaggctgggcttttctgtaataagcttccttttataatactggtcagcttagctctctcagatcctatcctgtggaatttagttattatgtgtatttatgtagtatttcaaacatttcaaaatgctttcatctatgtttatcacattttaataccacagcacttataatgatgtcactacatatagaagctcaaagttaagggatttgctgaagactgtaaagttaatggaagaattgagacaaaaatccagtgtagctggccacttatccagggctttttctacttcatcacaaggaatgttttgaaagtgtctgctttttttatccttaaaattcacctgtcagggaggcattaaaaatttggaaatgtatgccagcaaaatgtgagctctgtattttttggcattcttatgtttgggtttaataagattaagaaaatgatactgggaattttctttttcctgaaactttgaatcaccctagtaagtcaaagtactaaaaaatgtactagatcattaagacttatgtgctcttactgattgaaagattttttatgttttccttgtaataaaggacctaaaccgaaggtacctgaaaaaaaaaaaaaaa

SEQ ID NO: 6205 - DNA, 1400 bp, Homo sapiens
actttagttctgtggccacagtggtgtatcttcgcaaagagaactgcatgtaccaagcctgcccgactcaggactgcaataagaaagtgattgatcaacagaatggattgtaccgctgtgagaagtgcgacaccgaatttcccaatttcaagtaccgcatgatcctgtcagtaaatattgcagattttcaagagaatcagtgggtgacttgtttccaggagtctgctgaagctatccttggacaaaatgctgcttatcttggggaattaaaagacaagaatgaacaggcatttgaagaagttttccagaatgccaacttccgatctttcatattcagagtcagggtcaaagtggagacctacaacgacgagtctcgaattaaggccactgtgatggacgtgaagcccgtggactacagagagtatggccgaaggctggtcatgagcatcaggagaagtgcattgatgtgagaggagcagtgccaatcgggcagaagtttgcaaataggcagaatggaatcgatttcctcccacctccgtgtgacgatcccatgttagctacacagtgcagaggctcttgatggtggactaagcaatttcctcccttgtgcgcatctcagaacccatcggtaggcaaaggaaaatacgctcaggtggttgtggtgtagactgtgtcaggcctacggagtcagccagtggctagcgcaagaccagtcactccctctgccttcaggcttctgtcaatttcattatcatcaagcaggaattatgtcgtaagtcactgaccctaactgcagaccatgaagtaaattatgtaactaggtttttgcttctccagtggtgaccaccccccccccatccccgctcacaacttgggttcttctcagcggggcgagctgagaagcggtcatgagcacctggggattttagtaagtgtgtcttcctagaattcgaaggctctctctttctagaggtgctacatagttggtaatgcttggaatggcaatagggtagaatgattaatcaaaggcatatcttctatatctgaagagtatccttccttcagggtttaatagactgagtcagatgggtctgatattaatcaaaattgtctcttctgaggaccgctgataagcattgacttgctgtcccctaaggaaatccgagcggctacaaagcgtttctttacttttcacttcaattaatgctgcgcttcgcttggtgagtgcgtactttttctacctgtacacattcctgcattcatgtattttgttttttttgactaaagctatgttacatggaaaggattttgaagccttttgtttcccttgctttgttttaataaacagtatattctttggttgtgaatcctaaaaaaaaaaaaaaaaaaaaaaaaaaaaa

SEQ ID NO: 6206 - DNA, 1400 bp, Homo sapiens
cgcaatactctccagctccaccgttaccgctaatataagtaaagtttgtaaaattcatacttaataaacaatttaggacagtcatgtctgcttacaggtgttatttgtctgttaaaactagtctgcagatgtttcttgaatgctttgtcaaattaagaaagttaaagtgcaataatgtttgaagacaataagtggtggtgtatcttgtttctaataagataaacttttttgtctttgctttatcttattagggagttgtatgtcagtgtataaaacatactgtgtggtataacaggcttaataaattctttaaaaggagagaactgaaactagccctgtagatttgtctggtgcatgtgatgaaacctgcagctttatcggagtgatggcaatgctctgctggtttattttcaagtggctgcgttttttttagtttggcaggtgtagactttttaagttgggctttagaaaatctgggttagcctgaagaaaattgcctcagcctccacagtaccattttaaattcacataaaaggtgaaagctcctggttcagtgccatggcttcatggcattcagtgattagtggtaatggtaaacactggtgtgttttgaagttgaatgtgcgataaaattattagccttaagattggtaagctagcaatgaatgctagggtgggaagctggtgagccagtggccattagataaatacctttcaagtgtgagcttagacgtcaaccctaaaatacttaaccgtaatgctaattgtgatcattatgaatcccttcagtcacattagggggaaagtagttggctataagtacgtcattcttagtccagtcagtcttaaaaacatcttgggttacccactctgtccactcccataggctacagaaaaagtcacaagcgcatggtttccaaccatatgtgttttctgcagttatttctcttgttctggccaaacaaccctaaaaatccttaccattccacaaagttggaccatcacttgtgcacccactttgactatgagtataccaccacattgcatttctgtttgcaccatgtcttccaggagactagactactgttgtccagggtcaatttgagtgtaaagaaaatgtagacaaggaattgcccaattttaaattctgactttgctgacttaatttaaatgctcgttctgaaccaattttctcctatcttctctaggggtttcaaaagactcagttaattgatttccaggaagtactcatagcaagttcataaaagttcttgagacctaaatttcttcacaaaaaaagaaaagatcttaagtcatacattttaattgtgtagaggttgttcaactgaaggaataaatgtctattaaactaaaaaaaaaaaaaaaaaaaaaaaaaaaaa

SEQ ID NO: 6207 - DNA, 1400 bp, Homo sapiens
tgcccaggatgtttattaccgggatgagattggcaatgtttctaccagccacctccttattttggatgactctgtagagatggaaatccggcctcgcttccctctctttggcgggtggaagacccattacatcgttggctacaacctcccaagctatgagtacctctataatttgggtgaccagtatgcactgaagatgaggtttgtggaccatgtgtttgatgaacaagtgatagattctctgactgtgaagatcatcctgcctgaaggagccaagaacattgaaattgatagtccctatgaaatcagccgtgccccagatgagctgcactacacctatctggatacatttggccgccctgtgattgttgcctacaagaaaaatctggtagaacagcacattcaggacattgtggtccactacacgttcaacaaggtgctcatgctgcaggagcccctgctggtggtggcggccttctacatcctgttcttcaccgttatcatctatgttcggctggacttctccatcaccaaggatccagccgcagaagccaggatgaaggtagcctgcatcacagagcaggtcttgaccctggtcaacaagagaataggcctttaccgtcactttgacgagaccgtcaataggtacaagcaatcccgggacatctccaccctcaacagtggcaagaagagcctggagactgaacacaaggccttgaccagtgagattgcactgctgcagtccaggctgaagacagagggctctgatctgtgcgacagagtgagcgaaatgcagaagctggatgcacaggtcaaggagctggtgctgaagtcggcggtggaggctgagcgcctggtggctggcaagctcaagaaagacacgtacattgagaatgagaagctcatctcaggaaagcgccaggagctggtcaccaagatcgaccacatcctggatgccctgtagcccctgcccgcatcctccagggggcccagggtgcctgcactttgctgtggcaggcagattgggtggtagtgggaggttgtgcatggaggccagtgaaagctgacatctgtaaaaggccttcaaggaagagaaaccaggccctgcgtcaggcagtgtgagtttgccgtttgtccttaactttctttttttttttttttaaaaaagaaaactttaaaaaaactcccattaaaaacaaaacatctttgtgttgtgaacaaaggaattttcaatatttgattggtattctgttctgaagtctaggatatttttcagcctataaagccccctgttttatgcccttctaattctgatgtttgggtattgtgtgagtgcatgtgtttttttttttttttttttaaagcgtgtgtgaacaaatggaaataaagcagggactgtg

SEQ ID NO: 6208 - DNA, 978 bp, Homo sapiens; identical to SEQ ID NO: 973

SEQ ID NO: 6209 - DNA, 551 bp, Homo sapiens; identical to SEQ ID NO: 974

SEQ ID NO: 6210 - DNA, 1400 bp, Homo sapiens
gcattgacacaacgtaacaccagcattgtgtgtgcagacttcaggagaactcatgttattttttaaccccgtcaacaaatctaggaaaatattttgatcttcaacaaattgccctttagtctccccgtatgagttagaataataaatatttagtaggtgagttttcacctcgaattttgttttcttgatttttacgtttgaagacattgcaccagatgccattacatttattggccccccgaccttgtagaaaaacccctaccctcacaataccttatttaagtaactttaaattatgccgttacttttcatatttgcacctaagatatttccaggctgcatttgtatatttagattttttggttaagctttgacactggaatgagttgaaaaaatgtgccattttgcattttcatctactcatttaaagtattttattcttattcaaagaaatatctgagctctttgcactacctgttatcagtagtgcctttacttcaggcttgataatacttaggtgtgattataaaatcatgaagcaggtaaagggaggggcaagccccaaactgctgtggggacattttataatctatatgctgcacccacttaatctactgtggtgttttgtttattagttttgcataatttcagcttctatatattgtatgtatatattttttaaaaatctatattttgggaaaaaaacatacacaatgtgtctttctttttggacatttacctttttgaaaaagaaaacacttaaaatgatcattaggacataacagactaggccagacatagcatcttgtggctttgcaaccattttcatttgtttgttttccttttatttcttcaccagatttaaataaaaggaggaattttctccaatttttttttccttctctggcaggtatccccagcagtcaattaacaataagccagtataaaacacctaaataaccaatctacaatctcccttcacaagtttttttactgtttttagatgaatgtacgatgagaaattcaacgttaataattctggattttcttatcacaaaaaagaaaatgaaggacctcaaagcacctgaacagtttatcgaccagtttgaatctatttatcttcatttgaatgtcttctagatatgtaaaaagtcataaaatgtatcttccatgctacatgtacaataagaacttctataattgtatatatgcctttgatgtattttcccctcaagattatcaactgtgtgttcgacagtgaatattcaatctggtaccagttgaaatttttggttataaatgtaatacgaattgtttcacaaacagaaaacatgtaaagcagtattaaaatttggccaaacaagtgttctgtatctacttttaataaatggttattcttt

SEQ ID NO: 6211 - DNA, 1400 bp, Homo sapiens; identical to SEQ ID NO: 6210

SEQ ID NO: 6212 - DNA, 512 bp, Homo sapiens; identical to SEQ ID NO: 977

SEQ ID NO: 6213 - DNA, 424 bp, Homo sapiens; identical to SEQ ID NO: 978
  misc_feature (40)..(40): n is a, c, g, or t

SEQ ID NO: 6214 - DNA, 649 bp, Homo sapiens; identical to SEQ ID NO: 979

SEQ ID NO: 6215 - DNA, 1060 bp, Homo sapiens; identical to SEQ ID NO: 980

SEQ ID NO: 6216 - DNA, 600 bp, Homo sapiens
aaaaaagcttttgttttgcttacaaagtatatttaaggattattctgctgaagattcagtttaagagttttccttgggagaactaagtaagaaacacaatgccaacagctggccagtaattagtgttgtgcacttcatgtcattaatcaatttctcaatagttcttaaaattagtgagattaaaaatctaaaaattttgcatttcatgctatcagaaacagtattttcttcccaaatcaaaataaaagaaatatgatcagagcttgaacacaggcttatttttaaaataaaaatatttttaacatgggtttccttattgaaaaatcagtgtattagtcataaaacaccatcattaagaataattgaacaataaagtttgctttcagatgcagttttcaaattataatctcatttcaatttataacgttctcagtcctttgttataattttcctttttcatgtaagtttaattatctgcatttatcttttttcctagtttttctaatactaatgttatttcttaaaattcagtgagatataggataaaataatgctttgagaagaatgtttaatagaaaattaaaataactttttctggca

SEQ ID NO: 6217 - DNA, 600 bp, Homo sapiens
tgaaaccccatgtgtactaaaaatacaaaaaattagccgggcgtggtagcgggcgcctgtagtcccagctactcgggaggctgaggcaggagaatggcgtgaacccgggagcggagcttgcagtgagccgagatcgcgccactgcactccagcctgggcgacagagcgagactccgtctcaaaaaaaaaaaaaaaaaaaaaaaaaatacaaaaattagccgcgtggtggcccacgcctgtaatcccagctactcgggaggctaaggcaggaaaattgtttgaacccaggaggtggaggctgcagtgagctgagattgtgccacttcactccagcctgggtgacaaagtgagactccgtcacaacaacaacaacaaaaagcttccccaactaaagcctagaagagcttctgaggcgctgctttgtcaaaaggaagtctctaggttctgagctctggctttgccttggctttgcaagggctctgtgacaaggaaggaagtcagcatgcctctagaggcaaggaagggaggaacactgcactcttaagcttccgccgtctcaacccctcacaggagcttactggcaaacatgaaaaatcgggg

SEQ ID NO: 6218 - DNA, 1400 bp, Homo sapiens
  misc_feature (1136)..(1136): n is a, c, g, or t
tgctgtgtgcctggtgggtttcatgctgtaccgcatgaagaagaaggacgaaggcagctactccttggaggagccgaaacaagccaacggcggggcctaccagaagcccaccaaacaggaggaattctatgcctgacgcgggagccatgcgccccctccgccctgccactcactaggcccccacttgcctcttccttgaagaactgcaggccctggcctcccctgccaccaggccacctccccagcattccagcccctctggtcgctcctgcccacggagtcgtgggtgtgctgggagctccactctgcttctctgacttctgcctggagacttagggcaccaggggtttctcgcataggacctttccaccacagccagcacctggcatcgcaccattctgactcggtttctccaaactgaagcagcctctccccaggtccagctctggaggggagggggatccgactgctttggacctaaatggcctcatgtggctggaagatctgcgggtggggcttggggctcacacacctgtagcacttactggtaggaccaagcatcttgggggggtggccgctgagtggcagggacaggagtcactttgtttcgtggggaggtctaatctagatatcgacttgtttttgcacatgtttcctctagttctttgttcatagcccagtagaccttgttacttctgaggtaagttaagtaagttgattcggtatccccccatcttgcttccctaatctatggtcgggagacagcatcagggttaagaagactttttttttttttttttaaactaggagaaccaaatctggaagccaaaatgtaggcttagtttgtgtgttgtctcttgagtttgtcgctcatgtgtgcaacagggtatggactatctgtctggtggccccgtttctggtggtctgttggcaggctggccagtccaggctgccgtggggccgccgcctctttcaagcagtcgtgcctgtgtccatgcgctcagggccatgctgaggcctgggccgctgccacgttggagaagcccgtgtgagaagtgaatgctgggactcagccttcagacagagaggactgtagggagggcggcaggggcctggagatcctcctgcagaccacncccgtcctgcctgtgcgccgtctccaggggctgcttcctcctggaaattgacgaggggtgtcttgggcagagctggctctgagcgcctccatccaaggccaggttctccgttagctcctgtggccccaccctgggccctgggctggaatcaggaatattttccaaagagtgatagtcttttgcttttggcaaaactctacttaatccaatgggtttttccctgtacagtagattttccaaatgtaataaactttaatataaagt

SEQ ID NO: 6219 - DNA, 1100 bp, Homo sapiens; identical to SEQ ID NO: 984

SEQ ID NO: 6220 - DNA, 758 bp, Homo sapiens; identical to SEQ ID NO: 985

SEQ ID NO: 6221 - DNA, 1400 bp, Homo sapiens
ccctgtgtagtagtgtatagaattctagcttttttcctcctttctctgtatattgggctcagagagtacactgtgtctctatgtgaatatggacagttagcatttaccaacatgtatctgtctactttctcttgtttaaaaaaagaaaaaaaaacttaaaaaaatggggttatagaaggtcagcaaaggggtggggtttgagatgtttgggtgggttagtgggcattttgacaacatggcttctcctttggcatgtttaattgtgatatttgacagacatccttgcagtttaagatgacacttttaaaataaattctctcctaatgatgacttgagccctgccactcaatgggagaatcagcagaacctgtaggatcttatttggaattgacattctctattgtaattttgttcctgtttatttttgggtttctttttgtttcactggaaaggaaagatgatgctcagttttaaacgttaaaagtgtacaagttgctttgttacaataaaactaaatgtgtacacaaaggatttgatgcttttctctcagcataggtatgcttactatgaccttccaagtttgacttgtataacatcactgtcaaactttgtcaccctaacttcgtattttttgatacgcacttttgcaggatgacctcagggctatgtggattgagtaatgggatttgaatcaatgtattaatatctccatagctgggaaacgtgggttcaatttgccattggtttctgaaaagtattcacatcatttgggataccagatagctcaatactctctgagtacattgtgcccttgatttttatctccaagtggcagtttttaaaattggccttttacctggatataaattaattgtgcctgccaccaccatccaacagacctggtgctctaatgccaagttatacacgggacagttgctggcatgtcttcattggctctctaaaatgtggccaagaagataggctctcagtaagaagtctgatggtgagcagtaactgtccctgctttctggtataaagctctcaaatgtgaccatgtgaatctgggtgggataatggactcagctctgtctgctcaatgccattgtgcagagaagcaccctaatgcataagctttttaatgctgtaaaatatagtcgctgaaattaaatgccactttttcagaggtgaattaatggacagtctggtgaacttcaaaagctttttgatgtataaaacttgataaatggaactattccatcaataggcaaaagtgtaacaacctatctagatggatagtatgtaatttctgcacaggtctctgtttagtaaatacatcactgtataccgatcaggaatcttgctccaataaaggaacataaagatttaaaaaaaaaaaaaaa

SEQ ID NO: 6222 - DNA, 600 bp, Homo sapiens
atatgttatttaccttcagatctaaatggtaatctgaacccaaatttgtataaagacttttcaggtgaaaagacttgattttttgaaaggattgtttatcaaacacaattctaatctcttctcttatgtatttttgtgcactaggcgcagttgtgtagcagttgagtaatgctggttagctgttaaggtggcgtgttgcagtgcagagtgcttggctgtttcctgttttctcccgattgctcctgtgtaaagatgccttgtcgtgcagaaacaaatggctgtccagtttattaaaatgcctgacaactgcacttccagacacccgggccttgcatataaataacggagcatacagtgagcacatctagctgatgataaatacacctttttttccctcttccccctaaaaatggtaaatctgatcatatctacatgtatgaacttaacatggaaaatgttaaggaagcaaatggttgtaactttgtaagtacttataacatggtgtatctttttgcttatgaatatctgtattataaccattgtttctgtagtttaattaaaacattttcttggtgttagctttaaaaaaaaaaaaaaaaa

SEQ ID NO: 6223 - DNA, 528 bp, Homo sapiens; identical to SEQ ID NO: 988

SEQ ID NO: 6224 - DNA, 600 bp, Homo sapiens
gcctactcatgacctgcctctgatcctggctgtggactggattgtggaccggaccaccacggtggtgaatgtggaaggggatgccctgggtgcaggcattctccaccacctgaatcagaaggcaacaaagaaaggcgagcaggaacttgctgaggtgaaagtggaagccatccccaactgcaagtctgaggaggagacatcgcccctggtgacacaccagaaccccgctggccccgtggccagtgccccagaactggaatccaaggagtcggttctgtgatggggctgggctttgggcttgcctgccagcagtgatgtcccaccctgttcacccagccgccagtcatggacacagggcactgccttgccaacttttaccctcccaagcaatgctttggcccagtcgctggcctgaggcttacctctcggcactggcattgggctccccagccggaactggttaccaaggacaaggacactctgacattcggcttgatccatgtccaggtgcaactgtgtgtacaccagggatctgtttggaaacaaccccttgagctgccaggctcaagaaatcatggactcacagggtcctgtgtggtt

SEQ ID NO: 6225 - DNA, 1400 bp, Homo sapiens
tcgtctcgggctggtactggtgcagcgaccaggtcatcgtgcagcgctgcctggccgggaagagcctgacccacatcaaggcgggctgcatcctgtgtgggtacctgaagctgacgcccatgtttctcatggtcatgccaggcatgatcagccgcattctgtacccagacgaggtggcgtgcgtggtgcctgaggtgtgcaggcgcgtgtgcggcacggaggtgggctgctccaacatcgcctacccgcggctcgtcgtgaagctcatgcccaacggtctgcgcggactcatgctggcggtcatgctggccgcgctcatgtcctcgctggcctccatcttcaacagcagcagcacgctcttcaccatggacatctacacgcgcctgcggccacgcgccggcgaccgcgagctgctgctggtgggacggctctgggtggtgttcatcgtggtagtgtcggtggcctggcttcccgtggtgcaggcggcacagggcgggcagctcttcgattacatccaggcagtctctagctacctggcaccgcccgtgtccgccgtcttcgtgctggcgctcttcgtgccgcgcgttaatgagcagggcgccttctggggactcatcgggggcctgctgatgggcctggcacgcctgattcccgagttctccttcggctcgggcagctgtgtgcagccctcggcgtgcccagctttcctctgcggcgtgcactacctctacttcgccattgtgctgttcttctgctctggcctcctcaccctcacggtctccctgtgcaccgcgcccatccccagaaagcacctccaccgcctggtcttcagtctccggcatagcaaggaggaacgggaggacctggatgctgatgagcagcaaggctcctcactccctgtacagaatgggtgcccagagagtgccatggagatgaatgagccccaggccccggcaccaagcctcttccgccagtgcctgctctggttttgtggaatgagcagaggtggggtgggcagtcctccgccccttacccaggaggaggcagcggcagcagccaggcggctggaggacatcagcgaggacccgagctgggcccgtgtggtcaacctcaatgccctgctcatgatggcagtggccgtgttcctctggggcttctatgcctaagaccaactgcgttggacaccataagccacagcctcacaggaagtgggggtgaggagcctgcggtgctccccagaaaaggggaaggggcagtggggtgagaaggtcctggctccccttctcccggccttcctctgcctggggcccactgcatctgattggcagtcacttcccatgagggcctggcccacccgctgcagttgccctaaggaaaaataaagctgcctttcccctgta

SEQ ID NO: 6226 - DNA, 600 bp, Homo sapiens
aatttggcaccaggcaaacgaataaagataggattgggaaagaagttgctaagtgtgcttagttttaataagtaattccttctcttttttcagagaaggccttacagaaaattgttgtgcttagaattgctggatgcatttttaccctccacacaaacctaaaaattttgtgacccctttcacttacctgaaaagtagagaaatggattcagtataaggataaggagggaaggtggaccagaatgaaaactgtaaatatttttttaacctaatatcacttaaatcgaggcagaaagatatagacattcaatgaattatattcaatgcatttaaaataccactgtaattgacagagtaaaagtatagatacaaaaccttgtgtaagaggctgacttttccaaataaacattttttaagaaaacatttcttctcccaaatgtctattttcttgaggaaaatattgctgtgtcttcattttcattaccaggtttcattttgggccttgctaaattgattgaattaaatcctccagcttttgaaccttgaaaaaaaaaaaaaaaaaaaaaaaaaaaaaaaaaaaagaaaaaaaaaaaaaaaaag

SEQ ID NO: 6227 - DNA, 598 bp, Homo sapiens; identical to SEQ ID NO: 992

SEQ ID NO: 6228 - DNA, 1400 bp, Homo sapiens
ccagtctagaaaatctttcagctgtaaatactgtgacaaggaatatgtgagcctgggcgccctgaagatgcatattcggacccacacattaccttgtgtttgcaagatctgcggcaaggcgttttccagaccctggttgcttcaaggacacattagaactcacacgggggagaagcctttttcttgccctcactgcaacagagcatttgcagacaggtcaaatctgagggctcatctgcagacccattctgatgtaaagaaataccagtgcaaaaactgctccaaaaccttctccagaatgtctctcctgcacaaacatgaggaatctggctgctgtgtagcacactgagtgacgcaatcaatgtttactcgaacagaatgcatttcttcactccgaagccaaatgacaaataaagtccaaaggcattttctcctgtgctgaccaaccaaataatatgtatagacacacacacatatgcacacacacacacacacacccacagagagagagctgcaagagcatggaattcatgtgtttaaagataatcctttccatgtgaagtttaaaattactatatatttgctgatggctagattgagagaataaaagacagtaacctttctcttcaaagataaaatgaaaagcacattgcatcttttcttcctaaaaaaatgcaaagatttacattgctgccaaatcatttcaactgaaaagaacagtattgctttgtaatagagtctgtaataggatttcccataggaagagatctgccagacgcgaactcaggtgccttaaaaagtattccaagtttactccattacatgtcggttgtctggttgccattgttgaactaaagcctttttttgattacctgtagtgctttaaagtatatttttaaaagggaggaaaaaaataacaagaacaaaacacaggagaatgtattaaaagtatttttgttttgttttgtttttgccaattaacagtatgtgccttgggggaggagggaaagattagctttgaacattcctggcgcatgctccattgtcttactattttaaaacattttaataatttttgaaaattaattaaagatgggaataagtgcaaaagaggattcttacaaattcattaatgtacttaaactatttcaaatgcataccacaaatgcaataatacaataccccttccaagtgcctttttaaattgtatagttgatgagtcaatgtaaatttgtgtttatttttatatgattgaatgagttctgtatgaaactgagatgttgtctatagctatgtctataaacaacctgaagacttgtgaaatcaatgtttcttttttaaaaaacaattttcaagttttttttacaataaacagttttgatttaaaaaaaaaaaaaaaa

SEQ ID NO: 6229 - DNA, 600 bp, Homo sapiens
ctaaaactccaatggtaaaattttcagcattttcctaacttttagatttaacattgttgggccatttaaaatgtgcatattggagcagaacattaaatctgtttccattttagtcacagaaaagaaaagcagagtcagctactgagagctctggaaagaaggatgtcaagaaggtgaaatcctaaagcctagaaataaagttttaaatgggaaactgctattttcttgttcccatcttcaaatgctaattgccagttccagtgtattcatggtactctaagaaaaatctctttggttttgatttcttgcatattttatatattttacaatgctttctacctgaaatgtgtagctttatattttatggcattctagtatttttgtgtactgtattttgtgcatttcatgtcttcatcaaaatcctctcagtccttgttcttttgaagcttgtgctgaggttttagcttttctatgttttatatgccgctgctttgaaagagaacctagattctatagttgtattattgttgtttcatactttaaatttatatggctgtggaaaaacgaattaaaatgttttgaggagaaagaaaaaaaaaa

SEQ ID NO: 6230 - DNA, 600 bp, Homo sapiens
tgcttctctgtcacaacgctcagacgttcaacctggagggatcccagatctatgaagactccatcgtcttacagtcagtgtttaagagtgcccggcagaaaattgccaaagaggaagagagtgaggatgaaagcaatgaagaggaggaagaggaagatgaagaagagtcagagtccgaggcaaaatcagtcaaggtgaaaattaagctcaataaaaaagatgacaaaggccgggacaaagggaaaggcaagaaaaggccaaatcgaggaaaagccaaacctgtagtgagcgattttgacagcgatgaggagcaggatgaacgtgaacagtcagaaggaagtgggacggatgatgagtgatcagtatggacctttttccttggtagaactgaattccttcctcccctgtctcatttctacccagtgagttcatttgtcatataggcactgggttgtttctatatcatcatcgtctataaactagctttaggatagtgccagacaaacatatgatatcatggtgtaaaaaacacacacatacacaaatatttgtgaccaaatgggcctcaaagattcagattgaaacaaacaaaaagctttt

SEQ ID NO: 6231 - DNA, 600 bp, Homo sapiens
gacctagagaaggacgtcatgctcctgtgccagaacgcacagaccttcaacctggagggctccctgatctatgaagactccatcgtcttgcagtcggtcttcaccagcgtgcggcagaaaatcgagaaggaggatgacagtgaaggcgaggagagtgaggaggaggaagagggcgaggaggaaggctccgaatccgaatctcggtccgtcaaagtgaagatcaagcttggccggaaggagaaggcacaggaccggctgaagggcggccggcggcggccgagccgagggtcccgagccaagccggtcgtgagtgacgatgacagtgaggaggaacaagaggaggaccgctcaggaagtggcagcgaagaagactgagccccgacattccagtctcgaccccgagcccctcgttccagagctgagatggcataggccttagcagtaacgggtagcagcagatgtagtttcagacttggagtaaaactgtataaacaaaagaatcttccatatttatacagcagagaagctgtaggactgtttgtgactggccctgtcctggcatcagtagcatctgtaacagcattaactgtcttaaagaga

SEQ ID NO: 6232 - DNA, 600 bp, Homo sapiens
ctcacttggcagtcagagcatcatgctttgaggtttggggtgctcaggctgggagggtagaatgccattccagaggacaagccacaaaaatgccttaatttgagctcgtatttacccctgctgataagtgacttgagagttcccggttttttcctcttgtccttccctcccttctgtccttccatgtgtggggaaagggtgtttttggtagagcttggtttccaaagcgcctggctttctcacttcacattctcaagtggcagtttcattatttagaatgcaaggtggacatcttttggatatctttttctatatatttctaaagctttacatatgagagggtatagggaggtgtttataaaacacttgagaacttttttccttaatatcagaaagcaaaaaaataaaaccacaattgagatttgcctttcaaaccctcaggtttgcctctaaccaggtgtccctggtcaccatcagagtactggaatacgggaaccgaggaggaccttggtccttttgtttttgttctggactcttgggagtggaaatgggatgagtttatccactggagcttaagtcccatgcatttgctccagaaag

SEQ ID NO: 6233 - DNA, 600 bp, Homo sapiens
tgtcgaccctaacgaccagaagaagacagcctgttacgacatcgatgtggaggtggacgacccactgaaggcccaaatgagcaattttctggcctctaccaccaatcagcaggagatcgcctcccttgatgtcaagatccatgagaccattgagtccatcaaccagctgaagacccagagagatttcatgctcagttttagcaccgacccccaggacttcatccaggaatggctccgttcccagcgccgagaccttaagatcatcactgatgtgactggaaatcctgaggaggagagacgagctgctttctaccaccagccctgggcccaggaagcagtaggcaggcacatctttgccaaggtgcagcagcgaaggcaggaactggaacaggtgctgggaattcgcctgacctaactgctcagggatctttcttcccagccctggagcctggagggagaccaccctctgggtccttgctggggccgcagacacgtaggctggggtgaggagtgtctgctgtcaccctctactctccagctttagttttataaatgtagtgataggattccttgttgcttggtccccaaagccttatactt

SEQ ID NO: 6234 - DNA, 1400 bp, Homo sapiens
cgatggcgcctacaacatcaaagactccacaggcaaatactggacggtgggcagtgactccgcggtcaccagcagcggcgacactcctgtggacttcttcttcgagttctgcgactataacaaggtggccatcaaggtgggcgggcgctacctgaagggcgaccacgcaggcgtcctgaaggcctcggcggaaaccgtggaccccgcctcgctctgggagtactagggccggcccgtccttccccgcccctgcccacatggcggctcctgccaaccctccctgctaaccccttctccgccaggtgggctccagggcgggaggcaagcccccttgcctttcaaactggaaaccccagagaaaacggtgcccccacctgtcgcccctatggactccccactctcccctccgcccgggttccctactcccctcgggtcagcggctgcggcctggccctgggagggatttcagatgcccctgccctcttgtctgccacggggcgagtctggcacctctttcttctgacctcagacggctctgagccttatttctctggaagcggctaagggacggttgggggctgggagccctgggcgtgtagtgtaactggaatcttttgcctctcccagccacctcctcccagccccccaggagagctgggcacatgtcccaagcctgtcagtggccctccctggtgcactgtccccgaaacccctgcttgggaagggaagctgtcgggagggctaggactgacccttgtggtgtttttttgggtggtggctggaaacagcccctctcccacgtgggagaggctcagcctggctcccttccctggagcggcagggcgtgacggccacagggtctgcccgctgcacgttctgccaaggtggtggtggcgggcgggtaggggtgtgggggccgtcttcctcctgtctctttcctttcaccctagcctgactggaagcagaaaatgaccaaatcagtattttttttaatgaaatattattgctggaggcgtcccaggcaagcctggctgtagtagcgagtgatctggcggggggcgtctcagcaccctccccagggggtgcatctcagccccctctttccgtccttcccgtccagccccagccctgggcctgggctgccgacacctgggccagagcccctgctgtgattggtgctccctgggcctcccgggtggatgaagccaggcgtcgccccctccgggagccctggggtgagccgccggggcccccctgctgccagcctcccccgtccccaacatgcatctcactctgggtgtcttggtcttttattttttgtaagtgtcatttgtataactctaaacgcccatgatagtagcttcaaactggaaatagcgaaataaaataactcagtctgc

SEQ ID NO: 6235 - DNA, 600 bp, Homo sapiens
gagcgcggcccccacccggcggcggccagggacccccgaggcccccctctgcctttgagcttctcctctgctccaacagacaccttccactctgaggtctcaccttcgcctctgctgaagtctccccgcagccctctccacccagaggtctccctataccgagacccaccatccttccatcctgaggaccgccccaaccctcggagccccccactcagtaggtctgaaggcctccatttgtaccgaaacaccccgctcacgctgacagcctcctaggctccctgaggtacctttccacccagaccctccttccccaccccataagccctgagactcccgcctttgacctgacgatcttcccccttcccgccttcaggttcctcctaggcgctcagaggccgctctggggggttgcctcgagtccccccacccctccccacccaccaccgctcccgcggcaagccagcccgtgcaacggaagccaggccaactgccccgcgtcttcagctgtttcgcatccaccgccaccccactgagagctgctcctttgggggaatgtttggcaacctttgtgttacagattaaaaattcagcaattca

SEQ ID NO: 6236 - DNA, 600 bp, Homo sapiens
cttcagttgtctctgatgtagcttatacaaaacatttgttgttctgttaactgaatgccactctgtaattgcaaaaaaaaaaaacagttgcagctgttttgttgacattctgaatgcttctaagtaaatacaatttttaaaaaaccgtatgagggaactgtgtagacaaggtaccaggtcagtcttcttccatgttctattagctccacaaagccaatctcaatccctcaaaacaatcttgtcatacttgaaaatatgacactctagtcaaagccttggtaaaataatcagtgtttccaatctgtcctgttacaaaagaaacagattattattgaacttatgcaaataaccattgtcataagaatgtttatgaatagtttccaaattatggcaaattcatgtagagagagaaaagtaactgttttggttttgctcacaaaagtctactttacctaagggctgtcagatataagtaacttaaaagaaagagaagttttcttgacttttgaaaacaaaatatgaaaagaatcggcaatgtttcaaacaaaaagtcataaaagtcactttattcctccatcaaaaaaaaaaaaaaaaaaaaaa

SEQ ID NO: 6237 - DNA, 1400 bp, Homo sapiens
tgtacatcttccctgtacactggcagttcggccagctggaccagcaccccattgacgggtacctctcccacaccgagctggctccactgcgtgctcccctcatccccatggagcattgcaccacccgctttttcgagacctgtgacctggacaatgacaagtacatcgccctggatgagtgggccggctgcttcggcatcaagcagaaggatatcgacaaggatcttgtgatctaaatccactccttccacagtaccggattctctctttaaccctccccttcgtgtttcccccaatgtttaaaatgtttggatggtttgttgttctgcctggagacaaggtgctaacatagatttaagtgaatacattaacggtgctaaaaatgaaaattctaacccaagacatgacattcttagctgtaacttaactattaaggccttttccacacgcattaatagtcccatttttctcttgccatttgtagctttgcccattgtcttattggcacatgggtggacacggatctgctgggctctgccttaaacacacattgcagcttcaacttttctctttagtgttctgtttgaaactaatacttaccgagtcagactttgtgttcatttcatttcagggtcttggctgcctgtgggcttccccaggtggcctggaggtgggcaaagggaagtaacagacacacgatgttgtcaaggatggttttgggactagaggctcagtggtgggagagatccctgcagaatccaccaaccagaacgtggtttgcctgaggctgtaactgagagaaagattctggggctgtcttatgaaaatatagacattctcacataagcccagttcatcaccatttcctcctttacctttcagtgcagtttcttttcacattaggctgttggttcaaacttttgggagcacggactgtcagttctctgggaagtggtcagcgcatcctgcagggcttctcctcctctgtcttttggagaaccagggctcttctcaggggctctagggactgccaggctgtttcagccaggaaggccaaaatcaagagtgagatgtagaaagttgtaaaatagaaaaagtggagttggtgaatcggttgttctttcctcacatttggatgattgtcataaggtttttagcatgttcctccttttcttcaccctcccctttgttcttctattaatcaagagaaacttcaaagttaatgggatggtcggatctcacaggctgagaactcgttcacctccaagcatttcatgaaaaagctgcttcttattaatcatacaaactctcaccatgatgtgaagagtttcacaaatctttcaaaataaaaagtaatgacttagaaactgaaaaaaaaaaaaaaaaaaaaaaaaaaaaaa

SEQ ID NO: 6238 - DNA, 1400 bp, Homo sapiens
agagcaagatcctgtccaaggaagaacagaaagtggttgcgtttcatgagtcgggccacgccttggtgggctggatgctggagcacacggaggccgtgatgaaggtctccataacccctcggacaaacgccgccctgggctttgctcagatgctccccagagaccagcacctcttcaccaaggagcagctgtttgagcggatgtgcatggccttgggaggacgggcctcggaagcactgtccttcaacgaggtcacttctggggcacaggacgacctgaggaaggtcacccgcatcgcctactccatggtgaagcagtttgggatggcacctggcatcgggcccatctccttccctgaggcgcaggagggcctcatgggcatcgggcggcgccccttcagccaaggcctgcagcagatgatggaccatgaagcaagactgctggtggccaaggcctacagacacaccgagaaggtgctgcaggacaacctggacaagttgcaggcgctggcaaacgcccttctggaaaaggaagtgataaactatgaggacattgaggctctcattggcccgccgccccatgggccgaagaaaatgatcgcaccgcagaggtggatcgacgcccagagggagaaacaggacttgggcgaggaggagaccgaagagacccagcagcctccacttggaggcgaagagccgacttggcccaagtagttgggaggtgttggctgcacgtgcgggtggtccgggaagtgagggctcactcagccaccctgagttgcttttcagctgaggtttgcacttcctctcgcggccctcagtagtccctgcacagtgacttctgagatctgttgattgatgacccttttcatgattttaagtttctctgcagaaactactgacggagtcctgtgtttgtgagtcgtttcccctatggggaaggttatcagtgcttcccgagtgagcatggaacacttcgagttcccagggttatagacagtcgttcccagtgtggctgaggccacccagaggcagcagagcattcagactccaaacagacccctgttcatgccgacgcttgcacgaccgccccagttcctgtggctccctcggaatgctaaggggatcggacatgaaaggaccctgtgagccgattgtcctatctccagcggccctgtcatccagctcactcatcaatggggccagtcaggcccaggcactgggctccggaggactcaccactgccccctgctgccatgtggactggtgcaagttgaggacttcttgctggtctagtcacgcatgcagtgttggggatgccttggtttttactgctctgagaattgttgagatactttactaataaactgtgtagttggaaaaaaaaaaaaaaaaaaaaaa

SEQ ID NO: 6239 - DNA, 368 bp, Homo sapiens; identical to SEQ ID NO: 1004

SEQ ID NO: 6240 - DNA, 1400 bp, Homo sapiens
gtgtgcttgctgaccggggcctcccgcggcttcggccggacgctggccccgctcctggcctcgctgctgtcgcccggctccgtgcttgtccttagcgcccgcaacgacgaggcactgcgccagctggaggccgagctgggcgccgagcggtctggcctgcgcgtggtgcgggtgcccgccgacctgggcgccgaggccggcttgcagcagctgctcggcgccctgcgcgagctcccccggcccaaggggctgcagcgactgctgcttatcaacaacgcgggctctcttggggatgtgtccaaaggcttcgtggacctgagtgactccactcaagtgaacaactactgggcactgaacttgacctccatgctctgcctgacttccagcgtcctgaaggccttcccggacagtcctggcctcaacagaaccgtggttaacatctcgtccctctgtgccctgcaacctttcaaaggctgggcgctgtactgtgcaggaaaggctgctcgtgatatgctgttccaggtcctggcgctggaggaacctaatgtgagggtgctgaactatgccccaggtcctctggacacagacatgcagcagttggcccgggagacctccgtggacccagacatgcgaaaagggctgcaggagctgaaggcaaaggggaagctggtggattgcaaggtgtcagcccagaaactgctgagcttactggaaaaggacgagttcaagtctggagcccacgtggacttctatgacaaataagcccatgtttttggcttcctgaacctttttgcccccacttttagacataccccagagccctgtggctccccacaccctgccataggggcagtcctgccttacacatagaagcattcatgcctgctgccctgccctcaggcacagccagctgtgagctcccaggtcattggccttaccagttgtcaggagtctgtgctgtgcaccctgggttataaggaggcttaggagagaggttatgggtattggtgtctctatccccaggaatagaacttaaggggtgggaagaacaggaaaagaagctggaacacagaagagaggaggttgtgtctcttgctcatagcaagcctgtgggtagaggaaagagtgatctggtgtcgaataggaggacccatgtagattcgcagatggcctggatgggaggaagggcagacggtacatgtcccagcccacatagatgccccttgctgagggtagcaggaccttctgttgaactttgtgtcctcactctgatgtctccttccttcagaatctaccacccctcccccaggctgggagaaggggctcctgggtgtctgtatacacgccaaaggcagatacaaataaaatacagattgtcctttaaaaaaaaaaaaaaaaaa

SEQ ID NO: 6241 - DNA, 1400 bp, Homo sapiens
agagctttccatcacggaagattcatcatgagtctccggaaagcagctatggcagagcccaatgcaaagtttattgaaggtgttgtgttacagttattagaggaagatgatgttgtgatgggagttcagtacaaggataaagagactggagatatcaaggaactccatgctccactgactgttgttgcagatgggcttttctccaagttcaggaaaagcctggtctccaataaagtttctgtatcatctcattttgttggctttcttatgaagaatgcaccacagtttaaagcaaatcatgctgaacttattttagctaacccgagtccagttctcatctaccggatttcatccagtgaaactcgagtacttgttgacattagaggagaaatgccaaggaatttaagagaatacatggttgaaaaaatttacccacaaatacctgatcacctgaaagaaccattcttagaagccactgacaattctcatctgaggtccatgctagcaagcttccttcctccttcatcagtgaagaaacgaggtgttcttcttttgggagacgcatataatatgaggcatccacttactggtggaggaatgactgttgcttttaaagatataaaactatggagaaaactgctaaagggtatccctgacctttatgatgatgcagctattttcgaggccaacaaatcattttactgggcaagaaaaacatctcattcctttgtcgtgaatatccttgctcaggctctttatgaattattttctgccacagatgattccctgcatcaactaagaaaagcctgttttctttatttcaaacttggtggcgaatgtgttgcgggtcctgttgggctgctttctgtattgtctcctaaccctctagctttaattggacacttctttgctgttgcaatctatgccgtgtatttttgctttaagtcagaaccttggattacaaaacctcgagcccttctcagtagtagtgctgtattgtacaaagcgtgttctgtaatatttcctctaatttactcagaaatgaagtatatggttcattaagcttaaaggggaaccatttgtgaatgaatatttggaacttaccaagtcctaagagacttttggaagaggatatatatagcatagtaccataccacttataaagtggaaactcttggaccaagatttggattaatttgtttttgaagttttttgtatataaatatgtaaatacatgctttaatttgcaatttaaaatgaaggggttaaataagttagacatttgaaagaaatgattgttaccataaattagtgctaatgctgaggagaactacagtttttcttttgaatttagtatttgagatgagttgttgggacatgcaaataaaatgaagaatgac

SEQ ID NO: 6242 - DNA, 600 bp, Homo sapiens
aggagtcctattaccagctcatgaagacagccctcaaggaagatggtgtcctctgctgccagggcgagtgcgagtggctgcacctggacctcatcaaggagatgcggcagttctgccagtccctgttccccgtggtggcctatgcctactgcaccatccccacctaccccagcggccagatcggcttcatgctgtgcagcaagaacccgagcacgaacttccaggagccggtgcagccgctgacacagcagcaggtggcgcagatgcagctgaagtactacaactccgacgtgcaccgcgccgcctttgtgctgcccgagtttgcccgcaaggccctgaatgatgtgagctgagcccaggcgccaccactgatgccacccaggacctcggaccttggagcctgcggggtgcctcggcccctccagccccgggccggacctcctgctggctctcgcccaccaaccaagtgttacaagccccagaatgctgcccggcctgccctgctgggcggactgtctgtgtgtctgtctctctggcgttccacctccaagcctataccagctgtgtacagcgccatctctctgccttctgttgcccccg

SEQ ID NO: 6243 - DNA, 1400 bp, Homo sapiens
tgaggccttgcttctctttacttttccactctaggccacgatgccgcagtaccagacctgggaggagttcagccgcgctgccgagaagctttacctcgctgaccctatgaaggcacgtgtggttctcaaatataggcattctgatgggaacttgtgtgttaaagtaacagatgatttagtttgtttggtgtataaaacagaccaagctcaagatgtaaagaagattgagaaattccacagtcaactaatgcgacttatggtagccaaggaagcccgcaatgttaccatggaaactgagtgaatggtttgaaatgaagactttgtcgtgtacttaggaagtaaatatcttttgaattagagaaaggttgggacagaaagtactttatgtaactaagtgggctgttcagaagcttagaggtcattttttgtaattttctttttaattactttagagagctagggatgcaaatgttttcagttagaaagcctttatttacttttggaaattgaacaagaaatgcatctgtcttagaaactggagattatttgatgttaggtaaaacatgtaattgtttctctggcaaatttgtatcagtaatttgaaaatgagatattaggaaaaaccaattcttcttaaatttagttcatctttctttaaaagaacattaaatgtaaccattttgtcagatccatgtattttggagcataaaatgtatgctgttgtgaccaataaatataaaatatggtaattggaattaactccacaccatagtatgcattgttatacatactgtgtacctaattatgtatagcagtgtagtctcaattatatctgaaagtaattgtgactaacaagtatgctttgccttatttccacatttaaactacctgttaatataagggatttgtagtatcagcttgttgagcaatgactttgaatctagttttcagtgatcagaagcagcagttatttgagtgtatgaatggaatgatgatcactgtgctataatgtactgaaaccaccatattacagaaatatttactacatattttccatctgtagtttctcagaagggctatggattagtttgaactgtcaaatccttgcatacttctgtgacacccctgcccattttctgtctttaattaaccaaggtgttaggtgtgactgtcacaactgttatgttttccagtaaactagaagcacgatatttgataattatatttgtatttcaccacctaaatgtaatgttgattcctcaagaatgaaatgaaggcactacattgaaatatgttttgtataaatttgtcatgttgaacagcattttagcatggtaagttcccttagctatatgaattttggcatgtttcagagagatcagtaaataaaatattagata

SEQ ID NO: 6244 - DNA, 600 bp, Homo sapiens
atacagtaaggtgtaattacagaatttacgaaatgtaaatggcctctacagagttttatggaatacctggtactaacgtaggcagctgcaaaaccacactgagttacagctgtcagccctcctcattcctaaataacttgccttacatatcagccctcccacttctgaagttcaaattagtgcctcggaaatgtagaatttattatttgtcattttttttttttagcatagattgagaacagttgaactcttaaatcctcagatgccaggggtctgctctagcatcagtaagtatttagcagaaactaactccgtaatgaatggaattcaattccacacatggtttgttcaagcacacttaataagtagcctattttttaaatgtctttttaaaatgtaaatatttggatgaagtttttctttgttttgatatattcatttgctacaccaactatgttttcagaattcatcttttgaacaacttggtttcagaatatgtaaaatgactttaaggatcttgtgtatcaaacctatccccggatgtgtgagaataatgtgttcataaagcatggatctcgtaaaaaaaaaaaaaaaaaaaaa

SEQ ID NO: 6245 - DNA, 1093 bp, Homo sapiens; identical to SEQ ID NO: 1010

SEQ ID NO: 6246 - DNA, 600 bp, Homo sapiens
ctataagatcatggatgctaccaatatcctgttgtctccacttgtctatctctatcctgacattcccaaggaggaggcattcgggaagtattgtcggccagagagccaggagcatcctgaagctgacccaggtagcgctgccccatacctgaagaccaagtttatctgtgtgacaccaacgacctgcagcaataccattgacctgccgatgtccccccgcgctttagattcattgatgcagtttggaaataatggtgaaggtgctgaaccctcagcaggagggcagtttgagtccctcacctttgacatggagttgacctcggagtgcgctacctcccccatgtgaggagctgagaacggaagctgcagaaagatacgactgaggcgcctacctgcattctgccacccctcacacagccaaaccccagatcatctgaaactactaactttgtggttccagattttttttaatctcctacttctgctatctttgagcaatctgggcacttttaaaaatagagaaatgagtgaatgtgggtgatctgcttttatctaaatgcaaataaggatgtgttctctgagacccatgatcaggggatg

SEQ ID NO: 6247 - DNA, 600 bp, Homo sapiens
tgagggtttctgagctgctctgaattagtccttgcttggctgcttggccttgggttcattcaagctcacgatgctgttcccacgtttcccgggatatatattctctcccctccgttgggccccagccttctttgcttgcctctctgtttgtaaccttgtcgacaaagaggtagaaaagattgggtctaggatatggtgggtggacaggggccccgggacttggagggttggtcctcttgcctcctggaaaaaacaaaaacaaaaaactgcagtgaaagacaagctgcaaatcagccatgtgctgcgtgcctgtggaatctggagtgaggggtaaaagctgatctggtttgactccgctggaggtggggcctggagcaggccttgcgctgttgcgtaactggctgtgttctggtgaggccttgctcccaaccccacacgctcctccctctgaggcgtgaggactcgcagtcaggggcagctgaccatggaagattgagagcccaaggtttaaacttcttctctgaagggaggtggggatgagaagaggggtttttttgtactttgtacaaagaccacacatttgtgtaaacagtgttttgg

SEQ ID NO: 6248 - DNA, 1400 bp, Homo sapiens
taaagggacagcttgtccttccctgggtgttctgtctctccttccctcccttccttcaagataactggccccaagagtggggcatgggaagggctggtccaggggtctgggcactgtacatacctgccccctcatccttgggtccttcattattatttattaactgaccaccatggcctgcctgccctgcctccgtcccaaccatgggctgctgctgtcactccctctccacttcagtgcatgtcttagttgctgttccctcagctcccagctccacctctggggttcagcttctgtctctgctgtcccagttttgaggtttggtttcttgtttctgtctcttgctttcaggctcctccctcccaccactccccaacttcccctagcagttgcagggaagataggacgagtagcttctgacatgtgtgcctcagatctgttccacccactcacagtggttctgtttgctccagactggggctagggctaatctttgaagtttgttctttggtattgatgtgggtcagaaggaggcctcatcctaatctcactcaggcctccagggatccatgggggagtgaaaccaattctcagagaacaacccaccagagacttttaaagagaggccaggcttgggaatgggttgggagaggcatctgttcattggagcatgagtggatgccagaactgtaggttataaggcagtcactttttctctctactcccacccacacctgcctccctcttacccctgctccccacactgcaggaggatttgtctctaagaggtgctgccccaaagctccccaagcatcaatactcctagggctcaggacaagtggctcccctggccaggagagccacagccatgatacaggcctcttatggagccctggagttgttgggcaaggatgctgtcattttttgaaccaaaagacaaacaggttaaaaggaaaaaaagtaatctgaatttcccaagtgcctacgctgcatattccccttgttagatcccattttcatgttactttgtagccttggcccagaggctcaaaaaggacacaaccagtttggggaaggggtggctaaggaagatggtataggtgaaggcggctgtgtgaccactttcccccacccttcccaccctctagacaactctctcccttacctgtttttgctatggctgtaaaggtatttttcctctgccccactccctgccatacctttatcctgggatcctattttgggcctggggtgggtatacctggggctggtcttaggagggtgctaggctgcagactgccttgtactccctggacaccctcaaatgggggtttctgtgttatttcataaaattctttgaagtccaataaagcatgtaggagattttaaccacaaaaaaa

SEQ ID NO: 6249 - DNA, 600 bp, Homo sapiens
catctttgtggtcttccttgcttgaaccctctctactctgaggcactctgttggggtttgggaccctcctgggaaggcaagtggccagtgctgccactgagcctgtgcagggtacttgggagaaaggccctgtttccctggaactgctaagaatgaccactgcccctgatcccccaccccttgcctctggccaccctgtcctccccccaccaccctcaggcctatgaaacacacagggttctagatttgaactctgctgtgaagtgactggaagggagcagaggccagctgggggccagtgggggaggttgtttccactaggagatttttataaaccctctccagcctctcccggaaaggaagcgttggcagcaaagggagatgatgcccttacccaccttcctgtgagtgaagagaggaagcagccccagggaccaattttcccaattgacctctttcttcctctttcaccatgtgaggcagggagccctgagcccttcagctgcctgcacaacccctgacattggctgctggtgactcaatctgccaaatgtgctgcagctcgttttctcccaattacagcaagactgtcagcctcca

SEQ ID NO: 6250 - DNA, 1400 bp, Homo sapiens
gacaatcaccacgaggtgtacctctggcaaggctggtggcccatcgagaacaagatcactggttccgcccgcatccgctgggcctccgaccggaagagtgcgatggagactgtgctccagtactgcaaaggaaaaaatctcaagaaaccagcccccaagtcttaccttatccacgctggtctggagcccctgacattcaccaatatgtttcccagctgggagcacagagaggacatcgctgagatcacagagatggacacggaagtttccaatcagatcaccctcgtggaagacgtcttagccaagctctgtaaaaccatttacccgctggccgacctcctggccaggccactcccggagggggtcgatcctctgaagcttgagatctatctcaccgacgaagacttcgagtttgcactagacatgacgagggatgaatacaacgccctgcccgcctggaagcaggtgaacctgaagaaagcaaaaggcctgttctgagtggggagacgccagaggagcctcacggtcacgtccaacaacaccactgcaccagggaaatggatatatatttttggactggtgtttttcacaaagtatttttcaatcagagttttcagaacctgacattgttaaagatactgcttgtcccggagttgtgtattttgtaaatgttcaagggaactgtttggaaacttctttccaccattcaggaggttatcagaattaataaaagtatctgttatgtgcacttaagccgcagctgctatagatagcactgccttcttgttccagctaggcaatgcctttttttttttttttgaagcagttctctttataaagtgttattttgatagtttgtggattctaaaatatatatatatttatataaacaccatataagtcaaatatgtatttaacaaagcaatatgtattcattcactttcaagatttgttttggtgtcaaaataacatgaaaaggtagatggagttgcttctgttgaattagctctgccaccaatatgtatcttcatacacgtttggaaatgtttcctgcagcattaggtatgacttgttctgagtactgcttccggtgctaaaatgaacaaagaatttgtacttaatggcatggactctggagaatctatgcgaatcaacctttctaccttaatatctccccaaaaatgtatagtgccttgtttttatgtacagtttatatacagaaaagtttgctctgcatttttgatgatggtttggaacattatctacaattttactctcaaatagtcaaaataaaaacatctcaatttctaataccggttgtaaacaaacagtacacatgtcattttgtgatataggactcccaaataaaagtatcagaataaacacaacaattaactggt

SEQ ID NO: 6251 - DNA, 1102 bp, Homo sapiens; identical to SEQ ID NO: 1016

SEQ ID NO: 6252 - DNA, 600 bp, Homo sapiens
atgaatatttacgtttttgtaaattaatcttttatattgataacagcactgactagggaaatgatcagtttttttttatacactgtaatgaaccgctgaatatgaagcatttggcatttatttgtgagaaaagtggaatagttttttttttttttttttttttttgccttcaactaaaaacaaaggagataaatttagtatacattgtatctaaattgtgggtctatttctagttattacccagagtttttatgtagcagggaaaatatatatctaaatttagaaatcatttgggttaatatggctcttcataattctaagactaatgctcagaacctaaccactaccttacagtgagggctatacatggtagccagttgaatttatggaatctaccaactgtttagggccctgatttgctgggcagtttttctgtattttataagtatcttcatgtatccctgttactgatagggatacatgtcttagaaaattcactattggctgggagtggtggctcatgcctgtaatcccagcacttggagaggctgaggttgcgccactacactccagcctgggtgacagagtgagatctgcctc

SEQ ID NO: 6253 - DNA, 1400 bp, Homo sapiens
tcatgtagcttctgaaaaactccactgtacacttatagaatgaagaaggcaaaaaactttttttttttttttttgagactgagtctcgctctgtcgcccaggctggagtgcagtggcgcgatctcggctcactgcaagctccgcctctcgggttcacgccattctcctgcctcagcctcccaagtagctcggactacagggcgtcctccaccatgcctggctaatattttgtattttttagtagagacggggtttcaccgtgttagccaggatggtctcgatctcctaacctggtgatccgcccgcctcggcctcccaaaagtattgggattacccgcgtgagccaccgcgcccggctgcaaataatctttctttttttctttttttctgagacagagtctcgctctgttgcccaggctggagtgcagtggcacgatctcggctcacggcaccgtccgcctcccgggttcacgccattctcctgcctcagcttcccgagtagctgggactacaggggcccgccaccacgcccggctaactttttgtgtttttagtagagacggggtttcaccgtgttagccaggatggtctcgatctcctgaccttgtgatctgcccgcctcggcctcccaaagtgctgggattacaggcgtgacgaccgcgcccggcgcgaaacacgatattgtactaacatcttaattttgttataaaatctcacaaaccccctgacatagtctcagagatctgtagggccgaggttacatttggagaacccgtactctagggccaaatccattcttcttgccctggctcacttgtcccccccaccgccccgcgctggagccactgcctagttcttcagccctagatggtgctcgccagacctcctctcaatgctcatcacacacagggctattcctttcctccaatgaaccaaaccgcctcccgcccacctccaggtcccagtcctctgttccctttgcctggtccacccttgccctccctgggtcgcagacgaggtcggcctcgtcattccccgcagaccgccgcgcgtccctcttgtgcggttcaccacagttgtatttaagtgatcgtgtgagtcgtcgttaaatgcctgtctccccgcggatcatgggctcctcgaggacagggactggcctgtctgtccactgctgtaaccccgcgccggcatagggacctaaggcccactggagggcgctcatcaagtagctgctggatgttgacgaaggaagcggcggcgcagctcagggatctccgagtcaggacggtcggccagacccacggggtaacgggtctaatcgtgtaggaataaagctgtattccagtgcttccaaaaaaaaaaaaaaaaaaaaaaaaaaaaaaaaaaaaaaaaaaaaaaaa

SEQ ID NO: 6254 - DNA, 1400 bp, Homo sapiens
gcctcccggctctcgtcagcctcccgccggccgtctccttaacaccgaacaccatgccttcaattaagttgcagagttctgatggagagatatttgaagttgatgtggaaattgccaaacaatctgtgactattaagaccatgttggaagatttgggaatggatgatgaaggagatgatgacccagttcctctaccaaatgtgaatgcagcaatattaaaaaaggtcattcagtggtgcacccaccacaaggatgaccctcctcctcctgaagatgatgagaacaaagaaaagcgaacagatgatatccctgtttgggaccaagaattcctgaaagttgaccaaggaacactttttgaactcattctggctgcaaactacttagacatcaaaggtttgcttgatgttacatgcaagactgttgccaatatgatcaaggggaaaactcctgaggagattcgcaagaccttcaatatcaaaaatgactttactgaagaggaggaagcccaggtacgcaaagagaaccagtggtgtgaagagaagtgaaatgttgtgcctgacactgtaacactgtaaggattgttccaaatactagttgcactgctctgtttataattgttaatattagacaaacagtagacaaatgcagcagcaagtcaattgtattagcagaatattgtcctcattgcatgtgtagttgtagctcgagtcccaaaccttacggccaagtttcttctagtatgatggaaagtttcttttttctttgctctgaataaaactgaactgtgggttctctataagtggcattttgggctttcctcccttttttgtaaagcaatgtctgcctagtttattgtccaagttaactttaggtgaccttttaaaagttggcattgaaaataaaacaacttgcaaaaaagttttctggaatagaattaacaaaatattatctttatcatgagttggaaactggaaaaaggcttcttgaagtaaatgttctgagtggagctactaggatgtcttccagcctcctgcagtcaaggagtaccactgtattgattagcctgtatgtagcagggctcccttcattgcatctgaggacttgttttctttttctttatttttaatcctcttagttttaaatatattgcctagagactcagttactacccagtttgtggttttttgggagaaatgtaactggacagttagcttttcaattaaaaagacacttaacccatgtgggatgtcatctttttataattagtgttcccatgtggagaaaattattcacactacttgcatgtaaagaataatttaacttttaacattaaaatatgtggtaaaacccagaaagcatccatcatgaatgcaagatactttcaataaagtaagttatat

SEQ ID NO: 6255 - DNA, 1400 bp, Homo sapiens
ttaaggttggctctggccaggattccaggcagcaggttggagtgactggtgggcctagatcactggtgtgataaaccccatttcaccccggggggggtggggtacacagacacagggtgggggtggggaggggcggtgttaactctttctgctccttgcattttgacatccctgaaggggagctcttggatatcattggccatgtttcaatcgaatggagccactgggccccaacactggctttgagatttagagtcaaagggtagagtgaacaggaaagggtcacgtggtcccatgttgcaacagccccaacatcacgcatgtcattcactgccttgccactccatctccctccgtgctccagccacccctgagctgaggctcccattgtctccatcagagcctgcatgtgtatgccgtcctcccctggtccggtgtttgtgttccccacccctcacagactgcctgagctcttctgtaagctggggtagggtgatggcagtgctccgggaactgggcctgcagccttcctcttctgggactgctgtgaggcagaggaatgatggagaatctagtgtagcagcctccaggcaggattcagcacaacactggggagtcacccttccctcgggcctctgcctaccaacaactgggcttatcactgggaaaacacaaaaaattacacaacccagcaacaacaaaagaactagtcctcttagaatttcttgcgctttgatttttttagggcttgtgccctgtttcacttatagggtctagaatgcttgtgttgagtaaaaaggagattcccaatattcaaagctgctaaatgttctctttgccataaagactccgtgtaactgtgtgaacacttgggatttttctcctctgtcccgaggtcgtcgtctgctttcttttttgggtttctttctagaagattgagaagtgcatatgacaggctgagagcacctccccaaacacacaagctctcagccacaggcagcttctccacagccccagcttcgcacaggctcctggagggctgcctgggggaggcagacatgggagtgccaaggtggccagatggttccaggactacaatgtctttatttttaactgtttgccactgctgccctcacccctgcccggctctggagtaccgtctgccccagacaagtgggagtgaaatgggggtggggggaagcactgattcccagttagggggtgcctaactgagcagtagggatagaaggtgtgaacctgggagtgcttttataaattattttccttgtagattttatttttaatttatctctgtgacctgccagggagaggggagagagagagagatgctgttgagcacatgacaaaataaaataaaatggatgattcaaaaaaaaaaa

SEQ ID NO: 6256 - DNA, 600 bp, Homo sapiens
tttgtggcttcaagtgtgggtggacagtcctaatggggatctccagctccttcctgtgggctgccacagacagctacccccagaagggtcaatgttgggagtggttgtggctctgagctgctctacagagcttcagtgtgagaggatcgagccattgaaagctcattaccagtaggacataatttttggctctccctattcacaaccagtgcacagtttgacagtggcctcaggttcacagtgcaccatgtcactgtgctatcctacgaaatcatttgtttctaagttgtgtttattcctggagtgacatgccaccccgaatggctcactttcactgaggatgctgtcctctgatttagctgctgcctccagcctctggcttgagaacttactaaaggcacttccttcctgttaaacccctgttaactctccataaatttggtgattctctgctaggcctaagattttgagttaacatctcttgaagccaaactccaccttctgtgctttttgcttgggataatggagtttttctttagaaacagtgccaagaatgacaagatattaaaaaaaaaaaaaaaaaaaaaaaaaaaaaaaaaa

SEQ ID NO: 6257 - DNA, 600 bp, Homo sapiens
tcaaatccatagatttcgaagccacagagtctctccctggagcagcagactatgggcagcccagtgctgccacctgctgacgacccttgagaagctgccatatcttcaggccatgggttcaccagccctgaaggcacctgtcaactggagtgctctctcagcactgggatgggcctgatagaagtgcattctcctcctattgcctccattctcctctctctatccctgaaatccaggaagtccctctcctggtgctccaagcagtttgaagcccaatctgcaaggacatttctcaagggccatgtggttttgcagacaaccctgtcctcaggcctgaactcaccatagagacccatgtcagcaaacggtgaccagcaaatcctcttcccttattctaaagctgccccttgggagactccagggagaaggcattgcttcctccctggtgtgaactctttctttggtattccatccactatcctggcaactcaaggctgcttctgttaactgaagcctgctccttcttgttctgccctccagagatttgctcaaatgatcaataagctttaaattaaactctacttcaagaaaaaaaaaccg

SEQ ID NO: 6258 - DNA, 1400 bp, Homo sapiens
gtttggcctgatgaagaggatttcaactacacaatactatcattgtcaggactatgacctcaggcactctaaacatatgttttgtttggtcagcacagcgtttcaaaaagtgaagccactttataaatatttggagattttgcaggaaaatctggatccccaggtaaggatagcagatggttttcagttatctccagtccacgttcacaaaatgtgaaggtgtggagacacttacaaagctgcctcacttctcactgtaaacattagctctttccactgcctacctggaccccagtctaggaattaaatctgcacctaaccaaggtcccttgtaagaaatgtccattcaagcagtcattctctgggtatataatatgattttgactaccttatctggtgttaagatttgaagttggccttttattggactaaaggggaactcctttaagggtctcagttagcccaagtttcttttgcttatatgttaatagttttaccctctgcattggagagaggagtgctttactccaagaagctttcctcatggttaccgttctctccatcatgccagccttctcaacctttgcagaaattactagagaggatttgaatgtgggacacaaaggtcccatttgcagttagaaaatttgtgtccacaaggacaagaacaaagtatgagctttaaaactccataggaaacttgttaatcaacaaagaagtgttaatgctgcaagtaatctcttttttaaaactttttgaagctacttattttcagccaaataggaatattagagagggactggtagtgagaatatcagctctgtttggatggtggaaggtctcattttattgagatttttaagatacatgcaaaggtttggaaatagaacctctaggcaccctcctcagtgtgggtgggctgagagttaaagacagtgtggctgcagtagcatagaggcgcctagaaattccacttgcaccgtagggcatgctgataccatcccaatagctgttgcccattgacctctagtggtgagtttctagaatactggtccattcatgagatattcaagattcaagagtattctcacttctgggttatcagcataaactggaatgtagtgtcagaggatactgtggcttgttttgtttatgtttttttttcttattcaagaaaaaagaccaaggaataacattctgtagttcctaaaaatactgacttttttcactactatacataaagggaaagttttattcttttatggaacacttcagctgtactcatgtattaaaataggaatgtgaatgctatatactctttttatatcaaaagtctcaagcacttatttttattctatgcattgtttgtcttttacataaataaaatgtttattagattg

SEQ ID NO: 6259 - DNA, 1400 bp, Homo sapiens
gagcgtcctgtttagcaataacggctggagcacgtcctacaagttacgggagagtcggctgtgaaggagacgttcgcttatcccctgtgtccccgctcctggcccctccagacccccgccttgcctcgcgctgggaggggagatccagaatgaaaggcaagaaaggtattgttgcagcatctggcagtgagactgaggatgaggacagcatggacattcccttggacctttcttcatccgctggctcaggcaagagaaggagaaggggcaacctacccaaggagtctgtgcagattcttcgggattggctgtatgagcaccgttacaatgcctatccttcagagcaagaaaaagcgttgctgtcccagcaaacacacctgtctacgctacaggtctgtaactggttcatcaacgcccgccgcaggctcctccctgacatgctgagaaaggatggcaaagatccaaatcagttcacaatttcccgccgtggggccaagatttctgaaacgagctctgtggagtccgtgatgggcatcaaaaacttcatgccagctctagaggagaccccatttcattcctgtacagctgggccaaacccaaccctagggaggccactgtctcctaagccgtcatccccgggatcagttttggctcgtccatcagtgatctgccataccactgtgactgcattgaaagatgtccctttctctctctgccagtcggtcggtgtgggacaaaacacagatatacagcagatagcggccaaaaacttcacagacacctctctcatgtacccagaggacacttgtaaatctggaccaagtacgaatacacagagtggtcttttcaacactcctccccctactccaccggacctcaaccaggacttcagtggatttcagcttctagtggatgttgcactcaaacgggctgcagagatggagcttcaggcaaaacttacagcttaacccattttcaagcaaaacagttctcagaaatgtcatgattgccggggtgaaggcaagagatgaattgcattattttatatattttttattaatatttgcacatgggattgctaaaacagcttcctgttactgagatgtcttcaatggaatacagtcattccaagaactataaacttaaagctactgtagaaacaaagggttttcttttttaaatgtttcttggtagattattcataatgtgagatggttcccaatatcatgtgatttttttttttcctccccttccctttttttgttattttttcagactgtgcaatacttagagaacctatagcatcttctcattcccatgtggaacaggatgcccacatactgtctaattaataaattttccattttttttcaaacaagtaaaaaaaaaaaaaaaaaaaa

SEQ ID NO: 6260 - DNA, 1400 bp, Homo sapiens
tggccagaattagggaatcagaatcaaaccagtgtaaggcagtgctggctgccattgcctggtcacattgaaattggtggcttcattctagatgtagcttgtgcagatgtagcaggaaaataggaaaacctaccatctcagtgagcaccagctgcctcccaaaggaggggcagccgtgcttatatttttatggttacaatggcacaaaattattatcaacctaactaaaacattccttttctcttttttccgtaattactaggtagttttctaattctctcttttggaagtatgatttttttaaagtctttacgatgtaaaatatttattttttacttattctggaagatctggctgaaggattattcatggaacaggaagaagcgtaaagactatccatgtcatctttgttgagagtcttcgtgactgtaagattgtaaatacagattatttattaactctgttctgcctggaaatttaggcttcatacggaaagtgtttgagagcaagtagttgacatttatcagcaaatctcttgcaagaacagcacaaggaaaatcagtctaataagctgctctgccccttgtgctcagagtggatgttatgggattccttttttctctgttttatcttttcaagtggaattagttggttatccatttgcaaatgttttaaattgcaaagaaagccatgaggtcttcaatactgttttaccccatcccttgtgcatatttccagggagaaggaaagcatatacacttttttctttcatttttccaaaagagaaaaaaatgacaaaaggtgaaacttacatacaaatattacctcatttgttgtgtgactgagtaaagaatttttggatcaagcggaaagagtttaagtgtctaacaaacttaaagctactgtagtacctaaaaagtcagtgttgtacatagcataaaaactctgcagagaagtattcccaataaggaaatagcattgaaatgttaaatacaatttctgaaagttatgttttttttctatcatctggtataccattgctttatttttataaattattttctcattgccattggaatagaatattcagattgtgtagatatgctatttaaataatttatcaggaaatactgcctgtagagttagtatttctatttttatataatgtttgcacactgaattgaagaattgttggttttttcttttttttgttttttttttttttttttttttttttgcttttgacctcccatttttactatttgccaatacctttttctaggaatgtgcttttttttgtacacatttttatccattttacattctaaagcagtgtaagttgtatattactgtttcttatgtacaaggaacaacaataaatcatatggaaatttatattt

SEQ ID NO: 6261 - DNA, 600 bp, Homo sapiens
accttcggccatctggcaggtggctacgacgcccagtactacgggtacctgtggagcgaggtgtattccatggacatgttccacacgcgcttcaagcaggagggtgtcctgaacagcaaggttggcatggattacagaagctgcatcctgagacccggcggttccgaggatgccagcgccatgctgaggcgcttcctgggccgtgaccccaagcaggacgccttcctcctgagcaaggggctgcaggtcgggggctgcgagcccgagccgcaggtctgctgaggcctggcactgcgactgcccagtctggcctgcgctcccgccgccctggtgccttagcccccggcacaggatggggcaagctctggcacagtgccttgggactggactggcagggtggctgagcggctgtcttgcctcttgtcattgtctgtccccacccggtcgtggcccacccggctagacggcgtcctcaaggcatctggagggctttcgtggctgccagggcctggtctttgttgcactaacacgtctcctctctgggaaacgtcccttgtcaggagacggctcttctttgaaatgaggtcattaaaaggaaac

SEQ ID NO: 6262 - DNA, 600 bp, Homo sapiens
agcagtgaggcggactccccgagctcctctgaggaggaaccggaggtctgcgaggacctggcaggcaatgcagcctctccctgaagccccccagaaggccgatggggaaggagaaggagtgccataccttctcccaggcctctgccccaagagcaggaggtgcctgaaagctgggagcgtgggctcagcagggctggtcacctcccatcccgtaagaccaccttcccttcctcagcaggccaaacatggccagactcccttgctttttgctgtgtagttccctctgcctgggatgcccttccccctttctctgcctggcaacatcttacttgtcctttgaggccccaactcaagtgtcacctccttccccagctcccccaggcagaaatagttgtctgtgcttccttggttcatgcttctactgtgacacttatctcactgttttataattagtcgggcatgagtctgtttcccaagctagactgtgtctgaatcatgtctgtatccccagtgcccggtgcagggcctggcatagagtaggtactccataaaaggtgtgttgaattgaaaaaaaaaaaaaaaaaaaaaaaaaaaaaaaaa

SEQ ID NO: 6263 - DNA, 782 bp, Homo sapiens; identical to SEQ ID NO: 1028

SEQ ID NO: 6264 - DNA, 1075 bp, Homo sapiens; identical to SEQ ID NO: 1029

SEQ ID NO: 6265 - DNA, 600 bp, Homo sapiens
ctggacagactggctgttggaacgaaagctctatggttaccaggctcagcattatgtctgtatgaagcatgttgacggcacctgcagctggtaccggggccacctgcctctcaggaaggagtttgttgacatcgttcagccctagtagggaccagtgaccatcacatcccttcaagagtcctgaagatcaagccagttctccttccctgcagagctttggccattaccacctgacctcttgctgccagctaataagaagtgccaagtggacagtctggccactgtcaaggcagggaaggggccatgacttttctgccctgccctcagcctgttgccctgcctcccaaaccccattagtctagccttgtagctgttactgcaagtgtttcttctggcttagtctgttttctaaagccaggactattccctttcctccccaggaatatgtgttttcctttgtcttaatcgatctggtaggggagaaatggcgaatgtcatacacatgagatggtatatccttgcgatgtacagaatcagaaggtggtttgacagcatcataaacaggctgactggcaggaatgaaaaaaaaaaaaaaaaaaa

SEQ ID NO: 6266 - DNA, 1400 bp, Homo sapiens
aaatggaaccactctatcaagtattataccttttttagagttgatactacagtttgttagtatgaggcatttgtttgaactgataaagatgagtgagcatgcccctgaaccatggtcggaaaacatgctacacactgcatgtttgtgattgacgggactgttggtattggctagaggttcaaagatattttgctttgtgatttttgtaatttttttatcgtcactgcttaacttcacatattgatttccgttaaaataccagccagtaaatgggggtgcatttgaggtctgttctttccaaagtacactgtttcaaactttactatggccctggcctagcatacgtacacattttattttattatgcatgaagtaatatgcacacattttttaaatgcacctggaatatataaccagtgttgtggatttaacagaaatgtacagcaaggagatttacaactgggggagggtgaagtgaagacaatgacttactgtacatgaaaacacatttttcttagggaaggatacaaaagcatgtgagactggttccatggcctcttcagatctctaacttcaccatattaccacagacatactaaccagcagaaatgccttaccctcatgttcttaattcttagctcattctccttgtgttactaagtttttatggcttttgtgcattatctagatactgtatcatgacaaagactgagtacgttgtgcatttggtggtttcagaaatgtgttatcacccagaagaaaatagtggtgtgatttggggatatttttttcttttcttttcttttcttttttttttttttttgacaaggggcagtggtggttttctgttctttctggctatgcatttgaaaattttgatgttttaaggatgcttgtacataatgcgtgcataccacttttgttcttggtttgtaaattaacttttataaactttaccttttttatacataaacaagaccacgtttctaaaggctacctttgtattctctcctgtacctcttgagccttgaactttgacctctgcagcaataaagcagcgtttctatgacacatgcaaggtcattttttttaagaaaaaggatgcacagagttgttacatttttaagtgctgcatttaaaagatacagttactcagaattctctagtttgattaaattcttgcaaagtatccctactgtaatttgtgatacaatgctgtgccctaaagtgtatttttttactaatagacaatttattatgacacatcagcacgatttctgtttaaataatacaccactacattctgttaatcattaggtgtgactgaatttcttttgccgttattaaaaatctcaaatttctaaatctccaaaataaaactttttaaaataaaaaaaaat

SEQ ID NO: 6267 - DNA, 600 bp, Homo sapiens
ctctccctcctccctccccatttcattggcgtaacgtaaagtgtattctgtacataatttacaaataaaacattttattttaattgttacttattatttagatatttctcaacacttaaattcataaaattaagaccatgtaagggtatgtttttagagaaatggaagtttgagtaacccacagaacatctgtgatctttctacagcagcttcagttttgtgccaacattccatgtattttgaatatgagcaaaaactgatcttaagagcagacttaaagtagctttgtacgccttaatgttcattttgatttattttaaatctttacattcagaaatgagatactgtattatcagaccaggaggcattgctgtgaaagataatttcctattctaaaatatcaaatttaaaataaagataatgaaagaaaacataagagaactattggactctaattgctttgaactagttttgcagtttgactttacgtcttatacatcttagttacaagtctttggaaactcttgtttacttatgagcataatcattccttggagttatactaactaataatgaatattaaatgatttttcttcagtc

SEQ ID NO: 6268 - DNA, 600 bp, Homo sapiens
ctaattcctaaggaaacctgattaacacatgctcacaaccatcctggtcattctcgagcatgttctattttttaactaatcacccctgatatatttttatttttatatatccagttttcatttttttacgtcttgcctataagctaatatcataaataaggttgtttaagacgtgcttcaaatatccatattaaccactatttttcaaggaagtatggaaaagtacactctgtcactttgtcactcgatgtcattccaaagttattgcctactaagtaatgactgtcatgaaagcagcattgaaataatttgtttaaagggggcactcttttaaacgggaagaaaatttccgcttcctggtcttatcatggacaatttgggctagaggcaggaaggaagtgggatgacctcaggaggtcaccttttcttgattccagaaacatatgggctgataaacccggggtgacctcatgaaatgagttgcagcagaagtttatttttttcagaacaagtgatgtttgatggacctctgaatctctttagggagacacagatggctgggatccctcccctgtacccttctcactgccaggagaacta

SEQ ID NO: 6269 - DNA, 600 bp, Homo sapiens
atcagggttgccagatggtgataacagtgtaaggccttgggtctaaggcatccacgactggaagggactactgatgttctgtgatacatcaggtttcagcacacaacttacatttctttgcctccaaattgaggcatttattatgatgttcatactttccctcttgtttgaaagtttctaattattaaatggtgtcggaattgttgtattttccttaggaattcagtggaacttatcttcattaaatttagctggtaccaggttgatatgacttgtcaatattatggtcaactttaagtcttagttttcgtttgtgcctttgattaataagtataactcttatacaataaatactgctttcctctaaaaagatcgtgtttaaattaacttgtagaaaatctgctggaatggttgttgttttccactgagaaagctaagccctacatttctattcagagtactgtttttagatgtgaaatataagcctgcggccttaactctgtattaaaaaaaatgtttttgtttaaaaaaaactgttcccataggtgcagcaaaccaccatggcacatgtatacctatgtaacaaacctgcacattttg

SEQ ID NO: 6270 - DNA, 1358 bp, Homo sapiens; identical to SEQ ID NO: 1035

SEQ ID NO: 6271 - DNA, 874 bp, Homo sapiens; identical to SEQ ID NO: 1036

SEQ ID NO: 6272 - DNA, 600 bp, Homo sapiens
ggcccatgccagtgcccagagcttggcaggaggctcccggcggaccaaggaggaggagctgcagtgctaagtccagccagcgtgcagctgcatccagaaaccggccactacccagcccatctctgcctgtgcttatccagataagaagaccaaaatcccgctgggaaaaacccaggccttgacattgttattcaaatggcccctccagaaagtttaatgatttccatttgtatttgtgttgatgatggaccacttgaccatcacatttcagtattcatagatgactgtcacattttaaaatgttcccacttgagcaggtacacaactggtcataattcctgtctgtgtaattcgatgtatatttttccaaacatgtagctattgtttgctttgatttttgcttggcctcctttatgatgtgcatgtccttgaaggctgaatgaacagtccctttcagttcagcagatcaacaggatggagctcttcatgactgtctccagcaataggatgatttactataaatttcatccaactacttgtgatctctctcacctacatcaattatgtatgttaatttcagcaattaaaagaattgatttt

SEQ ID NO: 6273 - DNA, 1400 bp, Homo sapiens
gatgttttacactcacgtttgtagatgaaacagatcactgtgctgtccttcctaggggtgcaggaagtggacagggcggagggtttgaaagaatattgagccaaagcccaggctccctttgggaatcatgttagcccatcagaatgttgaaggattgaagagttctaagcataaaataagtggcattttctgacttcttcctcctcctccttccctgactcacagaaggaatgcaatcacccagcaagtcctacctgttacgcaattttttatctcaaaatgccgaacgagaaaactgtccattttctgagacccccagaaaggaaactgaccctcagcagctgcctgattgttacgcgaatctagctttaacggaagcaaattcattattttttaaatgcagtggacttttcaaaaagtttaaattaggcaaagcagctttagcctcatagaatattatttctttggactcaagctgaaatacaagccttacattgccttatgctttatttctttctaatttttatatgtatatagatgagggttccttaatggttgtgagcattgtgtggaattttacacctggcctgcgtggcagcctcttccagttgaggtgttttatgtcacgcacactccatcccagtgtacaaaacctgcttctcttctcaaccgtggcagctcccgctggctcctatgccctgccctaaagggctcttgagcctctgggaatgggaggggccaagagaaggaaaaccctgtctttagcaccctttaaaagaactgtgccccccttctcagtgctgcctttgcatgggcctggcccggctcacattcgtcagtgactccaaccctcctgcttgctgtacttgggatgaaacgaccccacaggtcaggtggagggtggggcgtgggcatcagccaggattgccgttacagtctttttctcaggagctacaaagatctcttcctgttactaaatagtcgcaccccagcagcctctctcgcacaccggggccctgcatgtcagatggcgtggtctgcagggggagctctgtgccttagtggctcttggcaggacactgagggcctgcctgtggtgtgcccggctctgccactcccgggaggggaagggctgctcagctcaaggtgtcctgttcggtagagcaagtgtcctctgacagccgtgtccccggacagttcagacacccttggggatggcactccacacacgacagagatgcaggggccagggaagcccagcgctcggtgcccttcgtccagggttaaaatcggcctgtggggtgtggtgagaaggcaggttgtgcgggtgttgaccgatgtatcttttccttaaagttattataataatgggtaatttgtcaataaagcattcctttggg

SEQ ID NO: 6274 - DNA, 1044 bp, Homo sapiens; identical to SEQ ID NO: 1039

SEQ ID NO: 6275 - DNA, 1400 bp, Homo sapiens
acgaatgaaaagacttaatgaaattgttgatgcggcaaatgctgttatttctcatatagatcaaacagccctagcagtttatattgcaatgaagactgatcccaggcctgatgcagctactataaaaaatgacatggacaaacaaaaatccaccctcgtagatgccctttgtaggaaaggttgtgccctggcagaccatcttcttcacacccaggctcaagacggagccatttccactgatgcagaaggaaaggaggaggaaggagaaagtcctttggattctctggcagaaacattttgggaaactactaaatggactgatctctttgacaataaggttttgacatttgcatataaacatgcattagtaaataaaatgtatgggagaggccttaaatttgcaactaaacttgtggaagaaaaaccaacaaaagaaaactggaaaaattgtattcaactgatgaagttacttggatggacccattgtgcatcttttactgaaaactggctccccatcatgtatcctcccgattattgcgtattctaaaataggaaacaagactttaaattttaaaaaaggaagttttatagtgaatgggtataaaaacaaatttgtggcatttttagtctaatgcatgttttcatccactatccagtactgattattaaaatgacatgtatttatcagagaattcactgacgtgtggcttaatacatgtaaatctagacctctgacatcatggtgttttcttaatgcctcacattgctggcacggggatgtgccctgcctgccagcacctaggacttcgagttgggttgcagcttatgacatgcatgataggttttggaaggtaacttttaactgcaaacctataaagtactattttttattttataaatgaacagggttttaacgtgctcaactttaatttttttcaattgtatgaaggccttaaaaaagctacattaagcgtagctaaaattatttattggactaaaaactaacagaacttcatttccagaattttttttttttttttttttttggcaaatgtttacattcaattaaggggaaaaagtagaaccagcacaaatgagtggcagttgctggagcataactgcttcaataaatcttcatcttggggtaattacaggcaagtcattttcacatcctcttgaggttcagagcatcagaatgaactctatgaatacatgtgtaagtgccagacagctgaatctttatcaggtattgtaaagatacacatatgatatgtttattaaaattgaaataatgtaaaacacatgaataaatttgcaaaaccaagatcacagtacaccatatgcactctggtaccttaatttttttttataaataataaaagtgaatattgaagcttctt

SEQ ID NO: 6276 - DNA, 1400 bp, Homo sapiens
aggatggtcaaggcaaaggagatgatgtcattgtaattgacagtgatgatgaagaagaggatgaggaagatgatgatgatgatgaagatgacacagggatgggagatgagggtgaagatagtaatgaaggaactggtagtgccgatggcaatgatggttatgaagctgatgatgctgagggtggtgatgggactgatccaggtacagaaacagaagaaagtatgggtggaggtgaaggtaatcacagagctgctgattctcaaaacagtggtgaaggaaatacaggtgctgcagaatcttctttttctcaggaggtttctagagaacaacagccatcatcagcatctgaaagacaggcccctcgagcacctcagtcaccgagacgcccaccacatccacttcccccaagactgaccattcatgccccacctcaggagttgggaccaccagttcagagaattcagatgacccgaaggcagtctgtaggacgtggccttcagttgactccaggaataggtggcatgcaacagcatttttttgatgatgaagacagaacagttccaagtactccaactcttgtggtgccacatcgtactgatggatttgctgaagcaattcattcgccgcaggttgctggtgtccctagattccggtttgggccacctgaagatatgccacaaacaagttctagtcactctgatcttggccagcttgcttctcaaggaggtttaggaatgtatgaaacacccctgttcctagctcatgaagaagagtcaggtggccgaagtgttcccactactccactacaagtagcagccccagtgactgtatttactgagagcaccacctctgatgcttcggaacatgcctctcaatctgttccaatggtgactacatccactggcactttatctacaacaaatgaaacagcaacaggtgatgatggagatgaagtatttgtggaggcagaatctgaaggtattagttcagaagcaggcctagaaattgatagccagcaggaagaagagccggttcaagcatctgatgagtcagatctcccctccaccagccaggatcctccttctagctcatctgtagatactagtagtagtcaaccaaagcctttcagacgagtaagacttcagacaacattgagacaaggtgtccgtggtcgtcagtttaacagacagagaggtgtgagccatgcaatgggagggagaggaggaataaacagaggaaatattaattaaatggtctgtaaacaataacaactgtgaataagattatcaaatctgttttagtgtaatgattgtcaagtttaaaaacatttttatatataaactggtatactcatgtcaatattctttattaataaaatgtttttcagtgtcaaaaaaaaa

SEQ ID NO: 6277 - DNA, 600 bp, Homo sapiens
ccataatggaaaaccacatttgtgacgcaaaataccaccttggcgcctacacgggagacgacgtccgcatcatccgtgacgacatgctgtgtgccgggaacagccagagggactcctgcaagggcgactctggagggcccctggtgtgcaaggtgaatggcacctggctacaggcgggcgtggtcagctgggacgagggctgtgcccagcccaaccggcctggcatctacacccgtgtcacctactacttggactggatccaccactatgtccccaaaaagccgtgagtcaggcctgggtgtgccacctgggtcactggaggaccaacccctgctgtccaaaacaccactgcttcctacccaggtggcgactgccccccacaccttccctgccccgtcctgagtgccccttcctgtcctaagccccctgctctcttctgagccccttcccctgtcctgaggacccttccccatcctgagcccccttccctgtcctaagcctgacgcctgcactgggccctccggccctcccctgcccaggcagctggtggtgggcgctaatcctcctgagtgctggacctcattaaagtgcatggaaatc

SEQ ID NO: 6278 - DNA, 600 bp, Homo sapiens
ccataatggaaaaccacatttgtgacgcaaaataccaccttggcgcctacacgggagacgacgtccgcatcgtccgtgacgacatgctgtgtgccgggaacacccggagggactcatgccagggcgactccggagggcccctggtgtgcaaggtgaatggcacctggctgcaggcgggcgtggtcagctggggcgagggctgtgcccagcccaaccggcctggcatctacacccgtgtcacctactacttggactggatccaccactatgtccccaaaaagccgtgagtcaggcctgggttggccacctgggtcactggaggaccaacccctgctgtccaaaacaccactgcttcctacccaggtggcgactgccccccacaccttccctgccccgtcctgagtgccccttcctgtcctaagccccctgctctcttctgagccccttcccctgtcctgaggacccttccctatcctgagcccccttccctgtcctaagcctgacgcctgcaccgggccctccagccctcccctgcccagatagctggtggtgggcgctaatcctcctgagtgctggacctcattaaagtgcatggaaatc

SEQ ID NO: 6279 - DNA, 830 bp, Homo sapiens; identical to SEQ ID NO: 1044

SEQ ID NO: 6280 - DNA, 1400 bp, Homo sapiens
atgcctaaatacctcaattttgtcaagggtgtggtggactcagatgatctccccttgaatgtttcccgcgagactcttcagcaacataaactgcttaaggtgattaggaagaagcttgttcgtaaaacgctggacatgatcaagaagattgctgatgataaatacaatgatactttttggaaagaatttggtaccaacatcaagcttggtgtgattgaagaccactcgaatcgaacacgtcttgctaaacttcttaggttccagtcttctcatcatccaactgacattactagcctagaccagtatgtggaaagaatgaaggaaaaacaagacaaaatctacttcatggctgggtccagcagaaaagaggctgaatcttctccatttgttgagcgacttctgaaaaagggctatgaagttatttacctcacagaacctgtggatgaatactgtattcaggcccttcccgaatttgatgggaagaggttccagaatgttgccaaggaaggagtgaagttcgatgaaagtgagaaaactaaggagagtcgtgaagcagttgagaaagaatttgagcctctgctgaattggatgaaagataaagcccttaaggacaagattgaaaaggctgtggtgtctcagcgcctgacagaatctccgtgtgctttggtggccagccagtacggatggtctggcaacatggagagaatcatgaaagcacaagcgtaccaaacgggcaaggacatctctacaaattactatgcgagtcagaagaaaacatttgaaattaatcccagacacccgctgatcagagacatgcttcgacgaattaaggaagatgaagatgataaaacagttttggatcttgctgtggttttgtttgaaacagcaacgcttcggtcagggtatcttttaccagacactaaagcatatggagatagaatagaaagaatgcttcgcctcagtttgaacattgaccctgatgcaaaggtggaagaagagcccgaagaagaacctgaagagacagcagaagacacaacagaagacacagagcaagacgaagatgaagaaatggatgtgggaacagatgaagaagaagaaacagcaaaggaatctacagctgaaaaagatgaattgtaaattatactctcaccatttggatcctgtgtggagagggaatgtgaaatttacatcatttctttttgggagagacttgttttggatgccccctaatccccttctcccctgcactgtaaaatgtgggattatgggtcacaggaaaaagtgggttttttagttgaattttttttaacattcctcatgaatgtaaatttgtactatttaactgactattcttgatgtaaaatcttgtcatgtgtataaaaataaaaaagatcccaaat

SEQ ID NO: 6281 - DNA, 1312 bp, Homo sapiens; identical to SEQ ID NO: 1046

SEQ ID NO: 6282 - DNA, 1400 bp, Homo sapiens
cgttaatatcgctgatattaagtaatttccccactctgagtgaatactttgatgattgccaacagtggctaataaaatgacggctaccacactcatgggtcactggggctgcgcagggctctttgaggtgggtggcttcttttggaaagtactatgaacgtctcgaagcagtattctagtgataagaattcttaacatagccaagcgccccacgtttgttccccacgtttgttccccttttctgtttgaaaaacctgttctggtagctccacaagagagatgatactgactttttaaattttttacaagagtctgtattcctgatatgcctatatttttcctcaaagattctgcattttaaggatgggcataagcaaactatattttaataatttatagttaatgttaaaatattggctgatttagaccaaaagattcaaatctcctctttgtgaaatcccatctgcatttgattttttattattttatgttcccccgttagattgttttaagtgtttgcttttcatcttttatagatgtaatctgattttcaaaaatcattaacactttttaattagtatcgactaagactttttccccctggaatcgaggctgtgtgtccgtcatcccagcccccggttggagcctgctctttgaactccgctgccttccttagcagcttctgtcctcttctgtgagtcagtcagcgagtgcttgggatccgcatccagccgtgctgagcacacaacaggctgtgtgtggaaatggccaccaccattctccttccccaccccaccacaaaaagagaagctgtgtctttagacaaccctgaggtatctgtgttacaatcgttctgtgtttgatatttgtgtaaagtatgcatgcagtcttgtactgtgacctaagaacaaaactgtaactgcattagaaaccatgaaaaaattagatattgttttgtgacttttagacagtggtaaatatagaaccatgaattctggtcacattccatttctctccaacatgaaggatcaaaaaatgtttttcaatgtgttctttgttccactggaaacttagagtcatgagtttatgagctgatttggtcaccttcctctgcctttgttcactgtgagttctgatgtcttagtgacttagttcttagaagctcacgccttagtttgaaacagattctccacggtggtccccaaaacactgtctgcatatccataagaattgagcgctatgggtgttaacgtgcatgaggatcagtttgcagcagcaagtacaaaaggagaagaggaacatccgttgaatgagtgtgttttgtacataacttcagatacttgtgaacatgccttatatttgtccaacaactgtcagaataaagaacattctaaaatgag

SEQ ID NO: 6283 - DNA, 501 bp, Homo sapiens; identical to SEQ ID NO: 1048

SEQ ID NO: 6284 - DNA, 1400 bp, Homo sapiens
tcaaccagtacctcacagaccccaagtttgtggagcgaacactgcggctggcaggcactcagcccttggaggtgctggaggctgtgcagcgcagcctggtgctgcagcgaccacagacctgggctgactgcgtgacctgggcctgccaccactggcacacccagtactcgaacaacatccggcagctgctgcacaacttccctcctgaccagctcacaagctcaggagcgccgttctggtctgggcccaaacgctgtccacacccgctcacctttgatgtcaacaatcccctgcatctggactatgtgatggctgctgccaacctgtttgcccagacctacgggctgacaggctctcaggaccgagctgctgtggccacattcctgcagtctgtgcaggtccccgaattcacccccaagtctggcgtcaagatccatgtttctgaccaggagctgcagagcgccaatgcctctgttgatgacagtcgtctagaggagctcaaagccactctgcccagcccagacaagctccctggattcaagatgtaccccattgactttgagaaggatgatgacagcaactttcatatggatttcatcgtggctgcatccaacctccgggcagaaaactatgacattccttctgcagaccggcacaagagcaagctgattgcagggaagatcatcccagccattgccacgaccacagcagccgtggttggccttgtgtgtctggagctgtacaaggttgtgcaggggcaccgacagcttgactcctacaagaatggtttcctcaacttggccctgcctttctttggtttctctgaaccccttgccgcaccacgtcaccagtactataaccaagagtggacattgtgggatcgctttgaggtacaagggctgcagcctaatggtgaggagatgaccctcaaacagttcctcgactattttaagacagagcacaaattagagatcaccatgctgtcccagggcgtgtccatgctctattccttcttcatgccagctgccaagctcaaggaacggttggatcagccgatgacagagattgtgagccgtgtgtcgaagcgaaagctgggccgccacgtgcgggcgctggtgcttgagctgtgctgtaacgacgagagcggcgaggatgtcgaggttccctatgtccgatacaccatccgctgaccccgtctgctcctctaggctggccccttgtccacccctctccacaccccttccagcccagggttcccatttggcttctggcagtggcccaactagccaagtctggtgttccctcatcatccccctacctgaacccctcttgccactgccttctaccttgtttgaaacctgaatcctaataaagaattaataactcccaaaaaaaaaaaa

SEQ ID NO: 6285 - DNA, 1400 bp, Homo sapiens
agatgttccatccaaatgtctatgcagatggtagtatatgtctggacatacttcagaaccgttggagtccaacctatgatgtgtcttccattctaacatccatacagtctctgttggatgaacccaatcccaatagtccagcaaacagccaggctgctcagctgtaccaggagaacaaacgggaatatgaaaagcgtgtttctgcaatagtagaacaaagctggcgtgattgttgaccccgggtacagtttaaagaagctggccataagaaaaatatatattgatgtgtttgtcacctccctactcctgtcattacatttactttattaaaagcaaaataactgttgtgctgtttccatcttccttgccaagttttcctaccccttctaccctctccttaaacatcagaaaacaccctctatgaaatcaaatgtactgtacctgggttacttgcaaaaattactaatgcttcagtttttctgttgtatttcatttccagttttcaggcagttatttttattattgtactttaagcttttaagatgaattgttatacaagaggtgcttatgcttagcttgatgaccaggatgttatttttaacaaaatgattgctgaagtgtttcatcctggctggtccttcacttgtgttggatttagaagtgaatgtgtttggaatatggcctacagagaatagaaacaaatccatgtaaacaattttgaaggaggcatgggagctaaaaatcctgtgatactaagatctcagtcatatgaattacaacgtagtatttactggcaagaaggagaaagttgaaggactcagctaaaggagtacagcaattgtagtaactgacacatcctctctttgcaagctgctgactgggcacactcatgccaagtttcagaattattggtcttctgggtttttgctttttaaaagaggtgtgggagcagaggaatggaaacaatcgtgagtttttgagctagggaaagttggagctcctttaatctttttaaaggatcagtgctgccctaagtgaataaactcaattgtccatctttattttagagttttaatgaattcaaggaagggagcatagcatatctgtggcaaactattttccactcaaatcctgagttattgctgcatgctttaatttcttccctttcagcatctgagaaccttaaagccaatgtctgcgatctttttttggatatttatacttttagatatatagtacctttaagtagcagtatgggacaaggcttgtaaatgttttgtctaatgttctattgtcaccttttatgcatttatcacttccaaatctaactttgcacaagtaacccatgtaaaaaaaaatgtacatttttcaaaagttgtaaataaaaataaccttaaaaa

SEQ ID NO: 6286 - DNA, 1400 bp, Homo sapiens
tattgaatgccttatttttgaattctttagatttttaaattggagaaaagcacttaaagttttttatatatgaatattacatgtaaagctgttaaaatacataacttcagtgcaagagactttgtcacttatttccttatgtgtgtaggaggggttaataagtctctagctctccatctattgatagtttcatttacaatttcaaaagaacattcttatattttatcaaggaagtcttcaaatttgattctaaatagcgattataatctccaactttattttgaatgtacctctattagtttcaattgagtaattctagacataactggtttgactctgtccaactctgtatttaggccatttgttacagtttcttcatgcattacttactgttaaaactgtaccttttgcgatttcacagttggcacttctgccatgagcagagaactgatgcgacttgttttgctgcttggtagcactttaaaaaattttttgattaatgaagaaagtaaaaccataaacattgccaaaaattcatgccccagtattagcaatgaattagttgaattggtttgagaaaggcacatattggagggaaatcttggtgtaacttaaatatttgaaaattacctttaatgcaatgcatatctgtttattctgggaaatgttttaatgccagggcctgctgagttgcttcttcttgtggagattttttttttaatctcctgagttgtataaaagttgtactgcatcttagtttactggataaatttaaaacacagtattgtagaaagctaatacaaaactatcctatgccttcaaatagtatagaaaatggaaaatatacaagtaaattctgttgaaccacctgtgtagtctctctagtagttaaaacagctattttagtaaccccaagagtttcttctcatatccataaaattggattacagtatggcaatatctacagcttctattcattatgcaacgtttaacattgattggataaatgcttataggctgggccaggtggctcccacctgtagtcccagcactttgggaggcaaaggcgggaggatcacttgaggccaggactttgagaccagccagggcaacataataagacttttctctactttaaattttttaaaaaattagttgggcatagtggcacttgcctgtagtctcagctacttaggaggctgaggtggcagaatagcttatgcctaggaggttgaggctgcagtgagctgtgattatgccattgcactccagcctgggtgacagagcaataccctgtctttaaaaataaaagctattacttggcaaaaaattccgcactatataattcgcacacattaattagggtttatgtaccatacaaaaaaaaattaattagggct

SEQ ID NO: 6287 - DNA, 1400 bp, Homo sapiens
gcagagctggtgtgagacgagacaatcctgccccgccgccgggataatcaagagttttggccggacctttgagcatacaccgagagagtgaggagccagacgacaagcacacactatggcgctgaaacggattaataaggaacttagtgatttggcccgtgaccctccagcacaatgttctgcaggtccagttggggatgatatgtttcattggcaagccacaattatgggacctaatgacagcccatatcaaggcggtgtattctttttgacaattcattttcctacagactaccccttcaaaccacctaaggttgcatttacaacaagaatttatcatccaaatattaacagtaatggcagcatttgtctcgatattctaagatcacagtggtcgcctgctttaacaatttctaaagttcttttatccatttgttcactgctatgtgatccaaacccagatgaccccctagtgccagagattgcacggatctataaaacagacagagataagtacaacagaatatctcgggaatggactcagaagtatgccatgtgatgctaccttaaagtcagaataacctgcattatagctggaataaactttaaattactgttccttttttgattttcttatccggctgctcccctatcagacctcatcttttttaattttattttttgtttacctccctccattcattcacatgctcatctgagaagacttaagttcttccagctttggacaataactgcttttagaaactgtaaagtagttacaagagaacagttgcccaagactcagaatttttaaaaaaaaaaatggagcatgtgtattatgtggccaatgtcttcactctaacttggttatgagactaaaaccattcctcactgctctaacatgctgaagaaatcatctgagggggagggagatggatgctcagttgtcacatcaaaggatacagcattattctagcagcatccattcttgtttaagccttccactgttagagatttgaggttacatgatatgctttatgctcataactgatgtggctggagaattggtattgaatttatagcatcagcagaacagaaaatgtgatgtattttatgcatgtcaataaaggaatgacctgttcttgttctacagagaatggaaattggaagtcaaacaccctttgtattccaaaatagggtctcaaacattttgtaattttcatttaaattgttaggaggcttggagctattagttaatctatcttccaatacactgtttaatatagcactgaataaatgatgcaagttgtcaatggatgagtgatcaactaatagctctgctagtaattgatttatttttcttcaataaagttgcataaaccaaaaaaaaaaaaaaaaaa

SEQ ID NO: 6288 - DNA, 1400 bp, Homo sapiens
tcgcctgctttttctcaggctgccctgaggatctgtgtttggtgaaaaggagccaaattcacctgcagggcaggcggctctagcagcttcagaagcctggtgccctggcgacactggacctgccttggcttctttgatcccaaccccacccccgatttctgctctgctgactggggaagtcatcgtgccacccagaacctgagtgcgggcctctcagagctccttcgtccgtgggtctgccggggactgggccttgtctccctggcgagtgccaggtgaggctgcggcggctccgacgcaggtggagctgctgacctggcccctttctgcggctgcgagggactttgaacatgtcggggatcgccctcagcagactcgcccaggagaggaaagcatggaggaaagaccacccatttggtttcgtggctgtcccaacaaaaaatcccgatggcacgatgaacctcatgaactgggagtgcgccattccaggaaagaaagggactccgtgggaaggaggcttgtttaaactacggatgcttttcaaagatgattatccatcttcgccaccaaaatgtaaattcgaaccaccattatttcacccgaatgtgtacccttcggggacagtgtgcctgtccatcttagaggaggacaaggactggaggccagccatcacaatcaaacagatcctattaggaatacaggaacttctaaatgaaccaaatatccaagacccagctcaagcagaggcctacacgatttactgccaaaacagagtggagtacgagaaaagggtccgagcacaagccaagaagtttgcgccctcataagcagcgaccttgtggcatcgtcagaaggaagggattggtttggcaagaacttgtttacaacatttttgcaaatctaaagttgctccatacaatgactagtcacctgggggggttgggcgggcgccatcttccattgccgccgcgggtgtgcggtctcgattcgctgaattgcccgtttccatacagggtctcttccttcggtcttttgtatttttgattgttatgtaaaactcgcttttattttaatattgatgtcagtatttcaactgctgtaaaattataaacttttatacttgggtaagtcccccaggcgagttcctcgctctgggatgcaggcatgcttctcaccgtgcagagctgcacttggcctcagctggctgtatggaaatgcaccctccctcctgcgctcctctctagaacctgggctgtgctgcttttgagcctcagaccccagggcagcatctcggttctgcgccacttcctttgtgtttatatggcgttttgtctgtgttgctgtttaggtaaataaactgtttatataaaaaaaaaaaaaaaaaaaaaaaaaaaaaaaaa

SEQ ID NO: 6289 - DNA, 1400 bp, Homo sapiens; identical to SEQ ID NO: 6288

SEQ ID NO: 6290 - DNA, 1400 bp, Homo sapiens
ctccgtgcagtggccctgccacagccctccctcggcacactttgaccctttgtaggattggaattagcaggactcggctatttaaagcaccagtctggggtcgcctgggcccctgctgaccccctcctccagagcagccagcccagcccgggaacaagacggacttcctctcccttcggactcacagcctttgcagagtcaagctccacttgaagctcactcagtaatatcctttcaatgtgttttatattgttttgactgcctttttttgtagaaataaaaattgaccttagaatttatcgtcagataaacttgtaaagatttgaatattaatgtcttttcaaggcaaatgggattgtccccgcactagtagagaatccatgtcgctctgacaccccaaggaagccgacgatccaaatgccgtgtgtcaccaaccccgcttctgccactggcggcttcccttcttggctcttgggggggactagatcctgtggagaagatgacttaaactttgctttttgttttaattttaattctataacttgagatctttccggggcctacaggcgtgtaagacagcttggtctggtctgtgcagaagtggggagtgatgggcaggttcggcagcctaacattgttcaggcgcatggcccctgcggtgtgtacacgaactcggcttcttttgtcctaggtacgccaagggcaggtttctggagactcccttgtgcccgggatggcaagggcaccgggctggcgtttccacatctgtcttcattagcagaaaagtgatgatggattttatttcactcacactccagtttgtaataaaatgccaaattctgtcagctatccaaacaagccaccatttgttcttgttgcttctctggatccagaaatgttgccattcttggaaactgtcccattgcttcgtatttctgccaacgtagctctgcctgcctgtcaacccctcactgcactctgctcatcacgggaggatacctgtgtgccggcagcccctcagggactctcagccctggcactggcaccccagggttggccccgtcagcagaggcttggctttcgagccagtgggtgtctctcctttgggcctgggcggcttgctcctgccagccatgccttcagggtaggctctgagcaagctggcgaacagccctggctgctccaaaaccaaaaagctgggtcctctggaggaggggcgagctgtggagcagccacccactgctgccccaagctcactcaggaattcacacccgcctggtttcttgaagtgtgctgggtccttccctctgctccctactccccaccacggcagagaataggctttctaagatgctgcgatcccgttctgctgcccgtaataaaaatgctctcagacactg

SEQ ID NO: 6291 - DNA, 1400 bp, Homo sapiens
gaaagtctatttaaattgattcccatcataactggtggggcacatctaactcaactgtgaaaagacacatcacacaatcaccttgctgctgattacacggcctggggtctctgccttctccctttaccctcccgcctcccaccctccctgcaacaacagccctctagcctggggggcttgttagagtagatgtgaaggtttcaggtcgcagcctgtgggactactgctaggtgtgtggggtgtttcgcctgcacccctggttcctttaagtcttaagtgatgccccttccaaaccatcatcctgtccccacgctcctccactcccgcccttggccgaagcatagattgtaacccctccactcccctctgagattggcttcggtgaggaattcagggctttccccatatcttctctccccccacctttatcgaggggtgctgctttttctccctcctcctcaagttcctttttgcaccgtcaccacccaacaccttccatgacacttccttgctttggccagaagccatcaggtaaggttggaaagagcctctgacctcccttgtttagttttggaaccatactcactcactctccaccagcctgggaaatgaatattgggtcctcagccctgccaccctctgctgtcatcagctgatgcattgtttttagctcaggttttgataaggtgaaaagaatagtcaccagggttactcagacctgccagctctcggagtccttggtggttgaacttggagaaagaccgcatgaagatacttgtaagcacacatgatccctctgaattgttttactttcctgtaactgcttttgcttttaaaaattgaagaagttttaaacagggctttcatttggtcatccttgcaatccattggggtctagtttggaatctgacaactggaacaaaaagaaccttgaatccggtgcatgccttggttttggtgctgctgctgcttcccaagatcctcagcagggattaagaaggaacccggtgtgcacagcagatccccgaaattggtgggcttgacctcctggcaaattgctgcgtctttccacttgctgttcaggaccactaaatgctgaaatgtggatgcataccgaaataaaagcaattcattgtgtactaaaggttttttttttttttttaatttagtatttgtgtaaaaccaccttttgaagcagcaactatcaagtctgaaaagcaattgatgtttccattaatctttttctggggggaaaaccttagttctaaggatttaacatcctgtaagtgaagtttaacataacagtattccataagcagcctttttattgtcagaccattgcctgattttaatataataaaaaaaaagtgtgcgttaataaaaaaaaaaaaaaaaaaaaa

SEQ ID NO: 6292 - DNA, 1400 bp, Homo sapiens
acctaaagtgtagagattgccatttttatttgtgatttttttttttttttggtacttcaggatagcaaatatctatctgctattaaatggtaaatgaaccaagtgtttttttttgttttttttttgagacagagtctcactgttgcccaggctggagtgcagtggtgcaatctcggctcactgcaagctctgcttcccaggttcacgccattctcctggctcagcctcccaagtagctgggactacaggcacccgccacagtgcctgggctaattttttgtatttttagtagagacagggtttcaccatgtgagccaggatggtctcaatctcctgaccttgtgaaccacccgtctcggcctcccaaagtgctgggattacaggtgtgagccaccacgcctgggcccatgaaccaagtgtttttaaggaaacaaaactatttttttaatcatcagatttatactagctatatggatattagcatatctggtaattatgaatctagaatttttttacatatttttataatactgttagctcagttattggatgagtgaaagataatcatgttggttttaatagtgtcaatttttgtaaaataaaaattaaacttcaaactctttactttataaattgtccataggccacactttaatatcacattataaagggaaggacagtcttcattcctcctggttattggtttgtttgtcattaaagatatattttgaatccatgaaattgctatgctaaacagcctttacatgtatggtctggttaaagttcctttgttccttttgttttaataaaatgtgtcactgattttttagctcaaaatcatcactgttaatttccagtcaccccaaatatggttaaaagatttttttttttaatcatgaagagaaaattagtagcatttctttctctccccattatttattggttttcctcactaatctttttttttttagtccaaaagccaaaaatatttatcttggttttacattttaatttccattcttaattgtaatttttttctttaaataaggaaaccaatataatctcatgtataaaaacttaaatattttacaagttacatatagcatcattctaaaataagaattttttttgttttctgtctgcttttttcttatgtctcttgttgagttttatattttcagtggttatttttgcttgtgttagatcattattaaaatatatccaatgtccctttgatacttgtgctctgctgagaatgtacagtttgcattaaacatcccaggtctcatccttcaggaattttgcagttcaatgagaagagggagacaaatataaagatgaggacagaagcatctctacagatgaaaattacataaataaaacattctccatcaacaaaa

SEQ ID NO: 6293 - DNA, 600 bp, Homo sapiens
tggtggtccacctcaaacgtttctcctacaacagatactggagggataagctcgacacagtcgtagaattcccaatcagagggctgaacatgtccgagtttgtctgtaacctgtcagcaaggccttatgtgtacgacctcattgccgtgtccaatcattatggagccatgggggttggccactacactgcatatgcgaagaacaaactgaatggtaaatggtattactttgatgatagcaacgtgtccctggcctctgaggatcagatagtgactaaagcagcttatgtgctattttaccaacgtcgagatgatgaattttataagacaccttcacttagcagttctggttcctctgatggagggacacgaccaagcagctctcagcagggctttggggatgatgaggcttgcagcatggacaccaactaatgctgactccacgatcctgccaccctgtagcgccagtgtaatcccccaggagaacatctttgacactctgcagactgctagtgttctgtctaaaaaccagacaaggaaatacccttcttttatgagcagaaggaaacaaaaaaaaaaagaagaccgtttacctagaaag

SEQ ID NO: 6294 - DNA, 1400 bp, Homo sapiens
ctgcgtgtggcctccgagcagtcctctcagcccacttgcacggtgggagtgtggattgatgttggcagccgttttgagactgagaagaataatggggcaggctactttttggagcatctggctttcaagggaacaaagaatcggcctggcagtgccctggagaaggaggtggagagcatgggggcccatcttaatgcctacagcacccgggagcacacagcttactacatcaaggcgctgtccaaggatctgccgaaagctgtggagctcctgggtgacattgtgcagaactgtagtctggaagactcacagattgagaaggaacgtgatgtgatcctgcgggagatgcaggagaatgatgcatctatgcgagatgtggtctttaactacctgcatgccacagcattccagggcacacctctagcccaggctgtggaggggcccagtgagaatgtcaggaagctgtctcgtgcagacttgaccgagtacctcagcacacattacaaggcccctcgaatggtgctggcagcagctggaggagtggagcaccagcaactgttagacctcgcccagaagcacctcggtggcatcccatggacatatgcagaggacgctgtgcccactcttactccatgccgcttcactggcagtgagatccgccaccgtgatgatgctctaccttttgcccacgtggccattgcagtagagggtcctggctgggccagcccggacagtgtggccttgcaagtggccaatgccatcatcggccactatgactgcacttatggtggtggcgtgcacctgtccagcccactggcttcaggtgctgtggccaacaagctatgccagagtttccagaccttcagcatctgctatgcagagacgggcttgctgggtgcacactttgtctgtgaccgaatgaaaatcgatgacatgatgttcgtcctgcaagggcagtggatgcgcctgtgtaccagtgccacggagagtgaggtggcccggggcaaaaacatcctcagaaatgccctggtatctcatctagatggcactactcctgtgtgtgaggacatcggacgcagcctcctgacctatggccgccgcatccccctggctgaatgggaaagccggattgcggaggtggatgccagtgtggtacgtgagatctgctccaagtacatctatgaccagtgcccagcagtggctggatatggccccattgagcagctcccagactacaaccggatccgtagcggcatgttctggctgcgcttctaggcgggaagcctatgtaagcaagagggcagggccggggtttgtggtcccccccccaccacaaacacagcacttcggctcctctaacctgtgccacaggtgaccaccaataaaatcctctgctgaga

SEQ ID NO: 6295 - DNA, 1400 bp, Homo sapiens
ggcttggtgattgcttctttggaaaactattctcctgtatcaagaattggtttgttcattaaagcaggcagtagatatgaggacttcagcaatttaggaaccacccatttgctgcgtcttacatccagtctgacgacaaaaggagcttcatctttcaagataacccgtggaattgaagcagttggtggcaaattaagtgtgaccgcaacaagggaaaacatggcttatactgtggaatgcctgcggggtgatgttgatattctaatggagttcctgctcaatgtcaccacagcaccagaatttcgtcgttgggaagtagctgaccttcagcctcagctaaagattgacaaagctgtggcctttcagaatccgcagactcatgtcattgaaaatttgcatgcagcagcttaccagaatgccttggctaatcccttgtattgtcctgactataggattggaaaagtgacatcagaggagttacattacttcgttcagaaccatttcacaagtgcaagaatggctttgattggacttggtgtgagtcatcctgttctaaagcaagttgctgaacagtttctcaacatgaggggtgggcttggtttatctggtgcaaaggccaactaccgtggaggtgaaatccgagaacagaatggagacagtcttgtccatgctgcttttgtagcagaaagtgctgtcgcgggaagtgcagaggcaaatgcatttagtgttcttcagcatgtcctcggtgctgggccacatgtcaagaggggcagcaacaccaccagccatctgcaccaggctgttgccaaggcaactcagcagccatttgatgtttctgcatttaatgccagttactcagattctggactctttgggatttatactatctcccaggccacagctgctggagatgttatcaaggctgcctataatcaagtaaaaagaatagctcaaggaaacctttccaacacagatgtccaagctgccaagaacaagctgaaagctggatacctaatgtcagtggagtcttctgagtgtttcctggaagaagtcgggtcccaggctctagttgctggttcttacatgccaccatccacagtccttcagcagattgattcagtggctaatgctgatatcataaatgcggcaaagaagtttgtttctggccagaagtcaatggcagcaagtggaaatttgggacatacaccttttgttgatgagttgtaatactgatgcacacattacaggagagagctgaacgttctctcacccagagcagcaaacacatgaaagtcagaagtctctaatatatcatttgtcttttttccagtgaggtaaaataaggcataaatgcaggtaattattcccagctgacctaaagtcaataaaacattctgttt

SEQ ID NO: 6296 - DNA, 1400 bp, Homo sapiens
aactaacgacagctatggattatttgcggttgtgatgcatagtggcattacaattagtagtgggcattacactgcttctgttaaagtcactgaccttaacagtttagaactagataaaggaaattttgtggttgaccaaatgtgtgaaataggtaagccagaaccattgaatgaggaggaagcaaggggtgtggttgagaattataatgatgaagaagtgtcaattagagttggtggaaatacacagccaagtaaagttttgaacaaaaaaaatgtagaagctattggacttcttggaggacaaaagagcaaagcagattatgagctatacaacaaagcctctaatcctgataaggttgctagtacagcgtttgctgaaaatagaaattctgagactagtgatactactgggacccatgaatctgatagaaacaaggaatccagtgaccaaacaggcattaatattagtggatttgagaacaaaatttcatacgtagtgcaaagcttaaaggagtatgaggggaagtggttgctttttgatgattctgaagtcaaagttactgaagagaaggactttctgaattctctttccccttctacatctcctacttctactccttacttgctattttataagaaattatagagtgagtgtattttccttgtgtatatattaaacacacccatacaaacattggtaaagttgattacatcaaagaatctttagcttatcttttgaagctactggatattattggtctctctaggtttttatataaatagtgaaatttgaattactgaaaaccatgttaatttttagaactcattttcctcagtagagactagtgatgcattagcttctgggaacaaacttgtatcggttcttaattaaattatccaaaacggaggcatttaaacacttggatttacaccagtcttttgtgtttgctttttaaaataaagtgctcgtatttgtattctccatattttggagtaattatctacatgatgtttatagttcctgtggtttttcacccaagaagcagaatctcattcagtacatttagttttataagagtcatgaagctaaatccttgggctatgtcagaggcacaaagtctagaatgtgtgtattcacaatggtgtatgtacattttgtgccttgattcacttagaagtgtctcagaaaacctggacagttcgcttctacacaagaattttatatgtatttatgaagatgattctgtaccctagtatatctttttgggcatggactaatttgtatctgtttaactcatattctgcacgatctgtatatagtacatcaaacttagaggtgtgaccttaaatttaactttttttaaaaactgggaggtcaataaaatttaaactgcttaact

SEQ ID NO: 6297 - DNA, 1400 bp, Homo sapiens
tctcacctaacactgggaaaaaaaatgctaaaatcaagacagggtacaagcgggagcacattaacctgggctgcgacatggatttcgacattgctgggccttccatccggggtgctctggtgctaggttacgagggctggctggccggctaccagatgaattttgagactgcaaaatcccgagtgacccagagcaactttgcagttggctacaagactgatgaattccagcttcacactaatgtgaatgacgggacagagtttggcggctccatttaccagaaagtgaacaagaagttggagaccgctgtcaatcttgcctggacagcaggaaacagtaacacgcgcttcggaatagcagccaagtatcagattgaccctgacgcctgcttctcggctaaagtgaacaactccagcctgataggtttaggatacactcagactctaaagccaggtattaaactgacactgtcagctcttctggatggcaagaacgtcaatgctggtggccacaagcttggtctaggactggaatttcaagcataaatgaatactgtacaattgtttaattttaaactattttgcagcatagctaccttcagaatttagtgtatcttttaatgttgtatgtctgggatgcaagtattgctaaatatgttagccctccaggttaaagttgattcagctttaagatgttacccttccagaggtacagaagaaacctatttccaaaaaaggtcctttcagtggtagactcggggagaacttggtggcccctttgagatgccaggtttcttttttatctagaaatggctgcaagtggaagcggataatatgtaggcactttgtaaattcatattgagtaaatgaatgaaattgtgatttcctgagaatcgaaccttggttccctaaccctaattgatgagaggctcgctgcttgatggtgtgtacaaactcacctgaatgggacttttttagacagatcttcatgacctgttcccaccccagttcatcatcatctcttttacaccaaaaggtctgcagggtgtggtaactgtttcttttgtgccattttggggtggagaaggtggatgtgatgaagccaataattcaggacttattccttcttgtgttgtgtttttttttggcccttgcaccagagtatgaaatagcttccaggagctccagctataagcttggaagtgtctgtgtgattgtaatcacatggtgacaacactcagaatctaaattggacttctgttgtattctcaccactcaatttgttttttagcagtttaatgggtacattttagagtcttccattttgttggaattagatcctccccttcaaatgctgtaattaacaacacttaaaaaacttgaataaaatattgaaacctc

SEQ ID NO: 6298 - DNA, 1400 bp, Homo sapiens
cagctgcagcagctggagggcgaagtgaaggagacaccgttccgcccgcggcctcgccatggcgacccacggacagacttgcgcgcgtccaatgtgtattcctccatcatatgctgaccttggcaaagttgccagagatattttcaacaaaggatttggttttgggttggtgaaactggatgtgaaaacaaagtcttgcagtggcgtggaattttcaacgtccggttcatctaatacagacactggtaaagttactgggaccttggagaccaaatacaagtggtgtgagtatggtctgactttcacagaaaagtggaacactgataacactctgggaacagaaatcgcaattgaagaccagatttgtcaaggtttgaaactgacatttgatactaccttctcaccaaacacaggaaagaaaagtggtaaaatcaagtcttcttacaagagggagtgtataaaccttggttgtgatgttgactttgattttgctggacctgcaatccatggttcagctgtctttggttatgagggctggcttgctggctaccagatgacctttgacagtgccaaatcaaagctgacaaggaataactttgcagtgggctacaggactggggacttccagctacacactaatgtcaatgatgggacagaatttggaggatcaatttatcagaaagtttgtgaagatcttgacacttcagtaaaccttgcttggacatcaggtaccaactgcactcgttttggcattgcagctaaatatcagttggatcccactgcttccatttctgcaaaagtcaacaactctagcttaattggagtaggctatactcagactctgaggcctggtgtgaagcttacactctctgctctggtagatgggaagagcattaatgctggaggccacaaggttgggctcgccctggagttggaggcttaatccagctgaaagaaacctttgggaatggatatcagaagatttggccttaatatatttccattgtgaccagcagcaggcttttttcccccaagaagatgatcaaaacaaaggatgatctcaacaagagctgtattttaagtatttagacagttctttgttagctggtttctagttggttatctagttaccaatgctgcagtcctgcagtcacctatacattatttaaatgtatttaactgttaaatgcgctacccaccaataatgaaatagacctttatgaaaactgtgcaattgtgtgcatgtttgtttttatgttcctttagaaaacattgactgttaccattgaatgagatggatcagtggatattaagatgaggttacaaattttgttaagttcagccattattacttttggtatcccagaacatgacaaattatgaataaaacaagtatacat

SEQ ID NO: 6299 - DNA, 1400 bp, Homo sapiens
gaatgaccgcttcgccaactacatcgacaaggtgcgcttcctggagcagcagaataagatcctgctggccgagctcgagcagctcaagggccaaggcaagtcgcgcctaggggacctctacgaggaggagatgcgggagctgcgccggcaggtggaccagctaaccaacgacaaagcccgcgtcgaggtggagcgcgacaacctggccgaggacatcatgcgcctccgggagaaattgcaggaggagatgcttcagagagaggaagccgaaaacaccctgcaatctttcagacaggatgttgacaatgcgtctctggcacgtcttgaccttgaacgcaaagtggaatctttgcaagaagagattgcctttttgaagaaactccacgaagaggaaatccaggagctgcaggctcagattcaggaacagcatgtccaaatcgatgtggatgtttccaagcctgacctcacggctgccctgcgtgacgtacgtcagcaatatgaaagtgtggctgccaagaacctgcaggaggcagaagaatggtacaaatccaagtttgctgacctctctgaggctgccaaccggaacaatgacgccctgcgccaggcaaagcaggagtccactgagtaccggagacaggtgcagtccctcacctgtgaagtggatgcccttaaaggaaccaatgagtccctggaacgccagatgcgtgaaatggaagagaactttgccgttgaagctgctaactaccaagacactattggccgcctgcaggatgagattcagaatatgaaggaggaaatggctcgtcaccttcgtgaataccaagacctgctcaatgttaagatggcccttgacattgagattgccacctacaggaagctgctggaaggcgaggagagcaggatttctctgcctcttccaaacttttcctccctgaacctgagggaaactaatctggattcactccctctggttgatacccactcaaaaaggacattcctgattaagacggttgaaactagagatggacaggttatcaacgaaacttctcagcatcacgatgaccttgaataaaaattgcacacactcagtggcaggcgatatattacccaggcaagaataaaaaagaaatcccatatcttaaagaaacagctttcaagtgcctttctgcagtttttcaggagcgcaagatagatttggaataggaataagctctagttcttaacaaccgacactcctacaagatttagaaaaaagtttacaacataatctagtttacagaaaaatcttgtgctagaatactttttaaaaggtattttgaataccattaaaactgcttttttttttccagcaagtatccaaccaacttggttctgcttcaataaatctttggaaaactcca

SEQ ID NO: 6300 - DNA, 600 bp, Homo sapiens
gggatgaaaaatcaacccccgacatggaacccatgattcctaaacccggggtaggttccatgccaagtaacagcagagggagttaagccataggaatttggctgtggagtaagagggaatgcggtgaggcagtgtggaatatgaccctaccagaggttggagaacaaacttgggcagccggaacccgtcactattttagattcctggcattcgaggagccctttgaactttccaaagtgcagccacagctacaatgctgttaaatcctcccacatttcttggatgccccttcaccttgtgtggacagtgtctggtttccccattttacagacaggaaaactgagcttcagacagggggtgggctttgcctaaggacacacaaatttggttgggagttgatggggccagatgagccagcattccagctgtttcacccttcagcaacatgcagagtccctgagcccacctcccagccctctcctcattctctgaacccactgtggtgagaagaatttgctccggccaaattggccgttagccacctgggtccacatcctgctaagacgtttaaaacagcctaacaaagacacttgcctgtgg

SEQ ID NO: 6301 - DNA, 1400 bp, Homo sapiens
ttgcacaagaagaagctgcagctcagagtttttatcaaacttatttttgtgatattctccagcatatcttttctgttgtgacagacacttcacatactgctggtttaacaatgcatgcatcaattcttgcatatatgtttaatttggttgaagaaggaaaaataagtacatcattaaatcctggaaatccagttaacaaccaaatctttcttcaggaatatgtggctaatctccttaagtcggccttccctcacctacaagatgctcaagtaaagctctttgtgacagggcttttcagcttaaatcaagatattcctgctttcaaggaacatttaagagatttcctagttcaaataaaggaatttgcaggtgaagacacttctgatttgtttttggaagagagagaaatagccctacggcaggctgatgaagagaaacataaacgtcaaatgtctgtccctggcatctttaatccacatgagattccagaagaaatgtgtgattaaaatccaaattcatgctgttttttttctctgcaactccgttagcagaggaaaacagcatgtgggtatttgtcgaccaaaatgatgccaatttgtaaattaaaatgtcacctagtggccctttttcttatgtgtttttttgtataagaaattttctgtgaaatatccttccattgtttaagcttttgttttggtcatctttatttagtttgcatgaagttgaaaattaaggcatttttaaaaattttacttcatgcccatttttgtggctgggctggggggaggaggcaaattcaatttgaacatatacttgtaattctaatgcaaaattatacaatttttcctgtaaacaataccaatttttaattagggagcattttccttctagtctatttcagcctagaagaaaagataatgagtaaaacaaattgcgttgtttaaaggattatagtgctgcattgtctgaagttagcacctcttggactgaatcgtttgtctagactacatgtattacaaagtctctttggcaagattgcagcaagatcatgtgcatatcatcccattgtaaagcgacttcaaaaatatgggaacacagttagttatttttacacagttctttttgtttttgtgtgtgtgtgctgtcgcttgtcgacaacagctttttgttttcctcaatgaggagtgttgctcatttgtgagccttcattaactcgaagtgaaatggttaaaaatatttatcctgttagaataggctgcatctttttaacaactcattaaaaaacaaaacaactctggcttttgagatgacttatactaatttacattgtttaccaagctgtagtgctttaagaacactacttaaaaagcaaaataaacttggtttacatttaaaaaaaa

SEQ ID NO: 6302 - DNA, 600 bp, Homo sapiens
gcaaagagtaccgtgagaagatagaggcagaactgcaggacatctgcaatgatgttctggagctgttggacaaatatcttattcccaatgctacacaaccagaaagtaaggtgttctacttgaaaatgaaaggagattattttaggtatctttctgaagtggcatctggagacaacaaacaaaccactgtgtcgaactcccagcaggcttaccaggaagcatttgaaattagtaagaaagaaatgcagcctacacacccaattcgtcttggtctggcactaaatttctcagtcttttactatgagattctaaactctcctgaaaaggcctgtagcctggcaaaaacggcatttgatgaagcaattgctgaattggatacgctgaatgaagagtcttataaagacagcactctgatcatgcagttacttagggacaatctcactctgtggacatcggaaaaccagggagacgaaggagacgctggggagggagagaactaatgtttctcgtgctttgtgatctgtccagtgtcactctgtaccctcaacatatatcccttgtgcgataaaaaaaaaaaaaaaaaaaaaaaaaaaaaaaaaa

SEQ ID NO: 6303 - DNA, 1400 bp, Homo sapiens
cctgctgttagctttcattatttttgctacactcattttatttgtatttaaatgttttaggcaacctaagaacaaatgtaaaagtaaagatgcaggaaaaatgaattgcttggtattcattacttcatgtatatcaagcacagcagtaaaacaaaaacccatgtatttaacttttttttaggatttttgcttttgtgattttttttttttttttttgatacttgcctaacatgcatgtgctgtaaaaatagttaacagggaaataacttgagatgatggctagctttgtttaatgtcttatgaaattttcatgaacaatccaagcataattgttaagaacacgtgtattaaattcatgtaagtggaataaaagttttatgaatggacttttcaactactttctctacagcttttcatgtaaattagtcttggttctgaaacttctctaaaggaaattgtacattctttgaaatttattccttattccctcttggcagctaatgggctcttaccaagtttaaacacaaaatttatcataacaaaaatactactaatataactactgtttccatgtcccatgatcccctctcttcctccccaccctgaaaaaaatgagttcctattttttctgggagagggggggattgattagaaaaaaatgtagtgtgttccatttaaaattttggcatatggcattttctaacttaggaagccacaatgttcttggcccatcatgacattgggtagcattaactgtaagttttgtgcttccaaatcactttttggtttttaagaatttcttgatactcttatagcctgccttcaattttgatcctttattctttctatttgtcaggtgcacaagattaccttcctgttttagccttctgtcttgtcaccaaccattcttacttggtggccatgtacttggaaaaaggccgcatgatctttctggctccactcagtgtctaaggcaccctgcttcctttgcttgcatcccacagactatttccctcatcctatttactgcagcaaatctctccttagttgatgagactgtgtttatctccctttaaaaccctacctatcctgaatggtctgtcattgtctgcctttaaaatccttcctctttcttcctcctctattctctaaataatgatggggctaagttatacccaaagctcactttacaaaatatttcctcagtactttgcagaaaacaccaaacaaaaatgccattttaaaaaaggtgtattttttcttttagaatgtaagctcctcaagagcagggacaatgttttctgtatgttctattgtgcctagtacactgtaaatgctcaataaatattgatgatgggaggcagtgagtcttgatgataagggtgagaaactgaaatccc

SEQ ID NO: 6304 - DNA, 1400 bp, Homo sapiens
aacctccaccaccccctcgcgctacaagactgagctatgtcggaccttctcagagagtgggcgctgccgctacggggccaagtgccagtttgcccatggcctgggcgagctgcgccaggccaatcgccaccccaaatacaagacggaactctgtcacaagttctacctccagggccgctgcccctacggctctcgctgccacttcatccacaaccctagcgaagacctggcggccccgggccaccctcctgtgcttcgccagagcatcagcttctccggcctgccctctggccgccggacctcaccaccaccaccaggcctggccggcccttccctgtcctccagctccttctcgccctccagctccccaccaccacctggggaccttccactgtcaccctctgccttctctgctgcccctggcacccccctggctcgaagagaccccaccccagtctgttgcccctcctgccgaagggccactcctatcagcgtctgggggcccttgggtggcctggttcggaccccctctgtacagtccctgggatccgaccctgatgaatatgccagcagcggcagcagcctggggggctctgactctcccgtcttcgaggcgggagtttttgcaccaccccagcccgtggcagccccccggcgactccccatcttcaatcgcatctctgtttctgagtgacaaagtgactgcccggtcagatcagctggatctcagcggggagccacgtctcttgcactgtggtctctgcatggaccccagggctgtggggacttgggggacagtaatcaagtaatccccttttccagaatgcattaacccactcccctgacctcacgctggggcaggtccccaagtgtgcaagctcagtattcatgatggtgggggatggagtgtcttccgaggttcttgggggaaaaaaaattgtagcatatttaagggaggcaatgaaccctctcccccacctcttccctgcccaaatctgtctcctagaatcttatgtgctgtgaataataggccttcactgcccctccagtttttatagacctgaggttccagtgtctcctggtaactggaacctctcctgagggggaatcctggtgctcaaattaccctccaaaagcaagtagccaaagccgttgccaaaccccacccataaatcaatgggccctttatttatgacgactttatttattctaatatgattttatagtatttatatatattgggtcgtctgcttcccttgtatttttcttcctttttttgtaatattgaaaacgacgatataattattataagtagactataatatatttagtaatatatattattaccttaaaagtctatttttgtgttttgggcatttttaaataaacaatctgagtgt

SEQ ID NO: 6305 - DNA, 1400 bp, Homo sapiens
ccatgagcagcaatgagtgcttcaagtgtggacgatctggccactgggcccgggaatgtcctactggtggaggccgtggtcgtggaatgagaagccgtggcagaggtggttttacctcggatagaggtttccagtttgtttcctcgtctcttccagatatttgttatcgctgtggtgagtctggtcatcttgccaaggattgtgatcttcaggaggatgcctgctataactgcggtagaggtggccacattgccaaggactgcaaggagcccaagagagagcgagagcaatgctgctacaactgtggcaaaccaggccatctggctcgtgactgcgaccatgcagatgagcagaaatgctattcttgtggagaattcggacacattcaaaaagactgcaccaaagtgaagtgctataggtgtggtgaaactggtcatgtagccatcaactgcagcaagacaagtgaagtcaactgttaccgctgtggcgagtcagggcaccttgcacgggaatgcacaattgaggctacagcctaattattttcctttgtcgcccctcctttttctgattgatggttgtattattttctctgaatcctcttcactggccaaaggttggcagatagaggcaactcccaggccagtgagctttacttgccgtgtaaaaggaggaaaggggtggaaaaaaaccgactttctgcatttaactacaaaaaaagtttatgtttagtttggtagaggtgttatgtataatgctttgttaaagaaccccctttccgtgccactggtgaatagggattgatgaatgggaagagttgagtcagaccagtaagcccgtcctgggttccttgaacatgttcccatgtaggaggtaaaaccaattctggaagtgtctatgaacttccataaataactttaattttagtataatgatggtcttggattgtctgacctcagtagctattaaataacatcaagtaacatctgtatcaggccctacatagaacatacagttgagtgggagtaaacaaaaagataaacatgcgtgttaatggctgttcgagagaaatcggaataaaagcctaaacaggaacaacttcatcacagtgttgatgttggacacatagatggtgatggcaaaggtttagaacacattattttcaaagactaaatctaaaacccagagtaaacatcaatgctcagagttagcataatttggagctattcaggaattgcagagaaatgcattttcacagaaatcaagatgttatttttgtatactatatcacttagacaactgtgtttcatttgctgtaatcagtttttaaaagtcagatggaaagagcaactgaagtcctagaaaatagaaatgtaattttaaactattccaataaagctgga

SEQ ID NO: 6306 - DNA, 1400 bp, Homo sapiens
actaatcatcaaagaattcatacaggagaaaaaccatatgtatgcagtgaatgtgggaaagccttttgtcagaagtcacatctcatatcacatcagaggacacatacaggggagaaaccctatgaatgcagtgaatgtgggaaggcctttggtgagaagtcaagtcttgcaactcatcagagaactcatactggagaaaaaccgtatgaatgcagggactgtgaaaaagctttctcccagaaatcacagctaaatacccatcagagaattcacactggagagaaaccctatgaatgcagtctttgtaggaaagctttttttgagaagtcggagctaattagacatctgagaactcatacaggagaaaaaccttatgaatgcaatgaatgtagaaaagccttcagggagaagtcaagtctcatcaatcatcagagaatacatacaggagagaagccttttgaatgcagtgagtgtggcaaagctttctctcggaagtcacaccttataccacatcaaaggacacatacgggtgagaaaccctatggatgcagtgaatgtaggaaggccttctctcagaagtcacagctggttaatcatcagagaattcatacaggagagaagccttatcgatgcattgaatgtgggaaagctttctcacagaagtcacagctcatcaatcatcagagaactcatacagtaaaaaaatcctaggaatacagttaatagtagtctttgacagatcatcttggacttcaggaaatgcaattatgataacgtttgtagacagtcacgtcatgttaggtgtctgtactccatgaggatgagaactctaaatgaggtggtgtatggaaagccgatcataattcatagagtagagtgaacctatgactgcagtggatctcaaaaacttttaaaaccatagacaagccttatagagtagaacattcacagcaaagaagaatcctgtgaatgtccaaaagccttccagaagtcaagtctcttaagctattagaaatattccactggggatgagggaaaaccccatgaatgcgggaaatgaggcaatatttttaagaaatgacagttcattgtacataagaaaatgctcttaggaatgaagttctatgaaagtactaaatatgggacagtgcaacaagtaaccagactattttgtattttggagaattcatattatggagaacctaacaatttaaagacactgggaacacttgcccctcagaatagtactgtcaagggaagccatacactttttgtagacatgggtaccaaaaatacccaattctaagtggttgacagatgttcactttgaagtgtgaagttttaaaaatacgtgaataaattggttattgaaacatctaaaaaaaaaaaaacccgaattc

SEQ ID NO: 6307 - DNA, 600 bp, Homo sapiens
cttacaagtgtgaagaatgtggcaaagcatttatatcatcctcaaccctaaatggacataagagaattcatactagagagaaaccctacaaatgtgaagaatgtggcaaagcatttagccaatcttcaaccctaactagacataagaggttgcacaccggagagaaaccctacaaatgtggagaatgtggcaaagcctttaaagagtcctcagctcttactaaacataagataattcacactggagagaaaccctacaaatgtgaaaaatgttgcaaagcctttaaccagtcttcaatccttactaaccataagaaaattcatactatcacacctgtaatcccactactttgggaggccgaggcgggcggatcacgaggtcaggagatggagaccatcctggctaacacagtgaaaccccttctctactaaaaaatacaaaaaactagccgggcgtggtggcgggcgcctgtagtcccagctatgcgagaggctgaggcaggagaatggcgtgaacccgggaggcggagcttgcagtgagccgagatcacgccactgcactcaagcctgggcgacagagcgagactccgtctcaaaaaaa

SEQ ID NO: 6308 - DNA, 1400 bp, Homo sapiens
ccccaaccctcagatgcttcacttctttggaattccaggactctcaatggggggacgggatgcctggcctaagcacctggagcaggggaccccatatccactggtagccacctccccattgctgtggccccctgaaatctcactcagtgctgttgctccatctactgccctaatggggctcttttcccacctcctgctggtttcccgagggaacttctgaccctggagtccatgagggctcctttcctttttgaccacgaccttggccctagctctgcactctctggaataagggcccgatgcagcattttcttgcccagtgtggcaagacctcagaaaaaccagtcaattacgcctaagatcattttgctgtccttaaaccccccaggttccttcttgcacaaatccactctgctgcccaccttccctggcattttaaacagacctaccccaccccaactcagagttaagcatacatggcaatgctgaaaataaacaaaatccactgaggcttcccaggccatttaaagcctggagtaccagcgcatatcatctcatggggtccagagtggagtccaggcttctctgaaaccagggctgagcatatttccatagccaaggaggtgggactccctggagctatctgtggtcttagggaaggatccagacatacacggctttggggtacaagctgtgatcactgatcaataaattatctctagattggtccttgtgaggggagttttaagaatccagaacatcttgctcttgatcagcacatccaaaaacaccaagacaaacatccagtggagcagaacctctcctgcctcgggagttctgaccgggttccccagcagggtgttaagcctctgtctctggccctaccagcatccaggttccactttcctaggagagagtggagatgggaagacagggaaaggaaggcagcaggaggccacaagcccaccaggtcttcatgtcaagagagggagtaacatgtcttctcattgcccacggacccaacctctgtccaggtgcccctcatcatcacagtttaacacaagctcccctgctccagccaaattgatctcccagtcttgtccttacccattccaagtgctctgccagcccctgttcatccaagttttaagtcctccaccctgttataagagactgttccaacggctctgggcctcagtggtcacttgaccaccattgtctcagagctgcccactttgtgtgtgtcacatgctgcctgagtcacatgtacatcttatttctgcctctagttttgtaagctcctggagggcggataacatcttatactactcttgtattctcatggcacctagtgcagtgctgggcacagagtaggtgctcaataaagacttgttgaatga

SEQ ID NO: 6309 - DNA, 1400 bp, Homo sapiens
cagttactaagcctcttttccccagtgctggacagatggggacacctgtcacaagctcaagtacagcttcatccaattcagaaagtctgtctgcatcttctaaagctctgtttcctagcacagcacaagctcaggcagctgtccaaggacctgttggtacagatttcaaacccttaaatagtacccctgcaacaactacagaacccccaaagcctacattccctgcttatacacagtctacagcttcaacaactagtacaacaaatagtactgcagctaaaccagcggcttcaataacaagtaagcctgctacacttacaacaactagtgcaaccagtaagttgatccatccagatgaggatatatccctggaagagagaagggcacagttacctaagtatcaacgtaatcttcctcggccaggacaggcccccatcggtaatccaccagttggaccaattggaggtatgatgccaccacagccaggcatcccacagcaacaaggaatgagacccccaatgccacctcatggtcagtatggtggtcatcatcaaggcatgccaggataccttcctggtgctatgcccccgtatgggcagggaccgccaatggtgcccccttaccagggtgggcctcctcgacctccgatgggaatgagacctcctgtaatgtcgcaaggtggccgttactgatcttacttcatccagtctaataggtttggagattaaaccttttctcaacttgtgctgtttatatagccaagcttccgtcaataaggcttcattgtgactttaacaaacattatcttcccacataccaggaactattggacatttattttacatgggaaaaattatttggaataataaagcaggaacttttcctgaagttgcaatttatactgtatggcttctttttcatgtttcatctaggtttttagaagtgaagtatagtaaatttggttcgttaaattgtgaaggcgctggaattacatgaacataccaccctagtaaaggcaagttctgtaagcttacattgctatttgtaaagtttgccttcacagcatttcagatgctgttggacttcatgtccccaacctagcttggtgagggctgtaactgtttccaagtacttgtacattggaagtctgaatgtgtaacaatatttaatgtatttagagttcctcatgttgcagggtttaagaaatctgacccaccaaggtcatgtgacttttctgtactgttaaacttcattgtaataaaatgagagaaaaatttatgcctttttattcataacccagctgtggaccactgcctgaaaggtttgtacagatgcatgccacagtagatgtccacataataaaattcatagttaccaatgcaataaaaaaaaaaaaaaaa

SEQ ID NO: 6310 - DNA, 600 bp, Homo sapiens
attgtttcccctagtgccctcttttccctagggcattgctctcctattcccacgccttaacacagctctatacctagaagcagccagcccaggcatgcagtcacatttaatcacatcccccttctagagtgcttcaaaatgatgtagtccctcaacttggctaaagaatctcaatctcttgaaatttatttttttaatgtcatattcatctggtaaatatctactgtttgccaggcatttaagaatatggcaaagaacataaaagatggtgtcaccagattttggtcaccaatgagtacccgacccgttgccatgattaagagagaatgctttctattggagtttcaggaaatataatttgagaatactttaaagggaagtggaagtataagtgaatgatatttttcttttacatgtaaacaatgaagttatttcaaagttaagttttaaacaaaatacatgaagtagtgtctgccatacatgttaatattctacattcttgcttccttaaattaatatgtttgtgtgtatatatgtgcctcacacctgaattgaaaattaaagactggtttaaaagtggttaaaaaaaaaaaaaaaaaa

SEQ ID NO: 6311 - DNA, 1400 bp, Homo sapiens
atttgtggttacgttatcaaatagaatgaattattttcaggttgcaaagacagttgcacagaggctcaacacagatccaatgttgctgcagtttttcaagtctcaaggttatagggatggcccaggtaatcctcttagacataattatgaaggtactttaagagatcttctacagttcttcaagcctagacaacctaagaaactttactatcagcagcttaagatgaaaatcacagactttgagaacaggcgaagttttaaatgtatatggttaaacagccaatttagggaagaggaaataacactatatccagacaagcatgggtgtgtccgggacctgttagaagaatgtaaaaaggccgtggagcttggggagaaagcatcagggaaacttaggctgctagaaattgtaagctacaaaatcattggtgttcatcaagaagatgaactattagaatgtttatctcctgcaacgagccggacgtttcgaatagaggaaatccctttggaccaggtggacatagacaaagagaatgagatgcttgtcacagtggcgcatttccacaaagaggtcttcggaacgttcggaatcccgtttttgctgaggatacaccagggcgagcattttcgagaagtgatgaagcgaatccagagcctgctggacatccaggagaaggagtttgagaagtttaaatttgcaattgtaatgacgggccgacaccagtacataaatgaagacgagtatgaagtaaatttgaaagactttgagccacagcccggtaatatgtctcatcctcggccttggctagggctcgaccacttcaacaaagccccaaagaggagtcgctacacttaccttgaaaaggccattaaaatccataactgatttccaagctggtgtgttcaaggcgaggacggtgtgtgggtggccccttaacagcctagaactttggtgcacgtgccctctagccgaagtcttcagcaagaggattcgctgctggtgttaattttattttattgaggctgttcagtttggcttctctgtatctattgactgccctttttgagcaaaatgaagatgtttttataaagcttggatgccaatgagagttattttatggtaaccacagtgcaaggcaactgtcagcgcaatgggggagaagaggttagtggatcgggggtccctggctcaaggtctctgggctgtccctagtgggcacgagtggctcggctgccttcctggggtcccgtgcaccagccctgcagctagcaagtcttgtgtttaggctcgtctgacctatttccttcagttatactttcaatgaccttttgtgcatctgttaaggcaaaacagagaaactcacaacctaataaatagcgctcttcccttcaaaaaaaaa

SEQ ID NO: 6312 - DNA, 1400 bp, Homo sapiens
  misc_feature (441)..(441): n is a, c, g, or t
cttgagtgttatgtgaatttgagtttgctgttttaaattgcatttctatgccatttttagtttaaaatcttgcatggcattaattgttccttgcttttatagttgtattttgtacattttggatttctttatataaggtcatagattcttgagctgttgtggtttttagtgcacttaatattagcttgcttaaggcatacttttaatcaagtagaacaaaaactattatcaccaggatttatacatacagagattgtagtatttagtatatgaaatattttgaatacacatctctgtcagtgtgaaaattcagcggcagtgtgtccatcatattaaaaatatacaagctacagttgtccagatcactgaattggaacttttctcctgcatgtgtatatatgtcaaattgtcagcatgacaaaagtgacagatgttattttngtatttttaaaaaacaattggttgtatataaagtttttttatttcttttgtgcagatcactttttaaactcacataggtaggtatctttatagttgtagactatggaatgtcagtgttcagccaaacagtatgatggaacagtgaaagtcaattcagtgatggcaacactgaaggaacagttaccctgctttgcctcgaaagtgtcatcaatttgtaattttagtattaactctgtaaaagtgtctgtaggtacgttttatattatataaggacagaccaaaaatcaacctatcaaagcttcaaaaactttgggaaagggtgggattaagtacaagcacatttggcttacagtaaatgaactgatttttattaactgcttttgcccatataaaatgctgatatttactggaaacctagccagcttcacgattatgactaaagtaccagattataatgccagaatataatgtgcaggcaatcgtggatgtctctgacaaagtgtgtctcaaaaataatatacttttacattaaagaaatttaatgtttctctggagttggggctcttggctttcagagtttggttaatcagtgttgattctagatgatcaacataatggaccactcctgaatgagacttaattttgtctttcaaatttactgtcttaaatcagtttattaaatctgaattttaaaacatgctgtttatgacacaatgacacatttgttgcaccaattaagtgttgaaaaatatctttgcatcatagaacagaaatatataaaaatatatgttgaatgttaacaggtattttcacaggtttgtttcttgatagttactcagacactagggaaaggtaaatacaagtgaacaaaataagcaactaaatgagacctaataattggccttcgattttaaatatttgttcttataaaccttgtcaataaaaataaatctaaatca

SEQ ID NO: 6313 - DNA, 600 bp, Homo sapiens
tactcagataaggtaaaatgccatgatgcctctgtcttctggactggttttcacattagaagacaattgacaacagttacataattcactctgagtgttttatgagaaagccttcttttggggtcaacagttttcctatgctttgaaacagaaaaatatgtaccaagaatcttggtttgccttccagaaaacaaaactgcatttcactttcccggtgttccccactgtatctaggcaacatagtattcatgactatggataaactaaacacgtgacacaaacacacacaaaagggaacccagctctaatacattccaactcgtatagcatgcatctgtttattctatagttattaagttctttaaaatgtaaagccatgctggaaaataatactgctgagatacatacagaattactgtaactgattacacttggtaattgtactaaagccaaacatatatatactattaaaaaggtttacagaattttatggtgcattacgtgggcattgtctttttagatgcccaaatccttagatctggcatgttagcccttcctccaattataagaggatatgaaccaaaaaaaaaaaaaaaaaaa

SEQ ID NO: 6314 - DNA, 1400 bp, Homo sapiens
aaatttttattttaggacttgtactctgaattttcaggaaccgtcaaaggagcagcagcaaattcacatattttcgacttgagaaatgcttgtggtatgtgttttccaaactgccccctatatgtaaagttcagtttaaccactgattgccttgttattactaggttttttgagattaaaaaaaaaaaatccctggtttaaaaccaacaatgatgcctagtgagtatgtgtccacaggccataacagggtagaagagagacatcgtgcaacccaatgagtagtgaagggactgtgttgcttgtgaagcggtgtagtagcatttttgcagattcttggctgggtttagtgtactgatctagaaaagctgtttttctgctcctttgtggaaggcagttatgatcaggctgcatggacaaagcaggtagaggggcaccatcaggggctcttgcactattttcacctctaaatattacgtactcagtagtgccctgcttctagggctctgaatacgggcttaaagtcatcttgtcctgctggaatttgctgtgcagagccataagcctcccattttgttagcgtcagctaggccaataggaacagaccgggaccttgtctcacactgatgatacctcacatgttgaccggctatgtgaactgcctatttcctatgctggagttttgatttttaactaaacgcaaatctgtagattctctcctctcccatcccagaaaacaaaacaaaataatgcttttcgaaattgtttctaggactttaaaacataatggtatatccaaaattctttatttcagaatgcaacaatagattccattaatatagactcaagatcaaaacagcatacctgctaagctaagatagatggtgttgattccactgggttttgatcaatacaataacaaacctttttcctttgacatactctgaattttgttgtttggggggagggggtgtgtgtgtgtgtgtgtgtgtgtgtgtgtattgtgtgtgtgtgtgtgtgcacgcgcagtgtccatcagtatcagtgcctgcctgagttaggaaaattacattcctggttctgtattgaggagaaggatgtataaagcaacatgaaacattagccctccttttattttaaagactaatgttaattgttcttaaaactggattttttttccttaaagcaatttttttcttttcgatttaatgaagtattgctagctgaagccagtttgacatagagagatgtcagattgatttgaaaggtgtgcagcctgatttaaaaccaaaccctgaacccttttaaagaacaataaaacatattttacacgctcaaaaaaaaaaaaaaaaaaaaaaaaaaaaaaaaaaaaaaaaaaaaaaaaaaaaaaaaaaaaaaaaaaa

SEQ ID NO: 6315 - DNA, 1400 bp, Homo sapiens
tcagtagctgtcaagaccacacgatttgcctcattccctgactacctggtcatccagatcaagaagttcaccttcggcttagactgggtgcccaagaaactggatgtgtccatcgagatgccagaggagctcgacatctcccagttgaggggcacagggctgcagcccggagaggaggagctgccagacattgccccacccctggtcactccggatgagcccaaagcgcccatgctggatgaatcagtcatcatccagctggtggagatgggattccctatggacgcctgccgcaaagctgtctactacacggacaacagcggggctgaggccgccatgaactgggtcatgtcacacatggatgatccagattttgcaaaccccctcatcctgcctggctctagtgggccgggctccacaagcgcagcagccgacccccctcctgaggactgtgtgaccaccattgtctccatgggcttctcccgggaccaggccttgaaagcgctgcgggccacgaacaatagtttagaacgggctgtggactggatcttcagtcacattgacgacctggatgctgaagctgccatggacatctcagagggccgctcagctgccgactccatctctgagtctgtgccagtgggacctaaagtccgggatggtcctggaaagtatcagctctttgccttcattagtcacatgggcacctctaccatgtgtggtcactacgtctgccacatcaagaaagaaggcagatgggtgatctacaatgaccagaaagtgtgtgcctccgagaagccgcccaaggacctgggctacatctacttctaccagagagtggccagctaagagcctgcctcaccccttaccaatgagggcaggggaagaccacctggcatgagggagaggggctgagggatggacttcagcccctctgctctgtaccctttttccttttgtccccggcagcagggaagaagctggaggccgtgggagaatggctgggcagagcagaggggcagcgatagactctggggatggagcaggacggggacgggaggggccggccacctgtctgtaaggagactttgttgcttcccctccccccggaatccacagtgctctgcttctctgtgtcgccccgcccagccccctggtgtggagggaggggtctcgtttgtgcgcgtgggtgtagctttgtgcatcctctcccagtggagcgatcacctgtgcctcccctccccctttgtttgcccctgtgtggttggtcaaggagggatgtgagggaaatagggaccccccgacttgccctcctgcctcagtctttcccccaccctgtctcttccttgtccttctctggaaatgccaaaatacacgatgtgaataaaagtacaacggct

SEQ ID NO: 6316 - DNA, 1400 bp, Homo sapiens
tcgctcctaggttcttaaggataattttcctcaatcacactacacatcacacaagatttgactgtaatatttaaatattaccctccaagtctgtacctcaaatgaattctttaaggagatggactaattgacttgcaaagacctacctccagacttcaaaaggaatgaacttgttacttgcagcattcatttgttttttcaatgtttgaaatagttcaaactgcagctaaccctagtcaaaactatttttgtaaaagacatttgatagaaaggaacacgtttttacatacttttgcaaaataagtaaataataaataaaataaagccaaccttcaaagaacttgaagctttgtaggtgagatgcaacaagccctgcttttgcataatgcaatcaaaaatatgtgtttttaagattagttgaatataagaaaatgcttgacaaatattttcatgtattttacacaaatgtgatttttgtaatatgtctcaaccagatttattttaaacgcttcttatgtagagtttttatgcctttctctcctagtgagtgtgctgactttttaacatggtattatcaactgggccaggaggtagtttctcatgacggcttttgtcagtatggcttttagtactgaagccaaatgaaactcaaaaccatctctcttccagctgcttcagggaggtagtttcaaaggccacatacctctctgagactggcagatcgctcactgttgtgaatcaccaaaggagctatggagagaattaaaactcaacattactgttaactgtgcgttaaataagcaaataaacagtggctcataaaaataaaagtcgcattccatatctttggatgggccttttagaaacctcattggccagctcataaaatggaagcaattgctcatgttggccaaacatggtgcaccgagtgatttccatctctggtaaagttacacttttatttcctgtatgttgtacaatcaaaacacactactacctcttaagtcccagtatacctcatttttcatactgaaaaaaaaagcttgtggccaatggaacagtaagaacatcataaaatttttatatatatagtttatttttgtgggagataaattttataggactgttctttgctgttgttggtcgcagctacataagactggacatttaacttttctaccatttctgcaagttaggtatgtttgcaggagaaaagtatcaagacgtttaactgcagttgactttctccctgttcctttgagtgtcttctaactttattctttgttctttatgtagaattgctgtctatgattgtactttgaatcgcttgcttgttgaaaatatttctctagtgtattatcactgtctgttctgcacaataaacataacagcctctgtga

SEQ ID NO: 6317 - DNA, 1400 bp, Homo sapiens
ttgctggagccccaccgcttccagtaccccgagcgccccatcatcttcctctccatgtgctacaacgtctactcgctggccttcctgatccgtgcggtggccggagcgcagagcgtggcctgtgaccaggaggcgggcgcgctctacgtgatccaggagggcctggagaacacgggctgcacgctggtcttcctactgctctactacttcggcatggccagctcgctctggtgggtggtcctgacgctcacctggttcctggctgccgggaagaaatggggccacgaggccatcgaggcccacggcagctatttccacatggctgcctggggcctgcccgcgctcaagaccatcgtcatcctgaccctgcgcaaggtggcgggtgatgagctgactgggctttgctacgtggccagcacggatgcagcagcgctcacgggcttcgtgctggtgcccctctctggctacctggtgctgggcagtagtttcctcctgaccggcttcgtggccctcttccacatccgcaagatcatgaagacgggcggcaccaacacagagaagctggagaagctcatggtcaagatcggggtcttctccatcctctacacggtgcccgccacctgcgtcatcgtttgctatgtctacgaacgcctcaacatggacttctggcgccttcgggccacagagcagccatgcgcagcggccgcggggcccggaggccggagggactgctcgctgccagggggctcggtgcccaccgtggcggtcttcatgctcaaaattttcatgtcactggtggtggggatcaccagcggcgtctgggtgtggagctccaagactttccagacctggcagagcctgtgctaccgcaagatagcagctggccgggcccgggccaaggcctgccgcgcccccgggagctacggacgtggcacgcactgccactataaggctcccaccgtggtcttgcacatgactaagacggacccctctttggagaaccccacacacctctagccacacaggcctggcgcggggtggctgctgccccctccttgccctccacgccctgccccctgcatcccctagagacagctgactagcagctgcccagctgtcaaggtcaggcaagtgagcaccggggactgaggatcagggcgggaccccgtgaggctcattaggggagatgggggtctcccctaatgcgggggctggaccaggctgagtccccacagggtcctagtggaggatgtggaggggcggggcagaggggtccagccggagtttatttaatgatgtaatttattgttgcgttcctctggaagctgtgactggaataaacccccgcgtggcactgctgatcctctctggctgggaagggggaaggtaggaggtgaggc

SEQ ID NO: 6318 - DNA, 600 bp, Homo sapiens
aacctgtccgtggagaacgctgcagaaattctcatcctggccgacctccacagtgcagatcagttgaaaactcaggcagtggatttcatcaactatcatgcttcggatgtcttggagacctctgggtggaagtcaatggtggtgtcacatccccacttggtggctgaggcataccgctctctggcttcagcacagtgcccttttctgggacccccacgcaaacgcctgaagcaatcctaagatcctgcttgttgtaagactccgtttaatttccagaagcagcagccactgttgctgccactgaccaccaggtagacagcgcaatctgtggagcttttactctgttgtgaggggaagagactgcattgtggccccagacttttaaaacagcactaaataacttgggggaaacggggggagggaaaatgaaatgaaaaccctgttgctgcgtcactgtgttccctttggcctgtctgagtttgatactgtggggattcagtttaggcgctggcccgaggatatcccagcggtggtacttcggagacacctgtctgcatctgactgagcagaacaaatcgtcaggtgcctggagcaaaaagg

SEQ ID NO: 6319 - DNA, 600 bp, Homo sapiens
tggttccctggctgagccctacgaggagctggaggcggaggagtgcgggatcctggacggctgcaccaacgaccgctgcgtgcgcgtccccgaaggcttcacctgccgttgcttcgacggctaccgcctggacatgacccgcatggcctgcgttgacatcaacgagtgtgatgaggccgaggctgcctccccgctgtgcgtcaacgcgcgttgcctcaacacggatggctccttccgctgcatctgccgcccgggattcgcacccacgcaccagccgcaccactgtgcgcccgcacggccccgggcctgagccctggcacccgctggccacccacccgcgcccgccactcggggcccctgccgcgcatcctgcagcccgcttatgcgtatgtgcacggggccgcccgcctggacctggagaagggacctacggacgcctggaagctgcgacgccctgcactgctcccgcctccaccagcgcctcccactgatgtcgtggtcccgggcctggcccaggggcccctttacatgccctctcccttttataaaattttccattaaaaaccacctattttctaaaaaaaaaaaaaaaaaaaaaaa

SEQ ID NO: 6320 - DNA, 1400 bp, Homo sapiens
gacgcggaaacagatggccaagcctcggggggcagtgattctggggactggatcttcacaatccgagaaaaagatcccaagaatctcgagaatggagctcttcagccatcggacttggacagaaataagatgaaagacatcccaaagaggcctttctctcagtgtttatctacaattatttctcctctgtttgcagagttgaaggagaagagccaggcgtgcggagggaacttggggtccattgaagagctgcgaggggccatctacctagcggaggaggcgtgccctggcatctccgacaccatggtggcccagctcgtgcagcggctccagagatactctctaagtggtggaggaacttcatcccactgaaattcctttggcatttggggttttgtttttccttttttccttcttcatcctcctccttttttaaaagtcaacgagagccttcgctgactccaccgaagaggtgcgccactgggagccaccccagcgccaggcgcccgtccagggacacacacagtcttcactgtgctgcagccagatgaagtctctcagatgggtggggagggtcagctccttccagcgatcattttattttattttattacttttgtttttaattttaaccatagtgcacatattccaggaaagtgtctttaaaaacaaaaacaaaccctgaaatgtatatttgggattatgataaggcaactaaagacatgaaacctcaggtatcctgctttaagttgataactccctctggagcttggagaatcgctctggtggatgggtgtacagatttgtatataatgtcatttttacggaaaccctttcggcgtgcataaggaatcactgtgtacaaactggccaagtgcttctgtagataacgtcagtggagtaaatattcgacaggccataaacttgagtctattgccttgcctttattacatgtacattttgaattctgtgaccagtgatttgggttttattttgtatttgcagggtttgtcattaataattaatgcccctctcttacagaacactcctatttgtacctcaacaaatgcaaattttccccgtttgccctacgccccttttggtacacctagaggttgatttcctttttcatcgatggtactatttcttagtgttttaaattggaacatatcttgcctcatgaagctttaaattataattttcagtttctccccatgaagcgctctcgtctgacatttgtttggaatcgtgccactgctggtctgcgccagatgtaccgtcctttccaatacgattttctgttgcaccttgtagtggattctgcatatcatctttcccacctaaaaatgtctgaatgcttacacaaataaattttataacacgcttaaaaaaaaaaaaaa

SEQ ID NO: 6321 - DNA, 600 bp, Homo sapiens
gagaagggggagaccatggaggtgattgagaagccggagaacgaccccgagtggtggaaatgcaaaaatgcccggggccaggtgggcctcgtccccaaaaactacgtggtggtcctcagtgacgggcctgccctgcaccctgcgcacgccccacagataagctacaccgggccctcgtccagcgggcgcttcgcgggcagagagtggtactacgggaacgtgacgcggcaccaggcgcagtgcgccctcaacgagcggggcgtggagggcgacttcctcattagggacagcgagtcctcgcccagcgacttctccgtgtcccttaaagcgtcagggaagaacaaacacttcaaggtgcagctcgtggacaatgtctactgcattgggcagcggcgcttccacaccatggacgagctggtggaacactacaaaaaggcgcccatcttcaccagcgagcacggggagaagctctacctcgtcagggccctgcagtgacggcgccccggccccacactcgcctcccgggccccacggtggagctgcccgcccggccttgtggcagaggctcctcccgcggggacggccccgacggcttctctg

SEQ ID NO: 6322 - DNA, 600 bp, Homo sapiens
acacaggaggtattcttggaatgtgaagcccaatgccagtcgggcagcccaggatagaagaaggtggtatccttataattactccagactctcctatccagcctgttgggaatggacccagtgatacaaacctgtcctggaattctacctggagaccagagctggcctgaaaattactggtgtgacttttaattagttcaggtctaatcaggtttctttattgttcccttatgtattcaagcttaaggaaaaattgcattgctgtttacctctttgctgataaatttgcagtaattacagcattgcaggaaaaacaatctgttattccagtcttaaatttttctaaaagaagacaatattttagaactgaagcattgagaacttcccttgcaaattatttttaaaattctatcttgtttttctatgtatttctttctgactagacttgtgatatgcgtgtgtttatgtacagaaatttttagtgtttttgttatgttctgttattgacccaaaggccatctttattttctataactgttcaaaatttatattaaaatctacttaggagataatttctttagaaaaaaaaaaaaaaaaaaa

SEQ ID NO: 6323 - DNA, 1400 bp, Homo sapiens
attaatgatcagttgtactagaggaacatcatagaagagaaaaatccaactctttatattaaaaatgaatacaataagaaaattgcaaaagagaccaaaatgaacgtgttttgtaaattgttacaggagcaaaaactttgcaactagttttcaacatactttagactttaaatgttgtttggacagttttgtcttcaacttggaccaattgtagattgttacaggcttcctaggatttagcattcctattttctctaccaaagttttttttagaagcatcccaactcttctctttgttgataaataagcctttcctgtcatcttcattttaacttgctaaaaccctagatacaaaggtcctccctcatttttcccacagagcccctgtttgggaatttgagattctgtgtcatgctggttttcctttcagaattgcttgaaatcgagttctcttagccactggacacctagttttcaggagaatgtcccaagattgtttatatatacaaaatggcaaaagtactgtttttcgaattgataattcaagcaaaggcttctctttactgtcactgatttttttttgtttttattttgtttccttgtttctatttccttgaagctttgaagggaggagaagcagaaaattttgtttatgtttgttaaaaatcagaactacttaatgctttttgccacagcatatttccttgcctgttggagccgttaggaagattacctatgtcctaatcttcaacctgagaagatttttgactcttgtgtctactgttgattgtttgcttgagttctcaaagacctgtggccaggtattttaaaaagtcgtctatttctttctagttgcatcaacttgcacactggtgtctaactatatgtggtattcggaacttgtaattcttattgagcagccattgcctatattttctcagctcctcactgatttctttatatgagctcagctgacaagcaaatgcagctattttgtttaccctctcttcataccggaccatcaacaacagtgttctaactcatccctgatggtctgtgagatgtagactattacacaagattcaagttactcgtaagcaacttttagatagagttggtcctgttaggaggagactcttgatgtcaccttcagtatcttgaaagcgggtcccctccccgaggctcttaattctttgaaaacttgatgctgtttcagctgaaaaattagcaagactgttaaaaaaaaaaagttgaggggagctgtttaagaaactgaaaagtaattgcaaactacattggataattgtgactttcagttgttgttctgtatcagttgaatttttgtgctcttttccctgtgtacgtggtggttctatttttctccaataaaacttttattt

SEQ ID NO: 6324 - DNA, 1400 bp, Homo sapiens
cccaactcagctgaggagagcaatgggcccatctatgcctttgagaacctccgggcatgtgaagaggcaccacccagtgcagcccacttccggttctaccagattgagggggatcgatatgactacaacacagtccccttcaacgaagatgaccctatgagctggactgaagactatctggcatggtggccaaagccgatggaattcagggcctgctatatcaaggtgaagattgtggggccactggaagtgaatgtgcgatcccgcaacatggggggcactcatcggcggacagtggggaagctgtatggaatccgagatgtgaggagcactcgggacagggaccagcccaatgtctcagctgcctgtctggagttcaagtgcagtgggatgctctatgatcaggaccgtgtggaccgcaccctggtgaaggtcatcccccagggcagctgccgtcgagccagtgtgaaccccatgctgcatgagtacctggtcaaccacttgccacttgcagtcaacaacgacaccagtgagtacaccatgctggcacccttggacccactgggccacaactatggcatctacactgtcactgaccaggaccctcgcacggccaaggagatcgcgctcggccggtgctttgatggcacatccgatggctcctccagaatcatgaagagcaatgtgggagtagccctcaccttcaactgtgtagagaggcaagtaggccgccagagtgccttccagtacctccaaagcaccccagcccagtcccctgctgcaggcactgtccaaggaagagtgccctcgaggaggcagcagcgagcgagcaggggtggccagcgccagagtggagtggtggcctctctgagatttcctagagttgctcaacagcccctgatcaactaagttttgtggtacttcaccctcttctgccctcatttcatgtgacagccattgtgagactgatgcacaaactgtcacttggttaatttaagcacttctgttttcgtgaatttgcttgtttgtttcttcatgcctttacttactttgtcccatgctactgattggcacgtggcccccacaatggcacaataaagcccctttgtgaaactgttctttaaatgaaacacaagaaattggccactggtaaaactctgcagcttcaactgtacttcatttaatgccattaatgcaaatatacttcctcttctttttgcatggttttgcccacctctgcaatagtgataatctgatgctgaagatcaaataaccaatataaagcatatttcttggccttgctccacaggacataggcaagccttgatcatagttcatacatataaatggtggtgaaataaagaaataaaacacaatacttttactggaaaaaaaaaaaa

SEQ ID NO: 6325 - DNA, 1400 bp, Homo sapiens
aaccctgcatttcccattaatctacatatcttcccacagcagctttgctcagtgatacccacatgggaaaaatcccaggggatgttgcttactctttttgcccacactgctttggatacttatctactgtccgaaggccttctttccccactcaattcttcctgccctgttattaattaagatatcttcagcttgtagtcagacccaatcagaatcacagaaaaatcctgcctaaggcaaagaaatataagacaagactatgatatcaatgaatgtgggttaagtaatagatttccagctaaattggtctaaaaaagaatattaagtgtggacagacctatttcaaaggagcttaattgatctcacttgttttagttctgatccagggagatcacccctctaattatttctgaacttggttaataaaagtttataagatttttatgaagcagccactgtatgatattttaagcaaatatgttatttaaaatattgatccttcccttggaccaccttcatgttagttgggtattataaataagagatacaaccatgaatatattatgtttatacaaaatcaatctgaacacaattcataaagatttctcttttataccttcctcactggccccctccacctgcccatagtcaccaaattctgttttaaatcaatgacctaagatcaacaatgaagtattttataaatgtatttatgctgctagactgtgggtcaaatgtttccattttcaaattatttagaattcttatgagtttaaaatttgtaaatttctaaatccaatcatgtaaaatgaaactgttgctccattggagtagtctcccacctaaatatcaagatggctatatgctaaaaagagaaaatatggtcaagtctaaaatggctaattgtcctatgatgctattatcatagactaatgacatttatcttcaaaacaccaaattgtctttagaaaaattaatgtgattacaggtagaggccttctaggtgagacacttttaaggtacactgcattttgcagaaaaaaaaaaaaaaaagtaatcttttagcaaccccagtattccttcactatttcgcttcctgcattagcaaattttacttacagtcaaaagtgcagatttatactcctgacgtgtctcattcacagctaaataataggccataggacttttggtaggtttaaacttttaattctgtatttcatgattataagtcttgctagaattttttctaatctttagtagatttgattaaataatgattcacagaatttagtaacagaatcaaactaagccatgtatgagggtaatcgagatgaggatattaactcaaaagaaatagggtgatttttaaaggattaataaaattctgaaatgttaagtag

SEQ ID NO: 6326 - DNA, 600 bp, Homo sapiens
tgacaacaaatggcaagatctgtttttgctttgtgttgtggtaaaaaattgtgtaccccctgctgcttttgagaaatttgtgaacattttcagaggcctcagtgtagtggaagtgataatccttaaatgaacattttctaccctaatttcactggagtgacttattctaagcctcatctatcccctacctatttctcaaaatcattctatgctgattttacaaaagatcatttttacatttgaactgagaaccccttttaattgaatcagtggtgtctgaaatcatattaaatacccacatttgacataaatgcggtaccctttactacactcatgagtggcatatttatgcttaggtcttttcaaaagacttgacaagaaatcttcatattctctgtagcctttgtcaagtgaggaaatcagtggttaaagaattccactataaacttttaggcctgaataggagtagtaaagcctcaaggacatctgcctgtcacaatatattctcaaagtgatctgatatttggaaacaagtatccttgttgagtaccaagtgctacagaaaccataagataaaaatactttctacctacagcgtgc

SEQ ID NO: 6327 - DNA, 600 bp, Homo sapiens
caaacttccgggtgacttcttctatgtcttccccctctatgcagccaaagaagatgcagatggacggcaatgtatcaggaacacagaggttggattctgctacagtcaggacttactcctgctaaagtctcctgttgtttacccacactacttctacagatgattatgcagcatttgaatccaacaaagactacattttggaaccagtggaatctttaatcttgttaatacttgttatatggaccctaagatattttattacagagtttttaattagtgaaaaattcatgaataccatagagaaaatattttagaatttaatgtttcttatatttatgtaaacttatgactcttcatttatatagttacttactttttcatgtatatccaggctataaatatcctttcaaatcatgttcttatacctaattttagtctttcaaatgaatgtactgtaatgcttgtatgtataaatcctatgaatagagggcttttgtaaattatgcatttattgtaattatcattaattttttaatgataaaccatgacaaaggattttacgtttataaaattatgacagaagccatgtgccccgaattc

SEQ ID NO: 6328 - DNA, 600 bp, Homo sapiens
agtccctgacggtggtcagcacctttgagctgggaaccgaagagggcagtgtcctacagctgactgaagcctcccgttggagtgagagcctcttggaggtggttcagacccggcctatcctcatctccctgtggatcctcataggcagtgtcctgggagggttgctcctgcttgctctccttgtcttctgcctgtggaagcttggcttctttgcccataagaaaatccctgaggaagaaaaaagagaagagaagttggagcaatgaatgtagaataagggtctagaaagtcctccctggcagctttcttcaagagacttgcataaaagcagaggtttgggggctcagatgggacaagaagccgcctctggactatctccccagaccagcagcctgacttgacttttgagtcctagggatgctgctggctagagatgaggctttacctcagacaagaagagctggcaccaaaactagccatgctcccaccctctgcttccctcctcctcgtgatcctggttccatagccaacactggggcttttgtttggggtccttttatccccaggaatcaataatttttttgcctaggaaaaaaaaaa

SEQ ID NO: 6329 - DNA, 1400 bp, Homo sapiens
tggcagcccagcttaactttaccaaagaccagctggtgggcctcggcagaactctggcaggaaagctggttgagcagaggaagcacattgatgcggccatggttttggaagagtgtgcccaggattatgaagaagctgtgctcttgctgttagaaggagctgcctgggaagaagctttgaggctggtatacaaatataacagactggatattatagaaaccaacgtaaagccttccattttagaagcccagaaaaattatatggcatttctggactctcagacagccacattcagtcgccacaagaaacgtttattggtagttcgagagctcaaggagcaagcccagcaggcaggtctggatgatgaggtaccccacgggcaagagtcagacctcttctctgaaactagcagtgtcgtgagtggcagtgagatgagtggcaaatactcccatagtaactccaggatatcagcgagatcatccaagaatcgccgaaaagcggagcggaagaagcacagcctcaaagaaggcagtccgctggaggacctggccctcctggaggcactgagtgaagtggtgcagaacactgaaaacctgaaagatgaagtataccatattttaaaggtactctttctctttgagtttgatgaacaaggaagggaattacagaaggcctttgaagatacgctgcagttgatggaaaggtcacttccagaaatttggactcttacttaccagcagaattcagctaccccggttctaggtcccaattctactgcaaatagtatcatggcatcttatcagcaacagaagacttcggttcctgttcttgatgctgagctttttataccaccaaagatcaacagaagaacccagtggaagctgagcctgctagactgagtgactgcagttaggagggatccgacagagaagaccatttccactcattcctgttgtcctaccaccccttgctctttgagggctggctattgagaactggaaagagtaaaatgataacttaccttagcattgccaagaacttcagcagacaacaagcaattctatttattttatgttgtgtatacatcttgatcattagcaagacattaagctttaaccattatggcaccattttgtgagaatgattgttctttcacttgggctgtttgagagcataattatggtaatcatgagattaatgtttcatgatttctacctccaaagtgtgaagacaagtaaaacaatgtttctaaattgtcttattttgttggcggagaagattacaatggctattagtgctacatttggtcaaatgtaatcacttaaatagcttcttgtcaccttaaactaaagcagaataaaaagtatcctttgaaattaaaaaaaacaaaaaagctaaaa

SEQ ID NO: 6330 - DNA, 600 bp, Homo sapiens
ctgggggcccttccccagatacttgttcccaggaccttaactcacgtgtgaagccaggatttcctaaaacaataaagaccaatgacccaggagtcctccaagcagccagatacagtgttgaaaagttcaacaactgcacgaacgacatgttcttgttcaaggagtcccgcatcacaagggccctagttcagatagtgaaaggcctgaaatatatgctggaggtggaaattggcagaactacctgcaagaaaaaccagcacctgcgtctggatgactgtgacttccaaaccaaccacaccttgaagcagactctgagctgctactctgaagtctgggtcgtgccctggctccagcacttcgaggtgcctgttctccgttgtcactgacccccgcctcttcagcaagaccacagccatgacaaacaccaggatgcatgctccttgtcccctcccacccgcctcatgacccagcctcacagaccctctcaggcctctgacgagtgagcgggtgaagtgccactgggtcaccgcagggcagctggaatggcagcatggtagcacctcctaacagattaaatagatcacatttgcttctaaaatt

SEQ ID NO: 6331 - DNA, 600 bp, Homo sapiens
aattaccggcgtcgcccgcgtcctcctaacgctccttcacaagatggcaaagaggccaaggcaggtgaagcaccaactgagaaccctgctccacccacccagcagagcagtgctgagtaacaccaggctcctcaggcaccttcaccatcggcaggtgacctaaagaattaatgaccattcagaaataaagcaaaaagcaggccacaaccttaaccaacaccaaagaaacatccaagcaataaagtggaagactaaccaagatttggacattggaatgtttactgttattctttaagaaacatctacaaaaagaaaatgtcaacaaatttttccagcaagctgagaacctgggaattcctgcacggaagacaagagagtagcctctccagtttcagcaaccgctaggtttctattttttttcctggtttttactgttttggtaatatatatattgaaacaagaaatattaataccacatggggagaaccccaaccaaagaaatctgaaatatatagtaaatgcttttttttccgtttttgttcattttggatgctggtgctaaacctccaagtgtcatgatttaaaaaaaaaaaaaaaaaa

SEQ ID NO: 6332 - DNA, 600 bp, Homo sapiens
gtggagacggtgcaccggggcatcaaaggtgtggtgacagataaattcggcaagccagtcaaaaacgcccggatctcagtcaaaggcattcgccacgacatcaccacagccccagatggtgactactggagactgctgcccccaggtatccacattgtcattgcccaagcccctggctacgccaaagtcatcaagaaagtcatcatccccgcccggatgaagagggctggccgtgtggacttcattctgcaacctctggggatgggacccaagaactttattcatgggctgcggaggactgggccccacgacccgctgggaggtgccagctctttgggggaggccacggagcccgacccgctccgggcgcgcaggcagccctcggccgacgggagtaagccctggtggtggtcctacttcacatcgctgagcacccacaggccacgctggctgctcaagtactagccccggccccagcacccgccaggatgtggagaccgaggcccatctccgcatcccgggctcctggctcttgattttgtctgccacagacatcccacaaagccgctgccattttattaaagtgttttgatccacaaa

SEQ ID NO: 6333 - DNA, 600 bp, Homo sapiens
cagctattctctaaaccatatttatttagagtcagaatggagcgatttgtagtaacagcaccacctgctcgaaaccgttctaagactgctttgtatgtgactcccctggatcgagtcactgagtttggaggtgagctgcatgaagatggaggaaaactcttctgcacttcttgcaatgtggttctgaatcatgttcgcaagtctgccattagtgaccacctcaagtcaaagactcataccaagaggaaggcagaatttgaagagcagaatgtgagaaagaagcagaggcccctaactgcatctcttcagtgcaacagtactgcgcaaacagagaaagtcagtgttatccaggactttgtgaaaatgtgcctggaagccaacatcccacttgagaaggctgatcacccagcagtccgtgctttcctatctcgccatgtgaagaatggaggctccatacctaagtcagaccagctacggagggcatatcttcctgatggatatgagaatgagaatcaactcctcaactcacaagattgttgactaggaggttaccaccattgtgatcaagataaatgtggagtattaaagttatgtgttgat

SEQ ID NO: 6334 - DNA, 1400 bp, Homo sapiens
gttgcattgtgtatactgagataatctgaggcatggagagcagattcagggtgtgtgtgtgtgtgtgtgtgtgtgtgtgtatgtgcgtgtgcgtgcacatgtgtgcctgcgtgttggtataggactttaaagctccttttggcatagggaagtcacgaaggattgcttgacatcaggagacttgggggggattgtagcagacgtctgggcttttccccacccagagaatagcccccttcgatacacatcagctggattttcaaaagcttcaaagtcttggtctgtgagtcactcttcagtttgggagctgggtctgtggctttgatcagaaggtactttcaaaagagggctttccagggctcagctcccaaccagctgttaggaccccacccttttgcctttattgtcgacgtgactcaccagacgtcggggagagagagcagtcagaccgagctttctgctaacatggggaggtagcaggcactggcatagcacggtagtggtttggggaggtttccgcaggtctgctccccacccctgcctcggaagaataaagagaatgtagttccctactcaggctttcgtagtgattagcttactaaggaactgaaaatgggccccttgtacaagctgagctgccccggagggagggaggagttccctgggcttctggcacctgtttctaggcctaaccattagtacttactgtgcagggaaccaaaccaaggtctgagaaatgcggacaccccgagcgagcaccccaaagtgcacaaagctgagtaaaaagctgcccccttcaaacagaactagactcagttttcaattccatcctaaaactccttttaaccaagcttagcttctcaaaggcctaaccaagccttggcaccgccagatcctttctgtaggctaattcctcttgcccaacggcatatggagtgtccttattgctaaaaaggattccgtctccttcaaagaagttttatttttggtccagagtacttgttttcccgatgtgtccagccagctccgcagcagcttttcaagatgcactatgcctgattgctgatcgtgttttaactttttcttttcctgtttttattttggtattaagtcgttgcctttatttgtaaagctgttataaatatatattatataaatatattaaaaaggaaaatgtttcagatgtttatttgtataattacttgattcacacagtgagaaaaaatgaatgtattcctgtttttgaagagaagaataatttttttttctctagggagaggtacagtgtttatattttggagccttcctgaaggtgtaaaattgtaaatatttttatctatgagtaaatgttaagtagttgttttaaaatacttaataaaataattcttttcctgtggaag

SEQ ID NO: 6335 - DNA, 600 bp, Homo sapiens
gaggtcatcccatcccggctggatatccgtgtggggaaaatcatcactgtggagaagcacccagatgcagacagcctgtatgtagagaagattgacgtgggggaagctgaaccacggactgtggtgagcggcctggtacagttcgtgcccaaggaggaactgcaggacaggctggtagtggtgctgtgcaacctgaaaccccagaagatgagaggagtcgagtcccaaggcatgcttctgtgtgcttctatagaagggataaaccgccaggttgaacctctggaccctccggcaggctctgctcctggtgagcacgtgtttgtgaagggctatgaaaagggccaaccagatgaggagctcaagcccaagaagaaagtcttcgagaagttgcaggctgacttcaaaatttctgaggagtgcatcgcacagtggaagcaaaccaacttcatgaccaagctgggctccatttcctgtaaatcgctgaaaggggggaacattagctagccagcccagcatcttccccccttcttccaccactgagtcatctgctgtctcttcagtctgctccatccatcacccatttacccatctctcaggaca

SEQ ID NO: 6336 - DNA, 1331 bp, Homo sapiens; identical to SEQ ID NO: 1101

SEQ ID NO: 6337 - DNA, 600 bp, Homo sapiens
tctggctacactggacagcactgtgaaaagacagactttagtattctctatgtagtgccaagtaggcaaaagctcactcatgttcttattgcagcaattattggagctgtacagattgccatcatagtagcaattgtaatgtgcataacaagaaaatgccccaaaaacaatagaggacgtcgacagaagcaaaacctaggtcattttacttcagatacgtcatccagaatggtttaaactgatgacttttatatgtacactgaccatgtgtatgtacatttattatgtctttttttaaagaatggaaatatttatttcagaaggccttatttttggacattttatagtgtagtactgttggctcgatatttgaatattcagctacgacagttttggactgtttagtagtctttgttttatgtttttaaatacagaaattgcttcacaaatttgtaccacatggtaattctaagacttgttctttacccatggaatgtaatatttttgcaaagatggactacttcacaaatggttataaagtcatatccacttcttccacaatgaccacagcaaatgacccaagcatgaactaaagaagag

SEQ ID NO: 6338 - DNA, 1400 bp, Homo sapiens
atcatgaaacttcaggagacctagctacagagtatcttcaactaatggtgtacgtcactaaaaccagcatcaaaatcccaagttctcataccctgatgaaaggaggaagcaccaagtattggtcagggaattctgaattccatttttattccataaacgttggtggattttttaagttacggtctggagaggaaatcagcatcgaggtctccaacccctccttactggatccggatcaggatgcaacatactttggggcttttaaagttcgagatatagattgagccccagtttttggagtgttatgtatttcctggatgtttggaaacattttttaaaacaagccaagaaagatgtatataggtgtgtgagactactaagaggcatggccccaacggtacacgactcagtatccatgctcttgaccttgtagagaacacgcgtatttacagccagtgggagatgttagactcatggtgtgttacacaatggtttttaaattttgtaatgaattcctagaattaaaccagattggagcaattacgggttgaccttatgagaaactgcatgtgggctatgggaggggttggtccctggtcatgtgccccttcgcagctgaagtggagagggtgtcatctagcgcaattgaaggatcatctgaaggggcaaattcttttgaattgttacatcatgctggaacctgcaaaaaatactttttctaatgaggagagaaaatatatgtatttttatataatatctaaagttatatttcagatgtaatgttttctttgcaaagtattgtaaattatatttgtgctatagtatttgattcaaaatatttaaaaatgtcttgctgttgacatatttaatgttttaaatgtacagacatatttaactggtgcactttgtaaattccctggggaaaacttgcagctaaggaggggaaaaaaatgttgtttcctaatatcaaatgcagtatatttcttcgttctttttaagttaatagattttttcagacttgtcaagcctgtgcaaaaaaattaaaatggatgccttgaataataagcaggatgttggccaccaggtgcctttcaaatttagaaactaattgactttagaaagctgacattgccaaaaaggatacataatgggccactgaaatctgtcaagagtagttatataattgttgaacaggtgtttttccacaagtgccgcaaattgtacctttttttttttttcaaaatagaaaagttattagtggtttatcagcaaaaaagtccaattttaatttagtaaatgttatcttatactgtacaataaaaacattgcctttgaatgttaattttttggtacaaaaataaatttatatgaaaacctgaaaaaaaaaacaaaaaaaaaaa

SEQ ID NO: 6339 - DNA, 1400 bp, Homo sapiens
caagagtttcgtttatggaggctgcttgggcaacaagaacaactaccttcgggaagaagagtgcattctagcctgtcggggtgtgcaaggcccctccatggaaaggcgccatccagtgtgctctggcacctgtcagcccacccagttccgctgcagcaatggctgctgcatcgacagtttcctggagtgtgacgacacccccaactgccccgacgcctccgacgaggctgcctgtgaaaaatacacgagtggctttgacgagctccagcgcatccatttccccagtgacaaagggcactgcgtggacctgccagacacaggactctgcaaggagagcatcccgcgctggtactacaaccccttcagcgaacactgcgcccgctttacctatggtggttgttatggcaacaagaacaactttgaggaagagcagcagtgcctcgagtcttgtcgcggcatctccaagaaggatgtgtttggcctgaggcgggaaatccccattcccagcacaggctctgtggagatggctgtcgcagtgttcctggtcatctgcattgtggtggtggtagccatcttgggttactgcttcttcaagaaccagagaaaggacttccacggacaccaccaccacccaccacccacccctgccagctccactgtctccactaccgaggacacggagcacctggtctataaccacaccacccggcccctctgagcctgggtctcaccggctctcacctggccctgcttcctgcttgccaaggcagaggcctgggctgggaaaaactttggaaccagactcttgcctgtttcccaggcccactgtgcctcagagaccagggctccagcccctcttggagaagtctcagctaagctcacgtcctgagaaagctcaaaggtttggaaggagcagaaaacccttgggccagaagtaccagactagatggacctgcctgcataggagtttggaggaagttggagttttgtttcctctgttcaaagctgcctgtccctaccccatggtgctaggaagaggagtggggtggtgtcagaccctggaggccccaaccctgtcctcccgagctcctcttccatgctgtgcgcccagggctgggaggaaggacttccctgtgtagtttgtgctgtaaagagttgctttttgtttatttaatgctgtggcatgggtgaagaggaggggaagaggcctgtttggcctctctgtcctctcttcctcttcccccaagattgagctctctgcccttgatcagccccaccctggcctagaccagcagacagagccaggagaggctcagctgcattccgcagcccccacccccaaggttctccaacatcacagcccagcccacccactgggtaataaaagtggtttgtggaaa

SEQ ID NO: 6340 - DNA, 600 bp, Homo sapiens
ctgactgacattgccaagtattcaataggcagactgcggcctcacttcttggatgtttgtgatccagattggtcaaaaatcaactgcagcgatggttacattgaatactacatatgtcgagggaatgcagaaagagttaaggaaggcaggttgtccttctattcaggccactcttcgttttccatgtactgcatgctgtttgtggcactttatcttcaagccaggatgaagggagactgggcaagactcttacgccccacactgcaatttggtcttgttgccgtatccatttatgtgggcctttctcgagtttctgattataaacaccactggagcgatgtgttgactggactcattcagggagctctggttgcaatattagttgctgtatatgtatcggatttcttcaaagaaagaacttcttttaaagaaagaaaagaggaggactctcatacaactctgcatgaaacaccaacaactgggaatcactatccgagcaatcaccagccttgaaaggcagcagggtgcccaggtgaagctggcctgttttctaaaggaaaatgattgccacaaggcaagaggatgcatctttcttcctgg

SEQ ID NO: 6341 - DNA, 1400 bp, Homo sapiens
ggaccttccggaagcagcgagtgggaagacgaacagtctgagtattctgatatccggaggtgaaatgaaaggcctggccacgaaatctttcctccacgccgtccattttcttatctatggacattccaaaacatttaccattagagaggggggatgtcacacgcaggattctgtggggactgtggacttcatcgaggtgtgtgttcgcggaacggacaggtgagatggagacccctggggccgtggggtctcaggggtgcctggtgaattctgcacttacacgtactcaagggagcgcgcccgcgttatcctcgtacctttgtcttctttccatctgtggagtcagtgggtgtcggccgctctgttgtgggggaggtgaaccagggaggggcagggcaaggcagggcccccagagctgggccacacagtgggtgctgggcctcgccccgaagcttctggtgcagcagcctctggtgctgtctccgcggaagtcagggcggctggattccaggacaggagtgaatgtaaaaataaatatcgcttagaatgcaggagaagggtggagaggaggcaggggccgagggggtgcttggtgccaaactgaaattcagtttcttgtgtggggccttgcggttcagagctcttggcgagggtggagggaggagtgtcatttctatgtgtaatttctgagccattgtactgtctgggctgggggggacactgtccaagggagtggcccctatgagtttatattttaaccactgcttcaaatctcgatttcactttttttatttatccagttatatctacatatctgtcatctaaataaatggctttcaaacaaagcaactgggtcattaaaaccagctcaaagggggtttaaaaaaaaaaaaaccagcccatcctttgaggctgatttttcttttttttaagttctattttaaaagctatcaaacagcgacatagccatacatctgactgcctgacatggactcctgcccacttgggggaaaccttatacccagaggaaaatacacacctggggagtacatttgacaaatttcccttaggatttcgttatctcaccttgaccctcagccaagattggtaaagctgcgtcctggcgattccaggagacccagctggaaacctggcttctccatgtgaggggatgggaaaggaaagaagagaatgaagactacttagtaattcccatcaggaaatgctgaccttttacataaaatcaaggagactgctgaaaatctctaagggacaggattttccagatcctaattggaaatttagcaataaggagaggagtccaaggggacaaataaaggcagagagagagagagagagagggagaggaagaaaagagagagagaaaagagcctcgtgcc

SEQ ID NO: 6342 - DNA, 1400 bp, Homo sapiens
tcgctgcgggctgggccccagggtgtcccccatggcggggccgcgggtggaggtcgatggcagcatcatggaagggggcggccagatcctgagagtctctacggccttgagctgtctcctaggcctccccttgcgggtgcagaagatccgagccggccggagcacgccaggcctgaggcctcaacatttatctggactggaaatgattcgagatttgtgtgatgggcaactggagggggcagaaattggctcaacagaaataacctttacaccagagaagatcaaaggtggaatccacacagcagataccaagacagcagggagtgtgtgcctcttgatgcaggtctcaatgccgtgtgttctctttgctgcttctccatcagaacttcatttgaaaggtggaactaatgctgaaatggcaccacagatcgattatacagtgatggtcttcaagccaattgttgaaaaatttggtttcatatttaattgtgacattaaaacaaggggatattacccaaaagggggtggtgaagtgattgttcgaatgtcaccagttaaacaattgaaccctataaatttaactgagcgtggctgtgtgactaagatatatggaagagctttcgttgctggtgttttgccatttaaagtagcaaaagatatggcagcggcagcagttagatgcatcagaaaggagatccgggatttgtatgttaacatccagcctgttcaagaacctaaagaccaagcatttggcaatggaaatggaataataattattgctgagacctccactggctgtttgtttgctggatcatcgcttggtaaacgaggtgtaaatgcagacaaagttggaattgaagctgccgaaatgctattagcaaatcttagacatggtggtactgtggatgagtatctgcaagaccagctgattgttttcatggcattagccaatggagtttccagaataaaaacaggaccagttacactccatacgcaaaccgcgatacattttgctgaacaaatagcaaaggctaaatttattgtgaagaaatcagaagatgaagaagacgccgctaaagatacttatattattgaatgccaaggaattgggatgacaaatccaaatctatagagtatttgcctcttaaatgatacctcattgatatattgcactatttcataaatactataaaataatgactaggaagtaacttattaaaggctatgacttaaatttgaagatgaagtacagtgttctaggtttgctgagaaggcttcattaaattaatctcactttgaatatctcctgagagatggacaatgaaatatcagttggtggatatgtgtgatagctgatttcaatattgaagtattgaaataaaatattctttacacctgag

SEQ ID NO: 6343 - DNA, 600 bp, Homo sapiens
gaagatccaggaagagtcactgaggacctacctcttcacctacagcagtgtctatgactccatcagcatggagacgctgtcagacatgtttgagctggatctgcccactgtgcactccatcatcagcaaaatgatcattaatgaggagctgatggcctccctggaccagccaacacagacagtggtgatgcaccgcactgagcccactgcccagcagaacctggctctgcagctggccgagaagctgggcagcctggtggagaacaacgaacgggtgtttgaccacaagcagggcacctacgggggctacttccgagaccagaaggacggctaccgcaaaaacgagggctacatgcgccgcggtggctaccgccagcagcagtctcagacggcctactgagctctccactctgtttcccgcctgggccatccaaccttgaagtcctaaaccacacctcagtcactaaaggtctgtttaaagttgttctggttgattgcttgttgccacaaaggtgtgttgagcccattcatttgctgattatacttctgagctgctaccacatgacagacacaaggctcagatgaagaggtgaattgaac

SEQ ID NO: 6344 - DNA, 1231 bp, Homo sapiens; identical to SEQ ID NO: 1109

SEQ ID NO: 6345 - DNA, 1280 bp, Homo sapiens; identical to SEQ ID NO: 1110

SEQ ID NO: 6346 - DNA, 1400 bp, Homo sapiens
cgcgtcacagccgggatgaagccgatcctactgcagggccatgagcggtccattacgcagattaagtataaccgcgaaggagacctcctctttactgtggccaaggaccctatcgtcaatgtatggtactctgtgaatggtgagaggctgggcacctacatgggccataccggagctgtgtggtgtgtggacgctgactgggacaccaagcatgtcctcactggctcagctgacaacagctgtcgtctctgggactgtgaaacaggaaagcagctggcccttctcaagaccaattcggctgtccggacctgcggttttgactttgggggcaacatcatcatgttctccacggacaagcagatgggctaccagtgctttgtgagcttttttgacctgcgggatccgagccagattgacaacaatgagccctacatgaagatcccttgcaatgactctaaaatcaccagtgctgtttggggacccctgggggagtgcatcatcgctggccatgagagtggagagctcaaccagtatagtgccaagtctggagaggtgttggtgaatgttaaggagcactcccggcagatcaacgacatccagttatccagggacatgaccatgtttgtgaccgcgtccaaggacaacacagccaagctttttgactccacaactcttgaacatcagaagactttccggacagaacgtcctgtcaactcagctgccctctcccccaactatgaccatgtggtcctgggcggtggtcaggaagccatggatgtaaccacaacctccaccaggattggcaagtttgaggccaggttcttccatttggcctttgaagaagagtttggaagagtcaagggtcactttggacctatcaacagtgttgccttccatcctgatggcaagagctacagcagcggcggcgaagatggttacgtccgtatccattacttcgacccacagtactttgaatttgagtttgaggcttaagaagctggatctcctgccgggcgtggttggctcatgcctgtaatcccaccactttttttttaaggcaggcggatcacctgaggtcaggagtttaagaccagcctgaccaacatggagaaacctcgtctctactaaaaatacaaaaattagccaggcatggtggcacacgcctatagtcccagctactcaggaggctgaggcaggagaatcacttgaacccaggaggcagaggttgcagtgagctgagatcacgtcattgcactccatcctgagccacaagagcaaaactccgtctcaaaaaaaaaaaagaagaaggtggatctccaaccaggccagagaagattctcacagaaggttttgaactctaagaaataaattggtttggtaataaatggcttctggtcaga

SEQ ID NO: 6347 - DNA, 1400 bp, Homo sapiens
ccgcaagatagtggcagaaaatctcgagaaggtccaggctgaggctgagagactggatcaggaggaagctcagtatcagagagaatacagtgaatttaaacgacagcagctggagctggatgatgagctgaagagtgttgaaaaccagatgcgttatgcccagacgcagctggataagctgaagaaaaccaacgtctttaatgcaaccttccacatctggcacagtggacagtttggcacaatcaataacttcaggctgggtcgcctgcccagtgttcccgtggaatggaatgagattaatgctgcttggggccagactgtgttgctgctccatgctctggccaataagatgggtctgaaatttcagagataccgacttgttccttacggaaaccattcatatctggagtctctgacagacaaatctaaggagctgccgttatactgttctggggggttgcggtttttctgggacaacaagtttgaccatgcaatggtggctttcctggactgtgtgcagcagttcaaagaagaggttgagaaaggcgagacacgtttttgtcttccctacaggatggatgtggagaaaggcaagattgaagacacaggaggcagtggcggctcctattccatcaaaacccagtttaactctgaggagcagtggacaaaagctctcaagttcatgctgacgaatcttaagtggggtcttgcttgggtgtcctcacaattttataacaaatgacttttttccttagggggaggtttgccttaaaggcttttaattttgttttgtttgcaaacatgttttaaattaaattcgggtaatattaaacagtacatgtttacaataccaaaaaagaaaaaatccacaaaagccactttattttaaaatatcatgtgacagatactttccagagctacaacatgccatctatagttgccagccctggtcagttttgattcttaaccccatggactcctttccctttcttctctgaaaaaaactaatttaaatttgcttttcttttttttaactgagttgaattgagattgatgtgttttcactggatttttatctctctcaacttcctgcacttaacaatatgaaatagaaacttttgtctttactgagatgaggatatgtttgagatgcacagttggataatgtgggaaaatgacatctaagctttacctggtcaccatgtgatgtgatcagatgcttgaaatttaacacttttcacttggttcttatactgaatgccgactctgctctgtgttagagatatgaaatggtgtttgatactgtttgagacattatggagagatttaattatttgtaataaaagatttgctgcagtctgaaaactgaaaaaaaaaaaaaaaaaaaaaaaaaaaaaaaa

SEQ ID NO: 6348 - DNA, 600 bp, Homo sapiens
gctgatgtgcagaaggatggagtggggatggtcgagtatctcagaaaagaagacatggaatatgccctgcgtaaactggatgacaccaaattccgctctcatgagggtgaaacttcctacatccgagtttatcctgagagaagcaccagctatggctactcacggtctcggtctgggtcaaggggccgtgactctccataccaaagcaggggttccccacactacttctctcctttcaggccctactgagacaggtgatgggaattttttctttattttttaggttaactgagctgctttgtgctcagaatctacattccagattgaggatttagtgtcttaggaaatttttttaattttttttttttaaagaagaaaaaaaactacataatttctaccagggccatattagcagtgaaacattttaaactgcagaaattgtggttttggttcagaaacaagttgtatatttttcacccctgattatgggaaaaaatcgttctgtctttgtggggttcgctctactatggagatcaacagttactgtgactgagtcggcccattctgtttagaaatatattttaaatgtttagtaattga

SEQ ID NO: 6349 - DNA, 600 bp, Homo sapiens
gtcttcactaggccccctagctacacctggaagtttcagaacccactttggggggcctcctgcctgggcaggctcttcaagtgtggccctctttggagtcaaccctccttcccgaccccctccccctagcccagccccagtcactgtcagggtcgggccagcccctgcactgcctcgcagagtggcctgggctaggtcactccacctctctgtgcctcagtttcccccccttgagtcccctagggcctggaagggtgggaggtatgtctagggggcagtgtctcttccagggggaattctcagctcttgggaacccccttgctcccaggggaggggaaacctttttcattcaacattgtagggggcaagctttggtgcgccccctgctgaggagcagccccaggaggggaccagaggggatgctgtgtcgctgcctgggatcttggggttggcctttgcatgggaggcaggtggggcttggatcagtaagtctggttcccgcctccctgtctgagagaggaggcaggagccccagggccggcttgtgtttgtacattgcacagaaacttgtgtgggtgctttagtaaaaaacgtgaatgg

SEQ ID NO: 6350 - DNA, 1400 bp, Homo sapiens
cataagctcatctgctgtaatggtgctggtgaatgctgtgtacttcaaaggcaagtggcaatcagccttcaccaagagcgaaaccataaattgccatttcaaatctcccaagtgctctgggaaggcagtcgccatgatgcatcaggaacggaagttcaatttgtctgttattgaggacccatcaatgaagattcttgagctcagatacaatggtggcataaacatgtacgttctgctgcctgagaatgacctctctgaaattgaaaacaaactgacctttcagaatctaatggaatggaccaatccaaggcgaatgacctctaagtatgttgaggtattttttcctcagttcaagatagagaagaattatgaaatgaaacaatatttgagagccctagggctgaaagatatctttgatgaatccaaagcagatctctctgggattgcttcggggggtcgtctgtatatatcaaggatgatgcacaaatcttacatagaggtcactgaggagggcaccgaggctactgctgccacaggaagtaatattgtagaaaagcaactccctcagtccacgctgtttagagctgaccacccattcctatttgttatcaggaaggatgacatcatcttattcagtggcaaagtttcttgcccttgaaaatccaattggtttctgttatagcagtccccacaacatcaaagraccaccacaagtcaatagatytgrgtttaattggaaaaatgtggtgtttcctttgagtttatttcttcctaacattggtcagcagatgacactggtgacttgacccttcctagacacctggttgattgtcctgatccctgctcttagcattctaccaccatgtgtctcacccatttctaatttcattgtctttcttcccacgctcatttctatcattctcccccatgacccgtctggaaattatggagrgtgctcaactggtaaggagaacgtagaagtagccctagggatcctttttgaaactctacagttatcgcagatattctagcttcattgtaagcaatctaggaaataagccctgctgctttctagaaataagtgtgaaggataaattttctttgttgacctatgaagattttagagtttaccttcatatgtttgattttaaatcagtgtataatctagatggtaaaaaatgtgaaattgggattagggacctaccaaaatatttcattaatgctttcaattgacaaattttggcctttctttgataagacaatatgtacatgttttttcaaatattaaagatcttttaactgttggcagttgttatctacagaatcatatttcatatgctgtgtagtttataagtttttcctctatttatcagaataaagaaatacaacatacctgtaaa

SEQ ID NO: 6351 - DNA, 1400 bp, Homo sapiens
ttaaagcaggaaacagcagttgttgaaaacgtccccattttgggactttatcagattccagctgagggtggaggccggattgtactgtatggggactccaattgcttggatgacagtcaccgacagaaggactgcttttggcttctggatgccctcctccagtacacatcgtatggggtgacaccgcctagcctcagtcactctgggaaccgccagcgccctcccagtggagcaggctcagtcactccagagaggatggaaggaaaccatcttcatcggtactccaaggttctggaggcccatttgggagacccaaaacctcggcctctaccagcctgtccacgcttgtcttgggccaagccacagcctttaaacgagacggcgcccagtaacctttggaaacatcagaagctactctccattgacctggacaaggtggtgttacccaactttcgatcgaatcgccctcaagtgaggcccttgtcccctggagagagcggcgcctgggacattcctggagggatcatgcctggccgctacaaccaggaggtgggccagaccattcctgtctttgccttcctgggagccatggtggtcctggccttctttgtggtacaaatcaacaaggccaagagcaggccgaagcggaggaagcccagggtgaagcgcccgcagctcatgcagcaggttcacccgccaaagaccccttcggtgtgaccggcagcctggctgaccgtgagggccagagagagccttcacggacggcgctggtgggtgagccgagctgtggtggcggctggtttaaaagggatccagtttccagctgcaggtttgttagagtctgttctacatgggcctgccctcctgtgatgggcagaggctcctggtacatcgagaagattcctgtggatcccgtcaggagggacttagtggctctgccgccagtgagacttcccgccggcagctgtgcgcaccaaagactcgggagaactggaaaggctgtctggggtcttctgactgcaggggaaggatgtactttccaaacaaatgatacaaccctgaccaagctaaaagacgcttgttaaaggctattttctatatttattgttgggaaaagtcactttaaagacttgtgctatttggaagcaaagctattttttttgtcagtggaatgcagtttttttactattccatcatgaggaacaacatagattccatgatctttttaatgacagtacagactgagatttgaaggaaacatgcacaaatctgtaaaacatagaccttcgctttatttttgtaagtatcacctgccaccatgttttgtaatttgaggtcttgatttcaccattgtcggtgaagaaaattttcaataaatatgtattacccgtctgaagctt

SEQ ID NO: 6352 - DNA, 1400 bp, Homo sapiens
gcttcaatcttcaagaactttgtcattacctataaccggacatatgagtcaaaggaagaagcccggtggcgcctgtccgtctttgtcaataacatggtgcgagcacagaagatccaggccctggaccgtggcacagctcagtatggagtcaccaagttcagtgatctcacagaggaggagttccgcactatctacctgaatactctcctgagaaaagagcctggcaacaagatgaagcaagccaagtctgtgggtgacctcgccccacctgaatgggactggaggagtaagggggctgtcacaaaagtcaaagaccagggcatgtgtggctcctgctgggccttctcagtcacaggcaatgtggagggccagtggtttctcaaccaggggaccctgctctccctctctgaacaggagctcttggactgtgacaagatggacaaggcctgcatgggcggcttgccctccaatgcctactcggccataaagaatttgggagggctggagacagaggatgactacagctaccagggtcacatgcagtcctgcaacttctcagcagagaaggccaaggtctacatcaatgactccgtggagctgagccagaacgagcagaagctggcagcctggctggccaagagaggcccaatctccgtggccatcaatgcctttggcatgcagttttaccgccacgggatctcccgccctctccggcccctctgcagcccttggctcattgaccatgcggtgttgcttgtgggctacggcaaccgctctgacgttcccttttgggccatcaagaacagctggggcactgactggggtgagaagggttactactacttgcatcgcgggtccggggcctgtggcgtgaacaccatggccagctcggcggtggtggactgaagaggggcccccagctcgggacctggtgctgatcagagtggctgctgccccagcctgacatgtgtccaggcccctccccgggaggtacagctggcagagggaaaggcactgggtacctcagggtgagcagagggcactgggctggggcacagcccctgcttccctgcaccccattcccaccctgaagttctgcacctgcacctttgttgaattgtggtagcttaggaggatgtcggggtgaagggtggtatcttggcagttgaagctggggcaagaactctgggcttgggtaatgagcaggaagaaaattttctgatcttaagcccagctctgttctgcccccgctttcctctgtttgatactataaattttctggttcccttggatttagggatagtgtccctctccatgtccaggaaacttgtaaccacccttttctaacagcaataaagaggtgtccttgtaaaaaaaaaaaaaaaaaaaaaaaaaaaaaa

SEQ ID NO: 6353 - DNA, 1201 bp, Homo sapiens; identical to SEQ ID NO: 1118

SEQ ID NO: 6354 - DNA, 1400 bp, Homo sapiens
ctgcctacaccagccatgagcacagagaacgcatcttggaactgtcaactcaggcgagaatggaactgcagcagttaatttctgtgtggattcaagctcaaagcaagaaaacaaaaagcatcgctgaagaactggaactcagtattttgaaaatcagtcacagtcttaatgaacttaagaaagaacttcatagtacagcgacacagctggcagcagatctattaaaataccatgctgatcatgtggttctaaaagcattaaaacttactggagtagaaggaaatttagaagctttggctgaatatgcctgtaaactctctgaacagaaagagcagcttgttgagacctgtcgattgttacgacacatatctgggacagaacctctggaaataacctgtatacatgcagaggagacatttcaggtgactggccaacagataatttctgctgctgaaacattgacattgcatccatctagtaaaattgctaaagaaaacctagatgtattttgtgaagcttgggaatcccaaattagtgacatgtcaacactgctgagagaaatcaatgacgtgtttgaaggaagacgaggagagaagtatggctacctttcacttccaaagccaatgaagaataatgcaaacctgaaatcattaaagccagacaagcctgactctgaggagcaagccaagatagcaaagcttggacttaagctgggtttgctcacctctgacgctgactgcgaaattgagaagtgggaagatcaggagaatgagattgttcaatatggacggaacatgtccagtatggcctattctctgtatttatttactagaggagaggggccactgaaaacttcccaggatttaattcatcaactagaggtttttgctgcagagggtttaaagcttacttccagtgttcaagctttttcaaaacagctgaaagacgatgacaagcttatgcttctcctggaaataaacaagctaattcctctatgccaccagctccagacagtaactaagacttctttgcagaataaagtatttctaaaggttgacaagtgtattacgaagacaagatccatgatggctctcttagtccaacttctttcactttgttataaactgctgaagaagcttcagatggaaaataacggatgggtctcagttacaaataaggacactatggatagtaaaacttgagaagcttttggggtcagatctctggaacatcatgtgatgaagctgacatttttaaaaatcaaatgatcctttatcttttcagaaattcatcaattttataaagaaaacaatattgaaattttgctctattttctgatcatgaaactgattgtaaagctttttgacaactaataaatgtcttggtaattgctagattct

SEQ ID NO: 6355 - DNA, 1400 bp, Homo sapiens
acagaacatgaccttctgggcactgaggcttggcttgaagcctaccacgatgtcaatgtcactggcatgcagtcgtctcccctgcagggccgagctggggccattcaggcagccgtggccctggagctgagcagtgatgtggtcaccagcctcgatgtggccgtggaggggcttaacgggcagctgcccaaccttgacctgctcaatctcttccagaccttctgccagaaagggggcctgttgtgcacgcttcagggcaagctgcagcccgaggactggacatcattggatggaccgctgcagggcctgcagacactgctgctcatggttctgcggcaggcctccggccgcccccacggctcccatggcctcttcctgcgctaccgtgtggaggccctaaccctgcgtggcatcaatagcttccgccagtacaagtatgacctggtggcagtgggcaaggctttggagggcatgttccgcaagctcaaccacctcctggagcgcctgcaccagtccttcttcctctacttgctccccggcctctcccgcttcgtctccatcggcctctacatgcccgctgtcggcttcttgctcctggtccttggtctcaaggctctggaactgtggatgcagctgcatgaggctggaatgggccttgaggagcccgggggtgcccctggccccagtgtaccccttcccccatcacagggtgtggggctggcctcgctcgtggcacctctgctgatctcacaggccatgggactggccctctatgtcctgccagtgctgggccaacacgttgccacccagcacttcccagtggcagaggctgaggctgtggtgctgacactgctggcgatttatgcagctggcctggccctgccccacaatacccaccgggtggtaagcacacaggccccagacaggggctggatggcactgaagctggtagccctgatctacctagcactgcagctgggctgcatcgccctcaccaacttctcactgggcttcctgctggccaccaccatggtgcccactgctgcgcttgccaagcctcatgggccccggaccctttatgctgccctgctggtgctgaccagcccggcagccacgctccttggcagcctgttcctgtggcgggagctgcaggaggcgccactgtcactggccgagggctggcagctcttcctggcagcgctagcccagggtgtgctggagcaccacacctacggcgccctgctcttcccactgctgtccctgggcctctacccctgctggctgcttttctggaatgtgctcttctggaagtgagatctgcctgtccgggctgggacagagactccccaaggaccccattctgcctccttctggggaaataaatgagtgtctgtttcagc

SEQ ID NO: 6356 - DNA, 1400 bp, Homo sapiens
ttggagtatagagactttttacagagaggaggtggagcctgccttttcaacaggccaacaaagctatttgagcccacggaatgtggaaatggatacgtggaagctggggaggagtgtgattgtggttttcatgtggaatgctatggattatgctgtaagaaatgttccctctccaacggggctcactgcagcgacgggccctgctgtaacaatacctcatgtctttttcagccacgagggtatgaatgccgggatgctgtgaacgagtgtgatattactgaatattgtactggagactctggtcagtgcccaccaaatcttcataagcaagacggatatgcatgcaatcaaaatcagggccgctgctacaatggcgagtgcaagaccagagacaaccagtgtcagtacatctggggaacaaaggctgcagggtctgacaagttctgctatgaaaagctgaatacagaaggcactgagaagggaaactgcgggaaggatggagaccggtggattcagtgcagcaaacatgatgtgttctgtggattcttactctgtaccaatcttactcgagctccacgtattggtcaacttcagggtgagatcattccaacttccttctaccatcaaggccgggtgattgactgcagtggtgcccatgtagttttagatgatgatacggatgtgggctatgtagaagatggaacgccatgtggcccgtctatgatgtgtttagatcggaagtgcctacaaattcaagccctaaatatgagcagctgtccactcgattccaagggtaaagtctgttcgggccatggggtgtgtagtaatgaagccacctgcatttgtgatttcacctgggcagggacagattgcagtatccgggatccagttaggaaccttcacccccccaaggatgaaggacccaagggtcctagtgccaccaatctcataataggctccatcgctggtgccatcctggtagcagctattgtccttgggggcacaggctggggatttaaaaatgtcaagaagagaaggttcgatcctactcagcaaggccccatctgaatcagctgcgctggatggacaccgccttgcactgttggattctgggtatgacatactcgcagcagtgttactggaactattaagtttgtaaacaaaacctttgggtggtaatgactacggagctaaagttggggtgacaaggatggggtaaaagaaaactgtctcttttggaaataatgtcaaagaacacctttcaccacctgtcagtaaacgggggagggggcaaaagaccatgctataaaaagaactgttccagaatctttttttttccctaatggacgaaggaacaacacacacacaaaaattaaatgcaataaaggaatcattaaaaa

SEQ ID NO: 6357 - DNA, 1400 bp, Homo sapiens
ccaacactgtggcccatgagttaggtcatacgttgggtatgcagcatgatgaagaattctgtttttgtggggaaagaggttgcatcatgaatacttttagagtgccagcagagaaattcaccaattgcagttacgctgattttatgaagaccaccttaaaccagggatcatgtctgcataatcctccaagattgggggaaatctttatgctaaagcgctgtgggaatggtgtggttgaaagagaagagcagtgtgactgtggatccgtacagcagtgtgaacaagacgcctgttgtctgttgaactgcactctaaggcctggggctgcctgtgcttttgggctttgttgcaaagactgcaagttcatgccatcaggggaactctgtagacaagaggtcaatgaatgtgaccttccagaatggtgcaatggaacatctcatcagtgtccagaagatagatatgtgcaggacgggatcccctgtagtgacagtgcctactgctatcaaaagaggtgtaataaccatgaccagcattgcagggagatttttggtaaagatgcaaaaagtgcatctcagaattgctataaagaaatcaactctcagggaaaccgttttggtcactgtggtataaatggcacaacatacctaaaatgtcatatctctgatgtcttttgtgggagagttcaatgtgagaatgtgagagacattcctcttctccaagatcattttactttgcagcacactcatatcaatggtgtcacctgctggggtattgactatcatttaaggatgaacatatctgacattggtgaagtgaaagatggtactgtgtgtggcccaggaaagatctgcatccataagaagtgtgtcagtctgtctgtcttgtcacatgtctgccttcctgagacctgcaatatgaaggggatctgcaataacaaacatcactgccactgtggctatgggtggtccccaccctactgccagcacagaggctatgggggcagtattgacagtggcccagcatctgcaaagagaggagtttttttgccgctgattgtgattccttctttgtctgttttgactttcctgtttactgtcgggcttcttatgtatctacgacaatgttctggtcccaaagaaactaaggctcattcatcaggttaagaaaatgtctctaacttaatattccatgcattagtacactttagtctcttggcagtagaaacattagtacatccctgaaactgagcacatttctgaccatttccagaaagctgcaaagatcttcccttacattagtaccacaaacattgtcattaagttcaagttattcttaacatgtttctatctattgtttattgttttaagcagcaaataaagctacatccttccctcccttta

SEQ ID NO: 6358 - DNA, 600 bp, Homo sapiens
gctatacctgatattggtgaggtgaaagatggcacagtatgtggtccagaaaagatctgcatccgtaagaagtgtgccagtatggttcatctgtcacaagcctgtcagcctaagacctgcaacatgaggggaatctgcaacaacaaacaacactgtcactgcaaccatgaatgggcacccccatactgcaaggacaaaggctatggaggtagtgctgatagtggcccacctcctaagaacaacatggaaggattaaatgtgatgggaaagttgcgttacctgtcactattgtgccttcttcctttggttgcttttttattattttgcttacatgtgctttttaagaaacgcacaaaaagtaaagaagatgaagaaggataagagaaatgggaaaaagaaggagactaaactttatacttcatttttaatatccaattttttaatagaaaaatatgaagccatgtctcactgtttaaataaaacttcatggacatttcatgtcaggattgcaagcattagctatcacagcaaaggattcctagcctattcttacttactctacagtgtcttaagcaatattaaaggttccttttcccagaa

SEQ ID NO: 6359 - DNA, 1400 bp, Homo sapiens
atccctgctgtgattctttgacctgccagctgaggccaggtgcacagtgtgcatctgacggaccctgttgtcaaaattgccagctgcgcccgtctggctggcagtgtcgtcctaccagaggggattgtgacttgcctgaattctgcccaggagacagctcccagtgtccccctgatgtcagcctaggggatggcgagccctgcgctggcgggcaagctgtgtgcatgcacgggcgttgtgcctcctatgcccagcagtgccagtcactttggggacctggagcccagcccgctgcgccactttgcctccagacagctaatactcggggaaatgcttttgggagctgtgggcgcaaccccagtggcagttatgtgtcctgcacccctagagatgccatttgtgggcagctccagtgccagacaggtaggacccagcctctgctgggctccatccgggatctactctgggagacaatagatgtgaatgggactgagctgaactgcagctgggtgcacctggacctgggcagtgatgtggcccagcccctcctgactctgcctggcacagcctgtggccctggcctggtgtgtatagaccatcgatgccagcgtgtggatctcctgggggcacaggaatgtcgaagcaaatgccatggacatggggtctgtgacagcaacaggcactgctactgtgaggagggctgggcaccccctgactgcaccactcagctcaaagcaaccagctccctgaccacagggctgctcctcagcctcctggtcttattggtcctggtgatgcttggtgccggctactggtaccgtgcccgcctgcaccagcgactctgccagctcaagggacccacctgccagtacagggcagcccaatctggtccctctgaacggccaggacctccgcagagggccctgctggcacgaggcactaagtctcaggggccagccaagcccccacccccaaggaagccactgcctgccgacccccagggccggtgcccatcgggtgacctgcccggcccaggggctggaatcccgcccctagtggtaccctccagaccagcgccaccgcctccgacagtgtcctcgctctacctctgacctctccggaggttccgctgcctccaagccggacttagggcttcaagaggcgggcgtgccctctggagtcccctaccatgactgaaggcgccagagactggcggtgtcttaagactccgggcaccgccacgcgctgtcaagcaacactctgcggacctgccggcgtagttgcagcgggggcttggggaggggctgggggttggacgggattgaggaaggtccgcacagcctgtctctgctcagttgcaataaacgtgacatcttgggagcgttaaaaaaaaaaaaaaa

SEQ ID NO: 6360 - DNA, 1400 bp, Homo sapiens
agtatcatctcagggaaacttaattcctgcccgtcctgctcctgcacctcctttatatagttccctcacttgatttttttaaccttctttttgcaaatgtcttcagggaactgagctaatactttttttttttcttgatgttttcttgaaaagcctttctgttgcaactatgaatgaaaacaaaacaccacaaaacagacttcactaacacagaaaaacagaaactgagtgtgagagttgtgaaatacaaggaaatgcagtaaagccagggaatttacaataacatttccgtttccatcattgaataagtcttattcagtcatcggtgaggttaatgcactaatcatggattttttgaacatgttattgcagtgattctcaaattaactgtattggtgtaagatttttgtcattaagtgtttaagtgttattctgaattttctaccttagttatcattaatgtagttcctcattgaacatgtgataatctaatacctgtgaaaactgactaatcagctgccaataatatctaatatttttcatcatgcacgaattaataatcatcatactctagaatcttgtctgtcactcactacatgaataagcaaatattgtcttcaaaagaatgcacaagaaccacaattaagatgtcatattattttgaaagtacaaaatatactaaaagagtgtgtgtgtattcacgcagttactcgcttccatttttatgacctttcaactataggtaataactcttagagaaattaatttaatattagaatttctattatgaatcatgtgaaagcatgacattcgttcacaatagcactattttaaataaattataagctttaaggtacgaagtatttaatagatctaatcaaatatgttgattcatggctataataaagcaggagcaattataaaatcttcaatcaattgaacttttacaaaaccacttgagaatttcatgagcactttaaaatctgaactttcaaagcttgctattaaatcatttagaatgtttacatttactaaggtgtgctgggtcatgtaaaatattagacactaatattttcatagaaattaggctggagaaagaaggaagaaatggttttcttaaatacctacaaaaaagttactgtggtatctatgagttatcatcttagctgtgttaaaaatgaatttttactatggcagatatggtatggatcgtaaaattttaagcactaaaaattttttcataacctttcataataaagtttaataataggtttattaactgaatttcattagttttttaaaagtgtttttggtttgtgtatatatacatatacaaatacaacatttacaataaataaaatacttgaaattctcaaaaaaaaaaaaaaaaaaaaaaaaaa

SEQ ID NO: 6361 - DNA, 1400 bp, Homo sapiens
atcagggggtgaatctctacattaagaacttggatgacactattgatgatgagaaattaaggaaagaattttctccttttggatcaattaccagtgctaaggtaatgctggaggatggaagaagcaaagggtttggcttcgtctgcttctcatctcctgaagaagcaaccaaagcagtcactgagatgaatggacgcattgtgggctccaagccactatatgttgccctggcccagaggaaggaagagagaaaggctcacctgaccaaccagtatatgcaacgagtggctggaatgagagcacttcctgccaatgccatcttaaatcagttccagcctgcagcgggtggctactttgtgccagcagtcccacaggctcagggaaggcctccatattatacacctaaccagttagcacagatgaggcctaatccacgctggcagcaaggtgggagacctcaaggcttccaaggaatgccaagtgctatacgccagtctgggcctcgtccaactcttcgccatctggctccaactgggtctgagtgcccggaccgcttggctatggactttggtggggctggtgccgcccagcaagggctgactgacagctgccagtctggaggcgttcccacagctgtgcagaacttagcgccacgcgctgctgttgctgctgctgctccccgggctgttgccccctacaaatacgcctccagtgtccgcagccctcatcctgccatacagcctctgcaggcaccccagcctgcggtccatgtgcaggggcaggagccactgactgcctccatgctggctgcagcacccccccaggaacagaagcagatgctgggagaacgcttgttcccactcatccaaacaatgcattcaaatctggctgggaagatcacgggaatgctgctggagatagacaactctgagctgctgcacatgttagagtcccccgagtctctccgctccaaggtggatgaagctgtagcagttctacaggctcatcatgccaagaaagaagctgcccagaaggtgggcgctgttgctgctgctacctcttagacaaggaaaaaccgattcaaaagccaaataaccccttatggaattcaactcaaggtttgaagacttcctagcttgtcctatggacctcaacaccaaggattacaaattgcaaatttaataggtcattttgtatcaaaaggtcaattatgaagcacctagaatttttcaattatacgaatatgttctttgggttctgctgtggcccagacagtgttaactttttttttattgtgggttttgattttttcccccagaaattggttttatttgatgtacccaagtcttacgtttcccaataaagaaaaaaaatctccataaaaaaagtcgagcggccgc

SEQ ID NO: 6362 - DNA, 1400 bp, Homo sapiens
atacatgccaaatggatcattaaatgaactcctacataggaaaactgaatatcctgatgttgcttggccattgagatttcgcatcctgcatgaaattgcccttggtgtaaattacctgcacaatatgactcctcctttacttcatcatgacttgaagactcagaatatcttattggacaatgaatttcatgttaagattgcagattttggtttatcaaagtggcgcatgatgtccctctcacagtcacgaagtagcaaatctgcaccagaaggagggacaattatctatatgccacctgaaaactatgaacctggacaaaaatcaagggccagtatcaagcacgatatatatagctatgcagttatcacatgggaagtgttatccagaaaacagccttttgaagatgtcaccaatcctttgcagataatgtatagtgtgtcacaaggacatcgacctgttattaatgaagaaagtttgccatatgatatacctcaccgagcacgtatgatctctctaatagaaagtggatgggcacaaaatccagatgaaagaccatctttcttaaaatgtttaatagaacttgaaccagttttgagaacatttgaagagataacttttcttgaagctgttattcagctaaagaaaacaaagttacagagtgtttcaagtgccattcacctatgtgacaagaagaaaatggaattatctctgaacatacctgtaaatcatggtccacaagaggaatcatgtggatcctctcagctccatgaaaatagtggttctcctgaaacttcaaggtccctgccagctcctcaagacaatgattttttatctagaaaagctcaagactgttattttatgaagctgcatcactgtcctggaaatcacagttgggatagcaccatttctggatctcaaagggctgcattctgtgatcacaagaccactccatgctcttcagcaataataaatccactctcaactgcaggaaactcagaacgtctgcagcctggtatagcccagcagtggatccagagcaaaagggaagacattgtgaaccaaatgacagaagcctgccttaaccagtcgctagatgcccttctgtccagggacttgatcatgaaagaggactatgaacttgttagtaccaagcctacaaggacctcaaaagtcagacaattactagacactactgacatccaaggagaagaatttgccaaagttatagtacaaaaattgaaagataacaaacaaatgggtcttcagccttacccggaaatacttgtggtttctagatcaccatctttaaatttacttcaaaataaaagcatgtaagtgactgtttttcaagaagaaatgtgtttcataaaaggatatttataaaaaaaaaaaaaaaaaa

SEQ ID NO: 6363 - DNA, 600 bp, Homo sapiens
gtccagcacagaaggaatctgtgcagatgagcagtcacactgttactccacagcggaggagaccagctcagaggcccaggaatcggagcgaagcagagaggtggagaactgggatttgaacccccgccatccttcaccagagcccatgctcaaccactgtggcgttctgctgcccctgcagttggcagaaaggatgttttgtcccatttccttggaggccaccgggacagacctggacactagggtcaggcggggtgctgtggtggggagaggcatggctggggtgggggtggggagacctggttggccgtggtccagctcttggcccctgtgtgagttgagtctcctctctgagactgctaagtaggggcagtgatggttgccaggacgaattgagataatatctgtgaggtgctgatgagtgattgacacacagcactctctaaatcttccttgtgaggattatgggtcctgcaattctacagtttcttactgttttgtatcaaaatcactatctttctgataacagaattgccaaggcagcgggatctcgtatctttaaaaagcagtcctcttattcctaaggtaatcctattaaaa

SEQ ID NO: 6364 - DNA, 600 bp, Homo sapiens
ctttttccatacttatatctaagaaaaggcatcataggtttctgaaagagataactatataacagctttttaactatccagtcaactttcagcttttctacatttaggtaaaatggttaggatataactcatggtgtggctaatctacatttatcaataaaatgtaaattatctgaaaggacagaatataagatttaaccatgtttgacatattttaatttagttaatgaagcaaaattcagtttatatttcactagaactgtgtacttgattgattttcagagaaatatcacaaattagaaatattaaatctaaggatgaaaggtatatataaaacaatttgggggccaggcacgatggctcaaacctgtaatcccagcactttgggagaccaaggcgggtggatcacttgaggtcaggagttcaagaccagcctgggcaacatggcgaaaccctgtctctactaaaaatacaaaaattagccgggtgtggtggcacttctctgtaatctcagcttctcaggaggctgagacaggagaatcgcttgaacccgggaggcagaggttgcagtgagctgagatcatgcgcggccgcgaattc

SEQ ID NO: 6365 - DNA, 600 bp, Homo sapiens
aacaacgcaagttggattggggcagtctttgtgcgttggcattggaggtgatccttttaatggaacagattttattgactgcctcgaaatctttttgaacgattctgccacagaaggcatcatattgattggtgaaattggtggtaatgcagaagagaatgctgcagaatttttgaagcaacataattcaggtccaaattccaagcctgtagtgtccttcattgctggtttaactgctcctcctgggagaagaatgggtcatgccggggcaattattgctggaggaaaaggtggagctaaagagaagatctctgcccttcagagtgcaggagttgtggtcagtatgtctcctgcacagctgggaaccacgatctacaaggaatttgaaaagaggaagatgctatgaaagaaaaaaaaaattcctaaaactgtggaatggatcacgtagacatgtaacccagcagcagtttgcttctgttgtccactgattaatcagcctatgtgcctgacactggtcttgcagtacaactggaagccaaaacaaggtggaagatgtcctgaattaagacgttttcaccacattgtattacagagacagcc

SEQ ID NO: 6366 - DNA, 1400 bp, Homo sapiens
tcaagctttacagcctttttctgaaatacgatgcaaccatgatagaaataaatccaatggtggaagattcagatggagctgtattgtgtatggatgcaaagatcaattttgactctaattcagcctatcgccaaaagaaaatctttgatctacaggactggacccaggaagatgaaagggacaaagatgctgctaaggcaaatctcaactacattggcctcgatggaaatataggctgcctagtaaatggtgctggtttggctatggccacaatggatataataaaacttcatggagggactccagccaacttccttgatgttggtggtggtgctacagtccatcaagtaacagaagcatttaagcttatcacttcagataaaaaggtactggctattctggtcaacatttttggaggaatcatgcgctgtgatgttattgcacagggtatagtcatggcagtaaaagacttggaaattaaaatacctgttgtggtacggttacaaggtacacgagtcgatgatgctaaggcactgatagcggacagtggacttaaaatacttgcttgtgatgacttggatgaagctgctagaatggttgtaaagctctctgaaatagtgaccttagcgaagcaagcacatgtggatgtgaaatttcagttgccaatatgatctgaaaacccagtggatggctgaaggtgttaaatgtgctataatcattaagaatactgtgttctgtgttattgttctttttctttttagtgtgtggagattgtaattgccatctaggcacacaaacatttaaaaggatttggactgcatttaattgtaccattcagaatggactgtttgtacgaagcatgtataatgcagttatcttctttctttcgtcgcagccagtcttttttgcttctcctacaaaacgtaacttgcaatttgccagtttattattgttggatacaaagttcttcattgataagagtcctataaataagataaatacgaagataaagctttattctttagtgttaaaatacagtatatctaataactagcctcattagtagagcagtatattaaaacaatgttttatgtaaaaagtgtttatcttcagcaccaaatacatgataaatgtatcaatcactatttataaacagagctttcaaacactcctcagaatattcttctaagtattttgatgaagtaactttgtaattatttgaacattgttttaatcattaggaaacactgattaactgcaagtcttcatgattctgtcatattaagaaacacctgtaggtttgcttcaaataaaggcatatataccaaggacttacagacaaaattaagaatgtcaatttaagttaataaaaatctcccaatatgaaaaaaaaaaaaaaa

SEQ ID NO: 6367 - DNA, 600 bp, Homo sapiens
ttgttttcaaaaaaacatttgtcagtaatttaacatcactacaaaaagaaggagtttgtgactattctcatctctgttttgcaggtttacgccgcacactttgatttccttaatagcccatttctgttaacctattatcactaagaaagaaaggaaagaaggagatgaatagaagaaagaaaatggaaagaaggaaaaaaggaggattgaaaaaggatggaagaaagaagccattgaaaacaaagacattcttcccacttcttggatttttaaaccacagtctggagtgatagctactgtagaaaggaaatagacttttatgaactctttaagttgaaaagtaaaaaatatatgtggtttggatgtgtgctttaattcagctttagaaattaataccactacccgtgaattatatggcctgacaatatgaattaggtgtactgtactgaagaacagtactccacaaacatgggtggtaacaagagttccatcccaggaggccaaacggtgcaacagaagggtaggttagatgctattaagaaggcacttaatagtacatcatgtaagatggcaactgtattaaagaaaaatccggaaaac

SEQ ID NO: 6368 - DNA, 1047 bp, Homo sapiens; identical to SEQ ID NO: 1133

SEQ ID NO: 6369 - DNA, 1192 bp, Homo sapiens; identical to SEQ ID NO: 1134

SEQ ID NO: 6370 - DNA, 1125 bp, Homo sapiens; identical to SEQ ID NO: 1135

SEQ ID NO: 6371 - DNA, 1400 bp, Homo sapiens
ggtcaaggcacctgcctgtttttgttggtgcacagagattgacttgattcagagagacaattcactccatccctatggcagaggaatgggttagccctaatgtagaatgtcattgtttttaaaactgttttatatcttaagagtgccttattaaagtatagatgtatgtcttaaaatgtgggtgataggaattttaaagatttatataatgcatcaaaagccttagaataagaaaagctttttttaaattgctttatctgtatatctgaactcttgaaacttatagctaaaacactaggatttatctgcagtgttgcagggagataattctgccttaaattgtctaaaacaaaaacaaaaccagccaacctatgttacacgtgagattaaaaccaattttttccccattttttctccttttttctcttgctgcccacattgtgcctttattttatgagccccagttttctgggcttagtttaaaaaaaaaatcaagtctaaacattgcatttagaaagcttttgttcttggataaaaagtcatacactttaaaaaaaaaaaaaaaactttttccaggaaaatatattgaaatcatgctgctgagcctctattttctttctttgatgttttgattcagtattcttttatcataaatttttagcatttaaaaattcactgatgtacattaagccaataaactgctttaatgaataacaaactatgtagtgtgtccctattataaatgcattggagaagtatttttatgagactctttactcaggtgcatggttacagccacagggaggcatggagtgccatggaaggattcgccactacccagaccttgttttttgttgtattttggaagacaggttttttaaagaaacattttcctcagattaaaagatgatgctattacaactagcattgcctcaaaaactgggaccaaccaaagtgtgtcaaccctgtttccttaaaagaggctatgaatcccaaaggccacatccaagacaggcaataatgagcagagtttacagctcctttaataaaatgtgtcagtaattttaaggtttatagttccctcaacacaattgctaatgcagaatagtgtaaaatgcgcttcaagaatgttgatgatgatgatatagaattgtggctttagtagcacagaggatgccccaacaaactcatggcgttgaaaccacacagttctcattactgttatttattagctgtagcattctctgtctcctctctctcctcctttgaccttctcctcgaccagccatcatgacatttaccatgaatttacttcctcccaagagtttggactgcccgtcagattgtttctgcacatagttgcctttgtatctctgtatgaaataaaaggtcatttgttc

SEQ ID NO: 6372 - DNA, 600 bp, Homo sapiens
gtggcgctgcaggtggtgcgggaagccagccaggagagcaagttgctgtgggtcatccgtgaggaccagggcggcgagtggaagcacgggcggatcatcctgcccagctacgacatggagtaccagattgtgttcgagggagtgatagggaaaggacgttccggagagattgccattgatgacattcggataagcactgatgtcccactggagaactgcatggaacccatctcggcttttgcagtggacatcccagaaatacatgagagagaaggatatgaagatgaaattgatgatgaatacgaggtggactggagcaattcttcttctgcaacctcagggtctggcgccccctcgaccgacaaagaaaagagctggctgtacaccctggatcccatcctcatcaccatcatcgccatgagctcactgggcgtcctcctgggggccacctgtgcaggcctcctgctctactgcacctgttcctactcgggcctgagctcccgaagctgcaccacactggagaactacaacttcgagctctacgatggccttaagcacaaggtcaagatgaaccaccaaaagtgctgctccgaggcatga

SEQ ID NO: 6373 - DNA, 1400 bp, Homo sapiens
aaagagagagtaggcacgtcaaaagttttggttttactcagtggtggagtagactcaacagtttgtacagctttgctaaatcgtgctttgaaccaagaacaagtcattgctgtgcacattgataatggctttatgagaaaacgagaaagccagtctgttgaagaggccctcaaaaagcttggaattcaggtcaaagtgataaatgctgctcattctttctacaatggaacaacaaccctaccaatatcagatgaagatagaaccccacggaaaagaattagcaaaacgttaaatatgaccacaagtcctgaagagaaaagaaaaatcattggggatacttttgttaagattgccaatgaagtaattggagaaatgaacttgaaaccagaggaggttttccttgcccaaggtactttacggcctgatctaattgaaagtgcatcccttgttgcaagtggcaaagctgaactcatcaaaacccatcacaatgacacagagctcatcagaaagttgagagaggagggaaaagtaatagaacctctgaaagattttcataaagatgaagtgagaattttgggcagagaacttggacttccagaagagttagtttccaggcatccatttccaggtcctggcctggcaatcagagtaatatgtgctgaagaaccttatatttgtaaggactttcctgaaaccaacaatattttgaaaatagtagctgatttttctgcaagtgttaaaaagccacataccctattacagagagtcaaagcctgcacaacagaagaggatcaggagaagctgatgcaaattaccagtctgcattcactgaatgccttcttgctgccaattaaaactgtaggtgtgcagggtgactgtcgttcctacagttacgtgtgtggaatctccagtaaagatgaacctgactgggaatcacttatttttctggctaggcttatacctcgcatgtgtcacaacgttaacagagttgtttatatatttggcccaccagttaaagaacctcctacagatgttactcccactttcttgacaacaggggtgctcagtactttacgccaagctgattttgaggcccataacattctcagggagtctgggtatgctgggaaaatcagccagatgccggtgattttgacaccattacattttgatcgggacccacttcaaaagcagccttcatgccagagatctgtggttattcgaacctttattactagtgacttcatgactggtatacctgcaacacctggcaatgagatccctgtagaggtggtattaaagatggtcactgagattaagaagattcctggtatttctcgaattatgtatgacttaacatcaaagcccccaggaactactgagtgggagtaataaacttc

SEQ ID NO: 6374 - DNA, 1280 bp, Homo sapiens; identical to SEQ ID NO: 1139

SEQ ID NO: 6375 - DNA, 600 bp, Homo sapiens
tcactcagggctccccctgcatcacatcaggaggatgttcatgggagattcatgcccttatctagcagggaagccaaagatgttttttattcagaactatgtggtgtcagagggccagctggaggacagcagcctcttggaggtggatgggccagcgatgaagaatgtggaattcaaggctcagaagcgagggctgtgcacagttcaccgagaagctgacttcttctggagcctgtgtactgcggacatgtccctgctggagcagtctcacagctcaccatccctgtacctgcagtgcctctcccagaaactgagacaagaaagaaaacgcccactcctggatcttcacattgaactcaatggctacatgtatgattggaacagcagagtttctgccaaggagaaatattatgtctggctgcagcacactctgagaaagaaacttatcctctcctacacataagaaaccaaaaggctgggcgtagtggctcacacctgtaatcccagcactttgggaggccaaggagggcagatcacttcaggtcaggagttcgagaccagcctggccaacatggtaaacgctgtccctagtaaaaatac

SEQ ID NO: 6376 - DNA, 1307 bp, Homo sapiens; identical to SEQ ID NO: 1141

SEQ ID NO: 6377 - DNA, 600 bp, Homo sapiens
ccgcctgtgcctgtccaggccctgcccaccctccaggggtcgcagtccacaaaacagtgccttctagagccgggctgggaatggggacacggtgtccaccatccccagctggtggccctgtgcctgggccctgggctgatggaagatggtccgtgcccaggcccttggctgcaggcaacactttagcttgggtccaccatgcagaacaccaatattaacacgctgcctggtctgtctggatcccgaggtatggcagaggtgcaagacctagtcccctttcctctaactcactgcctaggaggctggccaaggtgtccagggtcctctagcccactccctgcctacacacacagcctatatcaaacatgcacacgggcgagctttctctccgacttcccctgggcaagagatgggacaagcagtcccttaatattgaggctgcagcaggtgctgggctggactggccatttttctgggggtaggatgaagagaaggcacacagagattctggatctcctgctgccttttctggagtttgtaaaattgttcctgaatacaagcctatgcgtgaaaaaaaaaaaaaaaaaaaaaaaaaaaaaa

SEQ ID NO: 6378 - DNA, 1400 bp, Homo sapiens
tgacattgacatccaccatggtgacggggttcaagaagctttctacctcactgaccgggtcatgacggtgtccttccacaaatacggaaattacttcttccctggcacaggtgacatgtatgaagtcggggcagagagtggccgctactactgtctgaacgtgcccctgcgggatggcattgatgaccagagttacaagcaccttttccagccggttatcaaccaggtagtggacttctaccaacccacgtgcattgtgctccagtgtggagctgactctctgggctgtgatcgattgggctgctttaacctcagcatccgagggcatggggaatgcgttgaatatgtcaagagcttcaatatccctctactcgtgctgggtggtggtggttatactgtccgaaatgttgcccgctgctggacatatgagacatcgctgctggtagaagaggccattagtgaggagcttccctatagtgaatacttcgagtactttgccccagacttcacacttcatccagatgtcagcacccgcatcgagaatcagaactcacgccagtatctggaccagatccgccagacaatctttgaaaacctgaagatgctgaaccatgcacctagtgtccagattcatgacgtgcctgcagacctcctgacctatgacaggactgatgaggctgatgcagaggagaggggtcctgaggagaactatagcaggccagaggcacccaatgagttctatgatggagaccatgacaatgacaaggaaagcgatgtggagatttaagagtggcttgggatgctgtgtcccaaggaatttcttttcacctcttggttgggctggagggaaaaggagtggctcctagagtcctgggggtcaccccagggcttttgctgactctgggaaagagtctggagaccacatttggttctcgaaccatctacctgcttttcctctctctcccaaggcctgacaatggtacctattagggatggagatacagacaaggatagctatctgggacattattggcagtgggccctggaggccagtccctagccccccttgccccttatttcttccctgcttccctcgaacccagagatttttgagggatgaacgggtagacaaggactgagattgcctctgacttcctcctcccctgggttctgacttcttcctccccttgcttccagggaagatgaagagagagagatttggaaggggctctggctccctaacacctgaatcccagatgatgggaagtatgttttcaagtgtggggaggatatgaaaatgttctgttctcacttttggctttatgtccattttaccactgtttttatccaataaactaagtcggtattttttgtacctttaaaaaaaaaaaaaaaaaaaa

SEQ ID NO: 6379 - DNA, 1400 bp, Homo sapiens
ctataatactccaacaggaatggtagtcacactgtcttgaaattgaatctgtccatctgtttataatcaagaacatatcagaaatatataggtcccaggtaatactcccaaacatcccactttttactgtttcaggccatcatatcattcttaagctacttggggtggtagtagaggattaggttgtctattataaaaccaaaactcattcgtttaatgaacttgactgtcatacctctatttagtaattgcgagggtaagattcatagtaggaatattggaaattttggcactctgagaataaataggcatatgatacccacttggacttttaacaaaagtaaaggaataaatttgcatataggcttggaaagtgaggcagcaatgctgttaactgcatttgttgtgatggtgcatttgattgaagcagcttgtctttattatgcaagactgtgtagagttttttttttttttggcattgtactttttgtttttgttataaaggaagacagaacaaactggaatgttttatgatgttgtatagcaatcgctttttacctttcaaagttccgggtaaaaatgtgttatatctgtagttttttgtttttgtttttttttaaagcactacatctgttttcactaattgttaatttctgtttgaacccttcatttaattttctcatagatttaagtaaacagatgtattttgcacagtgcacttatgtctattttaacaatcctcctgcatctgtattttatagtcagccttttgaccacctggtgccagctatataaggaataaagttgattcatatcaacattagaactccagtcccaaactaatctgtcaggttcactggtacataaatacctaggaaatatttttccagtctacaatttggtgctattgtgcagtaactaatagtactcttaccagaggagaaattatattaacgaccctgctaatatcctttcttagttatttgctccttgcaaattaaaaaagcaactaagagaaagaaaaacattgtagatatctatttatatttaaagtttatgtttcatgaactgcagctgcaggattctggcattttgcatgccattctccatcagatctgggatgatggctcagaacatgtacacagactaagagtaactgtgtgatctgttaaggggtggataacataatatgcagcttaggatgctattttgagatgtatgatattcagttcattcacctgattactttggttgcagcacaactgtatatattgtataaccgaaattgattattttcattgtccttaatgcagtgatttataattagagcatgtttaataagtttactcttcttgttaactagtcatttgactggaaaaaaataaaatacttttaaatgg

SEQ ID NO: 6380 - DNA, 1400 bp, Homo sapiens
ccggcctccaaagcaaacgacgttctggtgaggtggaagcgtgcgggctcctatcttctggaagaactcttcgagggaaacttggaaaaagaatgttatgaagaaatctgtgtctatgaagaagcaagagaagtgtttgaaaatgaagtagtcactgatgaattctggagacgatataagggcggctccccgtgcatctcccagccctgcctccacaacggctcttgccaggacagcatctggggctacacctgcacctgctcccccggctatgagggcagcaactgcgagctggctaaaaatgaatgtcacccagagcggactgatgggtgtcaacacttctgcctcccaggacaggaatcctacacgtgcagctgtgctcagggctacaggcttggtgaggaccacaaacagtgtgtgccccacgaccagtgtgcctgcggggtgctgacctctgagaagcgtgcaccggatctacaggacctcccgtggcaggtaaagttaacaaattccgaaggaaaagacttctgtggtggtgttataatacgggaaaattttgtactgacaacagcaaaatgttcactgttacacaggaatattactgtaaaaacatattttaacagaacgagccaagacccgctgatgatcaagataacgcacgtccatgtgcacatgcggtatgacgcggacgcgggggagaatgacctgtcactgctggagctggagtggcccatccagtgcccaggtgcggggctccccgtgtgcacccctgagaaagacttcgctgagcacctcctcatcccacgcaccaggggcctcctcagcggctgggcacgcaatggcactgacctgggcaactcgctgaccacgcggcctgtcacacttgtggagggggaggagtgcgggcaggtcctgaatgtgactgtcaccaccaggacctactgtgagagaagcagcgtggcggccatgcactggatggatggaagtgtggtcaccagagaacacagaggctcctggtttctcacgggggtcctgggctcgcagccagtaggagggcaggctcacatggtccttgtcaccaaggtctccaggtactcactctggtttaaacagatcatgaactaactgaaactcagctagccagaatgaacaacacaaccggaagcgggattccaagctggcactgccactgtggagggcgctgaaacttcatcacacactgagaggccgtcacagccccagaccacccgcttggcccacgcagcagcagagccgccgtttgctgggttgtttaccgagcactgtgacctttctttccctggaactctttatctcaatagagaccttaaaagaaaacatgagatacgttaaataataaaataagataatctgtcagtcat

SEQ ID NO: 6381 - DNA, 1236 bp, Homo sapiens; identical to SEQ ID NO: 1146

SEQ ID NO: 6382 - DNA, 1400 bp, Homo sapiens
atgatccctcatttttctgtaggtttactgttgtagttgcaactcagcttcctgaaagcacttcactacgcttagcagatgtcctctggaattcccagattcctcttttgatctgtaggacatatggactagttggttatatgaggatcattataaaagaacatccagtaatagaatctcatccagataatgcattagaggatctacgactagataagccatttcctgaactgagagaacattttcagtcctatgatttggatcatatggaaaaaaaggaccacagtcatactccatggattgtgatcatagctaaatatttagcacagtggtatagtgaaacaaatggacgaatacctaaaacgtataaagaaaaagaggacttcagagatttgattagacaaggaattctaaaaaatgaaaatggggctccagaagatgaagagaattttgaagaagctattaaaaatgtgaacacagcactaaatacaactcagatcccaagcagtattgaagatatatttaatgatgatcgctgcataaatatcaccaaacagactccatcattttggattttagctcgtgccttaaaggaatttgtggccaaagagggtcaaggaaatttacctgttcgaggcacaattcctgatatgattgcagattcaggcaaatatataaaactgcaaaacgtttaccgtgaaaaagcaaagaaagatgctgccgctgtgggtaatcatgttgccaaattgctgcagtccattggccaggcaccagagtccatttcagagaaagaattaaaattactctgcagcaattctgcatttcttcgagtggtaagatgtcgatccttagctgaagaatatggtttggatacaattaacaaggatgaaattatttctagcatggacaatccagataatgaaatagtgttgtacttaatgttacgggctgttgatagatttcataaacaacagggtagatatccaggagtatctaactatcaagttgaagaagatataggaaagttgaagtcttgtctcactggcttccttcaggaatatggtttatctgtaatggtgaaagatgattatgtccacgaattttgccgatatggagctgctgagccacataccattgctgcattcttggggggagctgctgctcaagaggtcatcaaaataatcaccaaacaatttgtaatttttaataatacttacatttacagtggcatgtcacaaacttcagcaactttccagttgtagagtaagcaagcaccttaagtagtgtgttaatgattgaaactgtaattgccttcgggttgtgctttagtctgtaaaattctaaaggagagctgctaaattgttttcttaataaacatttttctcatttgtaaaaaaaaa

SEQ ID NO: 6383 - DNA, 600 bp, Homo sapiens
aacatctccttgcatttttgttggctgaattgggtacaagtggttctatagatggtaataaccaacttgtaatcaaaggaagattccaacagaaacagatagaaaatgtcttgagaagatatatcaaggaatatgtcacttgtcacacatgccgatcaccggacacaatcctgcagaaggacatacgactctatttcctacagtgcgaaacttgtcattctagatgttctgttgccagtatcaaaaccggcttccaggctgtcacgggcaagcgagcacagctccgtgccaaagctaactaatttgctaatcactgattttgcaaagcttgttgtggagatgtggctggacaggtttgccatcagagtggatataccgttgtattaaaaacaagataaaaaagctgccaagatttttggcgagtggttggtctgaagtccttgcaagacgctgatgctcaagctgttgacatactcattgcctactttaacacctgtcagagaaacgtgatatggggtaaggaggtgcttttttaaaatcgttcatagacttctgtaaaatgcaagataaattaaagttattataacagtgattctttca

SEQ ID NO: 6384 - DNA, 600 bp, Homo sapiens
tttgaagtccttgtggagaaagaatggctaagttttggacatcgatttcaactaagagttggccatggagataagaaccatgcagatgcagacagatcgcctgtttttcttcaatttattgactgtgtctggcagatgacaagacagtttcctaccgcatttgaattcaatgagtattttctcattaccattttggaccacctatacagctgcttattcggaacattcctctgtaatagtgaacaacagagaggaaaagagaatcttcctaaaaggactgtgtcactgtggtcttacataaacagccagctggaagacttcactaatcctctctatgggagctattccaatcatgtcctttatccagtagccagcatgcgccacctagagctctgggtgggatattacataaggtggaatccacggatgaaaccacaggaacctattcacaacagatacaaagaacttcttgctaaacgagcagagcttcagaaaaaagtagaggaactacagagagagatttctaaccgatcaacctcatcctcagagagagccagctctcctgcacagtgtgtcactcctgtccaaactgttgtataa

SEQ ID NO: 6385 - DNA, 1400 bp, Homo sapiens
  misc_feature (1237)..(1237): n is a, c, g, or t
gtagaggccagaaacctagataagaaggacttcctgggaaaatcagatccatttctggagttcttccgccagggtgatgggaaatggcacctggtgtacagatctgaggtcatcaagaacaacctgaaccctacatggaagcgtttctcagtccccgttcagcatttctgtggtgggaaccccagcacacccatccaggtgcaatgctccgattatgacagtgacgggtcacatgatctcatcggtaccttccacaccagcttggcccagctgcaggcagtcccggctgagtttgaatgcatccaccctgagaagcagcagaaaaagaaaagctacaagaactctggaactatccgtgtcaagatttgtcgggtagaaacagagtactcctttctggactatgtgatgggaggctgtcagatcaacttcactgtgggcgtggacttcactggctccaatggagacccctcctcacctgactccctacactacctgagtccaacaggggtcaatgagtacctgatggcactgtggagtgtgggcagcgtggttcaggactatgactcagacaagctgttccctgcatttggatttggggcccaggttccccctgactggcaggtctcgcatgaatttgccttgaatttcaaccccagtaacccctactgtgcaggcatccagggcattgtggatgcctaccgccaagccctgccccaagttcgcctctatggccctaccaactttgcacccatcatcaaccatgtggccaggtttgcagcccaggctgcacatcaggggactgcctcgcaatacttcatgctgttgctgctgactgatggtgctgtgacggatgtggaagccacacgtgaggctgtggtgcgtgcctcgaacctgcccatgtcagtgatcattgtgggtgtgggtggtgctgactttgaggccatggagcagctggacgctgatggtggacccctgcatacacgttctgggcaggctgctgcccgcgacattgtgcagtttgtaccctaccgccggttccagaatgcccctcgggaggcattggcacagaccgtgctcgcagaagtgcccacacaactggtctcatacttcagggcccagggttgggccccgctcaagccacttccaccctcagccaaggatcctgcacaggccccccaggcctaggttcccttggaggctgtggcaagtcctcaatcctgtgtcccagaggtccctntgggccacaacccaacccttctcactctcctcagtgctagcactttgtattttttgatacttttatacttgtttctgcttttgctgctcttgatcccacctttgctcctgacaaccctcattcaataaagaccagtgaagaccaaaaaaaaaaaaaaaaaaaa

SEQ ID NO: 6386 - DNA, 600 bp, Homo sapiens
tattatgtgcaggtcctagcctggggtaggaaagtagatagacagaaaatcattaggtaatttaagtactaaattgggcagggctttttagtatcaaatcactactagaccgtttaatttgttaaattatctctaggatggtgatttataacctacccaaagttatcgatattcttactaaactctgaggcctgaagttctgtgatagaccttaaataagtgtcctaagtcagtggttcccaaatctggctggtcgggaatacctgggaagtttgttaaaattttttaaaaatgttttaagatttttgggtcctgagccaggcgtggtggctcacacctgtaatcccagcactttgggaggctgaggcaggtggatcgcctgaggtcaggagttcaagatcaacctggccaacatactgaaaccccgtctctactaaaaataagaaaaattagctgggcgtggtggcgggcacctgtaatcccagctacttgggaggctgaggcaggagaatcacttgaacctgggagttagaggttgcagtgagctgagatcacaccattgcgcttcagcctgggcaacaagagtgaaactccatctcc

SEQ ID NO: 6387 - DNA, 600 bp, Homo sapiens
gagtaatgtataatttcatagcattttaaatttagtgtatcatgcgagttttttttggtagatgctgaagaatgtggttgctaaacaaagaatgctaaagaatgttcaaactttatagataactttattgttattatttattttcacacatttaattcctattaagtacagccgcaagaaagaaaaaatgatgaagttgcaaatggcagtgtgctgtcacctgcaacagaagtgcgtaccagaagtatgactcatgcaaagcattttaccgtacaaatatcctggtgcgatgatgggcctggcaacattttctactgtacttttgtttaaatttaatgaaacaaaaaattcctaagaaataccaccctaccactaacaaaatggtataaagaatctcccagccaggccaacatggtgaaaccctgtctctactaaaaattagccaagtgtggtaatgttcacctgcagtcccagctacttgggaggccaaggcacgagaattgcttgaacaaggtaggcagaggttgcagtgagccaagatcgcgccactgcactccagcctgggcgacagagtgagactccatctcagaaaaaaaaaaa

SEQ ID NO: 6388 - DNA, 600 bp, Homo sapiens
ttccctcccctccaatgataaagaaaatgataaattttctgttgtgcattcaattcttattttaaataagactaagtataggcattgtacctgacattgctacgtttctaccagtgtttcaatttaaagtgctagtgtttaaaaacattttcaagggataaggccttctgtactttgcttatttgaagaatcagtggtaggagcagtgaagtaaattctatggagtacatttctaaaataccacatttctgaaatcataaataagtttattcaggttctaaccctttgctgtacacaagcagacagaaatgcatctgttacataaatgagaaaaagctattatgctgatggagcatgctttttaaatcctttaaaaacactcaccatataaacttgcatttgagcttgtgtgttcttttgttaatgtgtagagttctcctttctcgaaattgccagtgtgtacttggcttaactcaagaacagtttcttctggattccttatttgatttatttaacctaattatattctaatattgcaaatattaccataagtgggtaaaagtaaaattcctcttctgaaaaaaaaaaaaaaaaaaaaaa

SEQ ID NO: 6389 - DNA, 600 bp, Homo sapiens
gcgccgaggtggccttcaactggatcattgttcacatggaagagccagattttgctgagccgctgaccatgcctggttatggaggggcagcttctgctggagcctctgtttttggtgcttctggactggataaccaacctccagaggaaatcgtagctatcatcacctccatgggatttcagcgaaatcaggctattcaggcactacgagcaacgaataataacctggaaagagcactggattggatctttagccaccctgagtttgaagaagacagtgattttgtgattgagatggagaataatgccaatgcaaacattatttctgaggccaagcccgaaggacctagagtcaaggatggatctggaacatatgagctatttgcattcatcagtcacatgggaacatccacaatgagtggtcattacatttgccatatcaaaaaggaaggaagatgggtgatttacaatgaccacaaagtttgtgcctcagaaaggccccctaaagacctgggctacatgtacttttaccgcaggataccaagctaaacctcaaatataaaaattggcgaaaagaagccatacgcctttttaatttgcc

SEQ ID NO: 6390 - DNA, 1400 bp, Homo sapiens
ccaagctggtgctgcccagtctcatctcctctcgcatctatgtggtggacgtgggctctgagccccgggccccaaagctgcacaaggtcattgagcccaaggacatccatgccaagtgcgaactggcctttctccacaccagccactgcctggccagcggggaagtgatgatcagctccctgggagacgtcaagggcaatggcaaagggggttttgtgctgctggatggggagacgttcgaggtgaaggggacatgggagagacctgggggtgctgcaccgttgggctatgacttctggtaccagcctcgacacaatgtcatgatcagcactgagtgggcagctcccaatgtcttacgagatggcttcaaccccgctgatgtggaggctggactgtacgggagccacttatatgtatgggactggcagcgccatgagattgtgcagaccctgtctctaaaagatgggcttattcccttggagatccgcttcctgcacaacccagacgctgcccaaggctttgtgggctgcgcactcagctccaccatccagcgcttctacaagaacgagggaggtacatggtcagtggagaaggtgatccaggtgccccccaagaaagtgaagggctggctgctgcccgaaatgccaggcctgatcaccgacatcctgctctccctggacgaccgcttcctctacttcagcaactggctgcatggggacctgaggcagtatgacatctctgacccacagagaccccgcctcacaggacagctcttcctcggaggcagcattgttaagggaggccctgtgcaagtgctggaggacgaggaactaaagtcccagccagagcccctagtggtcaagggaaaacgggtggctggaggccctcagatgatccagctcagcctggatgggaagcgcctctacatcaccacgtcgctgtacagtgcctgggacaagcagttttaccctgatctcatcagggaaggctctgtgatgctgcaggttgatgtagacacagtaaaaggagggctgaagttgaaccccaacttcctggtggacttcgggaaggagccccttggcccagcccttgcccatgagctccgctaccctgggggcgattgtagctctgacatctggatttgaactccaccctcatcacccacactccctattttgggccctcacttccttggggacctggcttcattctgctctctcttggcacccgacccttggcagcatgtaccacacagccaagctgagactgtggcaatgtgttgagtcatatacatttactgaccactgttgcttgttgctcactgtgctgcttttccatgagctcttggaggcaccaagaaataaactcgtaaccctgtccttcaaaaaaaaaaaaaaaaa

SEQ ID NO: 6391 - DNA, 600 bp, Homo sapiens
gagacagagtctcgcgctgttgcccaggctggagtgcagtggcgtgatctcggctcactgcaagctcggcctcctgggttcaaatgattctcctgcctcagcctcccaagtagctgggataacaggcgcccaccaccgcaccctgctaattttttgtatttttgatcaagacggagtttcaccatgttggccaggctggtctccaactcctgccctcaagtgatccgcctcggtcccattttttattctttgggtccttccatcccactgggaaaacgtctcaggtggcctctgaaacaccactcctttttgtgtgtgtgcacgcatggctgagcatgtgtgggtgggagtcagcacattcacgatactgtgcaatcatcacctctgtctagttacaggacggtttctttctcccccaaagaaaccccatcgccatcagcactcactccccactcccccagcccctggcaaccacaaatctttccaactctacggatttgcctgttctgggcatttcatgtcaatggaatcatgtactctgtgaaaaaaaaaaaaaaaaaaaaaaaaaaaaaaaaaaaaaaaaaaaaaaaaaaaaaaaaa

SEQ ID NO: 6392 - DNA, 600 bp, Homo sapiens
cagagggcaatcgtgggacatgtggatctctataagggcactgttgatggtattttaaagatgtggaaacatgagggcttttttgcactctataaaggattttggccaaactggcttcggcttggaccctggaacatcattttttttattacatacgagcagctaaagaggcttcaaatctaagaactgaattatatgtgagcccagccctgccagcctttctactcctttgcccttttcccgtgttctaatgtattttgacaatgttgtaagtgtttaccaagccgttggtctcctaagggcctcctgatggaagaacagtggggtggttcaaagttatttctatgtttgtgttaccatgttaacttttccccgagagaaagtgttaacattgagactctggccccagattggtatcttctatgaagatggatactgatgggtgacattgaaaacggcctgctttccaaatgtggttaaatgtaattggttagccccagacttgggctagagcagaaggcataggccagggtggttattgctatatgtgttacagacctcggttctcattaaagtatttattggcagaatcacaaaaaa

SEQ ID NO: 6393 - DNA, 600 bp, Homo sapiens
ccattgtcttgctgtttttgtactttcttttcaggtcatttacaattgggagatttcagaaacattcctttcaccatcatttagaaatggtttgccttaatggagacaatagcagatcctgtagtatttccagtagacatggccttttaatctaagggcttaagactgattagtcttagcatttactgtagttggaggatggagatgctatgatggaagcatacccagggtggcctttagcacagtatcagtaccatttatttgtctgccgcttttaaaaaatacccattggctatgccacttgaaaacaatttgagaagtttttttgaagtttttctcactaaaatatggggcaattgttagccttacatgttgtgtagacttactttaagtttgcacccttgaaatgtgtcatatcaatttctggattcataatagcaagattagcaaaggataaatgccgaaggtcacttcattctggacacagttggatcaatactgattaagtagaaaatccaagctttgcttgagaacttttgtaacgtggagagtaaaaagtatcggttttaaaaaaaaaaaaaaaaaaaaaaaaaaaaaaaa

SEQ ID NO: 6394 - DNA, 843 bp, Homo sapiens; identical to SEQ ID NO: 1159

SEQ ID NO: 6395 - DNA, 600 bp, Homo sapiens
aaaggcagtgccacttatccaccaggagggcaaccggttgtaccgcgaggggcatgtgaaggaggctgctgccaagtactacgatgccattgcctgcctcaagaacctgcagatgaaggaacagcctgggtcccctgaatggatccagctggacaagcagatcacgccgctgctgctcaactactgccagtgcaagctggtggtcgaggagtactacgaggtgctggaccactgctcttccatcctcaacaagtacgacgacaacgtcaaggcctacttcaagcggggcaaggcccacgcggccgtgtggaatgcccaggaggcccaggctgactttgccaaagtgctggagctggacccagccctggcgcctgtggtgagccgagagctgcgggccctggaggcacggatccggcagaaggacgaagaggacaaagcccggttccgggggatcttctcccattgacaggagcacttggccctgccttacctgccaagcccactgctgcagctgccagcccccctgcccgtgctgcgtcatgcttctgtgtatataaaggcctttatttatctctcaaaaaaaaaaaaaaaaaaaaaaaa

SEQ ID NO: 6396 - DNA, 1400 bp, Homo sapiens
agcaagccagtcgctgcttccacctgttcagggaagaaaacaccccgtactggcaggcatggagccaacaaggagaacctggagctcaacggcagcatcctgagtggtgggtaccctggctcggcccccctccagcgcaacttcagcattaattctgttgccagcacctattctgagtttgcgaaggatccgtccctctctgacagttccactgttgggcttcagcgagaactttcaaaggcttccaaatctgatgctacttctggaatcctcaattcaaccaacatccagtcctgagaagccctgatcagtcaaccagctgtggcttcctgtgcctagactggacctaattatatgggggtgactttagtttttcttcagcttaggagtgcttgaaaccttggccaggttccatgaccatgggcctaacttaaagatgtgaatgagtgttacagttgaaagcccatcataggtttagtggtcctaggagacttggttttgacttatatacatgaaaagtttatggcaagaagtgcaaattttagcatatggggcctgacttctctaccacataattctacttgctgaagcatgatcaaagcttgttttatttcaccactgtaggaaaatgattgactatgcccatccctgggggtaattttggcatgtatacctgtaactagtaattaacatcttttttgtttaggcatgttcaattaatgctgtagctatcatagctttgctcttacctgaagccttgtccccaccacacaggacagccttcctcctgaagagaatgtctttgtgtgtccgaagttgagatggcctgccctactggcaaagaggtgacaggaaggctgggagcagctttgttaaattgtgttcagttctgttacacagtgcattgccctttgttgggggtatgcatgtatgaacacacatgcttgtcggaacgctttctcggcgtttgtcccttggctctcatctcccccattcctgtgcctactttgcctgagttcttctacccccgcagttgccagccagattgggagtctgtttgttccaatgggttgagctgtctttgtcgtggagatctggaactttgcacatgtcactactggggaggtgttcctgctctagcttccacgatgaggcgccctctttacctatcctctcaatcactactcttcttgaagcactattatttattcttccgctgtctgcctgcagcagtactactgtcaacatagtgtaaatggttctcaaaagcttaccagtgtggacttggtgttagccacgctgtttacctcatacagtacgtgtcctgtttttaaaatatacaattattcttaaaaataaattaaaatcgtatacttacatttcaaaaaaaaaaaaaaaaa

SEQ ID NO: 6397 - DNA, 600 bp, Homo sapiens
agacaaatgggctacaccgaagcaattgaagtgatccaggcagcctccagcccagtgaagaccacctctcaggcccactcgctgcctctctcgcctgcctccacaaggcagcaaatagacgagctccgagacagtgacagtgtctgcgacacgggcgtggagacatccttccgcaaactcagctttaccgagtctctgaccagtggtgcctcactgctaactctcaacaaaatgccccatgattatgggcaggaaggacctctagaaggcaaaatttagcctgctgacaatttcccacaccgtgtaaaccaaagccctaaaattccactgcgttgtccacaagacagaagctgaagtgcatccaaaggtgctcagagagccggcccgcctgaatcattctcgatttaactcgagaccttttcaacttggcttcctttcttggttcataaatgaattttagtttggttcacttacagatagtatctagcaatcacaacactggctgagcggatgcatctggggatgaggttgcttactaagctttgccagctgctgctggatcacagctgctttctgttgtcattgctgttgtccctctgc

SEQ ID NO: 6398 - DNA, 600 bp, Homo sapiens
gagacttgagcttgacctaaggatatgcattaaccactctacagactcccactcagtactgtacagggtggctgtggtcctagaagttcagtttttactgaggaaatatttccattaacagcaattattatattgaaggctttaataaaggccacaggagacattactatagcatagattgtcaaatgtaaatttactgagcgtgttttataaaaaactcacaggtgtttgaggccaaaacagattttagacttaccttgaacggataagaatctatagttcactgacacagtaaaattaactctgtgggtgggggcggggggcatagctctaatctaatatataaaatgtgtgatgaatcaacaagatttccacaattcttctgtcaagcttactacagtgaaagaatgggattggcaagtaacttctgacttactgtcagttgtacttctgctccatagacatcagtattctgccatcatttttgatgactacctcagaacataaaaaggaacgtatatcacataattccagtcacagtttttggttcctcttttctttcaagaactatatataaatgacctgttttcacgcggccgc

SEQ ID NO: 6399 - DNA, 1400 bp, Homo sapiens
atatgggagcaaccaccatggaccagaagtctctctgggcaggtgtagtggtcttgctgcttctccagggaggatctgcctacaaactggtttgctactttaccaactggtcccaggaccggcaggaaccaggaaaattcacccctgagaatattgaccccttcctatgctctcatctcatctattcattcgccagcatcgaaaacaacaaggttatcatcaaggacaagagtgaagtgatgctctaccagaccatcaacagtctcaaaaccaagaatcccaaactgaaaattctcttgtccattggagggtacctgtttggttccaaagggttccaccctatggtggattcttctacatcacgcttggaattcattaactccataatcctgtttctgaggaaccataactttgatggactggatgtaagctggatctacccagatcagaaagaaaacactcatttcactgtgctgattcatgagttagcagaagcctttcagaaggacttcacaaaatccaccaaggaaaggcttctcttgactgcgggcgtatctgcagggaggcaaatgattgataacagctatcaagttgagaaactggcaaaagatctggatttcatcaacctcctgtcctttgacttccatgggtcttgggaaaagccccttatcactggccacaacagccctctgagcaaggggtggcaggacagagggccaagctcctactacaatgtggaatatgctgtggggtactggatacataagggaatgccatcagagaaggtggtcatgggcatccccacatatgggcactccttcacactggcctctgcagaaaccaccgtgggggcccctgcctctggccctggagctgctggacccatcacagagtcttcaggcttcctggcctattatgagatctgccagttcctgaaaggagccaagatcacgcgcctccaggatcagcaggttccctacgcagtcaaggggaaccagtgggtgggctatgatgatgtgaagagtatggagaccaaggttcagttcttaaagaatttaaacctgggaggagccatgatctggtctattgacatggatgacttcactggcaaatcctgcaaccagggcccttaccctcttgtccaagcagtcaagagaagccttggctccttgtgaaggattaacttacagagaagcaggcaagatgaccttgctgcctggggcctgctctctcccaggaattctcatgtgggattccccttgccaggctggcctttggatctctcttccaagcctttcctgacttcctcttagatcatagattggacctggttttgttttcctgcagctgttgacttgttgccctgaagtacaataaaaaaaattcattttgctccagta

SEQ ID NO: 6400 - DNA, 1400 bp, Homo sapiens; identical to SEQ ID NO: 6399

SEQ ID NO: 6401 - DNA, 1400 bp, Homo sapiens
tgcagtacctgtactacctggcccagatcggcatcgccatgtctccgctcagcaacaacagcctcttcctcagctatcaccggaatccgctaccggagtacctgtcccgcggcctcatggtctccctgtccactgatgatcccttgcagttccacttcaccaaggagccgctgatggaggagtacagcatcgccacccaggtgtggaagctcagctcctgcgatatgtgtgagctggcccgcaacagcgtgctcatgagcggcttctcgcacaaggtaaagagccactggctgggacccaactataccaaggaaggccctgaggggaatgacatccgccggaccaatgtgccagacatccgcgtgggctaccgctacgagaccctgtgccaggagctggcgctcatcacgcaggcagtccagagtgagatgctggagaccattccagaggaggcgggtatcaccatgagcccagggcctcaatgagcctggtccatgaagtgcccaccacatcgcagcacttttaccacgttttgtcctcagaccccgcccatgctgtgtggtctctgcatgtctccattcttctctgtctctgtcttgcatgtctcctaccatgtcactgtccctgggccacccagtgaaagcaaagcctgggaatctgctcattgttgtttgggctcaggtattgagcctgatggcccaggtattgagggcctcccctgctggtggccctgtcctgggatcctcagaagcctgactgtcctatgggcttctccagtgtccacaggggcttgggatggttgtggggggctggcccctctagcctttccggtccttcctgggcaaatctaagccttggccagggccgaagtttaggcccctgtcttgttcatgtagccgaggggcaggcgggggacctctacacctctgctgtgggcacggggctgctgagggtctgtggaactccagcagctctgcactgggtagagctgggcctagagctcagtcacaggcctgggcttcctggcctgagtgggtagacgcaggcggcagaggtgctggaccacatctccgccaagtcactgcccagcagccttctccgtcctgtccccagcccacgtgctccttgggtgtcagcttcctgtgcctctgtgggagagggcagctgccttgtgttatgtctggggccacagttgctgcaaagtcctggatctgccactcaaccccgggagtggtgttcccagtgtggctcccagagctttgaccagattgtgatcccagctggcccctatgttgtgttctggactgaggcctttgctgtgaactgcagtgtttcatacgaaccatctttcctagtgcatgagaaataaagattatttaagtaaaaaaaaaaaaaaaaaa

SEQ ID NO: 6402 - DNA, 1362 bp, Homo sapiens; identical to SEQ ID NO: 1167

SEQ ID NO: 6403 - DNA, 1400 bp, Homo sapiens
gacgttccagttggtgaggagctgttgggtcgtgtagttgatgcccttggtaatgctattgatggaaagggtccaattggttccaagacgcgtaggcgagttggtctgaaagcccccggtatcattcctcgaatttcagtgcgggaaccaatgcagactggcattaaggctgtggatagcttggtgccaattggtcgtggtcagcgtgaactgattattggtgaccgacagactgggaaaacctcaattgctattgacacaatcattaaccagaaacgtttcaatgatggatctgatgaaaagaagaagctgtactgtatttatgttgctattggtcaaaagagatccactgttgcccagttggtgaagagacttacagatgcagatgccatgaagtacaccattgtggtgtcggctacggcctcggatgctgccccacttcagtacctggctccttactctggctgttccatgggagagtattttagagacaatggcaaacatgctttgatcatctatgacgacttatccaaacaggctgttgcttaccgtcagatgtctctgttgctccgccgaccccctggtcgtgaggcctatcctggtgatgtgttctacctacactcccggttgctggagagagcagccaaaatgaacgatgcttttggtggtggctccttgactgctttgccagtcatagaaacacaggctggtgatgtgtctgcttacattccaacaaatgtcatttccatcactgacggacagatcttcttggaaacagaattgttctacaaaggtatccgccctgcaattaacgttggtctgtctgtatctcgtgtcggatccgctgcccaaaccagggctatgaagcaggtagcaggtaccatgaagctggaattggctcagtatcgtgaggttgctgcttttgcccagttcggttctgacctcgatgctgccactcaacaacttttgagtcgtggcgtgcgtctaactgagttgctgaagcaaggacagtattctcccatggctattgaagaacaagtggctgttatctatgcgggtgtaaggggatatcttgataaactggagcccagcaagattacaaagtttgagaatgctttcttgtctcatgtcgtcagccagcaccaagccttgttgggcactatcagggctgatggaaagatctcagaacaatcagatgcaaagctgaaagagattgtaacaaatttcttggctggatttgaagcttaaactcctgtggattcacatcaaataccagttcagttttgtcattgttctagtaaattagttccatttgtaaaagggttactctcatactccttatgtacagaaatcacatgaaaaataaaggttccataatgcgtaaaaaaaaaaaaaaaaaa

SEQ ID NO: 6404 - DNA, 1007 bp, Homo sapiens; identical to SEQ ID NO: 1169

SEQ ID NO: 6405 - DNA, 925 bp, Homo sapiens; identical to SEQ ID NO: 1170

SEQ ID NO: 6406 - DNA, 1400 bp, Homo sapiens
aacggagcgcccgggatgcaggaggagagcctgcagggctcctgggtagaactgcacttcagcaataatgggaacgggggcagcgttccagcctcggtttctatttataatggagacatggaaaaaatactgctggacgcacagcatgagtctggacggagtagctccaagagctctcactgtgacagcccacctcgctcgcagacaccacaagataccaacagggcttctgaaacagatacccatagcattggagagaaaaacagctcacagtctgaggaagatgatattgaaagaaggaaagaagttgaaagcatcttgaagaaaaactcagattggatatgggattggtcaagtcggccggaaaatattccccccaaggagttcctctttaaacacccgaagcgcacggccaccctcagcatgaggaacacgagcgtcatgaagaaagggggcatattctctgcagaatttctgaaagttttccttccatctctgctgctctctcatttgctggccatcggattggggatctatattggaaggcgtctgacaacctccaccagcaccttttgatgaagaactggagtctgacttggttcgttagtggattacttctgagcttgcaacatagctcactgaagagctgttagatcctggggtggccacgtcacttgtgtttatttgttctgtaaatgctgcgttcctaatttagtaaaataaaagaatagacactaaaatcatgttgatctataattacacctatgggatcaataagcatgtcagactgattaatgtctactgtgaaaatttggtagtaaattttcatttgatattagatataaatatctgaatataaataattttaatatactagtcatgatgtgtgttgtattttaaaaattatctgcaaccttaattcagctgaagtactttatatttcaaaagaatgaataacattgataataaaatcgctactttaaggggtttgtccaaaataaatattgtggccttatatatcacactattgtagaaagtattatttaatttaaatggatgcaggttgtctactaaagaaagattatatataactatgctaattgttcataatcaacagaaaccaagatagagctacaaactcagctgtacagttcgtacactaaactcttcttgcttttgcattataaggaattaagtctccgattattaggtgatcaccctggatgatcagttttctgctgaaggcacctactcagtatcttttcctctttatcactctgcattggtgaatttaatcctctcctttgtgttcaacttttgtgtgcttttaaaatcagctttattctaagcaaatctgtgtctactttaaaaaactggaaatggaaaaaaaaataaatctt

SEQ ID NO: 6407 - DNA, 600 bp, Homo sapiens
ctgtgcagaagggcacctccacaccagagtacaatgtgaaaggcatcttctaccgcaagaagctgagccagcccatcactgtacaggtctggaaccaccgagtgctgaaggatgaatttctgggccaggtgcacctaaaggctgacccggacaacctccaggccctgcataccctccacctccgggaccgaaatagccggcagcccagcaacctgccaggcactgtggccgtgcacattctcagcagcacctccctcatggctgtctgacacctgcccacctacctggctctgaccgttcccaccaccatctgcatgtccccactgggcctgagtctagcctgggagccaggatactggggtccttttcccactcttccactgacttgctgtgtgaccttaggaagtctctgcccctctctcagcctcagtgtcccgagggccccgaagcattccattctcgtggaggagtttccttgctgagatttcaaatagtcctccccacctcaactgtcaccactgctaagggactctatccattgagcacattttcctaaggccctgctgtctgccgaggagcgccaagaagatgtcacttgcc

SEQ ID NO: 6408 - DNA, 1247 bp, Homo sapiens; identical to SEQ ID NO: 1173

SEQ ID NO: 6409 - DNA, 1400 bp, Homo sapiens
gcagcagggcatcaagagtcagcatcagacaaaagaagagcagtcacagatcaccagccaggtaactgggcagattggctggcggcgagagggtatcaagtatcgtcggaatgagctcttcctggatgtgctggagagtgtgaacctgctcatgtccccacaagggcaggtgctgagtgcccatgtgtcgggccgggtggtgatgaagagctacctgagtggcatgcctgaatgcaagtttgggatgaatgacaagattgttattgaaaagcagggcaaaggcacagctgatgaaacaagcaagagcgggaagcaatcaattgccattgatgactgcaccttccaccagtgtgtgcgactcagcaagtttgactctgaacgcagcatcagctttatcccgccagatggagagtttgagcttatgaggtatcgcacaaccaaggacatcatccttcccttccgggtgatcccgctagtgcgagaagtgggacgcaccaaactggaggtcaaggtggtcatcaagtccaactttaaaccctcactgctggctcagaagatcgaggtgaggatcccaaccccactgaacacaagcggggtgcaggtgatctgcatgaaggggaaggccaagtacaaggccagcgagaatgccatcgtgtggaagatcaagcgcatggcaggcatgaaggaatcgcagatcagcgcagagattgagcttctgcctaccaacgacaagaagaaatgggctcgaccccccatttccatgaactttgaggtgccattcgcgccctctggcctcaaggtgcgctacttgaaggtgtttgaaccgaagctgaactacagcgaccatgatgtcatcaaatgggtgcgctacattggccgcagtggcatttatgaaactcgctgctagctgccactaggcagctagcccacctccccagccaccctcctccacaggtccaggtgccgctccctcccccaccacacatcagtgtctcctccctcctgctttgctgccttccctttgcaccagcccgagtctaggtctgggccaagcacattacaagtgggaccggtggagcagcccctgggctccctgggcaggggagttctgaggctcctgctctcccatccacctgtctgtcctggcctaatgccaggctctgagttctgtgaccaaagccaggtgggttccctttccttcccacccctgtggccacagctctggagtgggagggttggttgcccctcacctcagagctcccccaaaggccagtaatggatccccggcctcagtccctactctgctttgggatagtgtgagcttcattttgtacacgtgtgacttcgtccagttacaaacccaataaactctgtagagtggaaaaaaaaaaaaaaaaaaa

SEQ ID NO: 6410 - DNA, 1400 bp, Homo sapiens
gaaagccggtatcagaaccatagtagcaagtcttctggtagaagtggaagaagtagttataaaagcaaacacaggattcaccacagtacttcacatcgtcgttcacatgggaagagtcaccgaaggaaaagaaccaggagtgtagaggatgatgaggagggtcacctgatctgtcagagtggagacgtactaagtgcaagatatgaaattgttgatactttaggtgaaggagcttttggaaaagttgtggagtgcatcgatcataaagcgggaggtagacatgtagcagtaaaaatagttaaaaatgtggatagatactgtgaagctgctcgctcagaaatacaagttctggaacatctgaatacaacagaccccaacagtactttccgctgtgtccagatgttggaatggtttgagcatcatggtcacatttgcattgtttttgaactattgggacttagtacttacgacttcattaaagaaaatggttttctaccatttcgactggatcatatcagaaagatggcatatcagatatgcaagtctgtgaattttttgcacagtaataagttgactcacacagacttaaagcctgaaaacatcttatttgtgcagtctgactacacagaggcgtataatcccaaaataaaacgtgatgaacgcaccttaataaatccagatattaaagttgtagactttggtagtgcaacatatgatgacgaacatcacagtacattggtatctacaagacattatagagcacctgaagttattttagccctagggtggtcccaaccatgtgatgtctggagcataggatgcattcttattgaatactatcttgggtttaccgtatttccaacacacgatagtaaggagcatttagcaatgatggaaaggattcttggacctctaccaaaacatatgatacagaaaaccaggaaacgtaaatattttcaccacgatcgattagactgggatgaacacagttctgccggcagatatgtttcaagagcctgtaaacctctgaaggaatttatgctttctcaagatgttgaacatgagcgtctctttgacctcattcagaaaatgttggagtatgatccagccaaaagaattactctcagagaagccttaaagcatcctttctttgaccttctgaagaaaagtatatagatctgtaattggacagctctctcgaagagatcttacagactgtatcagtctaatttttaaattttaagttattttgtacagctttgtaaattcttaacatttttatattgccatgtttattttgtttgggtaatttggttcattaagtacatagctaaggtaatgaacatctttttcagtaattgtaaagtgatttattcagaataaattttttgtgcttatga

SEQ ID NO: 6411 - DNA, 600 bp, Homo sapiens
ggcaatgtaagtgcccataccagccacttggtgggcagtgccctttccgacccttacctgtcctttgcagcagccatgaacgggctggcagggcctctccatggactggcaaatcaggaagtgcttgtctggctaacacagctgcagaaggaagttggcaaagatgtgtcagatgagaagttacgagactacatctggaacacactcaactcaggacgggttgttccaggctatggccatgcagtactaaggaagactgatccgcgatatacctgtcagcgagagtttgctctgaaacacctgcctaatgaccccatgtttaagttggttgctcagctgtacaagattgtgcccaatgtcctcttagagcagggtaaagccaagaatccttggcccaatgtagatgctcacagtggggtgctgctccagtattatggcatgacggagatgaattactacacggtcctgtttggggtgtcacgagcattgggtgtactggcacagctcatctggagccgagccttaggcttccctctagaaaggcccaagtccatgagcacagagggtctgatgaagtttgtggactctaagtcagggtaa

SEQ ID NO: 6412 - DNA, 1400 bp, Homo sapiens
cctgagagttcccagccagtggcagagaaatatcacatataagtcaaaccctaattggatattgcctgattctgtggactggagagagaaagggtgtgttactgaagtgaaatatcaaggttcttgtggtgcttgctgggctttcagtgctgtgggggccctggaagcacagctgaagctgaaaacaggaaagctggtgtctctcagtgcccagaacctggtggattgctcaactgaaaaatatggaaacaaaggctgcaatggtggcttcatgacaacggctttccagtacatcattgataacaagggcatcgactcagacgcttcctatccctacaaagccatggatcagaaatgtcaatatgactcaaaatatcgtgctgccacatgttcaaagtacactgaacttccttatggcagagaagatgtcctgaaagaagctgtggccaataaaggcccagtgtctgttggtgtagatgcgcgtcatccttctttcttcctctacagaagtggtgtctactatgaaccatcctgtactcagaatgtgaatcatggtgtacttgtggttggctatggtgatcttaatgggaaagaatactggcttgtgaaaaacagctggggccacaactttggtgaagaaggatatattcggatggcaagaaataaaggaaatcattgtgggattgctagctttccctcttacccagaaatctagaggatctctcctttttataacaaatcaagaaatatgaagcactttctcttaacttaatttttcctgctgtatccagaagaaataattgtgtcatgattaatgtgtatttactgtactaattagaaaatatagtttgaggccgggcacggtggctcacgcctgtaatcccagtacttgggaggccaaggcaggcatatcaacttgaggccaggagttaaagagcagcctggctaacatggtgaaaccccatctctactaaaaatacaaaaaattagccgagcacggtggtgcatgcctgtaatcccagctacttgggaggctgaggcacgagattccttgaacccaagaggttgaggctatgttgagctgagatcacaccactgtactccagcctggatgacagagtggagactctgtttcaaaaaaacagaaaagaaaatatagtttgattcttcatttttttaaatttgcaaatctcaggataaagtttgctaagtaaattagtaatgtactatagatataactgtacaaaaattgttcaacctaaaacaatctgtaattgcttattgttttattgtatactctttgtcttttaagacccctaatagccttttgtaacttgatggcttaaaaatacttaataaatctgccatttcaaatttcaaaaaaaaaaaaaaaaaaaaaa

SEQ ID NO: 6413 - DNA, 600 bp, Homo sapiens
ccgtcgagaagctcaaggatgaggtcctcaaggagacagtatctcagcgccctggagccacagtacccactgactttgccaccttcccttcatcagccttcctcagggccaaggaggagcagcaggatgacacagtctacatgggcaaagtgaccttctcatgtgcggctggttttggacagcgacaccggctggtgctgacccaggagcagctgcaccagcttcacagtcgcctcatctcctaagcactcctttcccctgctgtccccttcgaccctcagccctctggtgccgctctgcccgatgcacagccacctcagccagcccccaggtagaaacgtgggttaagctcttcctgccccgttcagcttcactcccaccctttcagcgtcctgccccttcaccttgacccgggttcccccactcccattccctggcctctgccataatttgttgttcaactgctccctccttcctgaggggcctcagggcttgtggggggtaggctgagaccccaccaccaaaggttaagtgaggtccccttgattgaggacttcaccccttgattaaagcaacttctgcttcagtgaaaaaaaaaaa

SEQ ID NO: 6414 - DNA, 490 bp, Homo sapiens; identical to SEQ ID NO: 1179

SEQ ID NO: 6415 - DNA, 420 bp, Homo sapiens; identical to SEQ ID NO: 1180

SEQ ID NO: 6416 - DNA, 600 bp, Homo sapiens
tggaagaagccatccagtgtgcagaaaaaattgccagcaattctaaaattgtagtagcgatggccaaagaatcagtgaatgcagcttttgaaatgacattaacagaaggaagtaagttggagaagaaactcttttattcaacctttgccactgatgaccggaaagaagggatgaccgcgtttgtggaaaagagaaaggccaacttcaaagaccagtgagaaccagctgcccctgcttcacacctctgcttggagaggacaagtgcagcctgtcagttttagaagcaagtaaatcatcctcttttcaagagcagtgtccgtggtgtgcagttcctctccaattgctgcgtggtcgtggcccgacctctcacggcatgacagccttcgtcacccagcctgtgagggtcctgactggagcaccttctaaatctaagattctgctgaggagcccccgctggtccctctgggcatgctgtgctcggacggaaagcggggcctgcgggtccttgtgtccctgccgctgaagaatggggctgctctgagggaaacgctgtctgctgccttcatacagatgctgattaaagtgatagcgattcagatt

SEQ ID NO: 6417 - DNA, 600 bp, Homo sapiens
tctttcctttcccctctagttttgggtgtgcatgtttggagtttgtagtgggtggtttgtaaaactggaccattctgccttgctatgggttgttcaagaaagcctcattcttttctgtgaccctttcgcttttgcattcaccctccttcccacctacctgtcctggggctgttgagcagcataataatcccgggagaatgattcccctcatagaaagacaaaagcatccatcccctcatagttaagtagccactggtgtcctgggaatttctggttggatttggtgccctgaacttttttattaagaaatcagatcccagggtgagagtaacaggccatttggccaagaaagaaacctgtttgtttttcttttgaactatgaaaagaccctgtttgtgaatatattttagaaagagaggaaggatgtctgcagaactttgttctgttttctgccacaaaaatgtgaatagttcagagtgaaaaccttttgtgatggttgatgtctcaggaataagctggatctccaatgttttggggatgctttgagtctcaaaaaaaattgataatcagaaaagtaaaaaaaaaaaaaaaaaaaaaaaa

SEQ ID NO: 6418 - DNA, 600 bp, Homo sapiens
aaaaccagaaatcactccactgcttaccttacaaaatagtgaaatgatcttagagaacaaggacagccatcacagagaacgtctgttttcaagaacaacataagcatagtgcaaggagctccatttccgagctcctaagaaatatgcttcaaaggtcaaacattacaaaagcattagtagtttgtttgtttgtttttgagactgagtctcactttatcacccagactggcgtgcagtggcactatcttggctcattgcaacctctgcctcccaggtcagcctcccaagtagctgggattacaccaccatgcccagctactaaaaatacttgtatttttagtagagacggggtttcaccatgttgaccaggctggtcttgaactcctgacctcaagtgatcttccggcctcagcctcccaaagtgctggattacaggcgtgagccactgagccagccagcattagtaatttttaaaaacactttatcagtattttaaaaatgttaatgcaggagaaaagatatcacaactctatggaaaatgacatttccatttgccttattgctacttcaagctctttaaatcaccatcttccctatttc

SEQ ID NO: 6419 - DNA, 1400 bp, Homo sapiens
gagcatccgatctgataggtctgtgccatcagacatcttccagatacaggccacaactatttatgccaacaccatcaatacttttcggattaaatctggaaatgaaaatggagagttctacctacgacaaacaagtcctgtaagtgcaatgcttgtgctcgtgaagtcattatcaggaccaagagaacatatcgtggacctggagatgctgacagtcagcagtatagggaccttccgcacaagctctgtgttaagattgacaataatagtggggccattttcattttagtcttttctaagagtcaaccacaggcatttaagtcagccaaagaatattgttaccttaaagcactattttatttatagatatatctagtgcatctacatctctatactgtacactcacccataacaaacaattacaccatggtataaagtgggcatttaatatgtaaagattcaaagtttgtctttattactatatgtaaattagacattaatccactaaactggtcttcttcaagagagctaagtatacactatctggtgaaacttggattctttcctataaaagtgggaccaagcaatgatgatcttctgtggtgcttaaggaaacttactagagctccactaacagtctcataaggaggcagccatcataaccattgaatagcatgcaagggtaagaatgagtttttaactgctttgtaagaaaatggaaaaggtcaataaagatatatttctttagaaaatggggatctgccatatttgtgttggtttttattttcatatccagcctaaaggtggttgtttattatatagtaataaatcattgctgtacaacatgctggtttctgtagggtatttttaattttgtcagaaattttagattgtgaatattttgtaaaaaacagtaagcaaaattttccagaattcccaaaatgaaccagataccccctagaaaattatactattgagaaatctatggggaggatatgagaaaataaattccttctaaaccacattggaactgacctgaagaagcaaactcggaaaatataataacatccctgaattcaggcattcacaagatgcagaacaaaatggataaaaggtatttcactggagaagttttaatttctaagtaaaatttaaatcctaacacttcactaatttataactaaaatttctcatcttcgtacttgatgctcacagaggaagaaaatgatgatggtttttattcctggcatccagagtgacagtgaacttaagcaaattaccctcctacccaattctatggaatattttatacgtctccttgtttaaaatctgactgctttactttgatgtatcatatttttaaataaaaataaatattcctttagaagatcactctaaaa

SEQ ID NO: 6420 - DNA, 1400 bp, Homo sapiens
ggagccatcactgcacgatctcacggagttctcccgatctggaagcgggaccccaaccaagagcagaagtgtctctggcgtgctgaacggaggcaaatccatgagccacaatgaatcaacgtagccagtgagggcaaaagaagggctctgtaacagaaccttacctccaggtgctgttgaattcttctagcagtccttcacccaaaagttcaaatttgtcagtgacatttaccaaacaaacaggcagagttcactattctatctgccattagaccttcttatcatccatactaaagccccattatttagattgagcttgtgcataagaatgccaagcattttagtgaactaaatctgagagaaggactgccaaattttctcatgatctcacctatgactttggggatgataatccaaaagtatttcacagcactaatgctgatcaaaatttgctctcccaccaagaaaatgtaaaagaccacaattgttcttcaaaaacaaacaaaacaaaacaaaacaaaattaactgcttaaatgttttgtcggggcaaacaaaattatgtgaattgtgttgttttcttggcttgatgttttctatctacgcttgattcacatgtactcttttctttggcatagtgcaactttatgatttctgaaattcaatggttctattgactttttgcgtcacttaatccaaatcaaccaaattcagggttgaatctgaattggcttctcaggctcaaggtaacagtgttcttgtggtttgaccaattgtttttctttctttttttttttttagatttgtggtattctggtcaagttattgtgctgtactttgtgcgtagaaatgtgagttgtattgtcaaccccagtcagtaaagagaacttcaaaaaattatcctcaagtgtagatttctcttaattccatttgtgtatcatgttaaactattgttgtggcttcttgtgtaaagacaggaactgtggaactgtgatgttgtcttttgtgttgttaaaataagaaatgtcttatctgtatatgtatgagtcttcctgtcattgtatttggcacatgaatattgtgtacaaggaattgttaagactggttttccctcaacaacatatattatacttgctactggaaaagtgtttaagacttagctaggtttccatttagatcttcatatctgttgcatggaagaaagttgggttcttggcatagagttgcatgatatgtaagattttgtgcattcataattgttaaaaatctgtgttccaaaagtggacatagcatgtacaggcagttttctgtcctgtgcacaaaaagtttaaaaaagttgtttaatatttgttgttgtatacccaaatacgcaccgaataaactctttatattcattcaaaga

SEQ ID NO: 6421 - DNA, 600 bp, Homo sapiens
aggggatacaggccaaagaggtgctgaaaaaatatttggagtccaaggaggatgtggctgatgcacttctacagactgatcagtcactctcagaaaaggaaaaagcgattgaagtggaacgtataaaggctgaatctgcagaagctgcaaagaaaatgttggaggaaatacaaaagaagaatgaggagatgatggaacagaaagagaagagttatcaggaacatgtgaaacaattgactgagaagatggagagggacagggcccagttaatggcagagcaagagaagaccctcgctcttaaacttcaggaacaggaacgccttctcaaggagggattcgagaatgagagcaagagacttcaaaaagacatatgggatatccagatgagaagcaaatcattggagccaatatgtaacatactctaaaagtccaaggagcaaaatttgcctgtccagctccctctccccaagaaacaacatgaatgagcaacttcagagtgtcaaacaactgccattaaacttaactcaaaatcatgatgcatgcatttttgttgaaccataaagtttgcaaagtaaaggttaagtatgaggtcaatgtttt

SEQ ID NO: 6422 - DNA, 1194 bp, Homo sapiens; identical to SEQ ID NO: 1187

SEQ ID NO: 6423 - DNA, 600 bp, Homo sapiens
taatcctggaggggctgatcagtgcccgtgtggactcacacagcaagatcctatacgcccgggacgtggatcagcgcagcaccacctttgagaagtctctgttgatgggcaaggagttccagcgccgcgccaaggccatgatgctgcgggcagctgtgctccgcaaccagatccatgtcaagtccccgcccagagaagggagccagggggagctgactccagccaacagccagtcccggatgagcaccaacatgtgaggggtgaaccttggcctccaggacatctgcaccccctccccacctccacggacctcggacctccaggcggctcagtgctgcctgcggcccagctaaggggcctggccactgggtgccacccagcctgtgtgccctccctggggctgaggaggcaggcggctgctagttgtggcccttcctggaaggagaggcctgcagggctcgaccctgtgggtttctgtccccagggagcagactgtgcggcacccaggcccagtggcaccatttcccagacccctcctgttcccgcctcagtcaggtgcagacaagtgggcggtgtccattaaagagcagactcagcgtt

SEQ ID NO: 6424 - DNA, 1400 bp, Homo sapiens
gaattgtcagcagcaccagacccagggtggcctgactgcttcaattccggagtcttcgtttatcagccttcagttgaaacatacaatcagctgttgcatcttgcttctgagcaaggtagttttgatggtggggaccaaggcatactgaacacattttttagcagctgggcaacaacagatatcagaaaacacctgccgtttatttataacctaagcagcatctctatatactcctacctcccggcatttaaagtgtttggtgcaagtgccaaagttgtgcatttcctgggacgagtcaaaccatggaattatacttatgatcccaaaacaaaaagtgtcaaaagtgaggcccatgatcccaacatgactcatccagagtttctcatcctgtggtggaacatctttaccaccaacgttttacctctgcttcaacaatttggccttgtcaaagacacctgctcatatgtaaatgtgctttcagacttggtctatacactggctttctcttgtggcttctgtagaaaggaagatgtctcaggagccatatcacatctgtcccttggggagatcccagctatggcacagccgtttgtatcctcggaagaacggaaggaacgatgggaacagggccaggctgattatatgggagcagattcctttgacaacatcaagaggaaacttgacacttacctccagtagaaacactgcatttttctgtgaacacatccacttcacaagccttgtttctgatacttagtatctagagctgggttgagaaaagtctgttacagttgctagaggttttcattaaaacttatcagatgagaggcttttttaggataagaggtgagaactgggcaaaagttgtgaagcagcaattctgttatatggacagtgttctgctttttaatcctatttagcttgtttcagaaattctcacttttgttgactgccaacatacaaagtaagggaaactcaagatattaagatggctgtatcagttcttaaaatctgcagagcctggttcaaaatcagtcactcccttcagaagcagacatggcatctgttccttgcttgcttgttggttgtgtacctttcacgagacctgaattttagaattgcccagtgctgccagagtgagtgagtgtaattctcctttcaggtaaagataggctatctcaacactgctgagtgattcataaacatatcaaccaatagcattaacccattttatttcctgtccttagtgtctgaagatgctcaccagttttctgtgtacagtaaggcagcatgctaaaatgcttttgttcagttctggatatttgaaaatagcagtgtgttctctgatggttacctgcagtggcaccctgtacaaaaaataaaagacttattggtgtaaa

SEQ ID NO: 6425 - DNA, 960 bp, Homo sapiens; identical to SEQ ID NO: 1190

SEQ ID NO: 6426 - DNA, 1400 bp, Homo sapiens
tgccagggtgactctggaggccccctgacctgtgagaaggacggcacctactacgtctatgggatagtgagctggggcctggagtgtgggaagaggccaggggtctacacccaagttaccaaattcctgaattggatcaaagccaccatcaaaagtgaaagtggcttctaaggtactgtcttctggacctcagagcccactctccttggcaccctgacaccgggaggcctcatggccaacaatggacacctccagagcctccaggggaccacacagtagactatccctactctaagcagagacaactgccacccagcctgggccttcccagaccagcatttgcacaatatcaccaggcttcttctgcctcccttggtaacccaaggaatgatggaatcaacacaacatagtatgtttgctttccttacccaattgtaccttctagaaaatcagtgttcacagagactgcctccaccacaggcatcctgcaaatgcagactccagaatccccagcatcagcgggaaccaccatcacatctttattcctcagcccagacactcgaggcactcaacagaatcagccatccacgtctaggtatcagagaggaccacaaatacaacattctccatctgctttcagagttattattttaataaaggaagatctgggatgggctggtgggccattccagcttgccgaaatcaaagccatctgaagcctgtctctggtgaacaaacttcctctctggcctctcaggaatcagggtggcatggctcacaacagcagggccttcttctttttgacgtgcagaatctcagtggcatctgggttcacctccccactctgatgatctccagcctccactgcttctgccccccgctgctgaaatcaaacataccccaagttaaaatgaagctcccccacccccactcccggccccggttcccacaggacacgctaagaagcacagggagcatttaacaggctcaccctccctttccttttcccctcttctaccctccccaagaaaaagggccttcaaggcaggaatgagaaagcaaagccaatctctcatttagacctggcttctttcttctgaacaaagtagggttcaaaatgcagactgtcatatccagcgagtccctgaccctttctgcgaatgtaacgagcaagcagtcagcacagcctgggctgccctggcccgggattgatgtagccccggtaggtttgcctctgcagaactaatggctgtgacttcagagaaagccctgcaggaagtttaacctgcgtgtcatctgcctggtcatctcagacccatgaaattaggcgccttgtttgagctgcgtttcacacttctttagagctagctgacctttggccaaaaataaactttgaaaag

SEQ ID NO: 6427 - DNA, 600 bp, Homo sapiens
acagtttactttgattggaattccaccagcccctcgtggagttcctcagattgaagttacatttgacattgatgccaatgggatagtacatgtttctgctaaagataaaggcacaagacgtgagcagcagattgtaatccagtcttctggtggattaagcaaagatgatattgaaaatatggttaaaaatgcagagaaatatgctgaagaagaccggcgaaagaaggaacgagttgaagcagttaatatggctgaaggaatcattcacgacacagaaaccaagatggaagaattcaaggaccaattacctgctgatgagtgcaacaagctgaaagaagagatttccaaaatgagggagctcctggctagaaaagacagtgaaacaggagaaaatattagacaggcagcatcctctcttcagcaggcatcattgaagctgttcgaaatggcatacaaaaagatggcatctgagcgagaaggctctggaagttctggcactggggaacaaaaggaagatcaaaaggaggaaaaacagtaataatagcagaaattttgaagccagaaggacaacatatgaagcttaggagtgaagagacttcc

SEQ ID NO: 6428 - DNA, 1400 bp, Homo sapiens
gcctgtccccgaaacttcgcaccccgtcgaactctcgcgagagcgtatctgcgtgtcgggacgtgcggaggctctcactttccgtcatggcgctgaaggtagcgaccgtcgccggcagcgccgcgaaggcggtgctcgggccagcccttctctgccgtccctgggaggttctaggcgcccacgaggtcccctcgaggaacatcttttcagaacaaacaattcctccgtccgctaagtatggcgggcggcacacggtgaccatgatcccaggggatggcatcgggccagagctcatgctgcatgtcaagtccgtcttcaggcacgcatgtgtaccagtggactttgaagaggtgcacgtgagttccaatgctgatgaagaggacattcgcaatgccatcatggccatccgccggaaccgcgtggccctgaagggcaacatcgaaaccaaccataacctgccaccgtcgcacaaatctcgaaacaacatccttcgcaccagcctggacctctatgccaacgtcatccactgtaagagccttccaggcgtggtgacccggcacaaggacatagacatcctcattgtccgggagaacacagagggcgagtacagcagcctggagcatgagagtgtggcgggagtggtggagagcctgaagatcatcaccaaggccaagtccctgcgcattgccgagtatgccttcaagctggcgcaggagagcgggcgcaagaaagtgacggccgtgcacaaggccaacatcatgaaactgggcgatgggcttttcctccagtgctgcagggaggtggcagcccgctaccctcagatcaccttcgagaacatgattgtggataacaccaccatgcagctggtgtcccggccccagcagtttgatgtcatggtgatgcccaatctctatggcaacatcgtcaacaatgtctgcgcgggactggtcgggggcccaggccttgtggctggggccaactatggccatgtgtacgcggtgtttgaaacagctacgaggaacaccggcaagagtatcgccaataagaacatcgccaaccccacggccaccctgctggccagctgcatgatgctggaccacctcaagctgcactcctatgccacctccatccgtaaggctgtcctggcatccatggacaatgagaatatgcacactccggacatcgggggccagggcacaacatctgaagccatccaggacgtcatccgccacatccgcgtcatcaacggccgggccgtggaggcctaggctggccctaggaccttcttggtttgctccttggattccccttcccactccagcaccccagccagcctggtacgcagatcccagaataaagcaccttctccctagaaaaaaaaaaaaaaaaaaaaaaaaaaa

SEQ ID NO: 6429 - DNA, 600 bp, Homo sapiens
cccctcaaacttctgtgcacaaagtgctcccttcccagaggaggggccccatcggtgtgtaaggtggcctattcctctgtgtgttctctggatcttttcagccctgtggtccagtgtccatcacagccatgctgactgagtgactggagacagggatgatggagagttcatgaagggctgggcagagagctggggccacctctggaggtgtcctgctgttcctgttggccccagctgcactcgcagggccttcctgtggcccctttccccaagcaggggcggccgcagctctcacccactttctcctgcagacggcgaggggaccgacctgtttgccgtggctgtccatgagtttggccacgccctgggcctgggccactcctcagcccccaactccattatgaggcccttctaccagggtccggtgggcgaccctgacaagtaccgcctgtctcaggatgaccgcgatggcctgcagcaactctatggtagggggagagggacctgccgcgaaaccatcattgccccatccagtgtcctctgcagcaaggccaggggacgcacacctgcctgactctttcctcacagggaaggcgcccc

SEQ ID NO: 6430 - DNA, 600 bp, Homo sapiens
atatcccctgtatctatgtgttaaataagattgaccaaatctccattgaggaattggatatcatctataaggtgcctcactgtgtacccatctctgcccatcaccgctggaattttgatgacctattggaaaagatctgggactatctgaaactagtgagaatttacaccaaacccaaaggccagttaccagattacacatccccagtggtgcttccttactccaggaccacagtggaggatttctgcatgaagattcacaaaaatcttatcaaagaatttaaatatgctctggtctggggtctctctgtgaaacacaatcctcagaaagtgggtaaagaccatacgttggaggatgaggatgtcattcaaattgtgaagaagtgaaacctttcccttttcccatctgccggacgaaccacaacagcgttccccatgatcaagcaccctaccccagttctttctggttttggcagtcactggatcaggatccaggggagggagatggaggcacccaaactggaacttcatttgtcttaccttggtgtcaccttgtatgtcgaactgcataaaagatctggtaggctggtcagctacatgc

SEQ ID NO: 6431 - DNA, 986 bp, Homo sapiens; identical to SEQ ID NO: 1196

SEQ ID NO: 6432 - DNA, 1400 bp, Homo sapiens
caccaatctgctttctgtctctatggttttatctattcttgctattttatataaatcgaattgtatgagaccttttgtgtctggcttctttcacttagtacaagtttttgagatttatttacatagtagcatgtatcaacacttcatttttatggccaaataaaattgtattatgtgtttatagcacaatttatttatccactcattcattgatggactttgggttgtttctgacttttggctattgggaatagtgctgctatgaatgtttgtgtacctgtatttgtttgaatgcctattttgcattctcttgggtatatatctaggagtggaactgctgggtcatatgttaattctatgtttagctttttgaggaacagacaaactgttttccacagcagttgaaccattccacattcccaccagcaatgtatgagaattccaatttctgtccacttcctcaccaacacttattattttccttttcctttttttaaaaaaaataagttatggccatcttagtgggtgtgaagtggtatctcattgtgttttttatttgcatttcctatgtaatgagctagaaactaaagtacaaactagatgggacatccagtccctttgatagataatgctgagtaaaaaatgagatgaaagacatttgtttgtttttagaacatgagtgacagtttgttaaaaagctttagaggaggaatgaaaacaaagtgaagtacacttagaaaagggccaagtggacatcttggatgtcaagtgcctagttcagtatcttttttttttttttttttttttttgagacagtgcctcactctgtcacccaggctggagtgtagtggcatgatctgggctcactgcaacctcctcctcctggattcaagcaattctcttgcttcagcctcccaagtagctgagactacaagcacccaccaccacacccggctaattttgtatttttcagtagagacggggtttcgccacattggccgtgttggtcttgaactcctggcctcaagcaatccgcctacctcagcctcccaaagtgctaggattacaggcataagccactgagcccagccctagttcagtatcttttatgtaaattataaacatctgcaacattatgtatcatatgcagatacttattgcatttcttttattagtggtgaaagtgttctatgcatttattggctcttgaatttcctcatctatgaattgtcattcacacacctacttttctgcttcgtttttacatatgtctttgcctattaaagatattatccctctgttttatattttctctcattcttgtattgccttttaaattttgttatgatgtttcattaataaacagtgttttgttttcctctataaaaaaaaaaaaaaaa

SEQ ID NO: 6433 - DNA, 600 bp, Homo sapiens
cttcctataaatttctcctgggaaacctgcctttgtatgtggaagtatacctggctttttaaaatatatgtatttaaaaacaaaaagcaacagtaatctatgtgtttctgtaacaaattgggatctgtcttggcattaaaccacatcatggaccaaatgtgccatactaatgatgagcatttagcacaatttgagactgaaatttagtacactatgttctagataggtcagtctaacagtttgcctgctgtatttatagtaaccattttcctttggactgttcaagcaaaaaaggtaactaactgcttcatctccttttgcgcttatttggaaattttagttatagtgtttaactggcatggattaatagagttggagttttatttttaagaaaaattcacaagctaacttccactaatccattatcctttattttattgaaatgtataattaacttaactgaagaaaaggttcttcttgggagtatgttgtcataacatttaaagagatttcccttcatttaaactaaattactgttttatgttgatctgcatatttctgtatatttgtcatgacagtgcttgcatcctatttggtgtg

SEQ ID NO: 6434 - DNA, 600 bp, Homo sapiens
aggaatgcaggctgtactatctgcgaaatggagaacgtatttcagtgtcggcagcctccaagctgctgtccaacatgatgtgccagtaccggggcatgggcctctctatgggcagtatgatctgtggctgggataagaagggtcctggactctactacgtggatgaacatgggactcggctctcaggaaatatgttctccacgggtagtgggaacacttatgcctacggtgtcatggacagtggctatcggcctaatcttagccctgaagaggcctatgaccttggccgcagggctattgcttatgccactcacagagacagctattctggaggcgttgtcaatatgtaccacatgaaggaagatggttgggtgaaagtagaaagtacagatgtcagtgacctgctgcaccagtaccgggaagccaatcaataatggtggtggtggcagctgggcaggtctcctctgggaggtcttggccgactcagggacctaagccacgttaagtccaaggagaagaagaggcctagcctgagccaaagagagagtacgggctcagcagccagaggaggccggtgaagtgcatcttctgcgtgttctc

SEQ ID NO: 6435 - DNA, 600 bp, Homo sapiens
cttgccttcttcttaggtttgcagatgatacatatacagaaagctacatcagcacaattggtgtggatttcaaaataagaactatagagttagacgggaaaacaatcaagcttcaaatatgggacacagcaggccaggaaagatttcgaacaatcacctccagttattacagaggagcccatggcatcatagttgtgtatgatgtgacagatcaggagtccttcaataatgttaaacagtggctgcaggaaatagatcgttatgccagtgaaaatgtcaacaaattgttggtagggaacaaatgtgatctgaccacaaagaaagtagtagactacacaacagcgaaggaatttgctgattcccttggaattccgtttttggaaaccagtgctaagaatgcaacgaacgtagaacagtctttcatgacgatggcagctgagattaaaaagcgaatgggtcccggagcaacagctggtggtgctgagaagtccaatgttaaaattcagagcactccagtcaagcagtcaggtggaggttgctgctaaatttgcctccatccttttctcacagcaatgaatttgcaatctgaacccaagtgaa

SEQ ID NO: 6436 - DNA, 1400 bp, Homo sapiens
gaatcagtgttgtagtaactaaacctctagtttgaactagctggaatagtcttctgcttcctaaatgttaataacaatggaattggagcatttaaccagcccagtatgacttccaaaagaagagacttatgatagagtcaagtttctaatacagaattattttaagtgttttgaacttaatttttaataacatgcatgggtccctctcactaatgtttcaacaatagggaaaaatgagaactatgtggacacttgtttcattggaaggttagggggaataatttctcatcactaggaatatagacaaatgactgtctgggcccacacagttaaccagcccatttctccacactggtacagtagtcacctgtgaaaaaaaaaattggaacttactaatttgggcttttcaaaaacattctttgtttagaaggagattctaaagttatttatgatgcttagccatagtattcaggcaaatgttcatttctcctggtacctgtatttaaaatgtacattccacattttaataaattaaccacaagaaaataatcccacatatacaaggtcaggggtggggaagagtattaatggtatcttaattatacccagtctggtttttttttttaaatggggtaaaaatcaaatgcaaccccatcttgttttaggaattttgagaactaataaatgcaccttaatggtcagtgttcctttcaaacatgtgagttctttaacaaaaatgaaataaaccaggtgtctgtgatttctaattaatcaccgctggccattacacaggttttgttgtttggggtggggagggggcttttgttcccttttgacataatatagtcaatgcactaacaattatgtatattcaaacttgattattttaaattcgatcttcagctgtactgtaaatagggtactgcattgtagtctccatatctgtattacttttctgtaatatttaagagttgcttaaaagcatacaaaatgtactgttactaaaacagctaattatttctctctccccctttgacaggaaggggcttcagttgttcctccatggctagaaccataataaacaatgtacccgtaatttgtaacataaagtattgcaatatgttagtaacaatcttgcagccttcctttccaaagttcattttattttgatcagttcagtatattgcactaattattttaggtattttcattatatgaaagctaccatgtgtcagagatgatttaatctatttaagtgttggactgctaggagaacttgtacatttatgataatgcagaattaggaaaacggttcaccagtgtttagttttatattgaggtgctcaggttggaataaagtggtataaaaagcaaaaaaaaaaaaaaaaaaaaaaaaaaaa

SEQ ID NO: 6437 - DNA, 1400 bp, Homo sapiens
ttccttgccaggacctagagtttgttcagttccaccccacaggcatatatggtgctggttgtctcattacggaaggatgtcgtggagagggaggcattctcattaacagtcaaggcgaaaggtttatggagcgatacgcccctgtcgcgaaggacctggcgtctagagatgtggtgtctcggtcgatgactctggagatccgagaaggaagaggctgtggccctgagaaagatcacgtctacctgcagctgcaccacctacctccagagcagctggccacgcgcctgcctggcatttcagagacagccatgatcttcgctggcgtggacgtcacgaaggagccgatccctgtcctccccaccgtgcattataacatgggcggcattcccaccaactacaaggggcaggtcctgaggcacgtgaatggccaggatcagattgtgcccggcctgtacgcctgtggggaggccgcctgtgcctcggtacatggtgccaaccgcctcggggcaaactcgctcttggacctggttgtctttggtcgggcatgtgccctgagcatcgaagagtcatgcaggcctggagataaagtccctccaattaaaccaaacgctggggaagaatctgtcatgaatcttgacaaattgagatttgctgatggaagcataagaacatcggaactgcgactcagcatgcagaagtcaatgcaaaatcatgctgccgtgttccgtgtgggaagcgtgttgcaagaaggttgtgggaaaatcagcaagctctatggagacctaaagcacctgaagacgttcgaccggggaatggtctggaacacagacctggtggagaccctggagctgcagaacctgatgctgtgtgcgctgcagaccatctacggagcagaggcgcggaaggagtcacggggcgcgcatgccagggaagactacaaggtgcggattgatgagtacgattactccaagcccatccaggggcaacagaagaagccctttgaggagcactggaggaagcacaccctgtcctttgtggacgttggcactgggaaggtcactctggaatatagacccgtaatcgacaaaactttgaacgaggctgactgtgccaccatcccgccagccattcgctcctactgatgagacaagatgtggtgatgacagaatcagcttttgtaattatgtataatagctcatgcatgtgtccatgtcataactgtcttcatacgcttctgcactctggggaagaaggagtacattgaagggagattggcacctagtggctgggagcttgccaggaacccagtggccagggagcgtggcacttacctttgtcccttgcttcattcttgtgagatgataaaactgggcacagctcttaaataaaatataaatgag

SEQ ID NO: 6438 - DNA, 1014 bp, Homo sapiens; identical to SEQ ID NO: 1203

SEQ ID NO: 6439 - DNA, 574 bp, Homo sapiens; identical to SEQ ID NO: 1204

SEQ ID NO: 6440 - DNA, 600 bp, Homo sapiens
caggaaatggagtttgcagtaatgagctgaagtgtgtgtgtaacagacactggataggttctgattgcaacacttacttccctcacaatgatgatgcaaagactggtatcactctgtctggcaatggtgttgctggcaccaatatcataataggcataattgctggcaccattttagtgctggccctcatattaggaataactgcgtggggttataaaaactatcgagaacagagacagttaccccagggagattatgtaaaaaagcctggagatggtgactctttttatagcgacattcctcccggagtcagcacaaactcagcatctagttctaagaagaggtcaaatgggctctctcattcttggagtgaaaggattccagacacaaaacatatttcagacatctgtgaaaatgggcgacctcgaagtaactcttggcaaggtaacctgggaggcaacaaaaagaaaatcagaggcaaaagatttagacctcggtctaattcaactgagtaagtctgaacctctaatggaaaaaggcactccaaggtcctgtgcaaatagtgtcaaaagtaaattaagcagatagtcaaagaactgt

SEQ ID NO: 6441 - DNA, 1400 bp, Homo sapiens
ccacaaccaagtcacaggtgctggactacctcagctatgctgtcttccagttgggtgatctgcaccgtgccctggagctcacccgccgcctgctctcccttgacccaagccacgaacgagctggagggaatctgcggtactttgagcagttattggaggaagagagagaaaaaacgttaacaaatcagacagaagctgagctagcaaccccagaaggcatctatgagaggcctgtggactacctgcctgagagggatgtttacgagagcctctgtcgtggggagggtgtcaaactgacaccccgtagacagaagaggcttttctgtaggtaccaccatggcaacagggccccacagctgctcattgcccccttcaaagaggaggacgagtgggacagcccgcacatcgtcaggtactacgatgtcatgtctgatgaggaaatcgagaggatcaaggagatcgcaaaacctaaacttgcacgagccaccgttcgtgatcccaagacaggagtcctcactgtcgccagctaccgggtttccaaaagctcctggctagaggaagatgatgaccctgttgtggcccgagtaaatcgtcggatgcagcatatcacagggttaacagtaaagactgcagaattgttacaggttgcaaattatggagtgggaggacagtatgaaccgcacttcgacttctctaggaatgatgagcgagatactttcaagcatttagggacggggaatcgtgtggctactttcttaaactacatgagtgatgtagaagctggtggtgccaccgtcttccctgatctgggggctgcaatttggcctaagaagggtacagctgtgttctggtacaacctcttgcggagcggggaaggtgactaccgaacaagacatgctgcctgccctgtgcttgtgggctgcaagtgggtctccaataagtggttccatgaacgaggacaggagttcttgagaccttgtggatcaacagaagttgactgacatccttttctgtccttccccttcctggtccttcagcccatgtcaacgtgacagacacctttgtatgttccttgtatgttcctatcaggctgatttttggagaaatgaatgtttgtctggagcagagggagaccatactagggcgactcctgtgtgactgaagtcccagcccttccattcagcctgtgccatccctggccccaaggctaggatcaaagtggctgcagcagagttagctgtctagcgcctagcaaggtgcctttgtacctcaggtgttttaggtgtgagatgtttcagtgaaccaaagttctgataccttgtttacatgtttgtttttatggcatttctatctattgtggctttaccaaaaaataaaatgtccctaccagaagccttaaa

SEQ ID NO: 6442 - DNA, 600 bp, Homo sapiens
ctacggtcttcgaccccttctgggacctctcactgcccattgctaagcgaggttatcctgaggtgacattaatggactgcatgaggctcttcaccaaagaggatgtgcttgatggagatgaaaagccaacatgctgtcgctgccgaggcagaaaacggtgtataaagaagttctccatccagaggttcccaaagatcttggtgctccatctgaagcggttctcagaatccaggatccgaaccagcaagctcacaacatttgtgaacttccccctaagagacctggacttaagagaatttgcctcagaaaacaccaaccatgctgtttacaacctgtacgctgtgtccaatcactccggaaccaccatgggtggccactatacagcctactgtcgcagtccagggacaggagaatggcacactttcaacgactccagcgtcactcccatgtcctccagccaagtgcgcaccagcgacgcctacctgctcttctacgaactggccagcccgccctcccgaatgtagcgccaggagccacgtcccttctcccttccccgtggtggccccgctccctaaattttttaaaaaaaaaaaaaaaaaa

SEQ ID NO: 6443 - DNA, 1400 bp, Homo sapiens
acggctggcggggcggcttcctcatcctgggcggcctgctgctcaactgctgcgtgtgtgccgcactcatgaggcccctggtggtcacggcccagccgggctcggggccgccgcgaccctcccggcgcctgctagacctgagcgtcttccgggaccgcggctttgtgctttacgccgtggccgcctcggtcatggtgctggggctcttcgtcccgcccgtgttcgtggtgagctacgccaaggacctgggcgtgcccgacaccaaggccgccttcctgctcaccatcctgggcttcattgacatcttcgcgcggccggccgcgggcttcgtggcggggcttgggaaggtgcggccctactccgtctacctcttcagcttctccatgttcttcaacggcctcgcggacctggcgggctctacggcgggcgactacggcggcctcgtggtcttctgcatcttctttggcatctcctacggcatggtgggggccctgcagttcgaggtgctcatggccatcgtgggcacccacaagttctccagtgccattggcctggtgctgctgatggaggcggtggccgtgctcgtcgggcccccttcgggaggcaaactcctggatgcgacccacgtctacatgtacgtgttcatcctggcgggggccgaggtgctcacctcctccctgattttgctgctgggcaacttcttctgcattaggaagaagcccaaagagccacagcctgaggtggcggccgcggaggaggagaagctccacaagcctcctgcagactcgggggtggacttgcgggaggtggagcatttcctgaaggctgagcctgagaaaaacggggaggtggttcacaccccggaaacaagtgtctgagtggctgggcggggccggcaggcacagggaggaggtacagaagccggcaacgcttgctatttattttacaaactggactggctcaggcagggccacggctgggctccagctgccggcccagcggatcgtcgcccgatcagtgttttgagggggaaggtggcggggtgggaaccgtgtcattccagagtggatctgcggtgaagccaagccgcaaggttacaaggcatcctcaccaggggccccgcctgctgctcccaggtggcctgcggccactgctatgctcaaggacctggaaacccatgcttcgagacaacgtgactttaatgggagggtgggtgggccgcagacaggctggcagggcaggtgctgcgtggggccctctccagcccgtcctaccctgggctcacatggggcctgtgcccacccctcttgagtgtcttggggacagctctttccacccctggaagatggaaataaacctgcgtgtgggtggagtgttctcgtgccgaattcaaaaagctt

SEQ ID NO: 6444 - DNA, 1138 bp, Homo sapiens; identical to SEQ ID NO: 1209

SEQ ID NO: 6445 - DNA, 600 bp, Homo sapiens
aggagggaatgggaatgtggcaacacaacaaaattctttggaacaactggaacctgactattttaaggacatgacaccaactattaggaaaactcagaaaattgttattaagaagagagaaccattgaattttggcatcccagatgggagcacaggtttctctagtagattagcagctacacaagatctgccttttattcatcagtcttctgaattaggtgacttagatacctggcaggaaaataccaatgcatgggaagaagaagaagatgcagcctggcaagcagaagaagttctgagacagcagaaactagcagacagagaaaagagagcagccgaacaacaaaggaagaaaatggaaaaggaagcacaacggctaatgaagaaggaacaaaacaaaattggtgtgaaactttcataacacatgttcaaattttatcatgccagtaggagaaatctcagctccacaacccaagcaacatttgtatggatttaagagtattttaagaagacatactgcttgattttaatacattgatcaggccatccaggacaccacgattctcccaaagtaccttgaactcttagtgattgagactc

SEQ ID NO: 6446 - DNA, 600 bp, Homo sapiens
ctctcagcaatggccaccggccggctgcacacaacttccccctggggcggcagctccccagcaggagtaccccgaccctgggttttgaggaagtgctgagcagcagggaatgtcaccctgccctgccgcttcctcccggcttccatccccacccggggcccaattacccatccttcctgcccgatcagatgcagccgcaagtcccgccgctccattaccaagagctcatgccacccggttcctgcatgccagaggagcccaagccaaagaggggaagacgatcgtggccccggaaaaggaccgccacccacacttgtgattacgcgggctgcggcaaaacctacacaaagagttcccatctcaaggcacacctgcgaacccacacaggtgagaaaccttaccactgtgactgggacggctgtggatggaaattcgcccgctcagatgaactgaccaggcactaccgtaaacacacggggcaccgcccgttccagtgccaaaaatgcgaccgagcattttccaggtcggaccacctcgccttacacatgaagaggcatttttaaatcccagacagtggatatgacccacactgccagaaga

SEQ ID NO: 6447 - DNA, 600 bp, Homo sapiens
tcctcccagttcaaggacctcaaagtgaacctgagtgcccagtctctgctgcacgatggcagccccctgtccccattctggcaggacacagcgttcatcacactctctcctaaagaagcaaagacctacccctgcaaaatctcctattcccagtacagccagtacctgtcaacagacaagctgatccgcatcagtgccctgggtgaagagaaaagcagtcctgagaaaatcctggtgaacaagatcatcaccttatcttatccaagcatcacgattaatgttctaggagcagccgttgtgaaccagccactctccatacaggtgatattttcaaaccccctctcggagcaggttgaggactgtgtgctgactgtggaaggaagtggcctcttcaagaaacagcagaaagtcttccttggagtcctcaaaccccaacaccaagcaagcatcattctggagaccgtccccttcaagagtggacaaaggcagatccaagctaatatgagaagcaacaagtttaaggacattaagggttacaggaatgtttatgtagactttgcattataaattctggaacaacgcgccagacgtgtgagtttc

SEQ ID NO: 6448 - DNA, 600 bp, Homo sapiens
cgggctccattcccaaggaaaagagaggagcttgggctcacagaaagagaaggggatgaaaccccaaggggccctatctttgggatttacatggaattttattttctacaagtttgaccttagccatggtttgcaagtgaacagaacattctgacctctgtcttgctctgctcctttcatcctcgtctcccctgccccatctggtgcttacattctgaatatatgtcatctcccaagaggcttcactgcctctgcttccagctgcagcctccttcctgcctgggtccccagggaagccgcctgccttttaattcagtgttcccatgagcgccaaggccccattattgcccccttgctcccactccatgctgcttctgggtgggacctaagatggcttgggagttgttgggttcctgcgatcagaagtctaccccaccacctcctcaggaaactgctgcctcccctaagaatcttccttgccctggagtagggggccagagcactttgatttccagccatttactccaagtcctctccccagctaccaccagtcccttactctgttctcccccagtgaaaaagagtctgttgattttcctc

SEQ ID NO: 6449 - DNA, 645 bp, Homo sapiens; identical to SEQ ID NO: 1214

SEQ ID NO: 6450 - DNA, 600 bp, Homo sapiens
acagattgcctgctcctcagagtctctcctatttttgtattacccagctttctttttaatacaaatgttatttatagtttacaatgaatgcactgcataaaaactttgtagcttcattattgtaaaacatattcaagatcctacagtaagagtgaaacattcacaaagatttgcgttaatgaagactacacagaaaacctttctagggatttgtgtggatcagatacatacttggcaaatttttgagttttacattcttacagaaaagtccatttaaaagtgatcatttgtaagaccaaaatataaataaaaagtttcaaaaatctatctgaatttggaattcttctggtttgttctttcatgtttaaaaatgatgtttttcaatgcatttttttcatgtaagccctttttttagccaaaatgtaaaaatggctgtaatatttaaaacttataacatcttattgttggtaatagtgctttatatttgtctgattttatttttcaaagttttttcatttatgaacacattttcattggtatattatttaaggaatatctcttgatatagaatttttatattaaaaatgatttttctttggc

SEQ ID NO: 6451 - DNA, 600 bp, Homo sapiens
cagtgtcacctttaccaaagatatccatagtgtgtgtctcccagctgctacccagaatattccacctggctctactgcttatgtaacaggatggggcgctcaagaatatgctggccacacagttccagagctaaggcaaggacaggtcagaataataagtaatgatgtatgtaatgcaccacatagttataatggagccatcttgtctggaatgctgtgtgctggagtacctcaaggtggagtggacgcatgtcagggtgactctggtggcccactagtacaagaagactcacggcggctttggtttattgtggggatagtaagctggggagatcagtgtggcctgccggataagccaggagtgtatactcgagtgacagcctaccttgactggattaggcaacaaactgggatctagtgcaacaagtgcatccctgttgcaaagtctgtatgcaggtgtgcctgtcttaaattccaaagctttacatttcaactgaaaaagaaactagaaatgtcctaatttaacatcttgttacataaatatggtttaacaaacactgtttaacctttctttattattaaaggttttctattttctcc

SEQ ID NO: 6452 - DNA, 600 bp, Homo sapiens
agcactgattgcacgaacagcaaaagacattgatgttttgatagattccttacccagtgaagaatctacagctgctttacaggctgctagcttgtataagctagaagaagaaaaccatgaagctgctacatgtgtggaggatgttgtttatcgaggagacatgcttctggagaagatacaaagcgcacttgctgatattgcacagtcacagctgaagacaagaagtggtacccatagccagtctcttccagactcatagcatcagtggataccatgtggctgagaaaagaactgtttgagtgccattaagaattctgcatcagacttagatacaagccttaccaacaattacagaaacattaaacactatgacacattacctttttagctatttttaatagtcttctattttcactcttgataagcttataaatcatgattgaatcagctttaaagcatcataccatcattttttaactgagtgaaattattaaggcatgtaatacattaatgaacataatataaggaaacatatgtaaaattctgttatgacataatttatgtctccattttgttgtattggccagtacttttacaatc

SEQ ID NO: 6453 - DNA, 600 bp, Homo sapiens
aacattttgtgtggactgtgagacttaccatacggccgcctctacccttggcagccaaggtcagaccgggaagctgatgtatgtgatgcacaactcagagtacccattgagctgtttcgccctctttgagaatggcccttgccttattgctgacaccaactttgatgtgcttatggtgaagctcaagggctttttccagagtgctaaggccagcaagattgagacccggggcaccaggtaccagtactgtgacttcctggtgaaggtgggcacggtcacaatggggccagtgccggggatctctgtggaggtggagtatggcccctgtgtggtagctagtgactgctggagtctgctgctcgagttcctacagagttttctaggcagccacacaccaggggctcccgcagtgtttgggaacagacatgatgcggtctacggcccagcagataccatggtccagtacatggaactcttcaacaagatccgcaagcagcagcaggtggctgggattcgttagtgatgagcagctgcagctgagctctgtcacaagggtactccacaggaggagcagtgctgacttcagtcctgacccagaaa

SEQ ID NO: 6454 - DNA, 600 bp, Homo sapiens
cgactctgtacaagtgtcacagaaagtgaggttgcacgagccagaaatcttctgaaaacaaacatgttgttgcagcttgatggttcaactccaatttgtgaagatattggtaggcaaatgttatgctataatagaaggattcccatccctgagcttgaagcaagaattgatgctgtgaatgctgagacaattcgagaagtatgtaccaaatacatttataataggagtccagctattgctgctgttggtcccattaagcaactaccagattttaaacagatacgcagtaacatgtgttggcttcgtgattaaaatgctcctaatcaagattgtttgaacacatgtatttataaaacagagctagagaaaaataaaaatgaacatgtatatacatttggaaatttgaattaaatactgtatcatactttcaaaggataaaaagactacccctctgaaggttgttttgtattaatggtcagtctttgttctctgagaaattatgttggaagcagcatactttcaaattattaccatgagtataattttaagaatgaaaatgtttacagtattttcagttttattataaaaatgcacacacaa

SEQ ID NO: 6455 - DNA, 600 bp, Homo sapiens
gaccttgtcagagttctcagtagtcttcagtctcctgttgaccggaactcccatccagaacagcctccaagagctctactccctcctcagttttgtggagcctgatctcttttccaaggaagagtgggagattttattcaacgctaccaggatattgagaaagaatctgagtcagcaagtgaactgcacaaactcttgcagccatttctgctgagcgagtgaaagctgaggtagctacagagcttcccaagaagacagaagtagtgatataccatggcatgtccgcattgcagaagaaatactacaaggccattttgatgaaagacctagatgcatttgaaaatgagacggcaaagaaagttaaactacagaacattttgtcccagcttcgaaagtgtgtggatcacccatatttgtttgatggtgtggagccggagccttttgaagttggagaccacctgactgaggctagtgggaagcttcacctgctggataagctactagcattcctgtattctgggggccatcgggttttacttttctcccaaatgacccagatgttggatattctccaagactatatggattacagaggctacg

SEQ ID NO: 6456 - DNA, 1400 bp, Homo sapiens
catttgtcgatcacccattgcagaagcagttttcaggaaacttgtaaccgatcaaaacatctcagagaattggagggtagacagcgcggcaacttccgggtatgagatagggaacccccctgactaccgagggcagagctgcatgaagaggcacggcattcccatgagccacgttgcccggcagattaccaaagaagattttgccacatttgattatatactatgtatggatgaaagcaatctgagagatttgaatagaaaaagtaatcaagttaaaacctgcaaagctaaaattgaactacttgggagctatgatccacaaaaacaacttattattgaagatccctattatgggaatgactctgactttgagacggtgtaccagcagtgtgtcaggtgctgcagagcgttcttggagaaggcccactgaggcaggttcgtgccctgctgcggccagcctgactagaccccaccctgaggtcctgcatttctcagtcggtgtgtaatcacgttccagggcccaaagccagctctttgttcagttgacttactgtttcttaccttaaaaagtaattgtagatggaaatcagttgtgtttggcaggagaatcaataaaaatgtttgattcagacagcttatggggtattttaagcattcttagactagttgaacatctcactttgccccagttacaaaaatagtagaacaagcaacataaaacaatgaaggaaaacctcacttgaaggcccaggtcaacatctaagcctgttgagacttagataatcgagtctacctcttcagtaggtttgtgtggatggcctggaggcaggtgcttgctccccagtgctacctctctcttccctagggccttttgtggattgacagtagtcccctccgtagagctcacagtctagattagaagtgttttaatttctacacacccatagtgcacacttgtatattgaaaagatagggaagagagaaacatttatggaatcagtcgttggcaccttcaatacttcatgatttttgtcgagtttacttcatgaggaggtcagcccattggctcccatctgaaccactttgcctctgaaacttaattacatccagaaagaaggacacttgtatgctagtctatggtcagttgaggaatatgactgtttttatatgcacatgtaacccaaatgtccaatataaattggcttattttttaaaataattttaaaagttgggaaaagtgttattatttggcatgcttaaatattgaataagtattcttcatcagcatttaataaatgtataggcagatgtaaggtaatttctgtgtattttgagataatgtcaaaatcatgaatatttcaaaataaactggggagttataaaaatacaactagagatat

SEQ ID NO: 6457 - DNA, 1400 bp, Homo sapiens
aagactgactacatggtaggcagctatgggccccgggccgaggagtacgagttcctgacccccgtggaggaggcacccaagggtatgctggcccggggcagctacagcatcaagtcccgcttcacagacgacgacaagaccgaccacctgtcctgggagtggaatctcaccatcaagaaggactggaaggactgagcccagccagaggcgggcagggcagactgacggacggacgacggacaggcggatgtgtcccccccagcccctcccctccccataccaaagtgctgacaggccctccgtgcccctcccaccctggtccgcctccctggcctggctcaaccgagtgcctccgacccccctcctcagccctcccccacccacaggcccagcctcctcggtctcctgtctcgttgctgcttctgcctgtgctgtgggggagagaggccgcagccaggcctctgctgccctttctgtgccccccaggttctatctccccgtcacacccgaggcctggcttcaggagggagcggagcagccattctccaggccccgtggttgcccctggacgtgtgcgtctgctgctccggggtggagctggggtgtgggatgcacggcctcgtgggggccgggccgtcctccagccccgctgctccctggccagcccccttgtcgctgtcggtcccgtctaaccatgatgccttaacatgtggagtgtaccgtggggcctcactagcctctaactccctgtgtctgcatgagcatgtggcctccccgtcccttccccggtggcgaacccagtgacccagggacacgtggggtgtgctgctgctgctccccagcccaccagtgcctggccagcctgcccccttccctggacagggctgtggagatggctccggcggcttggggaaagccaaattgccaaaactcaagtcacctcagtaccatccaggaggctgggtattgtcctgcctctgccttttctgtctcagcgggcagtgcccagagcccacacccccccaagagccctcgatggacagcctcacccaccccacctgggcccagccaggagccccgcctggccatcagtatttattgcctccgtccgtgccgtccctgggccactggcctggcgcctgttcccccaggctctcagtgccaccacccccggcaggccttccctgacccagccaggaacaaacaagggaccaagtgcacacattgctgagagccgtctcctgtgcctcccccgccccatccccggtcttcgtgttgtgtctgccaggctcaggcagaggcgcctgtccctgcttcttttctgaccgggaaataaatgcccctgaaggaaaaaaaaaaaaaaaaaaaaaaaaaaaaaaaaaaaaaaaaaaaaaaaaaaa

SEQ ID NO: 6458 - DNA, 600 bp, Homo sapiens
gacagaaaaagatttgaagagacgggtcaggaactagcggaattactggaggaagaaaaactaagttgtgtgccagtgctcatctttgctaataagcaggatttgctcacagcagcccctgcctctgaaattgcagaaggactgaacctgcataccatccgcgaccgagtctggcagatccagtcttgctcagctctcacaggagagggcgttcaggatggcatgaactgggtctgcaaaaatgtcaatgcaaagaagaaataaaatctagacgaatggagatgcaggagctgcgggagccgaattcgggccttaaaaacactaatttgctgctttctgaccaaatgtttttcatctgtgtacactccagctgtttgaagagagggaacaacacggtttagaaagaatccccattccagcagtagatttaactgatctctgaggttcagtatcatttttcaaataaaggaattatattatttcctctgcataattgaaatagtattaaatgtctaaagcacatgattagaaaatgagatcttttaaatgagcaagagattgcattgcagtttagacaattccagtgggctttttttttcg

SEQ ID NO: 6459 - DNA, 1400 bp, Homo sapiens
aactcgatgctaagcagggtagatggtatgtggtacaaacaaattatgaccgttggaaacatcccttcttccttgatgatcgcagaacgcctgcaaagatgtgtctgaaccgcaccagccaagagaatatctcatttgaaaccatgtatgatgtcctgtcaacaaaacctgtcctcaacaagctgaccgtatacacaaccttgatagatgttaccaaaggtcaattcgaaacttacctgcgggactgccctgacccttgtataggttggtgagcacacgtctggcctacagaatgcggcctctgagacatgaagacaccatctccatgtgaccgaacactgcagctgtctgaccttccaaagactaagactcgcggcaggttctctttgagtcaatagcttgtcttcgtccatctgttgacaaatgacagatctttttttttttccccctatcagttgatttttcttatttacagataacttctttaggggaagtaaaacagtcatctagaattcactgagttttgtttcactttgacatttggggatctggtgggcagtcgaaccatggtgaactccacctccgtggaataaatggagattcagcgtgggtgttgaatccagcacgtctgtgtgagtaacgggacagtaaacactccacattcttcagtttttcacttctacctacatatttgtatgtttttctgtataacagccttttccttctggttctaactgctgttaaaattaatatatcattatctttgctgttattgacagcgatattattttattacatatcattagagggatgagacagacattcacctgtatatttcttttaatgggcacaaaatgggcccttgcctctaaatagcactttttggggttcaagaagtaatcagtatgcaaagcaatcttttatacaataattgaagtgttccctttttcataattactctacttcccagtaaccctaaggaagttgctaacttaaaaaactgcatcccacgttctgttaatttagtaaataaacaagtcaaagacttgtggaaaataggaagtgaacccatattttaaattctcataagtagcattgatgtaataaacaggtttttagtttgttcttcagattgatagggagttttaaagaaattttagtagttactaaaattatgttactgtatttttcagaaatcaaactgcttatgaaaagtactaatagaacttgttaacctttctaaccttcacgattaactgtgaaatgtacgtcatttgtgcaagaccgtttgtccacttcattttgtataatcacagttgtgttcctgacactcaataaacagtcactggaaagagtgccagtcagcagtcatgcacgctgataaaaaaaaaaaaaaaaaa

SEQ ID NO: 6460 - DNA, 600 bp, Homo sapiens
tgttaattgggaaaaagaacagtccacaggaagaggttgaactaaagaagttgaaacatttggagaagtctgtggagaagatagctgaccagctggaagagttgaataaagagcttactggaatccagcagggttttctgcccaaggatttgcaagctgaagctctctgcaaacttgataggagagtaaaagccacaatagagcagtttatgaagatcttggaggagattgacacactgatcctgccagaaaatttcaaagacagtagattgaaaaggaaaggcttggtaaaaaaggttcaggcattcctagccgagtgtgacacagtggagcagaacatctgccaggagactgagcggctgcagtctacaaactttgccctggccgagtgaggtgtagcagaaaaaggctgtgctgccctgaagaatggcgccaccagctctgccgtctctggatcggaatttacctgatttcttcagggctgctgggggcaactggccatttgccaattttcctactctcacactggttctcaatgaaaaatagtgtctttgtgatttgagtaaagctcctattctgtttttcacaaaaaaaaaaaaa

SEQ ID NO: 6461 - DNA, 1400 bp, Homo sapiens
gggacacagctgagccaaactggaacgaggaatttgagatagagctggagggctcccagaccctgaggatactgtgctatgaaaagtgttacaacaagacgaagatccccaaggaggacggcgagagcacggacagactcatggggaagggccaggtccagctggacccgcaggccctgcaggacagagactggcagcgcaccgtcatcgccatgaatgggatcgaagtaaagctctcggtcaagttcaacagcagggagttcagcttgaagaggatgccgtcccgaaaacagacaggggtcttcggagtcaagattgctgtggtcaccaagagagagaggtccaaggtgccctacatcgtgcgccagtgcgtggaggagatcgagcgccgaggcatggaggaggtgggcatctaccgcgtgtccggtgtggccacggacatccaggcactgaaggcagccttcgacgtcaataacaaggatgtgtcggtgatgatgagcgagatggacgtgaacgccatcgcaggcacgctgaagctgtacttccgtgagctgcccgagcccctcttcactgacgagttctaccccaacttcgcagagggcatcgctctttcagacccggttgcaaaggagagctgcatgctcaacctgctgctgtccctgccggaggccaacctgctcaccttccttttccttctggaccacctgaaaagggtggcagagaaggaggcagtcaataagatgtccctgcacaacctcgccacggtctttggccccacgctgctccggccctccgagaaggagagcaagctccctgccaaccccagccagcctatcaccatgactgacagctggtccttggaggtcatgtcccaggtccaggtgctgctgtacttcctgcagctggaggccatccctgccccggacagcaagagacagagcatcctgttctccaccgaagtctaaaggtcccagtccatctcctggaggcagacagatggcctggaaacctctggctaatcgggccatccgtagagcgggaaccttcctgaggtgtccttgggccacccccaagtgttgggccatctgccaagagacagcgacccaaagccgaaggacaggtggcctgggcagatctcgcccaggtctgggagccccaggctggcctcagactgtggttttttatgtggccacccgagggcgccccaagccagttcatctcagagtccaggcctgaccctgggagacagggtgaagggagtgatttttatgaacttaacttagagtctaaaagatttctactggatcacttgtcaagatgcgccctctctggggagaagggaacgtgaccggattccctcactgttgtatcttgaataaacgctgctgcttcatcctgtg

SEQ ID NO: 6462 - DNA, 1337 bp, Homo sapiens; identical to SEQ ID NO: 1227

SEQ ID NO: 6463 - DNA, 600 bp, Homo sapiens
tgagcatgagaatgttctagactcagaggtactaaaatttgttaccacatcattgcttcctttctacaggacgaattgaggcttaaactttactgttaatgatactggttcattttaatgtgcttgttggtatgttgctatttttcatttcatagctttcaaaaatcatgctaattgtatacttgtctagtttaaggctattttaaaatatgtacaatactattcacagcatttagttcgtttaatttttattataaagcaatctactaaaaaagtacaactgtatttgaacttttcaatagttgtttgtgagctatgataatcaaaagtcattaaagtcttttttaacaaacattcgtgcttacttttcaacataattcccagttatatacagaaaaagatttccacctgtcacgtatctgcctcttttacctgagcaatggtgtagttcttagacctaaggtctgtaattgcaatacttttaaagaaagatgttgctctaagtgctgtttgttagttatgaaatcagatttttctgcttgttcttaatgctgtggtcaaaccatagcacaaaatcattaaaaataatcagcggcatac

SEQ ID NO: 6464 - DNA, 1400 bp, Homo sapiens
agcattggggaatagctaaacctttttaaaaaaatttattggattttcctccctgcttaaaagatttcaccagaaaaccttcatataaaaattcaggccctttttggacaatttttaaaatttgtatctttactagaacatgagaatctttttcccttggaagcttgaattataaatgtggtgtttggcctgcctcagcagcaccagttgactgctcgtgtgccagcggtgtggggaggacggggcaggacgctgcagctctctccagccctgttggcatcctcagtgcctgcaggcctctcgctgcctgttgggctgtctggggggtggccatttagggatcgtggggacggggtccaccccaagaagaaagaaaggcccgtccacaggcccggctctgggccacgtgccccggaagcaggtgtgtccagagtcagctgagggctctccccacaccacccagcaggcgctggtgctccttctgcctcatgggaccagtccagcttccagccgctctggctcgagggtggtctgagcacttccttctgagtgggcttctctgggagctctccagtggcactgctggacctgcccacgtttctgtaaaatcaggatacgtggctttagtaagcagaccaagcgcttcgtggcagggaaagcagcgtgcggggaagtcactgaaaagtgctgcctaaggaagtttggaaatagtccccgttccagattgccttgaattttaaaacattttgctttgggaaagtaggtcagcagcacctaagatcaaggatgcgttccattttcacacttcacagtcatgaaaactgagaagactgtcttcagcgtgaactaaagttcacaggcagatcactgatccagaacacttcaagaactcgtcaaacagctcgataagcctttttgactgtgtacatctgtaccgggaataacattcctaggctgaaatttccacaaagaatagaacctgtacccagttcttcaggctgatttccctgacctcttgggcatttgtatttgtagtaaagtattgcagagattcctaagtattttatagcagccatcaaaattggactttgtattgtttattcataaaagacacttggtaatagacttcagtgaactctgtatgaatgcagtagtgtgcgtgcaaaatccgcttcctgagcgtagggtgctgagctggcgctagggctcggttgtgaaatacagcgtagtcagcccttgcgctcagtgtagaaacccacgtctgtaaggtcggtcttcgtccatctgcttttttctgaaatacactaagagcagccacaaaactgtaacctcaaggaaaccataaagcttggagtgccttaatttttaaccagtttccaataaaacggtttactacctga

SEQ ID NO: 6465 - DNA, 600 bp, Homo sapiens
gccaggccaaggacgagctgtagagaggcctgcctccagggctggactgaggcctgagcgctcctgccgcagagcttgccgcgccaaataatgtctctgtgagactcgagaactttcatttttttccaggctggttcggatttggggtggattttggttttgttcccctcctccactctcccccaccccctccccgccctttttttttttttttttaaactggtattttatcctttgattctccttcagccctcacccctggttctcatctttcttgatcaacatcttttcttgcctctgtgccccttctctcatctcttagctcccctccaacctggggggcagtggtgtggagaagccacaggcctgagatttcatctgctctccttcctggagcccagaggagggcagcagaagggggtggtgtctccaaccccccagcactgaggaagaacggggctcttctcatttcacccctccctttctcccctgcccccaggactgggccacttctgggtggggcagtgggtcccagattggctcacactgagaatgtaagaactacaaacaaaatttctattaaattaaattttgtgtctc

SEQ ID NO: 6466 - DNA, 600 bp, Homo sapiens
aggcagagccatggaccacgcaggaagggcctacagcccatttctccatacgcactggtatgtgtggatgatgctgccagggcgccatcgccaagtaagaaagtgaagcaaatcagaaacttgtgaagtggaaatgttctaaaggtggtgaggcaataaaaatcatagtactctttgtagcaaaattcttaagtatgttattttctgttgaagtttacaatcaaaggaaaatagtaatgttttatactgtttactgaaagaaaaagacctatgagcacataggactctagacggcatccagccggaggccagagctgagcactcagcccgggaggcaggctccaggcctcagcaggtgcggagccgtcactgcaccaagtctcactggctgtcagtatgacatttcacgggagatttcttgttgctcaaaaaatgagctcgcatttgtcaatgacagtttcttttttcttactagacctgtaacttttgtaaatacacacagcatgtaatggtatcttaaagtgtgtttctatgtgacaattttgtacaaatttgttattttccatttttatttcaaaatatacattcaaacttaaaatt

SEQ ID NO: 6467 - DNA, 1400 bp, Homo sapiens; identical to SEQ ID NO: 1232

SEQ ID NO: 6468 - DNA, 600 bp, Homo sapiens
acacatgggtgctattggggttgggggggaggtgaggtaccagccttggatactccatggaattcgagctccacttggacatgggccccagataccatgatgctgagcccggaaactccacatcctgtgggacctgggccatagtcattctgcctgccctgaaagtcccagatcaagcctgcctcaatcagtattcatatttatagccaggtaccttctcacctgtgagaccaaattgagctcggggggtcagccagccctcttctgacactaaaacacctcagctgcctccccagctctatcccaacctctcccaactataaaactaggtgctgcagcctgggaccaggcacccccagaatgacctggccgcagtgaggcgattgagaaggagctcccaggaggggcttctgggaagaccctggtcaagaagcatcgtctggcgttgtggggatgaactttttgttttgtttcttccttttttagttcttcaaggaatggggggccaggggggcaatgagcctttgttgctaatcaaatccgggacttgtttgtacgtttttttttctcactgaaaccttttccagtgccaaaaaaaaa

SEQ ID NO: 6469 - DNA, 1304 bp, Homo sapiens; identical to SEQ ID NO: 1234

SEQ ID NO: 6470 - DNA, 1400 bp, Homo sapiens
ccccgcgccccgaccctttcttcgcgcccccgcccctcggcccgccaggcccccttgccggccacccgccaggccccgcgccggcccgcccgccgcccaggaccggcccgcgccccgcaggccgcccgccgcccgcgccgccatgggagtggagggctgcaccaagtgcatcaagtacctgctcttcgtcttcaatttcgtcttctggctggctggaggcgtgatcctgggtgtggccctgtggctccgccatgacccgcagaccaccaacctcctgtatctggagctgggagacaagcccgcgcccaacaccttctatgtaggcatctacatcctcatcgctgtgggcgctgtcatgatgttcgttggcttcctgggctgctacggggccatccaggaatcccagtgcctgctggggacgttcttcacctgcctggtcatcctgtttgcctgtgaggtggccgccggcatctggggctttgtcaacaaggaccagatcgccaaggatgtgaagcagttctatgaccaggccctacagcaggccgtggtggatgatgacgccaacaacgccaaggctgtggtgaagaccttccacgagacgcttgactgctgtggctccagcacactgactgctttgaccacctcagtgctcaagaacaatttgtgtccctcgggcagcaacatcatcagcaacctcttcaaggaggactgccaccagaagatcgatgacctcttctccgggaagctgtacctcatcggcattgctgccatcgtggtcgctgtgatcatgatcttcgagatgatcctgagcatggtgctgtgctgtggcatccggaacagctccgtgtactgaggccccgcagctctggccacagggacctctgcagtgccccctaagtgacccggacacttccgagggggccatcaccgcctgtgtatataacgtttccggtattactctgctacacgtagcctttttacttttggggttttgtttttgttctgaactttcctgttaccttttcagggctgatgtcacatgtaggtggcgtgtatgagtggagacgggcctgggtcttggggactggagggcaggggtccttctgcccctggggtcccagggtgctctgcctgctcagccaggcctctcctgggagccactcgcccagagactcagcttggccaacttggggggctgtgtccacccagcccgcccgtcctgtgggctgcacagctcaccttgttccctcctgccccggttcgagagccgagtctgtgggcactctctgccttcatgcacctgtcctttctaacacgtcgccttcaactgtaatcacaacatcctgactccgtcatttaataaagaaggaacatcaggcatgctaaaaaaaaaaaaaaaa

SEQ ID NO: 6471 - DNA, 1400 bp, Homo sapiens
gggtgagttcaacgagaagaagacaacatgtggcaccgtttgcctcaagtacctgctgtttacctacaattgctgcttctggctggctggcctggctgtcatggcagtgggcatctggacgctggccctcaagagtgactacatcagcctgctggcctcaggcacctacctggccacagcctacatcctggtggtggcgggcactgtcgtcatggtgactggggtcttgggctgctgcgccaccttcaaggagcgtcggaacctgctgcgcctgtacttcatcctgctcctcatcatctttctgctggagatcatcgctggtatcctcgcctacgcctactaccagcagctgaacacggagctcaaggagaacctgaaggacaccatgaccaggcgctaccaccagtcgggccatgaggctgtgaccagcgctgtggaccagctgcagcaggagttccactgctgtggcagcaacaactcacaggactggcgagacagtgagtggatccgctcacaggaggccggtggccgtgtggtcccagacagctgctgcaagacggtggtggctctttgtggacagcgagaccatgcctccaacatctacaaggtggagggcggctgcatcaccaagttggagaccttcatccaggagcacctgagggtcattggggctgtggggatcggcattgcctgtgtgcaggtctttggcatgatcttcacgtgctgcctgtacaggagtctcaagctggagcactactgaccctgccttgggccttgctgctgctgcacccaactactgagctgagaccactgagtaccaggggctgggctccctgatgacacccaccctgtgccatcaccataacctctggggaccccaacctcagaggcagcttcaagtgccttttcgtgcgcaccaatgcccagcaggggaggtgaggggggctggcggggcgaagtttggggggtgttttgtggggctccccggacatactctctgcctggtggtcagatgcaggttggaaggggccttgctgagtggcgcaaggccgagatcgttcccagcagggggagaaacccttcacaccccaggcccttcaggaactggggctttgccttgcagccacatggccccatcccagttggggaagccaggtgagctctgacccttgggcctgggcctctgcccctcccaacccagccgtcgtctccctcgacagcgcccctgctgtcttccccaccgcagtcaccaccacccgaaatgccacgtggtcactgtgcactgccctgttcatgtgcctctgcggggcagggccttcctggttttgtacactgctgtacccagatgcctacaaccatccctgccacatacaggtgctcaataaacacttgtagagcag

SEQ ID NO: 6472 - DNA, 1400 bp, Homo sapiens
ccctaggccacaggcagccaaaccagctgccaccaagccagccaccactaagcccgtggttaagatgctccgtgaagtccaggtgtttgagataacagagaacagcgccaaactccactgggagaggcctgagccccccggtccttatttttatgacctcaccgtcacctcagcccatgatcagtccctggttctgaagcagaacctcacggtcacggaccgcgtcattggaggcctgctcgctgggcagacataccatgtggctgtggtctgctacctgaggtctcaggtcagagccacctaccacggaagtttcagtacaaagaaatctcagcccccacctccacagccagcaaggtcagcttctagttcaaccatcaatctaatggtgagcacagaaccattggctctcactgaaacagatatatgcaagttgccgaaagacgaaggaacttgcagggatttcatattaaaatggtactatgatccaaacaccaaaagctgtgcaagattctggtatggaggttgtggtggaaacgaaaacaaatttggatcacagaaagaatgtgaaaaggtttgcgctcctgtgctcgccaaacccggagtcatcagtgtgatgggaacctaagcgtgggtggccaacatcatatacctcttgaagaagaaggagtcagccatcgccaacttgtctctgtagaagctccgggtgtagattcccttgcactgtatcatttcatgctttgatttacactcgaactcgggagggaacatcctgctgcatgacctatcagtatggtgctaatgtgtctgtggaccctcgctctctgtctccagcagttctctcgaatactttgaatgttgtgtaacagttagccactgctggtgtttatgtgaacattcctatcaatccaaattccctctggagtttcatgttatgcctgttgcaggcaaatgtaaagtctagaaaataatgcaaatgtcacggctactctatatacttttgcttggttcattttttttcccttttagttaagcatgactttagatgggaagcctgtgtatcgtggagaaacaagagaccaactttttcattccctgcccccaatttcccagactagatttcaagctaattttctttttctgaagcctctaacaaatgatctagttcagaaggaagcaaaatcccttaatctatgtgcaccgttgggaccaatgccttaattaaagaatttaaaaaagttgtaatagagaatatttttggcattcctctcaatgttgtgtgttttttttttttgtgtgctggagggaggggatttaattttaattttaaaatgtttaggaaatttatacaaagaaactttttaataaagtatattgaaagtttaaaaaaaaaaaaaaaa

SEQ ID NO: 6473 - DNA, 1400 bp, Homo sapiens
gagacagaaaggaagaagctgcccaaagagactctagaacagcagaagcgcatctgtgagatggcagcctatttcacccactcaaacctgcagcctgtgcacatgatcctggtgctgcgtacagccctcaatctgttcttcaagctcaagaacttcaagacagctgccacctttgctcggcgcctactagaactcgggcccaagcctgaggtggcccaacagacccgaaaaatcctgtctgcctgtgagaagaatcccacagatgcctaccagctcaattatgacatgcacaacccctttgacatttgtgctgcatcatatcggcccatctaccgtggaaagccagtagaaaagtgtccactcagtggggcctgctattcccctgagttcaaaggtcaaatctgcagggtcaccacagtgacagagattggcaaagatgtgattggtttaaggatcagtcctctgcagtttcgctaaggccccctttgtgtgcatgggtcagtcaccatatgttccccccagagaatgtgtctatatcctccttctaacagcaccttccccctgcagctactcttcagatctggctctctgtaccctaaaacctagtatctttttctcttctatggaaaatccgaaggtctaaacttgacttttttgaggtcttctcaacttgactacagttgtgctcataattgtccttgcctttccagcttaattattttaaggaacaaatgaaaactctgggctgggtggagtggctcatacctgtaatcccagcactttgggaggctacggtgggcagatcatctgaggccaggagttcgagacctgcctggccaacatggcaacaccccgtctctaataaaaatataaaaattagcctggcatggtagcatgcgcctatagtcccagctgctcaggaggctgaggcatgagaatcgcttgaacctaggaggtggaggttgcattcaactgagatcataccacttcattccagcctgggtgacagagcaagactctgtctcaaaaaaaaaaaaaaaaaaaaaaaaaaaaaaaaaaggaaaactctgtgatggacatttgtttagtaaatcccttcagtatttatccctcctttccccacagcagctttctttcctgtcaactagaaaggagcaggatgtaataaatacattttggtgtgactaggccacaccaactcttaatcatctcccattttccttagacatttaaatttcaaggcaggtaccctctgtgtactcagaaatttgaagaagttatttggttttccaaaatgcacactgcgggttattgatttgttctttacaactattgttctcatatttctcacactaaataaatctctatgagagcttcttgaaaaaaaaaaaaaaaaagcg

SEQ ID NO: 6474 - DNA, 1400 bp, Homo sapiens
gggggagttcggagacgtgatgctgggcgattaccgagggaacaaagtcgccgtcaagtgcattaagaacgacgccactgcccaggccttcctggctgaagcctcagtcatgacgcaactgcggcatagcaacctggtgcagctcctgggcgtgatcgtggaggagaagggcgggctctacatcgtcactgagtacatggccaaggggagccttgtggactacctgcggtctaggggtcggtcagtgctgggcggagactgtctcctcaagttctcgctagatgtctgcgaggccatggaatacctggagggcaacaatttcgtgcatcgagacctggctgcccgcaatgtgctggtgtctgaggacaacgtggccaaggtcagcgactttggtctcaccaaggaggcgtccagcacccaggacacgggcaagctgccagtcaagtggacagcccctgaggccctgagagagaagaaattctccactaagtctgacgtgtggagtttcggaatccttctctgggaaatctactcctttgggcgagtgccttatccaagaattcccctgaaggacgtcgtccctcgggtggagaagggctacaagatggatgcccccgacggctgcccgcccgcagtctatgaagtcatgaagaactgctggcacctggacgccgccatgcggccctccttcctacagctccgagagcagcttgagcacatcaaaacccacgagctgcacctgtgacggctggcctccgcctgggtcatgggcctgtggggactgaacctggaagatcatggacctggtgcccctgctcactgggcccgagcctgaactgagccccagcgggctggcgggcctttttcctgcgtcccagcctgcacccctccggccccgtctctcttggacccacctgtggggcctggggagcccactgaggggccagggaggaaggaggccacggagcgggcggcagcgccccaccacgtcgggcttccctggcctcccgccactcgccttcttagagttttattcctttccttttttgagattttttttccgtgtgtttattttttattatttttcaagataaggagaaagaaagtacccagcaaatgggcattttacaagaagtacgaatcttatttttcctgtcctgcccgtgaggtgggggggaccgggcccctctctagggacccctcgccccagcctcattccccattctgtgtcccatgtcccgtgtctcctcggtcgccccgtgtttgcgcttgaccatgttgcactgtttgcatgcgcccgaggcagacgtctgtcaggggcttggatttcgtgtgccgctgccacccgcccacccgccttgtgagatggaatcgtaataaaccacgccatgaggaaaaaa

SEQ ID NO: 6475 - DNA, 1399 bp, Homo sapiens; identical to SEQ ID NO: 1240

SEQ ID NO: 6476 - DNA, 600 bp, Homo sapiens
cctgactgtcctgctcacccacagccgatctgctgcaggtcagcaactgtgtcgtgagcagctgccaaccaccagcctttctggtgctgttctccagttcacgtctgccagctggtgagggcagaggcagacctggtcagacccagcgcccctcctccctgagggagcatggcacagcctcacacttgaaagacggtgtttggtttcccatctaatcaacttaagggaagccggcatgtacccttcaaggccctgtcaccacctattttcctgatcagttggtataaactgagggtggcttttagagacccagacttggttggcagcgctgccatggaacaccccagcaagcacctcccagcctgcctttcggagcagcacccaggaggggatgccgcgctccagcaacaccaggtcaggcctgtgcagacccctgccctgccgctgcagaaatccagaagcatccttaatgcttctcagtcttcagccagagggagggctgttatttccagaggtgcgctttttatgtacttttagctagatgtggcatgcatctgtgagctttagatcattaaatccaaaatgtttgcctaaatgagg

SEQ ID NO: 6477 - DNA, 1400 bp, Homo sapiens
aatgcttgatatgggctttgaaccccaaataaggaagattgtggatcaaataagacctgataggcaaactctaatgtggagtgcgacttggccaaaagaagtaagacagcttgctgaagatttcctgaaagactatattcatataaacattggtgcacttgaactgagtgcaaaccacaacattcttcagattgtggatgtgtgtcatgacgtagaaaaggatgaaaaacttattcgtctaatggaagagatcatgagtgagaaggagaataaaaccattgtttttgtggaaaccaaaagaagatgtgatgagcttaccagaaaaatgaggagagatgggtggcctgccatgggtatccatggtgacaagagtcaacaagagcgtgactgggttctaaatgaattcaaacatggaaaagctcctattctgattgctacagatgtggcctccagagggctagatgtggaagatgtgaaatttgtcatcaattatgactaccctaactcctcagaggattatattcatcgaattggaagaactgctcgcagtaccaaaacaggcacagcatacactttctttacacctaataacataaagcaagtgagcgaccttatctctgtgcttcgtgaagctaatcaagcaattaatcccaagttgcttcagttggtcgaagacagaggttcaggtcgttccaggggtagaggaggcatgaaggatgaccgtcgggacagatactctgcgggcaaaaggggtggatttaatacctttagagacagggaaaattatgacagaggttactctagcctgcttaaaagagattttggggcaaaaactcagaatggtgtttacagtgctgcaaattacaccaatgggagctttggaagtaattttgtgtctgctggtatacagaccagttttaggactggtaatccaacagggacttaccagaatggttatgatagcactcagcaatacggaagtaatgttccaaatatgcacaatggtatgaaccaacaggcatatgcatatcctgctactgcagctgcacctatgattggttatccaatgccaacaggatattcccaataagactttagaagtatatgtaaatgtctgtttttcataattgctctttatattgtgtgttatctgacaagatagttatttaagaaacatgggaattgcagaaatgactgcagtgcagcagtaattatggtgcactttttcgctatttaagttggatatttctctacattcctgaaacaatttttaggttttttttgtactagaaaatgcaggcagtgttttcacaaaagtaaatgtacagtgatttgaaatacaataatgaaggcaatgcatggccttccaataaaaaatatttgaagactgaaaaaaaaaa

SEQ ID NO: 6478 - DNA, 1400 bp, Homo sapiens
ctgcagacttctttcgggacgaggcagagaggatcatgagggactcccctgtcattgatgggcacaatgacctcccctggcagctgctggatatgttcaacaaccggctgcaggacgagagggccaacctgaccaccttggccggcacacacaccaacatccccaagctgagggccggctttgtgggaggccagttctggtccgtgtacacgccctgcgacacccagaacaaagacgccgtgcggaggacgctggagcagatggacgtggtccaccgcatgtgccggatgtacccggagaccttcctgtatgtcaccagcagtgcaggcattcggcaggccttccgggaagggaaggtggccagcctgatcggcgtggagggcggccactccattgacagcagtttgggcgtcctgcgggcactctatcagctgggcatgcggtacctgaccctcacccacagctgcaacacgccctgggctgacaactggctggtggacacgggagacagcgagccccagagccaaggcttgtcaccctttgggcagcgtgtggtgaaggagctgaaccgtctgggggtcctcatcgacttggctcacgtgtctgtggccaccatgaaggccaccctgcagctgtccagagccccggtcatcttcagccactcctcggcctacagcgtgtgcgcaagccggcgcaacgtgcctgacgacgtcctgaggctggtgaaacagacagacagcctggtgatggtgaacttctacaacaattacatttcctgcaccaacaaggccaacctgtcccaagtggccgaccatctggatcacatcaaggaggtggcaggagccagagccgtgggttttggtggggactttgatggtgttccaagggtccctgaggggctggaggacgtctccaagtatccagacctgatcgctgagctgctcaggaggaactggacggaggcggaggtcaagggcgcactggctgacaacctgctgagggtcttcgaggctgtggaacaggccagcaacctcacacaggctcccgaggaggagcccatcccgctggaccagctgggtggctcctgcaggacccattacggctactcctctggggcttccagcctccatcgccactgggggctcctgctggcctccctcgctcccctggtcctctgtctgtctctcctgtgaaacctgggagaccagagtcccctttagggttcccggagctccgggaagacccgcccatcccaggactccagatgccaggagccctgctgcccacatgcaaggaccagcatctcctgagaggacgcctgggcttacctggggggcaggatgcctggggacagttcaggacacacacacagtaggcccgcaataaaagcaacacccctt

SEQ ID NO: 6479 - DNA, 1400 bp, Homo sapiens
gtgatcgcacaaggacatttgggactgtcttgagaaaacagataatgatagtgttttgtacttgttcttttctggtaggttctgtctgtgccaagggcaggttgatcagtgagctcaggagagagcttcctgtttctaagtggcctgcaggggccactctctactggtaggaagaggtaccacaggaagccgcctagtgcagagaggttgtgaaaacagcagcaatgcaatgtggaaattgtagcgtttcctttcttccctcatgttctcatgtttgtgcatgtatattactgatttacaagactaacctttgttcgtatataaagttacaccgttgttgttttacatcttttgggaagccaggaaagcgtttggaaaacgtatcacctttcccagattctcggattctcgactctttgcaacagcacttgcttgcggaactcttcctggaatgcattcactcagcatccccaaccgtgcaacgtgtaacttgtgcttttgcaaaagaagttgatctgaaattcctctgtagaatttagcttatacaattcagagaatagcagtttcactgccaacttttagtgggtgagaaattttagtttaggtgtttgggatcggacctcagtttctgttgtttcttttatgtggtggtttctatacatgaatcatagccaaaaacttttttggaaactgttggttgagatagttggttcttttaccccacgaagacatcaagatacacttgtaaataaagctgatagcatatattcatacctgttgtacacttgggtgaaaagtatggcagtgggagactaagatgtattaacctacctgtgaatcatatgttgtaggaaaagctgttcccatgtctaacaggacttgaattcaaagcatgtcaagtggatagtagatctgtggcgatatgagagggatgcagtgcctttccccattcattcctgatggaattgttatactaggttaacatttgtaatttttttctagttgtaatgtgtatgtctggtaaataggtattatattttggccttacaataccgtaacaatgtttgtcattttgaaatacttaatgccaagtaacaatgcatgctttggaaatttggaagatggttttattctttgagaagcaaatatgtttgcattaaatgctttgattgttcatatcaagaaattgattgaacgttctcaaaccctgtttacggtacttggtaagagggagccggtttgggagagaccattgcatcgctgtccaagtgtttcttgttaagtgcttttaaactggagaggctaacctcaaaatattttttttaactgcattctataataaatgggcacagtatgctccttacagaaaaaaaaaaaaaaaaaaaaaaaaaaaaaaaaaa

SEQ ID NO: 6480 - DNA, 1400 bp, Homo sapiens
gaggatacgaagcgttttcggcttcctgcccggagctgtgcagcaaacagtcgacccccatggggctcagccttcccctgagtactagcgtccctgacagcgcggaatctgggtgcagttcctgcagtaccccactctacgatcagggtggcccggtggaaatcctgccctttctgtacctgggcagtgcgtatcacgcttcccgcaaggacatgctggatgccttgggcataactgccttgatcaacgtctcagccaattgtcccaaccattttgagggtcactaccagtacaagagcatccctgtggaggacaaccacaaggcagacatcagctcctggttcaacgaggccattgacttcatagactccatcaagaatgctggaggaagggtgtttgtccactgccaggcaggcatttcccggtcagccaccatctgccttgcttaccttatgaggactaatcgagtcaagctggacgaggcctttgagtttgtgaagcagaggcgaagcatcatctctcccaacttcagcttcatgggccagctgctgcagtttgagtcccaggtgctggctccgcactgttcggcagaggctgggagccccgccatggctgtgctcgaccgaggcacctccaccaccaccgtgttcaacttccccgtctccatccctgtccactccacgaacagtgcgctgagctaccttcagagccccattacgacctctcccagctgctgaaaggccacgggaggtgaggctcttcacatcccattgggactccatgctccttgagaggagaaatgcaataactctgggaggggctcgagagggctggtccttatttatttaacttcacccgagttcctctgggtttctaagcagttatggtgatgacttagcgtcaagacatttgctgaactcagcacattcgggaccaatatatagtgggtacatcaagtccatctgacaaaatggggcagaagagaaaggactcagtgtgtgatccggtttctttttgctcgcccctgttttttgtagaatctcttcatgcttgacatacctaccagtattattcccgacgacacatatacatatgagaatataccttatttatttttgtgtaggtgtctgccttcacaaatgtcattgtctactcctagaagaaccaaatacctcaatttttgtttttgagtactgtactatcctgtaaatatatcttaagcaggtttgttttcagcactgatggaaaataccagtgttgggtttttttttagttgccaacagttgtatgtttgctgattatttatgacctgaaataatatatttcttcttctaagaagacattttgttacataaggatgacttttttatacaatggaataaattatggcatttctattg

SEQ ID NO: 6481 - DNA, 600 bp, Homo sapiens
caccaccacttgtgttgccgccaccctcccagccctactcgggatgagtgctttgcccgtcgggctccttaccccaactatgaccgggacatcttgaccattgacatcagtcgagtcacccccaacctcatgggccacctctgtggaaaccaaagagttctcaccaagcataaacatattcctgggctgatccacaacatgactgcccgctgctgtgacctgccatttccagaacaggcctgctgtgcagaggaggagaaattaaccttcatcaatgatctgtgtggtccccgacgtaacatctggcgagaccctgccctctgctgttacctgagtcctggggatgaacaggtcaactgcttcaacatcaattatctgaggaacgtggctctagtgtctggagacactgagaacgccaagggccagggggagcagggctcaactggaggaacaaatatcagctccacctctgagcccaaggaagaatgagtcaccccagagccctagagggtcagatggggggaaccccaccctgccccacccatctgaacactcattacactaaacacctcttggatttggaaaaaaaaaaaaaaaaaa

SEQ ID NO: 6482 - DNA, 600 bp, Homo sapiens
ctttaatattttttcctcgctccttctggtatatgcatgtcactgcatgataattgagttttcctttgttttaataaaactgttctcagacattaagctaaactaagagaaaaataactttgttgccaaaaggttgtgctatccagattttttatatgtctgcatgtttaaaaaaaaaaaagcaacaaaagaaaatgcactctaacttatgtgaactgagagaaaaaaatcaggttttaaacaggaaaacctatggggaatgatattttttgaaagacttttgtataaagttgagtacttagaaaaaagacaaaccagatgtaatatattttgtggatgtttttatttcttggatttatagtaccttatactaaggttaaaaaaatatgcttgatattgtgaaaaggtgaaattcttcaccaacatttcatttgctcctttgtcatattgtaatgccaatataatatagttaatgaaaacagcatttttaaaaaccgaaatattgaaatggtgtaatgttgtaccatttgcactgtgagcaaatgctaatacagtaaatatattgtgtttgctgacaatcaaaaaaaaaaaaaaaaaaaa

SEQ ID NO: 6483 - DNA, 1400 bp, Homo sapiens
actcgcattacccttggtcactgtgatttctgttttgtttaaaaaattcttacaaacctcaggaaaactgtgccctccgccggctaccttagcttagcgtgtcagcgggcgccacagcggaatcagcggttccgtgttcacttttgttgtacaatatatgacacagtgcacattgaataccaacaaggttgcaacgtttacattatagccacatcaacagaagtaactgggtatattcttagtaacttttctatggaactcttcaaaaatgggtcacaggatggccttttaaaacattgtatattatcttcactgttttcaccttttaggttgctaagttcaatatttgtgatgataatgaggtactgaaccacgatggctgttgaggaattggtcctaaaaggacagatcacttcagaagagtgaataactgatttgcacagctgaatcaggagacacaaagatgagactgtgtttggttacattttccaaagtttcattgcattctcccttggggaggctgtgagagagggcttgtatccctcttgtgctaagcagactctactcctaactgacttcaatatttcagcagggtacacaggcgtttccaagtttcagtgacaccgtcctgcctaaccagatgcggtcagcctcttcacacccacctggcttgcatcccccatcccttgttcacacgccctgattcacggtgagacattttgccaccttcttgtgtatattacttggcatgagatgatattgtacttgtataggattctagcaattcataataaatatgtaagactaggctttactgtcttatgcttatggacattgtatatttgtattttatgaccaagtagaccaagtcagaaagatctctctcgagcgcaccataaacctgcagagagaagtctcgaaaggctccaccaaggtaccaagggcagctgcttttcctgtcttttgtgcatgggcgacccattacagtatgagataagattgagttctgatgcgttaaacggaggtggcagaaatttgtcaagaaggccttatccatttcgattgtgtgacagattgaaatttattgtttacattggggaatgtatctcaaatttttaaatagaagagtaataaacagactttaaagcaaatattaagatttttactcattcaaggcaagtaaatgaatggaattatctgagctctatggcactggttgtttagagtgactgatgaagtgcacctttcaaaaacatttttgatgccatcaccagcctactgcagaagtgcagggcacagtaaacaccatgtattattgaagatgatctgttttgtatgtatccttgtcaaatatattctataatggaataaaaaatcctggaaagtgggggtttccttaa

SEQ ID NO: 6484 - DNA, 1400 bp, Homo sapiens
aattgccattcgtcctactagtgaaacagtaatgtatcctgcatatgcaaaatgggtacaatcacacagagacctgcccatcaagctcaatcagtggtgcaatgtggtgcgttgggaattcaagcatcctcagcctttcctacgtactcgtgaatttctttggcaggaagggcacagtgcttttgctaccatggaagaggcagcggaagaggtcttgcagatacttgacttatatgctcaggtatatgaagaactcctggcaattcctgttgttaaaggaagaaagacggaaaaggaaaaatttgcaggaggagactatacaactacaatagaagcatttatatctgctagtggaagagctatccagggaggaacatcacatcatttagggcagaatttttccaaaatgtttgaaatcgtttttgaagatccaaagataccaggagagaagcaatttgcctatcaaaactcctggggcctgacaactcgaactattggtgttatgaccatggttcatggggacaacatgggtttagtattaccaccccgtgtagcatgtgttcaggtggtgattattccttgtggcattaccaatgcactttctgaagaagacaaagaagcgctgattgcaaaatgcaatgattatcgaaggcgattactcagtgttaacatccgcgttagagctgatttacgagataattattctccaggttggaaattcaatcactgggagctcaagggagttcccattagacttgaagttgggccacgtgatatgaagagctgtcagtttgtagccgtcagacgagatactggagaaaagctgacagttgctgaaaatgaggcagagactaaacttcaagctattttggaagacatccaggtcacccttttcacaagggcttctgaagaccttaagactcatatggttgtggctaatacaatggaagactttcagaagatactagattctggaaagattgttcagattccattctgtggggaaattgactgtgaggactggatcaaaaagaccactgccagggatcaagatcttgaacctggtgctccatccatgggagctaaaagcctttgcatccccttcaaaccactctgtgaactgcagcctggagccaaatgtgtctgtggcaagaaccctgccaagtactacaccttatttggtcgcagctactgagggatgaacgaaagccccctcttcaactcctctcactttttaaagcattgatattagtatcttctcagatacagaccgttttatgattttttaaaaagtaaaagttctaaaatgaagtcacacaggacaattattcttatgcctaagttaacagtggataaaagacttttctgtaaacaactccagtaataaatatcatgaacta

SEQ ID NO: 6485 - DNA, 815 bp, Homo sapiens; identical to SEQ ID NO: 1250

SEQ ID NO: 6486 - DNA, 1400 bp, Homo sapiens
agtgggaggccataaatatattcagagtaacacaggattcactgttttattctagcaatgaatttgaagaataccctggaagaagaaacatctacagaattagcattggaagctatcctccaagcaagaagtgtgttacttgccatctaaggaaagaaaggtgccaatattacacagcaagtttcagcgactacgccaagtactatgcacttgtctgctacggcccaggcatccccatttccacccttcatgatggacgcactgatcaagaaattaaaatcctggaagaaaacaaggaattggaaaatgctttgaaaaatatccagctgcctaaagaggaaattaagaaacttgaagtagatgaaattactttatggtacaagatgattcttcctcctcaatttgacagatcaaagaagtatcccttgctaattcaagtgtatggtggtccctgcagtcagagtgtaaggtctgtatttgctgttaattggatatcttatcttgcaagtaaggaagggatggtcattgccttggtggatggtcgaggaacagctttccaaggtgacaaactcctctatgcagtgtatcgaaagctgggtgtttatgaagttgaagaccagattacagctgtcagaaaattcatagaaatgggtttcattgatgaaaaaagaatagccatatggggctggtcctatggaggatacgtttcatcactggcccttgcatctggaactggtcttttcaaatgtggtatagcagtggctccagtctccagctgggaatattacgcgtctgtctacacagagagattcatgggtctcccaacaaaggatgataatcttgagcactataagaattcaactgtgatggcaagagcagaatatttcagaaatgtagactatcttctcatccacggaacagcagatgataatgtgcactttcaaaactcagcacagattgctaaagctctggttaatgcacaagtggatttccaggcaatgtggtactctgaccagaaccacggcttatccggcctgtccacgaaccacttatacacccacatgacccacttcctaaagcagtgtttctctttgtcagactaaaaacgatgcagatgcaagcctgtatcagaatctgaaaaccttatataaacccctcagacagtttgcttattttattttttatgttgtaaaatgctagtataaacaaacaaattaatgttgttctaaaggctgttaaaaaaaagatgaggactcagaagttcaagctaaatattgtttacattttctggtactctgtgaaagaagagaaaagggagtcatgcattttgctttggacacagtgttttatcacctgttcatttgaagaaaaataataaagtcagaagttcaaaaaaaaaa

SEQ ID NO: 6487 - DNA, 1400 bp, Homo sapiens
attatgtttaattatttaagatttctttatgtggaacatctatagagataaatagaaattttcaataagatgtagtaacactgtgatttatctttcaagagtctctcttcacttccttctaaagagactaatttgagagtacaggtgcatattaattttcttggttctttcagctgaattatattggtccagaagttcaaaatcatgtgacaataataagggatactgacagaagttatttccaagtttgtgtatatattataaaaattacatatataaaactaaggcttttatttctgttatttttaagcttttatttcttgtagctaaaaataaaacatcataaatcttcttattaaatcaatcttgtaaatagaaaatgtaataactttcttaccattaacatttttttacccttccatagaagggagggaataaatcatgacttatcccattttcaataacaaaacgaactatggcactaaccaaaaacttgcattctggcataatttttacagttgcagagaattgtttctgggctcattaaaaaaagtagtattgcagacattgctgcaatgggaagcagacaataacttcttaaaggaattctacacctcctttaagatttacttaattgctacatctaaattctgataatttaaaatccattttaggtgataaaattttttaaaagttttgaaggaaacctctggataaatggacaaggcctaatttttttttgtagtcaatccaactgtactggccaatttttgaaataagattatatgattaggtattagcagagacaaagagttacctcctccatcttactctgccctatttgaaagtctcaggggagaaaagggaacaagatgctgatccaacctgagtggagtcaggtgaggcatctttacatctaagaatttttttttaaattttattattattatacttcaagttctagggtacatgtccacaatgcacatgtctgtcacacatgcacacatgtgccatgctggtgtgctgcacccaccaacctgtcatccagcattaggtatatctcctaatgctatccctcccctctccacccaccccacagcaggccccggtatgtgatgttccccttcgtgtgtccatgtgttcttattgttcaattcccacctatgagtgagaatatgtggtgtttggtttttggtccttgcaacagtttgctgagaatgatggtttccagcttcatccatgtccctacaaagaacatgaactcatcattttttatggctgcatagtattccatggtgtatatgtgccacattttcttaatccagtctatcattgttggacatttgggttggttccaagtctttgctattgtgaatagtgctgcaataaacatatgtgtg

SEQ ID NO: 6488 - DNA, 600 bp, Homo sapiens
cctctcagccttcctatcatcccacgtgtctacccagacccttgtgcggcccatgccctgggggcggcgtcctgtccctgagctgggaggcggctttggatggtccgggcgtcaagagcaggggtgggccggggaggggtcctttgcggtgagctatgtttacattgacacagtgtgccaaagtgacttactgcggttgcgttagtttctgtcatcaggacactatctcaccctcccactcctgtttttaaaactcagaattctttcctaagagcccttcgaagcaaagcgtgccgaagttagttgtcttctctgtgctggtcctttcttatgtcctcataaaagctcagatgatggtatctgtgagtatgttttgcaaattcaaaatatagtttggtaattttttttgccagttgatttttaaaaagaactgctgtacagagctagtactttgtccattttatgaatggaaaccatccttgaaaattgtttaacttaaataaagagaagatactttctagataccgctctttgctggccagagtctgtcctggtgtgtgaaggctgggtggggtgggtgtggggactgggattggggtc

SEQ ID NO: 6489 - DNA, 1400 bp, Homo sapiens
gggcccgcgaaattaaagagagctgaggatgccaaggccagtctgcagccgtcgtcgctcacgttcccggcgacggggtttgtacgccgcgggcacccgtcgcagcgcgcttccgccttctttcacctgtgaggtcggccgccgccgtgactccggaaggactcggccgggccgccggatgtgacgcaggggccagggcgcgtcggagccgctgagaaagcgcagagaaggcgggccccgtctgaggtctggcagtcagagacagccgggcgcccacggcccgagcgcccacggcagcaccatgcccgcactcctggagcgccccaagctttccaacgccatggccagggcgctgcaccggcacattatgatggagcgggagcgcaagcggcaggaggaagaagaggtggataagatgatggaacagaagatgaaggaagaacaggagagaaggaagaaaaaggagatggaagagagaatgtcattagaggagaccaaggaacaaattctgaagttggaggagaagcttttggctctacaggaagagaagcaccagcttttcctgcagctcaagaaagttttacatgaggaagaaaaacggaggcgaaaggaacagagtgacctgaccaccctgacatcagctgcataccagcagagcctgactgttcacacaggaactcatctcctcagcatgcaggggagccctggaggacacaatcgcccaggcaccctcatggcagctgacagagccaaacaaatgtttggaccccaagtgcttacgacccggcactacgtgggctcagcagctgcttttgcagggacaccagagcatggacaattccaaggcagtcctggtggtgcctatgggactgctcagcccccacctcactatgggcccacacagccagcttatagtcctagtcagcagctcagagctccttcggcattccctgcagtgcagtacctatctcagccacagccacagccctatgctgtgcatggccactttcagcccactcagacaggtttcctccagcctggtggtgccctgtccttgcaaaagcagatggaacatgctaaccagcagactggcttctccgactcatcctctctgcgccccatgcacccccaggctctgcatccagcccctggactccttgcttccccccagctccctgtgcagatgcagccagcaggaaagtcgggctttgcagctaccagccaacctggccctcggctccccttcatccaacacagccagaacccgcgattctaccacaagtgaccatcagattatatcttcaacaccacaccccccaccccatcgtgggtgagggtatcccctgtgtgtcccaggccaataaaatctacctgccactgaaaaaaaaaaaaaaaaaaaa

SEQ ID NO: 6490 - DNA, 990 bp, Homo sapiens; identical to SEQ ID NO: 1255

SEQ ID NO: 6491 - DNA, 1400 bp, Homo sapiens
aggaagaggctaccaaggaagatgctgaggccccaggcatcagagatcatgagagcctgtagccaccaatgtttcaagaggagcccccaccctgttcctgctgctgtctgggtgctactggggaaactggccatggcctgcaaactgggaacccctttcccaccccaacctgctctcctcttctactcacttttcccactccaagcccagcccatggagattgacctggatggggcaggccacctggctctcacctctaggtccccatactcctatgatctgagtcagagccatgtcttctccctggaatgagttgaggccactgtgttccttccgcttggagctattttccaggcttctgctggggcctgggacaactgctcccacctcctgacacccttctcccactctcctaggcattctggacctctgggttgggatcaggggtaggaatggaaggatggagcatcaacagcagggtgggcttgtggggcctgggaggggcaatcctcaaatgcggggtgggggcagcacaggagggcggcctccttctgagctcctgtcccctgctacacctattatcccagctgcctagattcagggaaagtgggacagcttgtaggggaggggctcctttccataaatccttgatgattgacaacacccatttttccttttgccgaccccaagagttttgggagttgtagttaatcatcaagagaatttggggcttccaagttgttcgggccaaggacctgagacctgaagggttgactttacccatttgggtgggagtgttgagcatctgtccccctttagatctctgaagccacaaataggatgcttgggaagactcctagctgtcctttttcctctccacacagtgctcaaggccagcttatagtcatatatatcacccagacataaaggaaaagacacattttttaggaaatgtttttaataaaagaaaattacaaaaaaaaattttaaagacccctaaccctttgtgtgctctccattctgctccttccccatcgttgcccccatttctgaggtgcactgggaggctccccttctatttggggcttgatgactttctttttgtagctggggctttgatgttccttccagtgtcatttctcatccacataccctgacctggccccctcagtgttgtcaccagatctgatttgtaacccactgagaggacagagagaaataagtgccctctcccaccctcttcctactggtctctctatgcctctctacagtctcgtctcttttaccctggcccctctcccttgggctctgatgaaaaattgctgactgtagctttggaagtttagctctgagaaccgtagatgatttcagttctaggaaaataaaacccgttgattact

SEQ ID NO: 6492 - DNA, 1400 bp, Homo sapiens
cataagggctttgccttcgttcagtatgttaatgagagaaatgcccgggctgctgtagcaggagaggatggcagaatgattgctggccaggttttagatattaacctggctgcagagccaaaagtgaaccgaggaaaagcaggtgtgaaacgatctgcagcggagatgtacggctcctcttttgacttggactatgactttcaacgggactattatgataggatgtacagttacccagcacgtgtacctcctcctcctcctattgctcgggctgtagtgccctcgaaacgtcagcgtgtatcaggaaacacttcacgaaggggcaaaagtggcttcaattctaagagtggacagcggggatcttccaagtctggaaagttgaaaggagatgaccttcaggccattaagaaggagctgacccagataaaacaaaaagtggattctctcctggaaaacctggaaaaaatggaaaaggaacagagcaaacaagcagtagagatgaagaatgataagtcagaagaggagcagagcagcagctccgtgaagaaagatgagactaatgtgaagatggagtctgaggggggtgcagatgactctgctgaggagggggacctactggatgatgatgataatgaagatcggggggatgaccagctggagttgatcaaggatgatgaaaaagaggctgaggaaggagaggatgacagagacagcgccaatggaggatgactcttaagcacatagtggggtttagaaatcttatcccattatttctttacctaggcgcttgtctaagatcaaatttttcaccagatcctctcccctagtatcttcagcacatgctcactgttctccccatccttgtccttcccatgttcattaattcatattgccccgcgcctagtcccattttcacttcctttgacgctcctagtagttttgttaagtcttaccctgtaatttttgcttttaattttgatacctctttatgacttaacaataaaaaggatgtatggtttttatcaactgtctccaaaataatctcttgttatgcagggagtacagttcttttcattcatacataagttcagtagttgcttccctaactgcaaaggcaatctcatttagttgagtagctcttgaaagcagctttgagttagaagtatgtgtgttacaccctcacattagtgtgctgtgtggggcagttcaacacaaatgtaacaattatttttgtgaatgagagttggcatgtcaaatgcatcctctagaaaaataattagtgttatagtcttaagatttgttttctaaagttgatactgtgggatttttgtgaacagcctgatgtttgggaccttttttcctcaaaataaacaagtccttattaaaccaggaatttggag

SEQ ID NO: 6493 - DNA, 1400 bp, Homo sapiens
ttcaacgaacaaagctggtttacagactgcagacaaatatgcagcacttgctaatttagacaatatcttcagtgccgggcaaggtggtgatcagggaagtggctttgggaccacaggtaaagctcctgttggttctgtggtttcagttcccagtcagtcaagtgcatcttcagacaagtatgcagctctggcagaactagacagcgttttcagttctgcagccacctccagtaatgcgtatacttccacaagtaatgctagcagcaatgtttttggaacagtgccagtggttgcttctgcacagacacagcctgcttcatcaagtgtgcctgctccatttggacgtacgccttccacaaatccatttgttgctgctgctggtccttctgtggcatcttctacaaacccatttcagaccaatgccagaggagcaacagcggcaacctttggcactgcatccatgagcatgcccacgggattcggcactcctgctccctacagtcttcccaccagctttagtggcagctttcagcagcctgcctttccagcccaagcagctttccctcaacagacagctttttctcaacagcccaatggtgcaggttttgcagcatttggacaaacaaagccagtagtaaccccttttggtcaagttgcagctgctggagtatctagtaatccttttatgactggtgcaccaacaggacaatttccaacaggaagctcatcaaccaatcctttcttatagccttatatagacaatttactggaacgaacttttatgtggtcacattacatctctccacctcttgcactgttgtcttgtttcactgatcttagctttaaacacaagagaagtctttaaaaagcctgcattgtgtattaaacaccaggtaatatgtgcaaaaccgagggctccagtaacaccttctaacctgtgaattggcagaaaagggtagcggtatcatgtatattaaaattggctaatattaagttattgcagataccacattcattatgctgcagtactgtacatatttttcttagaaattagctatttgtgcatatcagtatttgtaactttaacacattgttatgtgagaaatgttactggggaaatagatcagccacttttaaggtgctgtcatatatcttggaatgaatgacctaaaatcattttaaccattgctactggaaagtaacagagtcaaaattggaaggttttattcattcttgaatttttcctttctaaagagctcttctatttatacatgcctaaattcttttaaaatgtagagggatacctgtctgcataataaagctgatcatgttttgctacagtttgcaggtgaaaaaaaataaatattataaaataaaaaaaaaaaaaaagaaaaaaaaaa

SEQ ID NO: 6494 - DNA, 600 bp, Homo sapiens
tggaaaggttatcttaaatggctacctaaattgaaatccttttcagaaaaaatataattgcaagtaggtaggagtggcctaaattgtctaatgtaataaagtcagacaaaatgcacactttatagtttcaagattttcagtaaataaaatctgtccattcctacctggacatgtcccattaaaaagtggaagattttaaataatttctttacagatgttttatttaaacaggtagcacaatctactaatgttgtgtgatttgtgttatactggttgtaattaatttttttaattcatgaactagcggaaaatttattaaattaactattaactacattcaccttgtaaattactgtataaaacttgttgacaatgcactgactttagaaagatgttaatgtacataaatagagtgtaaataaaatagtgttgatgtactgaaatatgaactgtatcaaaagtattggtaattgtatatggggtgtacctgtttatctgttaactattatccaaacaaattaaatactgtggttgcctctatgtgctgtttttcctcatacaagtaaacacagaaagtcaaaaaaaaaaaaaaaaaaaaaa

SEQ ID NO: 6495 - DNA, 1400 bp, Homo sapiens
cagccctctcatgtctagtgctgtccagctaaatggctcatccagtctgacctcagaagatccagtgaccatgatggattccattttgaatgataacatcaatcttttgggaaaggttgagctgttggattatcttgacagtattgactgcagtttagaggacttccaggccatgctatcaggaagacaatttagcatagacccagatctcctggttgatcttttcactagttctgtgcagatgaatcccacagattacatcaataatacaaaatctgagaataaaggattagaaactaccaagaacaatgtagttcagccagtttcggaagagggaagaaaatctaaatccaaaccagataagcagcttatccagtataccgcctttccacttcttgcattcctcgatgggaaccctgcttcttctgttgaacaggcgagtacaacagcatcatcagaagttttgtcctctgtagataaacccatagaagttgatgagcttctggatagcagcctagacccagaaccaacccaaagtaagcttgttcgcctggagccattgactgaagctgaagctagtgaagctacactgttttatttatgtgaacttgctcctgcacctctggatagtgatatgccacttttagatagctaaatccccaggaagtggactttacatgtatatattcatcaaaatgatgaactatttattttaaagtatcatttggtactttttttgtaaattgctttgttttgtttaatcagatactgtggaataaaagcaccttttgcttttctcactaaccacacactcttgcagagctttcaggtgttactcagctgcatagttacgcagatgtaatgcacattattggcgtatctttaagttggattcaaatggccatttttctccaattttggtaaattggatatcttttttttacaaatacgaccattaacctcagttaaatttttgtttgttttcctgtttgatgctgtctatttgcattgagtgtaagtcatttgaactaatggtataactcctaaagcttctctgctccagttatttttattaaatatttttcacttggcttatttttaaaactgggaacataaagtgcctgtatcttgtaaaacttcatttgtttcttttggttcagagaagttcatttatgttcaaagacgtttattcatgttcaacaggaaagacaaagtgtacgtgaatgctcgctgtctgatagggttccagctccatatatatagaaagatcgggggtgggatgggatggagtgagccccatccagttagttggactagttttaaataaaggttttccggtttgtgtttttttgaaccatactgtttataaaataaatacaatgaatgttgagtactagtgg

SEQ ID NO: 6496 - DNA, 600 bp, Homo sapiens
gaggacggcacggccagcgcctgctgtgagtgggtctcccaagactaggcctcaggacgcggggggagccatccccgccgccctcacaggacccaccaggcagcggagacatgtggaattagagtattttgaggtgtcctttctttacaaaataatggggtcttgggcatttcacatcactccatttctactgagactttcagaatcacacaggccctttccgtggatttcatttggggcaaagaaacaacatagttttgtttttgttttcagcctatggaatgatttccttttgtctgtcttgttcaagttcagacgaagctactctggcatctgcacatttccgtgttacagcagctgcctgatgaattttatccacctccatttcagcatgtggctcgcgtggacaggtggacggacgctgtggccgcatggaaccttgagaacccagggacgagccagtgccgggaaggaactgccgggactcaccgagctgcacttaactgttctctttctggctattttttgttgtttgtttctttgtgttgactttgtccctggcaaaattttccactctgagtaaaacaagtctcggaattc

SEQ ID NO: 6497 - DNA, 1400 bp, Homo sapiens
acaccgtgatattgtacagaagctattgcagtacaaggcagacatcaatgcagtgaatgaacacgggaatgtgcccctgcactatgcctgtttttggggccaagatcaagtggcagaggacctggtggcaaatggggcccttgtcagcatctgtaacaagtatggagagatgcctgtggacaaagccaaggcacccctgagagagcttctccgagagcgggcagagaagatgggccagaatctcaaccgtattccatacaaggacacattctggaaggggaccacccgcactcggccccgaaatggaaccctgaacaaacactctggcattgacttcaaacagcttaacttcctgacgaagctcaacgagaatcactctggagagctatggaagggccgctggcagggcaatgacattgtcgtgaaggtgctgaaggttcgagactggagtacaaggaagagcagggacttcaatgaagagtgtccccggctcaggattttctcgcatccaaatgtgctcccagtgctaggtgcctgccagtctccacctgctcctcatcctactctcatcacacactggatgccgtatggatccctctacaatgtactacatgaaggcaccaatttcgtcgtggaccagagccaggctgtgaagtttgctttggacatggcaaggggcatggccttcctacacacactagagcccctcatcccacgacatgcactcaatagccgtagtgtaatgattgatgaggacatgactgcccgaattagcatggctgatgtcaagttctctttccaatgtcctggtcgcatgtatgcacctgcctgggtagcccccgaagctctgcagaagaagcctgaagacacaaacagacgctcagcagacatgtggagttttgcagtgcttctgtgggaactggtgacacgggaggtaccctttgctgacctctccaatatggagattggaatgaaggtggcattggaaggccttcggcctaccatcccaccaggtatttcccctcatgtgtgtaagctcatgaagatctgcatgaatgaagaccctgcaaagcgacccaaatttgacatgattgtgcctatccttgagaagatgcaggacaagtaggactggaaggtccttgcctgaactccagaggtgtcgggacatggttgggggaatgcacctccccaaagcagcaggcctctggttgcctcccccgcctccagtcatggtactaccccagcctggggtccatccccttcccccatccctaccactgtgcgcaagaggggcgggctcagagctttgtcacttgccacatggtgtcttccaacatgggagggatcagccccgcctgtcacaataaagtttattatgaaaaaaaaaaaaaaaaaaaaaa

SEQ ID NO: 6498 - DNA, 1400 bp, Homo sapiens
ctgggccctgtcactcctgagatctgcaaacaggacattgtatttgatggcatcgctcagatccgtggtgagatcttcttcttcaaggaccggttcatttggcggactgtgacgccacgtgacaagcccatggggcccctgctggtggccacattctggcctgagctcccggaaaagattgatgcggtatacgaggccccacaggaggagaaggctgtgttctttgcagggaatgaatactggatctactcagccagcaccctggagcgagggtaccccaagccactgaccagcctgggactgccccctgatgtccagcgagtggatgccgcctttaactggagcaaaaacaagaagacatacatctttgctggagacaaattctggagatacaatgaggtgaagaagaaaatggatcctggctttcccaagctcatcgcagatgcctggaatgccatccccgataacctggatgccgtcgtggacctgcagggcggcggtcacagctacttcttcaagggtgcctattacctgaagctggagaaccaaagtctgaagagcgtgaagtttggaagcatcaaatccgactggctaggctgctgagctggccctggctcccacaggcccttcctctccactgccttcgatacaccgggcctggagaactagagaaggacccggaggggcctggcagccgtgccttcagctctacagctaatcagcattctcactcctacctggtaatttaagattccagagagtggctcctcccggtgcccaagaatagatgctgactgtactcctcccaggcgccccttccccctccaatcccaccaaccctcagagccacccctaaagagatcctttgatattttcaacgcagccctgctttgggctgccctggtgctgccacacttcaggctcttctcctttcacaaccttctgtggctcacagaacccttggagccaatggagactgtctcaagagggcactggtggcccgacagcctggcacagggcagtgggacagggcatggccaggtggccactccagacccctggcttttcactgctggctgccttagaacctttcttacattagcagtttgctttgtatgcactttgtttttttctttgggtcttgttttttttttccacttagaaattgcatttcctgacagaaggactcaggttgtctgaagtcactgcacagtgcatctcagcccacatagtgatggttcccctgttcactctacttagcatgtccctaccgagtctcttctccactggatggaggaaaaccaagccgtggcttcccgctcagccctccctgcccctcccttcaaccattccccatgggaaatgtcaacaagtatgaataaagacacctactgagtggc

SEQ ID NO: 6499 - DNA, 1400 bp, Homo sapiens
agaggcctaccttgaattaagggttatactcagtttttaacacattgttgaagaaaaggtaccagctttggaacgagatgctatactaataagcaagtgtaaaaaaaaaaaaaaaaagaggaagaaaatcttaagtgattgatgctgttttcttttaaaaaaaaaaaaaaaaaaattcattttctttgggttagagctagagagaaggccccaagcttctatggtttcttctaattcttattgcttaaagtatgagtatgtcacttacccgtgcttctgtttactgtgtaattaaaatgggtagtactgtttacctaactacctcatggatgtgttaaggcatattgagttaaatctcatataatgtttctcaatcttgttaaaagctcaaaattttgggcctatttgtaatgccagtgtgacactaagcattttgttcacaccacgctttgataactaaactggaaaacaaaggtgttaagtacctctgttctggatctgggcagtcagcactctttttagatctttgtgtggctcctatttttatagaagtggagggatgcactatttcacaaggtccaagatttgttttcagatatttttgatgactgtattgtaaatactacagggatagcactatagtattgtagtcatgagacttaaagtggaaataagactatttttgacaaaagatgccattaaatttcagactgtagagccacatttacaatacctcaggctaattactgttaattttggggttgaactttttttgacagtgagggtggattattggattgtcattagaggaaggtctagatttcctgctcttaataaaattacattgaattgatttttagaggtaatgaaaacttcctttctgagaagttagtgttaaggtcttggaatgtgaacacattgtttgtagtgctatccattcctctcctgagattttaacttactactggaaatccttaaccaattataatagctttttttctttattttcaaaatgatttcctttgctttgattagacactatgtgctttttttttttaaccatagttcatcgaaatgcagctttttctgaacttcaaagatagaatcccatttttaatgaactgaagtagcaaaatcatctttttcattctttaggaaatagctattgccaaagtgaaggtgtagataatacctagtcttgttacataaaggggatgtggtttgcagaagaattttctttataaaattgaagttttaagggacgtcagtgtttatgccatttttccagttccaaaatgattccattccattctagaaatttgaagtatgtaacctgaaatccttaataaaatttggatttaattttaaaaaaaaaaaaaaaaaaaaaaaaaaaaaaaaaa

SEQ ID NO: 6500 - DNA, 600 bp, Homo sapiens
aagtgatggagggtgctgacaaccagggtgcaggagaacaaggtagaccagtgaggcagatatgtatcggggatatagaccacgattccgcaggggccctcctcgccaaaagacagcctagagaggacggcaatgaagaagataaagaaaatcaaggagatgagacccaaggtcagcagccacctcaagctcggtaccgccgcaacttcaattaccgacgcagacgcccagaaaaccctaaaccacaagatggcaaagagacaaaagcagccgatccaccagctgagaattcgtccgctcccgaggctgagcagggcggggctgagtaaatgccggcttaccatctctaccatcatccggtttagtcatccaacaagaagaaatatgaaattccagcaataagaaatgaacaaaagattggagctgaagacctaaagtgcttgctttttgcccgttgaccagataaatagaactatctgcattatctatgcagcatggggtttttattatgttttacctaaagacgtctctttttggtaataacaaaccgtgttttttaaaaaagcctggtttttctcaatacgcctttaaaggaattcc

SEQ ID NO: 6501 - DNA, 1400 bp, Homo sapiens
atttggaaactcggcagcagagtttgtccaaatgacccttttcaggatgtctcaaagcttgtgccaaaggtcacttttctttcctgccttctgctgtgagccctgagatcctcctcccagctcaagggacaggtcctgggtgagggtgggagatttagacacctgaaactgggcgtggagagaagagccgttgctgtttgttttttgggaagagcttttaaagaatgcatatttttttacctggttggaattgagtaggaactgaggctgtgcttcaggtatggtacaatcaagtgggggattttcatgctgaacccattcaaagccctccccgtccccgcatttccaggccaccctttggctggcgtctgctggagaggatgtctctgtcgcattcccgtgcagctcagctcgcgcaggttttctctctctccctggatgttgagctctcatcagaatatgtgggtggggggtggacgtgcacgggtgcatgattgtgcttaacttggttgtatttttcgatttgacatggaagcctgttgctttgctctagagaatagtttctcgtgtccccttcgcacgcctcattctttgaacctcatctctgatgtttgatacagatgggggcttgatagctgtggtcccctttcccttctgactacgtgaaaatcaatacctaaatacagaagccttggtctaaacaccgagacttttagtttgcgaaggggcttagatagggagagaggtaacatgaatctggacaggggagggagatactatagaaaggagaacactgcatactttgcaaagccagtgacctccttttgaaggggacattggacgggggccgggggcgggggttcggtttgactaccgtcatgaacttttggcgtatactgattcctccaactctccaccccacaaaataacggggaccaatatttttaactttgcctatttgtttttgggtgagtttcccccctccattattctgtcctgagaccacgggcaaagctcttccattttgagagagaagaaaaactgtttggaaccacaccaatgatatttttctttgtaatacttgaaatttatttttttattattttgatagcagatgtgctatttatttatttaatatatgtataaggagtcctaaacaatagaaagctgtagaagctgtagagataggcttcagttgttaattggtttggagcctcctatgtgtgacttatgactctctgtgttctgtgtatttgtctgaattaatgacctgggatataaagctatgctagctttcaaacaggagatgccttcagaaagctttgtatattttgcagttgccagaccaataaaatacctggttgaaatacatggacgaaaaaaaaaaaaaaaaaaaaaaa

SEQ ID NO: 6502 - DNA, 1400 bp, Homo sapiens
agaatatctgaggaaactgcacttgatttgggccttgaagagtaattgactggatttagatttatctagaaaggtcgttcccagcagaagcaacaagaacaacaagcttggaggtctgccatcatggatgttctcgcagaagcaaatggcacctttgccttaaaccttttgaaaacgctgggtaaagacaactcgaagaatgtgtttttctcacccatgagcatgtcctgtgccctggccatggtctacatgggggcaaagggaaacaccgctgcacagatggcccagatactttctttcaataaaagtggcggtggtggagacatccaccagggcttccagtctcttctcaccgaagtgaacaagactggcacgcagtacttgcttagggtggccaacaggctctttggggaaaagtcttgtgatttcctctcatcttttagagattcctgccaaaaattctaccaagcagagatggaggagcttgactttatcagcgccgtagagaagtccagaaaacacataaacacctgggtagctgaaaagacagaaggtaaaattgcggagttgctctctccgggctcagtggatccattgacaaggctggttctggtgaatgctgtctatttcagaggaaactgggatgaacagtttgacaaggagaacaccgaggagagactgtttaaagtcagcaagaatgaggagaaacctgtgcaaatgatgtttaagcaatctacttttaagaagacctatataggagaaatatttacccaaatcttggtgcttccatatgttggcaaggaactgaatatgatcatcatgcttccggacgagaccactgacttgagaacggtggagaaagaactcacttacgagaagttcgtagaatggacgaggctggacatgatggatgaagaggaggtggaagtgtccctcccgcggtttaaactagaggaaagctacgacatggagagtgtcctgcgcaacctgggcatgactgatgccttcgagctgggcaaggcagacttctctggaatgtcccagacagacctgtctctgtccaaggtcgtgcacaagtcttttgtggaggtcaatgaggaaggcacggaggctgcagccgccacagctgccatcatgatgatgcggtgtgccagattcgtcccccgcttctgcgccgaccaccccttccttttcttcatccagcacagcaagaccaacgggattctcttctgcggccgcttttcctctccgtgaggacagggcagtcttggtgtgcagcccctctcctctctgtcccctgacactccacagtgtgcctgcaacccaagtggccttatccgtgcagtggtggcagttcagaaataaagggcccatttgtgggatgccgcattaaaaaaaaa

SEQ ID NO: 6503 - DNA, 600 bp, Homo sapiens
gtgaggtgtgcttttctcatcatgttggttatattgcacaattggttatatttatgacctgatattcaaagactctggcattgatagccagtgtgttttcttatttaactccgtttactacattctacatggtgtttacgtgatccacacttgaaatactagatcagtagacattcactaatataccaaaataaaatgaaaaattgagtttttccgtgaactttatactgtccagctctgttgattttaaagcctcttcatccaggtcagttcaggaagtatatctggagtacctgctctgtttttggctgtgagactagcactaaggattctggtacctttacccaaacctactgggctactaatacttctctcagcagttgatcaaatacaatagaccatgtaagctggggccgctcatccacttccagtttgctggtctccctgctagaaaacacattgtactgtgctttttctggaattcagtataatggcatcactgcctgtttttcacatcttttgtttcctgttcattttaaggaaacctactaaatccagttaatattaaatggacaccactcaaaaaaaaaaaaaaaaaaa

SEQ ID NO: 6504 - DNA, 600 bp, Homo sapiens
acttgttttgcttttccattggtggaattgaaataattagtttttaattacataagatgcctgtttgctatttggtggaagatagatgttcatattgaagcagtcacatttgtactgtagttcaataaaagaaaaatgaagtattctgtagcctatatttttcatagagctcatgagcatttactgtacttgctgggtcttgccaagatcatttattccgctgcattgccaaagtgtcttcataccaaattaaaggtggttttaatatatgtttcatggaagttgtttataaaattcaaaggtatttcatttaggtgaaaagtcttatttattaaagtggtttgaataaagtagatcaaaacttccagagatcttaatggctatataggaagaaatatcactcaccataatttaaataaagaataaaaatacatgtattttatggtggcaaatgtttggtagaactgtaattagaaaaatacaagtatatttgcgtgatggttacactagaagcccagactttacgactacacaatatattcatgtatctaaactgtacttgtaccccctaaatttatttttaaaaaaaaaaaaaaaaaa

SEQ ID NO: 6505 - DNA, 1400 bp, Homo sapiens
tgtgcccgtttcctggaggtggatgagcggaactttcactgctgggactatcggcggtttgtggccacacaggcagccgtgccccctgcagaagagctagccttcactgacagcctcatcacccgaaacttctccaactactcttcctggcattaccgctcctgtctcttgccccagttgcacccccagccggattctggaccacaggggcgcctccctgaggatgtgctgctcaaagagctggagctggtgcagaatgccttcttcactgaccccaatgaccagagtgcctggttttatcaccggtggctcctaggtcgagctgacccccaggatgcactgcgctgtctgcatgtgagccgggacgaggcctgtctgactgtctccttctctcggcccctcttagtgggctccaggatggagatcttgctgctcatggttgatgattctcccctgattgtggagtggaggaccccagatggcaggaaccggcccagccatgtctggctctgtgacctgcctgctgcctccctcaacgaccagttgccccaacatacatttcgcgtcatttggacagcaggcgatgtccagaaagaatgcgtgcttttaaaaggccgccaggagggctggtgccgggactccacgacagacgagcagctattcaggtgtgagctgtcagtggagaagtccacagtgctgcagtctgagctggaatcctgtaaggagctgcaggagctggagcctgagaataaatggtgcctgcttaccatcatcctgctgatgcgggcactggaccccctgctgtatgagaaggagaccctgcagtacttccagaccctcaaggccgtggaccccatgcgggcaacgtatctggatgacctgcgcagcaagttcttgctggagaatagcgtgctcaagatggagtatgccgaggtgcgtgtgctgcacctggctcacaaggatctgacagtgctctgccatctggaacagctgctcttggtcacccatcttgacttgtcacacaatcgcctccgaaccctgccacctgcactggctgccctgcgctgccttgaggtgctgcaggccagtgataatgcaatagagtccctggacggcgtcaccaacctaccccggctgcaggagctgctactgtgcaacaaccgcctccagcagcctgcagtgctccagcctcttgcctcctgccccaggctggtcctcctcaacctgcagggtaacccgctgtgccaagcggtgggcatcttggagcaactggctgaactgctgccttcagttagcagcgtcctcacctaagaggccctgccccctacccttgccctttaacttattgggactgaataaagaatggagaggcccctctcaggctaccaaaaaaaaaaaaa

SEQ ID NO: 6506 - DNA, 600 bp, Homo sapiens
  misc_feature (437)..(437): n is a, c, g, or t
  misc_feature (468)..(469): n is a, c, g, or t
  misc_feature (492)..(493): n is a, c, g, or t
  misc_feature (502)..(502): n is a, c, g, or t
  misc_feature (518)..(518): n is a, c, g, or t
  misc_feature (522)..(522): n is a, c, g, or t
  misc_feature (538)..(538): n is a, c, g, or t
  misc_feature (549)..(549): n is a, c, g, or t
  misc_feature (558)..(558): n is a, c, g, or t
  misc_feature (562)..(563): n is a, c, g, or t
  misc_feature (566)..(567): n is a, c, g, or t
  misc_feature (569)..(570): n is a, c, g, or t
  misc_feature (572)..(572): n is a, c, g, or t
  misc_feature (582)..(582): n is a, c, g, or t
  misc_feature (589)..(589): n is a, c, g, or t
  misc_feature (593)..(593): n is a, c, g, or t
  misc_feature (595)..(595): n is a, c, g, or t
attgatagagagaaactgcgtaatttcattttagcatgtcaagatgaagaaacggggggatttgcagacaggccaggagatatggtggatccttttcataccttatttggaattgctggattgtcacttttgggagaagaacagattaaacctgttaatcctgtcttttgcatgcctgaagaagtgcttcagagagtgaatgttcagcctgagctagtgagctagattcattgaattgaaagttgcatagtatagttttgccattttaacatttctgtatttgaagtgcttatcgaatctaaaagtgactactgttaatattttgtatattgtgttaaattaattttaataaattatataattatacatattgtaaaataaagaccctttacaacaacagccacccaagccgattcctaagcagcaaggacctggtngggatccgctccagcaggatggcactcccanntcaatatcttctcaacacccagnnaaaatcaantcacaccctccaggtncagncaagccaattccaggnccccccccagnttcccccanaaannccnntnnanatttgccccntccacgncttncnacccg

SEQ ID NO: 6507 - DNA, 600 bp, Homo sapiens
cggaatctattcgaatttgtgattttggctttgcaaaacagctgagagcggaaaatggtcttctcatgactccttgttacactgcaaattttgttgcaccagaggttttaaaaagacaaggctatgatgctgcttgtgatatatggagtcttggtgtcctactctatacaatgcttaccggttacactccatttgcaaatggtcctgatgatacaccagaggaaatattggcacgaataggtagcggaaaattctcactcagtggtggttactggaattctgtttcagacacagcaaaggacctggtgtcaaagatgcttcatgtagaccctcatcagagactgactgctgctcttgtgctcagacatccttggatcgtccactgggaccaactgccacaataccaactaaacagacaggatgcaccacatctagtaaagggtgccatggcagctacatattctgctttgaaccgtaatcagtcaccagttttggaaccagtaggccgctctactcttgctcagcggagaggtattaaaaaaatcacctcaacagccctgtgaagtgacctcagtgagatatttggatccatggtgtaaa

SEQ ID NO: 6508 - DNA, 1400 bp, Homo sapiens
aggcggaggctgaccagcagcagactcgcctcaaggagctggagtcccaggtgtcgggtctggagaaggaggccatcgagctcagggaggccgtcgagcagcagaaagtgaagaacaatgacctccgggagaagaactggaaggccatggaggcactggccacggccgagcaggcctgcaaggagaagctgcactccctgacccaggccaaggaggaatcggagaagcagctctgtctgattgaggcgcagaccatggaggccctgctggctctgctcccagaactctctgtcttggcacaacagaattacaccgagtggctgcaggatctcaaagagaaaggccccacgctgctgaagcacccgccagctcccgcggagccctcctcggacctggcctccaagttgagggaggccgaggagacgcagagcacactgcaggccgagtgtgaccagtaccgcagcatcctggcggagacggagggcatgctcagagacctgcagaagagcgtggaggaggaggagcaggtgtggagggccaaggtgggcgccgcagaggaggagctccagaagtcccgggtcacagtgaagcatctcgaagagattgtagagaagctaaaaggagaacttgaaagttcggaccaggtgagggagcacacgtcgcatttggaggcagagctggaaaagcacatggcggccgccagcgccgagtgccagaactacgccaaggaggtggcagggctgaggcaacttctcctagaatctcaatctcagctcgatgccgccaagagcgaagcccagaaacagagcgatgagcttgccctggtcaggcagcagttgagtgaaatgaagagccacgtagaggatggtgacatagctggggccccagcttcctccccagaggcgcccccagccgagcaggaccccgttcagctgaagacgcagctggagtggacagaagccatcctggaggatgagcagacacagcggcagaagctcatggccgagtttgaggaggctcagacctcggcatgtcggttacaagaagaattggagaagctccgcacagccggccccctagagtcttcagaaacagaggaggcctcacagctgaaggagagactagaaaaagagaagaagttaacaagtgacctggggcgcgccgccacgagactgcaggagcttctgaagacgacccaggagcagctggcaagggagaaggacacggtgaagaagctgcaggaacagctggaaaaggcagaggacggcagcagctcaaaggagggcacctctgtctgagtttcctctttggaaaaagaagttactgttcaacttaccaaaatgccttacacattccttacaaataaaccaaccaacctacaaaaaaaaaaaaaaaaaaaa

SEQ ID NO: 6509 - DNA, 1400 bp, Homo sapiens
cacctttgtttcaatattttttttctctcttgaacaaaactgagataatttagaaaacaggtgcttaattgcaataaaattactatgaagtatattaaaaatcacgacattgtaaaatctcactttagatcatcaaagaaaaccattgttactatctcctttgagcttaggaaaatgtacaagagaacaaattaaaattgaaaaattgatttcacttagaaaaacttctaggaacagggtgaaccactgattttaatttgcctaattatcttatgacaagtatcaaattaagatgacacttaaagatccttagcattaacttaatgatggagaagagtgctcaacagacagttcccagtaaggtaatgagatgccattttccgagacattctaagaagatattttgattcattaaaacattaaataaaaagccctcctcagattggaacccccaaatcgatggagtcacattaataatacttttcatgcctcactttgacatgacagcattcgatttttttaaagatctttaatactttccatgagtactaaagattgtaatgagttaccttatccttagaagtagaatgtttgctttcttcttcttggaaatagtcctccaaaaagtccacttgtaccagtgacaagaagtcacttgtatagtgaccaagtacacataaaataccgattataaaaatattgtaataaaccacttcctcatttgatactggtattaagctgaatcctcactaattcacttttgaaaagttcttaatgaacagttttattcttataccatgaacagctcttttaatacaatttccttggtatccaacttaaatcccagaattttgttccaccatggttagttatttgccatatgaatgtattcttgtttctaccaatattctaggcatgagaataccttaatactgagttggagattttgtatctgtttctcctcctttacgcccattttcctacccacagcagcaaatgacaacgtgtctgtccaggtctgtccccctgctcatcccaggatgccactcacatttttttcttctttgttacccttgacccacgctgtacaagtaacatccaagagcccattctacaagtgggtggttttggtctttttataactttttctcaaagtcactgatgtttgttcctgttaaatgtatagcattgtaatgagagcccatcaaatcctgagtgtcagtttgttgtccctattgtagatgaaatagtgatgtagcaaaaacctagtaaattctgaatgcttttccacgtagacttatctggaatgtgaacacaactctttggttaatagtaaatgcttaactgtagtcctgagtaggtgcatttctgtctgtctcaataaattttactttgtctgc

SEQ ID NO: 6510 - DNA, 1400 bp, Homo sapiens
ggaaacggaccaatgtctgtgtgtgggaggtgctgaaccttttctggccatgaaccattataaaatcccaacatatatactgaaaatactgaaactgctttgaaaatttggaatttctgatacctccagtgggccgagagacacggtgggtaaaggatgtgggcagcagcagggaagacaacagaaacacaaggaggcggctgtggccggctggactgtgctggggtttgttgtgatggccactcggtgacctggcggtccctacgcaatagcagctgcctgtggggaagaagggctgcccagccagctggttctcccgggacaccagcagatccacaccctgggcacctccgtgtttggtcttttttttcccctgtgtgaaagaagaaacggcacgaccccttctcaagctggctcactcagacacattgggacaaaccctggacagccatgccagagagaggcctttgaccggccccagagctaaaagcaccagagaaaatcaaatgcttcctactcagcgtgacccaacttttctagtgtgccacggccccaccacctcctgcagtacccacaccatcaccactgctttctcttccaacagtgatctgtattcttagtttcattattttcttttgattgatatgacactatataaaattttcatttgagaatttctcaattgtatctagttaaatagcacagtttggaaacttgtctgagactgactttatcaataatctaaccgacaaagatcatatccatgtgtatgtggttagacatttttatttcattgactaacccaggacagtttcagtgatgcaaattgtgtgccctctggttcagctgaaacagtcctggactttcaaaaaccttgaataagtctcccacagttgtataaattggacaatttaggaattttaaactttagatgatcatttggttccatttttatttcatttttatttttgttaatgcaaacaggacttaaatgaactttgatctctgttttaaagattattaaaaaacattgtgtatctatacatatggctcttgaggacttagctttcactacactacaggatatgatctccatgtagtccatataaacctgcagagtgattttccagagtgctcgatactgttaattacatctccattagggctgaaaagaatgacctacgtttctgtatacagctgtgttgcttttgatgttgtgttactgtacacagaagtgtgtgcactgaggctctgcgtgtggtccgtatggaaaacctggtagccctgcgagttaagtactgcttccattcattgtttacgctggaatttttctccccatggaatgtaagtaaaacttaagtgtttgtcatcaataaatggtaatactaaaaaaaaaaaaa

SEQ ID NO: 6511 - DNA, 600 bp, Homo sapiens
ggcccttgggacacccagagctgggtggggacagtgataggcccaaggtcccctccacatcccagcagcccaagcttaatagccctccccctcaacctcaccattgtgaagcacctactatgtgctgggtgcctcccacacttgctggggctcacggggcctccaacccatttaatcaccatgggaaactgttgtgggcgctgcttccaggataaggagactgaggcttagagagaggaggcagccccctccacaccagtggcctcgtggttataagcaaggctgggtaatgtgaaggcccaagagcagagtctgggcctctgactctgagtccactgctccatttataaccccagcctgacctgagactgtcgcagaggctgtctggggcctttatcaaaaaaagactcagccaagacaaggaggtagagaggggactgggggactgggagtcagagccctggctgggttcaggtcccacgtctggccagcgactgccttctcctctctgggcctttgtttccttgttggtcagaggagtgattgaacctgctcatctccaaggatcctctccactccatgtttgcaatacacaattcc

SEQ ID NO: 6512 - DNA, 1400 bp, Homo sapiens
cgtcgggaggcagcaacggcgccacgtgcagcacgcaggtttccatgctgacccgcgtcagcccaggtgcccgccgctcctccagcttccaagccgaagtctccctggtctgaccaccaggatcccaggggcccaaggcggcccctcccgccccttcccactcaccccggcagacgccggggacagaggcctgcccgggcgcggccagccccggccctgggctcggaggctgcccccggccccctggtctctggtccggacactcctagagaacgcagccctagagcctgcctggagcgtttctagcaagtgagagagatgggagctcctctcctggaggattgcaggtggaactcagtcattagactcctcctccaaaggccccctacgccaatcaagggcaaaaagtctacatactttcatcctgactctgccccctgctggctcttctgcccaattggaggaaagcaaccggtggatcctcaaacaacactggtgtgacctgagggcagaaaggttctgcccggggaaggtcaccagcaccaacaccacggtagtgcctgaaatttcaccattgctgtcaagttcctttgggttaagcattaccactcaggcatttgactgaagatgcagctcactaccctattctctctttacgcttagttatcagctttttaaagtgggttattctggagtttttgtttggagagcacacctatcttagtggttccccaccgaagtggactggcccctgggtcagtctggtgggaggacggtgcaacccaaggactgagggactctgaagcctctgggaaatgagaaggcagccaccagcgaatgctaggtctcggactaagcctacctgctctccaagtctcagtggcttcatctgtcaagtgggatctgtcacaccagccatacttatctctctgtgctgtggaagcaacaggaatcaagagctgccctccttgtccacccacctatgtgccaactgttgtaactaggctcagagatgtgcacccatgggctctgacagaaagcagatacctcaccctgctacacatacaggatttgaactcagatctgtctgataggaatgtgaaagcacggactcttactgctaacttttgtgtatcgtaaccagccagatcctcttggttatttgtttaccacttgtattattaatgccattatcctgaattccccttgccaccccaccctccctggcgtgtggctgaggaggcctccatctcatgtatcatctggataggagcctgctggtcacagcctcctctgtctgcccttcaccccagtggccactcagcttcctacccacacctctgccagaagatcccctcaggactgcaacaggcttgtgcaacaataaatgttggcttgga

SEQ ID NO: 6513 - DNA, 1400 bp, Homo sapiens
ttcggccatcccatcgacctggtcccccagtccagtttggcactagtgacaaggactcagacttacgcctagtggtaggagacagcttgaaagcagagaaggagctaacagcatcagtcactgaggccattcctgtatcacgagactgggagctgcttcccagtgctgctgcctctgctgagccacaatccaagaacctggattctgggcactgtgtcccggagcccagctcctcaggccagcgcctgtatcctgaggttttctatggcagtgctgggccttccagttctcagatctctgggggagccatggactctcaattacatccaaacagtggaggcttccgccctgggacaccctcactgcacccttacagatcacagcccctatacctaccccccggcccagcccctccctcagcactgctctctggggtagctctcaagggccagtttctggatttctccacaatgcaagctacagagctggggaagttgccggctggaggagttctctaccctccaccttccttcctctactctccggctttctgccccagtcctttgcctgacacatcgttgcttcaggtacgccaggatctgccatccccttcggatttttattctactcctctgcagcctggtggccaaagtggctttctcccttcaggggctcctgcccagcagatgcttctacccatggtagactcacagctgcctgtggtgaactttggctccctgccgccagcaccacctcctgccccacctcccctttctctgttacctgtgggccctgctctgcagccccccagcctggctgtgcggcccccacctgctcctgctactcgggtgctgccttcacctgccaggcccttccccgctagcttggggcgagcagagctgcatccagtggaactaaagccgttccaggattatcaaaaactgagcagcaaccttgggggacctggatcatcacggactcccccaactggaaggtccttctctggcctcaattcccgtctcaaggccacgccttccacctacagtggagtcttccgcacccagcgcgtcgacctttaccagcaggcctccccaccagatgccctgcgctggatacctaagccttgggagcggacagggctgccacctcgagaagggccctcccgacgggcagaggagcctgggtcccgaggggacaaggagcctgggttgcccccaccccgctgagggagttcctcttgccccctacccccggggcttgtatatagattataaatatataagggggaaaggggtgggcggggaggggttgtggggctggggcctcacttcccctcctcccccttcccctggtcccctgtccctggggctgtttgttaaaaaagagtaataaaaggattt

SEQ ID NO: 6514 - DNA, 1400 bp, Homo sapiens
caccggagttttttacctcagtggtgcagggtgtgctcagctccctgctgggctccctgggggctcgggctggcagcagtgaaagtattgctgccttcatacaacgcctcagtggatccagcaacatctttgagcctggagctgatggggcccttggattctttggggccttgctttctcttctgtgccagaacttctctatggtggacgtagtgatgcttctccatgggcatttccagccactacaacggctccagccccagctgcgatccttcttccaccagcactacctgggtggtcaggagcccacacccagtaacatccggatggcaacccacacattgatcacggggctagaagagtatgtgcgggagagtttttccttggtgcaggttcagccaggtgtggacatcatccggacaaacctggaatttctccaagagcagtttaatagcattgctgcgcatgtgctgcattgcacagatagtggatttggggcccggttgctggagttgtgtaaccaaggcctgtttgaatgcctggccctaaacctgcactgcttggggggacagcagatggagcttgctgctgttatcaatggccgaattcgtcgtatgtctcgtggggtgaatccctccttggtgagctggctgaccactatgatgggactgaggcttcaggtggtactggagcacatgcctgtaggccctgatgccattctcagatacgttcgcagggttggtgatcccccccagccacttcctgaggagccaatggaagttcagggagcagaaagagcttcccctgagcctcagcgggagaatgcttccccagcccctggaacaacagcagaagaggccatgtcccgaggtccacctcctgctcctgaggggggctcccgggatgaacaggatggagcttcagctgagacagaaccttgggcagctgcagtccccccagaatgggtccctattatccagcaggacattcagagccagcggaaggtgaaaccgcagccccctctgagtgatgcctacctcagtggtatgcctgccaagagacgcaagacgatgcagggtgagggcccccagctgcttctctcagaggctgtgagccgggcagctaaggcagccggagctcggcccctgacgagccccgagagcctgagccgggacctggaggcaccagaggttcaggagagctacaggcagcagctccggtctgatatacaaaaacgactgcaggaagaccccaactacagtccccagcgcttccccaatgcccagcgggcctttgctgatgatccttagctctttgctctatggcccttcctcatcaggggaccgtttcccccctcttccttcacagtatttaagaaataaaagtcggatttttctggc

SEQ ID NO: 6515 - DNA, 600 bp, Homo sapiens
ggagcagaacttcccagccattgccatccaccgtgggatgccccaggaggagaggctttctcggtatcagcagtttaaagattttcaacgacgaattcttgtggctaccaacctatttggccgaggcatggacatcgagcgggtgaacattgcttttaattatgacatgcctgaggattctgacacctacctgcatcgggtggccagagcaggccggtttggcaccaagggcttggctatcacatttgtgtccgatgagaatgatgccaagatcctcaatgatgtgcaggatcgctttgaggtcaatattagtgagctgcctgatgagatagacatctcctcctacattgaacagacacggtagaagactcgcccattttggaatgtgaccgtctgtccttcaggagaggacaccagggtgggggtgaaggagacactactgcccccacccctgacagcccccaccccatggcttccatcttttgcatcaccaccactcctgaacccccatttctgatttgtcagaatttttttttaacaaaactaaaaatgaaacacatgtgtctgtggtatctaaaaaaaaaaaaaaaaaaaaaaaaa

SEQ ID NO: 6516 - DNA, 1400 bp, Homo sapiens
gggaccgagatccacgaggcctcggcgatcctggtgcacctgagccgtggaggggctgaagtccagatctttgctcctgacgtccctcagatgcacgtgattgaccacaccaaggggcagccgtccgaaggcgagagcaggaatgttttgaccgagtctgcgaggatcgcccgtggcaaaatcacagacctggccaacctcagtgcagccaaccatgatgctgccatctttccaggaggctttggagcggctaaaaacctgagcacgtttgccgtggacgggaaagattgcaaggtgaataaagaagtggagcgtgtcctgaaggagttccaccaggccgggaagcccatcggcttgtgctgcattgcacctgtcctcgcggccaaggtgctcagaggcgtcgaggtgactgtgggccacgagcaggaggaaggtggcaagtggccttatgccgggaccgcagaggccatcaaggccctgggtgccaagcactgcgtgaaggaagtggtcgaagctcacgtggaccagaaaaacaaggtggtcacgaccccagccttcatgtgcgagacggcactccactacatccatgatgggatcggagccatggtgaggaaggtgctggaactcactggaaagtgacgcgcatggacggggcccagctaggcgccaggacttggcctcaccctctggctgaggagctgtcggctgctttccatccagctgggagtctggcaggcccttttttttttttctttgccgaaacctgcaggcgttctctctctaaggaggatgtgctgcagtgcatgggggatgtttcttcctgggtgtggctgggctgctctcacatacagaggccgaggggccaattcgttctctgccacagggacttgcctcactgtgtcccaaaaacaaatcgcagccagcttttccagaaatagaaaattctgccgtctgaggttttatacttcaggttagttagtttttggaaggaagaacatttttaggtttgcaagcctcctgatcaggaaaccagaaataccacatttatggaccatgaaaggttggttcttgactctgaagggacttttgagttaatcagcgtaaggggatttctaaagcaggcaatccctgtagccgcagagaataaacgccttcccaaaatggcaacttcccacagccacatttcagacctgctgagactgctgagtgaggaatggcagtgaggtttcttcaattagtctcagttctcttaattttcaggaagaaagggaaattgcagctcctcagcccccaggattgacctctggggagtgatggtagcgttggtgccaggccgtgggttcaggtgtggcagaagcttgcagatgcgtccgaagggaaataaagtgtgttggcgttag

SEQ ID NO: 6517 - DNA, 1400 bp, Homo sapiens; identical to SEQ ID NO: 6516

SEQ ID NO: 6518 - DNA, 600 bp, Homo sapiens
actttgatgacaacagcgtctcccctgtcaatgagaatcagatcgagtccaaggcagcctatgtcctcttctaccaacgccaggacgtggcgcgacgcctgctgtccccggccggctcatctggcgccccagcctcccctgcctgcagctccccacccagctctgagttcatggatgttaattgagagccctgggtcctgccacagaaaaaaaaaaaaaaaagccctctctgcaatctcgcttctcgtgtccgccccgcttctcttattcgtgttaggtgcccccgccaggcattgcaggcttagtcgtggctactgttctcctgtgccgctgcatcgctctctcccgggaaagaacaggtcgtgtctcctcctagcagtgcgcgccccgcctgtgtttgcccttccagcagtgaccctcccttctagtctttatttatggtcgtgcccttccctctcctcagcccagagtgttctgcgtgggtggtgatgggggttcacctgaacacagagtgtattttcttattgaggccctgtaccttctgctgtgtgtgtgtatatataaagcaccagtctgctccccaaaaaaaaaacggaattc

SEQ ID NO: 6519 - DNA, 600 bp, Homo sapiens
gccccattgtacccccattcacctggatctcagtatcaacagaataaccatgtgcatggacagccatatacaggcccagcagcacatcacatgaacaaccctcagagaactggccaacgagcacaagaaaattatgaaggcagtgaagaagtatccccacctcaaaccaaggatcaatgaaatgcacataattaactggttccatcaagactgtgcacccaggccttacagtccaacctttttctgtgtctggctaatatttaaaactagaaaaactattcctaatcaacatggagtggagagtttattcactgtcttatctgcagaaatttgctgtcaatatataacccgcctgcagtggaaagtgtatagtgttttgtaataaatggcctgatgctaatgtgtaaatggcaaaggtgtatatagtatattaatgttgactgttaattcttaagcaagaaacttttttcttgatgagactcacagatctacacaaactacaaaagttaattttcttgttacacccactgcactctgcaaccagtgttgcctgcctcatggcagttggatcagctcctttacaaaaaagaaaaaaaaaaa

SEQ ID NO: 6520 - DNA, 1400 bp, Homo sapiens
aaattttactgattgaggactcctggcagactcacagaattcataatgcacttaaaggaattccagatgacagagatgggctgttcgatacaatacagcgctcgaagaatcactatcaaaaacgagcatatcagtgcataaaatgtatggtagctctatttagcagttgtcctgttgcttaccagatcttacagggtaacggagatcttaaaagaaaatggacctgggcagtggaatggctaggagatgaacttgaaagaagaccatatactggcaatcctcagtatagttacaacaattggtctcctccagtacaaagcaatgaaacagcaaatggttatttcttagaaagatcacatagtgctaggatgacacttgcaaaagcttgtgaactctgtccagaagaggagccagatgaccaggatgccccagatgagcatgagccctctccatcagaagatgccccattatatcctcattcacctgcctctcagtatcaacagaataatcatgtacatggacagccatatacaggaccagcagcacatcacttgaacaaccctcagaaaacaggccaacgaacacaagaaaattatgaaggcaatgaagaagtatcctcacctcagatgaaggatcagtgaaaagcaataattaactgcttcctttatgactatgcactaaggtcttatagtccaaactttctctgtgtctggctagtattgaaaactagataaactgctccaaaccaacatggagtaaagagcatattcactggtttatttgcagtaatttgcaatttgtcagtgtataagacacatgcagggtgaagtgtacagagttttgtaacaaatgactggtcctaatctgtaaatgagaaaggtatatatactatgttaatgtctgactgttaattcttaagcaagaaactttttttgatgaaaacaagtcagatctacacagtcacacaattattttttgttgtgttcactacattgtgcaattgatattgcctgctttgagcagtttggtcaacttaccaacttccccccaaaaaagggaacataaaagagcccatctttgtcagtttacaccaatagtttcttgttaatccttctttcctggatatataaggctggtggtaacttttgaattatatggttgatgtggaaaattggcagtgtaacatttctagatacttttcattacctttttattctggtatataggctaaccactttaaagctattcttatgctgtaacagttagcatggcttcacactgtttgtgtagccaagaggacagaattacatgaatgacagtgcccagagtgacagctgtatattgctcagagcttttatttcttatacctagaataaatataaaatgggggaaaaaaaaaa

SEQ ID NO: 6521 - DNA, 1400 bp, Homo sapiens
catctccgtgcggcggcgccaaggggtcagcatcggccggctccacaagcagcggaagcctgaccggcggaaacgctctcgcccctacaaggccaagcgccagtgaggactgctggccctgactctgcagcccactcttgccgtgtggccctcaccagggtccttccctgccccacttccccttttcccagtattactgaatagtcccagctggagagtccaggccctgggaatgggaggaaccaggccacattccttccatcgtgccctgaggcctgacacggcagatcagccccatagtgctcaggaggcagcatctggagttggggcacagcgaggtactgcagcttcctccacagccggctgtggagcagcaggacctggcccttctgcctgggcagcagaatatatattttacctatcagagacatctatttttctgggctccaacccaacatgccaccatgttgacataagttcctacctgactatgctttctctcctaggagctgtcctggtgggcccaggtccttgtatcatgccacggtcccaactacagggtcctagctgggggcctgggtgggccctgggctctgggccctgctgctctagccccagccaccagcctgtccctgttgtaaggaagccaggtcttctctcttcattcctcttaggagagtgccaaactcagggacccagcactgggctgggttgggagtagggtgtcccagtggggttggggtgagcaggctgctgggatcccatggcctgagcagagcatgtgggaactgttcagtggcctgtgaactgtcttccttgttctagccaggctgttcaagactgctctccatagcaaggttctagggctcttcgccttcagtgttgtggccctagctatgggcctaaattgggctctaggtctctgtccctggcgcttgaggctcagaagagcctctgtccagcccctcagtattaccatgtctccctctcaggggtagcagagacagggttgcttataggaagctggcaccactcagctcttcctgctactccagtttcctcagcctctgcaaggcactcagggtgggggacagcaggatcaagacaacccgttggagcccctgtgttccagaggacctgatgccaaggggtaatgggcccagcagtgcctctggagcccaggccccaacacagccccatggcctctgccagatggctttgaaaaaggtgatccaagcaggcccctttatctgtacatagtgactgagtggggggtgctggcaagtgtggcagctgcctctgggctgagcacagcttgacccctctagcccctgtaaatactggatcaatgaatgaataaaactctcctaagaatctcctgagaaaaaaaaaaaaaaaaa

SEQ ID NO: 6522 - DNA, 600 bp, Homo sapiens
gtgcacgtggcggcccacgagatcggccacgcgctgggcctgatgcactcacaacacggccgggcgctcatgcacctgaacgccacgctgcgcggctggaaggcgttgtcccaggacgagctgtgggggctgcaccggctctacggatgcctcgacaggctgttcgtgtgcgcgtcctgggcgcggaggggcttctgcgacgctcgccggcggctcatgaagaggctctgccccagcagctgcgacttctgctacgaattccccttccccacggtggccaccaccccaccgccccccaggaccaaaaccaggctggtgcccgagggcaggaacgtgaccttccgttgcggccagaagatcctccacaagaaagggaaagtgtactggtacaaggaccaggagcccctggagttctcctaccccggctacctggccctgggcgaggcgcacctgagcatcatcgccaacgccgtcaatgagggcacctacacctgcgtggtgcgccgccagcagcgcgtgctgaccacctactcctggcgagtccgtgtgcggggctgagcccggctgataaagcactttctctctgaaaaaaaaaaaaaa

SEQ ID NO: 6523 - DNA, 600 bp, Homo sapiens
aggcattgtagagatctgaaatagttttcttccactacattgttgaaatcaatgaagcaattagtttctcattcagaaatgtgcacactaatatttagttttgctttctcgtggataatattaagcacttactctgcagtttcctggaagttgtgtcaactgcagtgatactattcaggatggtgggaaatccccaaaaatatgtatgtgtgggcttgcttagattactatatttcatagttaatcttttgtctcttgcggtgctcatgatgtgtggggcacacggaaggcattgctgtagtcagtcattttggttttcttctatagccattttattattttagtgtattagttatgaagataatattatctatttgtaaattgctactttgtattttatgcatgctctgtaatttgatttttttttagttattgatttggattatattcacattctaataaacagttatagggggaaaaaaaaaaaaaaaaaaaaaaaaaaaaaaaaaaaaaaaaaaaaaaaaaaaaaaaaaaaaaaaaaaaaaaaaaaaaaaaaaaaaaaaaaaaaaaaaaaaaaaaaaaaaaaaaaaaaaaaaaaaa

SEQ ID NO: 6524 - DNA, 600 bp, Homo sapiens
cggctggaccaaggatgacgatgtgcctctagactggcggatgaagcagcacgcggctgtgctcgaggaaggggtcctggatcccaagtcaaccattgttgccatctttccgtctcccatgttatatgctggccccacagaggtccagtggcactgcaggtcccggatgattgcgggtgccaatttctacattgtggggagggaccctgcaggaatgccccatcctgaaaccaagaaggatctgtatgaacccactcatgggggcaaggtcttgagcatggcccctggcctcacctctgtggaaatcattccattccgagtggctgcctacaacaaagccaaaaaagccatggacttctatgatccagcaaggcacaatgagtttgacttcatctcaggaactcgaatgaggaagctcgcccgggaaggagagaatcccccagatggcttcatggcccccaaagcatggaaggtcctgacagattattacaggtccctggagaagaactaagcctttgggtccagagtttctttctgaagtgctctttgattaccttttctatttttatgattagatgctttgtattaaattgcttctca

SEQ ID NO: 6525 - DNA, 600 bp, Homo sapiens
cctcttgagggcagagactgatcggctgcgcgaaatcctggcggggaaggaacgggagtaccaggccctggtgcagcgggctctacagcggctgaatgaggaagcccggacctatgtcctggccccagagcctccaactgctctttcaacggaccagggcctggtgcagtggctacaggaactgaatgtggattcaggcaccatccaaatgctgttgaaccatagcttcaccctccacactctgctcacctatgccactcgagatgacctcatctacacccgcatcaggggagggatggtatgccgcatctggagggccatcttggcacagcgagcaggatccacaccagtcacctctggaccctgagagctgaatgagggcatcataggccagacaggcccaaggatggatgaatggagaggacaaaggcagcttctgacacaccagccccaggacctggggcgactggaggaagccaggcgagtggggcccaggactggttccagtgagagaaaccaaccacaggcacccaagcactaccagacaaagcgtattaaacagaacacttttgaaaaaaaaaaaaaaaaaaaaaaaaaaaa

SEQ ID NO: 6526 - DNA, 1400 bp, Homo sapiens
ctgatggccccaggcacagtgcaagtgatgactacttcatcccaagccaggcctttctggaggccgagagagctcaatccattgcctatcacctcaaaattgaggagcaaagagaaaaagtacatgaaaatgaaaatataggtaccactgagcctggagagcaccaagaggccaagaaagcagagaactcatcaaatgaggaggaaacgtcaagtgaaggcaacatgagggtgcatgctgtggattcttgcatgagcttccagtgtaaaagaggccacatctgtaaggcagaccaacagggaaaacctcactgtgtctgccaggatccagtgacttgtcctccaacaaaaccccttgatcaagtttgtggcactgacaatcagacctatgctagttcctgtcatctattcgctactaaatgcagactggaggggaccaaaaaggggcatcaactccagctggattattttggagcctgcaaatctattcctacttgtacggactttgaagtgattcagtttcctctacggatgagagactggctcaagaatatcctcatgcagctttatgaagccaactctgaacacgctggttatctaaatgagaagcagagaaataaagtcaagaaaatttacctggatgaaaagaggcttttggctggggaccatcccattgaccttctcttaagggactttaagaaaaactaccacatgtatgtgtatcctgtgcactggcagtttagtgaacttgaccaacaccctatggatagagtcttgacacattctgaacttgctcctctgcgagcatctctggtgcccatggaacactgcataacccgtttctttgaggagtgtgaccccaacaaggataagcacatcaccctgaaggagtggggccactgctttggaattaaagaagaggacatagatgaaaatctcttgttttgaacgaagattttaaagaactcaactttccagcatcctcctctgttctaaccacttcagaaatatatgcagctgtgatacttgtagatttatatttagcaaaatgttagcatgtatgacaagacaatgagagtaattgcttgacaacaacctatgcaccaggtatttaacattaactttggaaacaaaaatgtacaattaagtaaagtcaacatatgcaaaatactgtacattgtgaacagaagtttaattcatagtaatttcactctctgcattgacttatgagataattaatgattaaactattaatgataaaaataatgcatttgtattgttcataatatcatgtgcacttcaagaaaatggaatgctactcttttgtggtttacgtgtattattttcaatatcttaataccctaataaagagtccataaaaatccaaaaaaaaaaaaaaaa

SEQ ID NO: 6527 - DNA, 1400 bp, Homo sapiens
cgttaaagcagttttctttttcactgtctttttcttttcgcggggaacccagctgttcctgcgagggccacctcctcaggaagaccccgcagctctcccgcggcgcttctgcaggaggcagcgacagtttcgagaacccgggccttcccctcccagtgcctccgggggttcgcgtttcaggcgctcgtgttttccgggaagggcaggcgcgctgggccttggggagctgcgctcggcgggcggaccgggggatcatggaagctgataaagatgacacacaacaaattcttaaggagcattcgccagatgaatttataaaagatgaacaaaataagggactaattgatgaaattacaaagaaaaatattcagctaaagaaggagatccaaaagcttgaaacggagttacaagaggctaccaaagaattccagattaaagaggatattcctgaaacaaagatgaaattcttatcagttgaaactcctgagaatgacagccagttgtcaaatatctcctgttcgtttcaagtgagctcgaaagttccttatgagatacaaaaaggacaagcacttatcacctttgaaaaagaagaagttgctcaaaatgtggtaagcatgagtaaacatcatgtacagataaaagatgtaaatctggaggttacggccaagccagttccattaaattcaggagtcagattccaggtttatgtagaagtttctaaaatgaaaatcaatgttactgaaattcctgacacactgcgtgaagatcaaatgagagacaaactagagctgagcttttcaaagttccgaaatggaggcggagaggtggaccgcgtggactatgacagacagtccgggagtgcagtcatcacgtttgtggagattggagtggctgacaagattttgaaaaagaaagaataccctctttatataaatcaaacctgccatagagttactgtttctccatacacagaaatacacttgaaaaagtatcagatattttcaggaacatctaagaggacagtgcttctgacaggaatggaaggcattcaaatggatgaagaaattgtggaggatttaattaacattcactttcaacgggcaaagaatggaggtggagaagtagatgtggtcaagtgttctctaggtcaacctcacatagcatactttgaagaatagacttaacagaatcatgaaaactatagctttttaacccggattactgtaaatgtttgacaagaatgaatatgcttttccttaaaaaatgaaaactttaatttttaccatccatttatgtttagatacaaaacttatttccatgtttctgaatcttctttgtttcaaatggtgctgcatgttttcaactacaataagtgcactgtaataaaaagttttgtttat

SEQ ID NO: 6528 - DNA, 1400 bp, Homo sapiens
atgagtggaaaatacctgcacgatgacttcgccctgccctgcccaccggggctgaaaattcctgaggaagatggttacaccatcacccccaacaccctcaagaccctggtgctggtaggctgtttcaccgtcttctggactgtttactacatgctggaagtatatttgagccagaggaatgtggcttccaatcaagtttgtaggagtggaccctgccactggccccatcggagccggaaagccaaggaggaagggacagagctagaatcagtgccactttgcagcagcaaggatccagacgaagtggaaacagagagcaggggccctcccaccacctctgacctccttgccccagacctgctggagcaaggggactggagcctgtcccagaacaagagcgccctggactgccctcatcagcacctagacgtaccgcacgggaaggaggagcagatctgctgacctcagggcctgacagtgtgggacaggctcttctttcccaaaattagggagctcttgacagaaagcagttctgatgcttacatctggaatctgaggcatcctctgactccactcaaagagggtgagggccttcttaagatacaaatggtggaggattgctgccagagaagtctggtcagagccacagggtctgcctccagccaaacgggagcttttggtgagaaggtgttggacaggggattggcgcccccctttggtttggcctccatcctcatctctcttgggccaagccagctgcctaggtcccccaagcatgggggaccccttcccacatataagttgagaaggtgcctgccatagccaggagcgcatctcaatggaaacatcactggggtcacttgggaagaggacttcggggtagaggctgggaggagcccctggacatgcctgtcctgaaagcggctgcctccattatccattcccaagatgcctgatcagaaaccaaccatgaatgaacccctggctccttcaccacccccacgattggtatgatgctgccggcacagctgggatacacacggctcccccaggcctgagctgcttcactagggaatcctgcggcaggactgcagagcagatggcagatgcacatgttggaggagagagccttgggagccactgccactccagtcctgccaccaccctgtcttcctctgcaagtgctcagggaaatggccttcccgccggaggccagctatctgcctgacaggctgtgactcttctctcaaccttggccttctcccctcttctgagctagttggttgaattttttttaatgcttaagatttgtttttctcttttcacagcaacattttcttgaatttttttctgcacagcttttccaaaataaaaaccttccaaacaaaaaaaaaaaaaaa

SEQ ID NO: 6529 - DNA, 1145 bp, Homo sapiens; identical to SEQ ID NO: 1294

SEQ ID NO: 6530 - DNA, 600 bp, Homo sapiens
tccctttctcctctcccctcaacctcttactgctgttctccctttctccgtccttcatggaagccctgggagataacctggcttcctggagttgatggaataaaggttggggtggccataatggtttgttgggggtgagggaaaaaacccacagggaccagaatgttttgttgttcttttgttttcttttttgtaccaaagtcaactgcacgtgttttatatttttaagagatcgtaggcaattagagatcgaagcctcctatctccacatctctgaagaagttgaggggtgggggagagaatgacttctgccttcatctgcagtaacggggggacctatactgacctcttccccagccatttagaaacaagttctagggtgggttggaaaatctccaagagccctgacctcatcttccacctcagcaaccatgacctgaaacctcagcgtgaatttgggggatttttcagtggaacccttgcccccaaatgtcgaccagcccccaaatgtcgaagaattttcttcttgccaattttgttgtttaaaaaaaaaattcagggaaaattaaaaacctggaactccaaaaaaaaaaaaaaaaa

SEQ ID NO: 6531 - DNA, 1400 bp, Homo sapiens
aatgcccttcttaaaaagagagacctttttttttaatgttcggttaaaaatgtgacagatgagtagaaaaatgcagacacttaacaaaaagcaaacagaaaaaaaagtgtggaatgtgttgtattttcgacaggttgctgccagagagcctgcttcctgctgcctgccgaaatttcactttgcggagttggtccttaaaactgggcggtggccgggcgtggtggctcacgctgaggtcaggagttcgagaccagcctggccaaccaacatggtgaaacctcgtgtctactaaaaatacaagaaactagccagatgcggtggcacccgcctgtaatcccagctactcgggaggctgaggcggaagattcgcttgagcccaggaggtggaggttgcagtgagccaagactacgccactgcactccagcctggaggccagagtgagactccgtctcaaaacaaaacaaaagtgggtggctcactggtccggaggttatgtcttcggtgtctcagccctaaaagtccagttcccccgtgcggccagcttttccacataaggtgtttttgatttgattaccggaaaggactcttgattcttctcttttaaactgaataccataggggaaatgaattttaaaatattgcccccggaggggttttccgtggctggattcctgcgagttgctttcagtcattcagggaaacagaaagacgttttccaacatgtagaactgctttttaactggaggaaaaatacttcaggaggcttagcatattgcttggattctacgtgcagcgggttctctgcctccgtgaagacaagctgggctggggaggacggtgtctaggagggatgaccccactcagctccaggcagtgttctgccgagaccccaagaactcggggtgtcagagggcaaaggaactacctgcctttcacggctgctgacttctcagggctgcaagcagcacagaatgttatccttacgtcctgagccggtttaagtctgtggaaaaggaagcacgggagaaatccacgtaacctttgctttctttttaagggaagcggttccgccgtgaacttggaaccctcagctccgggtgttctcggcagaagggcagctggaagggacacagtggggcaggctttggggttgctccctgttctgccccgaggccggggacgcagggcagcccacgcctccgtgggctccattctgtagcattgccagcgttctcttcacgtctctaacaatcctttgcttttcctcactcacgtggaaatgtgaactgtcccggctctgtcttcatttttatttttaagccatcgttcccctcctgaacggttgccccttatttaatgctgtaaagttggactgttgttcaataaaccagagcaatgc

SEQ ID NO: 6532 - DNA, 600 bp, Homo sapiens
ctcacactgtactctgaggtccaaatactgtctgtcaatgtgtaacctgatgtctcaaccccctgtgagaagagtccattatttggtgttcaccaacgtgggagacttcaccggaacaggcttttttgctttgggctctgctatttgtttgcagaacacccaagagcgagcaaacacgctctcttcacagcagtaccttagggttttgccattgtaaatgggtctgatgtgatatgacaagaccagagaaattggatgtaaatttacatttttgaatatgcttgttgtttcacatgatacatttagggtatgcagctccttttgtagtttttatttttactatttaagtttggaaatgatgccaaatttttgtatttctttaatcaatgtgttctcttcggtgatatatattgcattatatattgatgtgtgtatcaatatatattgatatgtattacacttacacatacaaacacatataagagggggtgaaaaccgtagcctttgcattctctatagcctctgcagagagatactaagcagcaaaatcttggtgttgtgatgtacagaaatggagaagagtattaaaccatatttaag

SEQ ID NO: 6533 - DNA, 600 bp, Homo sapiens
aataggtcactgaatgataagatttgcaccttagaacaataatcattttaaggataacaagtaaatgtctgaaagcatgaggggctttatttgcctttacctcatatgagtctttgatcttgaaccgatacttttggatctcattgttgatatacctgaatttactttgtaagagattttaacttcacttcatgctgatgatgtatcaaattcattttatagaaagatttaaagtttttttctggaagtgatatatgtcaaattacatttcctactgcagtatttgagcagggacagtcattttttaaatgtttttggccgggcgtggtggctcatgcctgtaatctcagtacattgggaggccaaggcaggtggatcacctgaggtcaagagttcgaggccagcctggccaacatggtgaaaccctgtctctactaaaaatacaaaaaattggccgggcgtgatggtgggcgcctgtaatcccagccactccagaggctgaggcaggagaatcgcttgaacctgcgaggcagagattgcagtgagccaagatcaagccattgtactccagcctggacaacaagagcgaaactctgtcta

SEQ ID NO: 6534 - DNA, 1400 bp, Homo sapiens
gtcccgccgctacggctttgctgccctgaaatatctcacagccgagaacaacagctagcaccaagaagcccaccactagggggagacatgctgtaggggaagtgccactcgctgtttggggcccggccttcaaattcaaaattgagccatgctttttcggtttgtttttatttatctctttggcccagccaagctgccctcactacagagaccttggacaaggatccagccagtccctctctgccccacaaccctgcattcccagaggttagctatgcagcccacctagatgagtctcttcaagaatgggaaatcaaggggtgacagggagtaaaagggttatcatcttactgcaaagccacaagatcagggcagggctttaggatgttctggatgctttttaataattatgcttcccatcataactggggagaaagggaagtcagggttctaggggttattcgtcccaggaaatagaagtgaaattgtctttattaagtgaaaactttcccctttgccctgcaatgtagctgggcattcaaacggagggcaaaccgatgatctaaaccaaccacttggaaaaacccaatggggacattgtaaccagagggtcctggaggtggggttgatgggtttccttatccccaaagtcactcctgttttgttttgtttttctttgggggttttgtttatttttggggctggcaatccaaaatagaaaatctgatcctttgaggctctaaaggaaaatcagctgcctctaccaaccaccctctatcagcagtggcccaggaaggaggtcaagcatcttcggccgatatttaaacatgggcagcttccttcaggatgatcaccgaggctcccgtgactttgaactccctactctccagaatccaggggctatagcgatggggactgcggaattacgagggctggctgttttacaccggtcacattttctattggcagtgactgattcatgggaaagggctttgaaggaactacttcagtgcacacacaaggtacgaacctctcaggcctttcgaagaactttcataattcatgaaagcccagttctgaagattcacgtatccatctggagacctacaggaagaaagtgattgggttcctctggttcttgcctgcttcactgtggatgggaagaggtgacaacctcagtctccctttgggacctgtccaagggtaggcaaccaccttcaccttcacacagattgaggagacactggactttttacccattttctttaatcttcaatattaatattgtgtttacattgatgagaacaagagttaatgccctaccctctgctgggctgtttgtattgagttgcaatgtgaccagcgaaagctgcatttaataaatgaaagtacagactgtt

SEQ ID NO: 6535 - DNA, 1400 bp, Homo sapiens
gaagaaggccttagcacccggctcttggctctggtggttttgttctttatcgttggtgtaattattgggaagattgccttgtagaggtagcatgcacaggatggtaaattggattggtggatccaccatatcatgggatttaaatttatcataaccatgtgtaaaaagaaattaatgtatgatgacatctcacaggtcttgcctttaaattacccctccctgcacacacatacacagatacacacacacaaatataatgtaacgatcttttagaaagttaaaaatgtatagtaactgattgagggggaaaagaatgatctttattaatgacaagggaaaccatgagtaatgccacaatggcatattgtaaatgtcattttaaacattggtaggccttggtacatgatgctggattacctctcttaaaatgacacccttcctcgcctgttggtgctggcccttggggagctggagcccagcatgctggggagtgcggtcagctccacacagtagtccccacgtggcccactcccggcccaggctgctttccgtgtcttcagttctgtccaagccatcagctccttgggactgatgaacagagtcagaagcccaaaggaattgcactgtggcagcatcagacgtactcgtcataagtgagaggcgtgtgttgactgattgacccagcgctttggaaataaatggcagtgctttgttcacttaaagggaccaagctaaatttgtattggttcatgtagtgaagtcaaactgttattcagagatgtttaatgcatatttaacttatttaatgtatttcatctcatgttttcttattgtcacaagagtacagttaatgctgcgtgctgctgaactctgttgggtgaactggtattgctgctggagggctgtgggctcctctgtctctggagagtctggtcatgtggaggtggggtttattgggatgctggagaagagctgccaggaagtgttttttctgggtcagtaaataacaactgtcataggcagggaaattctcagtagtgacagtcaactctaggttaccttttttaatgaagagtagtcagtcttctagattgttcttataccacctctcaaccattactcacacttccagcgcccaggtccaagtttgagcctgacctccccttggggacctagcctggagtcaggacaaatggatcgggctgcaaagggttagaagcgagggcaccagcagttgtgggtggggagcaagggaagagagaaactcttcagcgaatccttctagtactagttgagagtttgactgtgaattaattttatgccataaaagaccaacccagttctgtttgactatgtagcatcttgaaaagaaaaattataataaagccccaaaattaaga

SEQ ID NO: 6536 - DNA, 1400 bp, Homo sapiens
gttaaatccactttcagacactttaaagataccaccaagaatatctttgatgaaaagggtaataaaagatttaatgctacaaaagaagcagctgaaaaaccaagaacagtttttagtgactatttacatccacagtataaggcacctacagaaaaccattcaaggccctactatgcaaaaagatggaaggaagaaaagccagttcactttaaagaattcagaaaaaatacaaattcaaagaaatgcagtcctgggcatgattgtagagaaaattctcattctttcagaaaggcttgttctggtgtatttgattgtgctcaacaagagtccatgagcctttttaacacagtggtgatccctataaggatggatgaatttagacagataattcaaaggtacatgttaaaagaactggatactttttgtcgctggaacgaacttgatcagttcatcaataagtttttcctaaacggtgtctttatacatgatcagaagctcttcactgactttgttaatgatgttaagattatcttaggaaacatgaaggaatatgaagtagataatgatggagtatttgagaagttggatgaatatatatatagacacttctttggtcacactttttcccctccatatggacccaggtcggtttacataaaaccgtgtcattacagtagtttgtaacatttgtagattggatacgatttttatgatttgatgagtttcttgtaaggttaccgtttctaagagttgtgctttatggccactgagagaattcagaataaattgaaagatggagtctaaaaattattagctgttacaaatggaacaatttcattataacgtgatcactttgacttgagcaaatggtttaatttttatcttaaaatcagttaagaatatataaaatcctacctttggccaagtttgtttcttttcattatagtttatatgaaaagatcaccttaagtgaaattattttccttattttcctttaatcttttatgtatttattcacttctggaagctaggaatgagcaacacaaattttactctgaagtcagaagagctcatatatataattctaatgtcccacctatgtccattccatgtaccagcttagttatatactagtcacataattatctttgataaaggtagaggcacaaagaggcaaactaacaagtcaaattctaatgtgtgtacttcataataattttttatccattttcatcttctttatctttatattctgtaacatgaaacttacctaatcttcaaatgttagcttcattttttacctttgaaatacttaatctttctgaataaatataatggtctataaaaaaaaaaaaaaaaaaaaaaaaaaaaccgtcgaaaagcggccgccaccgcgtgga

SEQ ID NO: 6537 - DNA, 1400 bp, Homo sapiens
actaatgaaccgcctggaagacaagtgcctggagttggtggagcactttggccccaatgagctgcggaaggtgctggtgatgctggcagctcagagccggcggtccgtgcccttgctgcgggccatctcctaccacctggtgcagaagcccttctctctgacgaaagatgtgctcttggacgtggcctatgcctatggcaaactcagctttcaccagacccaggtgtcccagcgcctggccaccgacctgctatccctcatgcccagcctgacttctggtgaggtggcccactgtgccaagtccttcgccttactcaagtggctcagcctgcccctgtttgaggcctttgcccagcacgtcctgaacagagcgcaggacatcaccctgccccacctgtgcagcgtacttctggcttttgcgcgtctgaacttccatccagaccaagaggatcagttcttcagcctggtacatgagaagctggggtcagagctgccaggcctggagccagccctgcaggtggacctggtgtgggccctgtgtgtgctgcagcaggcacgggaagcagagctgcaagccgtcctccaccctgaatttcacatccaatttctagggggcaagtctcagaaggatcagaacaccttccagaagctgctccacatcaacgccactgccctgctggagtaccccgagtactcgggtccccttctgcctgcctcggctgtgcccctgggccctcagcccttgacaggaaggagacccccctgcaaaaggagctgcaagacgctgaaggggctgctggggagcgccgacaagggcagcctcgaggtggccacgcagtatggctgggtgctggattctgaggtgctgctggacagtgacggcgagtttctgcccgtaagggactttgtggcacctcaccttgcccagccaactgggagccagtcaccacctccagggtctaagaggctagcgttcttgcggtgggagttccccaacttcaacagccgaagaaggacttgctgggtcgctttgttctggcccggcgacacatagtggctgcaggcttcctgatagtggacgtcccattctatgagtggctggaactcaagtctgaatggcagaaaggcgcctacctcaaggacaagatgcgcaaagcggtggctgaggagctggccaagtgacttgtgccagcagcatggactgcgtgcctctccgccggaggtctagctgtgggcggccaagaagggtcacccttgaggacaaacctctgtgcaggaccttggccactctgagggacagaacgtcctcttgtgtataataaacctttaattttggtgttggacccctggggccttcccaggcttggtcaccctctgcactgtcaaaaaaaaaaaaaaaa

SEQ ID NO: 6538 - DNA, 1400 bp, Homo sapiens
ccaggagccaccgccgagggcctctactggaccctcaacgggcgccgcctgccccctgagctctcccgtgtactcaacgcctccaccttggctctggccctggccaacctcaatgggtccaggcagcggtcgggggacaacctcgtgtgccacgcccgtgacggcagcatcctggctggctcctgcctctatgttggcctgcccccagagaaacccgtcaacatcagctgctggtccaagaacatgaaggacttgacctgccgctggacgccaggggcccacggggagaccttcctccacaccaactactccctcaagtacaagcttaggtggtatggccaggacaacacatgtgaggagtaccacacagtggggccccactcctgccacatccccaaggacctggctctctttacgccctatgagatctgggtggaggccaccaaccgcctgggctctgcccgctccgatgtactcacgctggatatcctggatgtggtgaccacggaccccccgcccgacgtgcacgtgagccgcgtcgggggcctggaggaccagctgagcgtgcgctgggtgtcgccacccgccctcaaggatttcctctttcaagccaaataccagatccgctaccgagtggaggacagtgtggactggaaggtggtggacgatgtgagcaaccagacctcctgccgcctggccggcctgaaacccggcaccgtgtacttcgtgcaagtgcgctgcaacccctttggcatctatggctccaagaaagccgggatctggagtgagtggagccaccccacagccgcctccactccccgcagtgagcgcccgggcccgggcggcggggcgtgcgaaccgcggggcggagagccgagctcggggccggtgcggcgcgagctcaagcagttcctgggctggctcaagaagcacgcgtactgctccaacctcagcttccgcctctacgaccagtggcgagcctggatgcagaagtcgcacaagacccgcaaccaggacgaggggatcctgccctcgggcagacggggcacggcgagaggtcctgccagataagctgtaggggctcaggccaccctccctgccacgtggagacgcagaggccgaacccaaactggggccacctctgtaccctcacttcagggcacctgagccaccctcagcaggagctggggtggcccctgagctccaacggccataacagctctgactcccacgtgaggccacctttgggtgcaccccagtgggtgtgtgtgtgtgtgtgagggttggttgagttgcctagaacccctgccagggctgggggtgagaaggggagtcattactccccattacctagggcccctccaaaagagtccttttaaataaatgagctatttaggtgc

SEQ ID NO: 6539 - DNA, 600 bp, Homo sapiens
attaaaagaagcctttgttgttgaagaatgggtgaaggaaacacatgctgatctgtggccagccaaacaatacccacttgtcacgccaaatgaagagagaaatgtcatggaagagggaaaagactttcagccctcaagatctacagctcaacaggaacttgatgggaaacctgcttctcctactccggttattgtggcctcccacacagccaacaaagaagaaaagagtttactcgaactagaagtagatttggataatttggaattagaagatattgacacaacagatatcaatctggatgaagatattttggatgattgactgtaatgctttccatttacctgactaaacagatcattattatatataggtattgattgctaccctgaccacagtgctttggactatgagaaacttcttagatttttatatgtaaatgctgtggaccactgggagcacaatgcccacatcatcttaagaagagtttatgtgcagcatttaaatcactgtgttttccttgttaactaaaacagacatgggctttgatttttttcatactattagaccatatctcataaaaccttttgaattaaaaaaaa

SEQ ID NO: 6540 - DNA, 1400 bp, Homo sapiens
aaaacaggttacacgggattatgatgaagaggaacaggggtatgacagtgagaaagagaaaaaagaagagaagaaaccaatagaaacaggttcccctaaaacaaaggaatgttctgtggaaaagggaactggtgattcactaagagaatccaaagtgaatggggatgatcatcatgaagaagacatggatatgagtgactgaatattgcctctgagggagtccaactgtatacctgcatcagtgtcattcctttgtgtgatttcttaatgctgtatttgttcatctcaaacctagatgtatacagctctgagttataaatggttataaagctcctgttactcatattagttatttacatcaaaaagcttttagaaaatggtacgaggtaaccaattcttgtcatggtgaaatctgattgagtaaccaagcagttttactattctggtgctgcttcataacaaaaatgaaaagctgcatgcatctacagcaggcatggattgtttatgtcgtatgatatcctttattaagtaagttcacttatagtatttctataatttgattcattgccgtaatagagccatgtaggaaatgcactgattgcatgttattgtggcaagaatatcctaaatgtcattaaaatcctccaacatgatggatctacttatggtcttgtttgttgacatgacaaattaacattcttatagttacatctggaaatgagcatttgaaatagataatcctttaagccttgtggcaaaatttttgtggcttttgtttaactttgaaaggttattatgcactaaccttttttggtggctaattagggtttaaatacagaaacaagatttcaaataaaactgtctttgggcagtgagtaaatagcatattttgaagtagagttgtatactttttcataagatgtttgggaatttttttcctgaagtaataatttattcccacatctacatcagtgaaagctatctacctatcctgagtctatcttaaaggaaaaaaagaaaaaaaccttatctcttgcccttattttgaattttccactctttcattaatttgttttaagctcctgttggaaaaaaaggggtagtgcattttaaattgaccttcatacgcttttaaaataagacaaatctacttgataatgtacctttatttgatctcaagttgtataaaaccaataaatttgtgttactgcagtagtaatcttatgcacacggtgatttcatgttatatatgcaaagtaggcaactgttttcttagttacagaagtttcaagcttcacttttgtgcagtagaaacaaaagtaggctacagtctgtgccatgttgatgtacagtttctgaaattgttttacaagactttgataataaaacccttaaactta

SEQ ID NO: 6541 - DNA, 1400 bp, Homo sapiens
cgatgggcctcgggggactctagcccatgcatttgctcctggagaaggcctgggaggagatacacatttcgacaatcctgagaagtggactatgggaacgaatggttttaatttgtttaccgttgctgctcatgaatttggccatgccctgggcctggcccattccacagacccatcagcactgatgtacccaacttataagtacaagaatccctatggattccacctccccaaagatgatgtgaaagggatccaggcattatacggacctcggaaagtattcctggggaagcccactctgccccatgccccccatcacaagccatccatccctgacctctgtgactccagctcatcctttgacgctgtgacaatgctggggaaggagctcctgctcttcaaggaccggattttctggagacggcaggttcacttgcggacaggaattcggcccagcactattaccagctccttcccccagctcatgtccaatgtggatgcagcttacgaagtggctgagaggggcactgcttacttcttcaaaggtccccactactggataacaagaggattccaaatgcaaggtcctcctcggactatttatgactttggatttccaaggcacgtgcagcaaatagatgctgctgtctacctcagggagccacagaagacccttttctttgtgggagatgaatactacagctacgacgaaaggaaaaggaaaatggaaaaagactatccaaagaatactgaagaagaattttcaggagtaaatggccaaatcgatgctgctgtagaattaaatggctacatttacttcttttcaggaccaaaaacatacaagtatgacacagagaaggaagatgtggttagtgtggtgaaatctagttcctggattggttgctaaatagaaaagcctagtcttctcaagcaatgaggatgactacaagcagcctctaactggatcttaaggactaaagcagaatgtaggagagggattcttccaaaggccttcaaatcaaattagaattcactgagaataataatacttccaatttttttcatagttgtataatcagaatttcaatccacattagaaaagtttttatatgggcaactttatgcgaaatccaaatcaacacaatgcactctgcagttagacaccattattttttcttacctaatatactgaagcagattgatccgtttgatttttatttccaggaggaagactagtggtggattccatgacatatattgtaattcttttcataggaaatgtcattacagtatgaattataattatttacaagcaatggcttttgtggccatcatttggccatcatttgttataataaatataaatttcccaatttttacttaaaagacatcacaacaca

SEQ ID NO: 6542 - DNA, 600 bp, Homo sapiens
aactgctgccactggcagtaatcgaagacttcagcagacacaaaatcaagtagatgaggtggtggacataatgcgagttaacgtggacaaggttctggaaagagaccagaagctctctgagttagacgaccgtgcagacgcactgcaggcaggcgcttctcaatttgaaacgagcgcagccaagttgaagaggaaatattggtggaagaattgcaagatgtgggcaatcgggattactgttctggttatcttcatcatcatcatcatcgtgtgggttgtctcttcatgaagaaccagcggaactcaaaactgctgttcaagaaacctcttcaagacttttgacttagaacctgctatattatcaagcttacctactgttatctctaaaattttttttgtgttaatgtaaagttgaatttctaggaaacgtgcctttgttttttaatatgcactccaaattagaaggccggccccgtccacattttgcacagtgcctttacagatttacgtatgggctgatgaagaggccttcttaagttccagagtgctataatctagatgtaatgttgtcactaattaattgccattactcccctttag

SEQ ID NO: 6543 - DNA, 1400 bp, Homo sapiens
tgtaattgcggaagatgtgactgcaaagcaggctggtatgggaagaagtgtgagcacccacagtcctgcacgctgtcagctgaggagagcatcaggaagtgccagggaagctcggatctgccttgctctgggaggggtaaatgtgaatgtggcaaatgcacctgctatcctccaggagatcgccgggtgtatggcaagacttgtgagtgtgatgatcgccgctgtgaagacctcgatggtgtggtctgtggaggccacggcacatgttcctgtggtcgctgtgtttgtgagagaggatggtttggaaagctctgccaacatccgcggaagtgtaacatgacggaagaacaaagcaagaatctgtgtgaatcagcagatggcatattgtgctcggggaagggttcttgtcattgtgggaagtgcatttgttctgctgaagagtggtatatttctggggagttctgtgactgtgatgacagagactgcgacaaacatgatggtctcatttgtacagggaatggaatatgtagctgtggaaactgtgaatgctgggatggatggaatggaaatgcatgtgaaatctggcttggctcagaatatccttaacaattacatgagagaggtctggattcttattttttctgggccattagaacatataaatgcgaaggaaaccatgtatattcaccactaggacaggttaaaaagaccattgtatgtttttctatttctgaattacgaatgaaatccgagtacctattagaaatgagttatgcaaatttagatgcaaataacattagaaaaaaaagattcttccataattaacataagtggttcctaacgagagcaatttttccacccaaaagtcatttggcaacatctacagacaattttgattgtcacactgggtcgggtaggaaggtatgctgcagacatttggtgggtagaggccagggatgctgctgagcatcccgcagtgtacaggacagcccccaaacaaggaattatccagccccaaatgccaatagggctcagactgagaaacattgagttatatggctattagaaatccacattcttacacaagaaagaccatattagaatctaaggaaaacatgcatattcacattaattaatcgatcagatttttccagaattccgtatcagtcaccattttaatatggggacaatgaagacaagcacacaggaggtagaatatcagagtggggctggatcaagggcaaaaactggtcattaagtcatctgacattaaatcatttagccactaagttatttgtgtactctcactttaaactcaccaaagaagattctcttaaagaaattatgaaaaatgtacaatttaacattttaaataaatagtgacagaagttgtttaaaaa

SEQ ID NO: 6544 - DNA, 1400 bp, Homo sapiens
ggatcaagggggataagagtgagttgaatgaaataaaagaaaatcagagaagtccagttagagtaaaagagagaaaaataacagatcacaggaatgtatctgagagtccaaacagaaaaaatgaaaaggagaagaaagttaaagaccataaatctaacagcaaagagagagacatcagaagaaattcagaaaaagatgacaagtataaaaacaaagtgaagaaaagggccaaatctaaaagtaggagtaagagcaaagagaaatcaaagagtaaagaaagagattcaaaacataatagaaatgaagaaaagaggatgaggtcaaggagtaaaggaagggatcatgaaaatgttaaagaaaaagaaaagcagtctgattctaaaggaaaagatcaggaaaggagtagaagtaaagagaagtctaaacagttagaatcaaagagtaatgagcatgatcacagtaaaagtaaggaaaaggatagacgcgcacaatccaggagtagagaatgtgatataactaaaggtaaacacagttataatagcagaacaagagaacgaagcagaagtagggacagaagcagaagagtgcgatcaagaacccatgacagagatcgcagcagaagcaaggagtaccatagatacagagaacaggaatacaggagaagaggacggtcacgaagccgagagagaagaacaccaccaggaagatcaagaagtaaagataggaggagaaggaggagagactcacggagctcagagagagaagaaagtcaaagcagaaacaaagacaaatacagaaaccaagagagtaagagctcacacagaaaagaaaattctgagagtgagaaaagaatgtactctaaaagtcgtgatcataatagctcaaataacagcagggaaaaaaaggctgatagagatcaaagtcccttctcaaaaataaaacaaagcagtcaggacgatgaattaaagtcctccatgttgaaaaataaggaggatgagaagatcagatcctcagtggaaaaagaaaaccaaaaatcaaaaggtcaagaaaatgaccatgtacatgaaaaaaataaaaaatttgatcatgaatcaagccctggaacagatgaagacaaaagcggatgagtgagttatataaacttacttccattctgtttcggattttaagtttgagagacttgctaatgaatctcctttatgttgttttccttttcattgtttttggattgttttatgtttgtccttttttttcttaatgtggatttcattgagttgattttttgataatctgcaatctggataatttgtactgctaaagttttaataaactcgacatgagaaaaacaaaaaaaaaaaaaaaaaaaaaaaaaaaaaaaaaaaaaaaaaaaaaaaaaaaaa

SEQ ID NO: 6545 - DNA, 1400 bp, Homo sapiens
gcgctacctggtgccccaggctcgcgccctgtgtggcttggatgagagcaaggccaagctgtcatcggacgtgctgacgctgctcatcaagcagtactgccgcgagagcggtgtccgcaacctgcagaagcaagtggagaaggtgttacggaaatcggcctacaagattgtcagcggcgaggccgagtccgtggaggtgacgcccgagaacctgcaggacttcgtggggaagcccgtgttcaccgtggagcgcatgtatgacgtgacaccgcccggcgtggtcatggggctggcctggaccgcaatgggaggctccacgctgtttgtggagacatccctgagacggccacaggacaaggatgccaagggtgacaaggatggcagcctggaggtgacaggccagctgggggaggtgatgaaggagagcgcccgcatagcctacaccttcgccagagccttcctcatgcagcacgcccccgccaatgactacctggtgacctcacacatccacctgcatgtgcccgagggcgccacccccaaggacggcccaagcgcaggctgcaccatcgtcacggccctgctgtccctggccatgggcaggcctgtccggcagaatctggccatgactggcgaagtctccctcacgggcaagatcctgcctgttggtggcatcaaggagaagaccattgcggccaagcgcgcaggggtgacgtgcatcatcctgccagccgagaacaagaaggacttctacgacctggcagccttcatcaccgagggcctggaggtgcacttcgtggaacactaccgggagatcttcgacatcgccttcccggacgagcaggcagaggcgctggccgtggaacggtgacggccaccccgggactgcaggcggcggatgtcaggccctgtctgggccagaactgagcgctgtggggagcgcgcccggacctggcagtggagccaccgagcgagcagctcggtccagtgacccagatcccagggacctcagtcggcttaatcagagtgtggcatagaagctatttaatgattaaagtcatttgcagtgggagttagcatcactaacctgacagttgttgccaggaatttgctttgtttactgctagtatattagaaatcctagatctcagaatcacaatagtaataaacaacaggggtcattttttcctaacttactctgtgttcaggtgtggaatttctgtctcccaagaggaaatgtgacttcactttggtgccaatggacagaaaattctacctgtgctacataggagaagtttggaatgcacttaatagctggtttttacaccttgatttcgaggtggaaagaaattgatcatgaatctctaataaatttaaatctcttaaaccaaaaaaaaaaaaaa

SEQ ID NO: 6546 - DNA, 1361 bp, Homo sapiens; identical to SEQ ID NO: 1311

SEQ ID NO: 6547 - DNA, 1400 bp, Homo sapiens
agctggcacaggagatggagggcagcgacaagccacaggagctggcccgggtctgcttgggccaggccaatcgccactttggcatggcgcttggcgccctctttgtacatgagcacttctcagctgccagcaaagccaaggtgcagcagctagtggaagacatcaagtacatcctgggccagcgcctggaggagctggactggatggacgccgagaccagggctgctgctcgggccaagctccagtacatgatggtgatggtcggctacccggacttcctgctgaaacccgatgctgtggacaaggagtatgagtttgaggtccatgagaagacctacttcaagaacatcttgaacagcatccgcttcagcatccagctctcagttaagaagattcggcaggaggtggacaagtccacgtggctgctccccccacaggcgctcaatgcctactatctacccaacaagaaccagatggtgttccccgcgggcatcctgcagcccaccctgtacgaccctgacttcccacagtctctcaactacgggggcatcggcaccatcattggacatgagctgacccacggctacgacgactgggggggccagtatgaccgctcagggaacctgctgcactggtggacggaggcctcctacagccgcttcctgcgaaaggctgagtgcatcgtccgtctctatgacaacttcactgtctacaaccagcgggtgaacgggaaacacacgcttggggagaacatcgcagatatgggcggcctcaagctggcctaccacgcctatcagaagtgggtgcgggagcacggcccagagcacccacttccccggctcaagtacacacatgaccagctcttcttcattgcctttgcccagaactggtgcatcaagcggcggtcgcagtccatctacctgcaggtgctgactgacaagcatgcccctgagcactacagggtgctgggcagtgtgtcccagtttgaggagtttggccgggttttacactgtccaaaggtctcacccatgaaccctgcccacaagtgttccgtgtggtgagcctggctgcccgcctgcacgcccccactgcccccgcacgaatcacctcctgctggctaccggggcaggcatgcacccggtgccagccccgctctgggcaccacctgccttccagcccctccaggacccggtccccctgctgcccctcacttcaggaggggcctggagcagggtgaggctggactttggggggctgtgagggaaatatactggggtccccagattctgctctaagggggccagaccctctgccaggctggattgtacgggccccaccttcgctgtgttcttgctgcaaagtctggtcaataaatcactgcactgttaaaaaaaaaaaaa

SEQ ID NO: 6548 - DNA, 600 bp, Homo sapiens
tatatagtgagaactaaaatggatatatttttataatgcagaagaaggaaagtccccctgtgtggtaactgtattgttctagaaatatgctttctagagatatgatgattttgaaactgatttctagaaaaagctgactccatttttgtccctggcgggtaaattaggaatctgcactattttggaggacaagtagcacaaactgtataacggtttatgtccgtagttttatagtcctatttgtagcattcaatagctttattccttagatggttctagggtgggtttacagctttttgtacttttacctccaataaagggaaaatgaagctttttatgtaaattggttgaaaggtctagttttgggaggaaaaaagccgtagtaagaaatggatcatatatattacaactaacttcttcaactatggactttttaagcctaatgaaatcttaagtgtcttatatgtaatcctgtaggttggtacttcccccaaactgattataggtaacagtttaatcatctcacttgctaacatgtttttatttttcactgtaaatatgtttatgttttatttataaaaattctgaaatcaatccatg

SEQ ID NO: 6549 - DNA, 600 bp, Homo sapiens
  misc_feature (469)..(469): n is a, c, g, or t
agaaggaggggctgggccagggccagtcgctggaacagctggaagctctggtgcaaaccaaggaccaggagattcagaccctgaagagtcagactggggggccccgcgaggccctggaggctgccgagcgtgaggagactcagcagaaggtgcagacccgcaatgcggagttggagcaccagctgcgggcgatggagcgcagcctggaggaggcacgggcagagcgggagcgggcgcgggctgaggtgggccgggcagcgcagctgctggacgtcagcctgtttgagctgagtgagctgcgtgagggcctggcccgcctggctgaggctgcgccctgagccggggctggttttctatgaacgattccggcctgggatgcgggccaggctgcaggcggcatagttgggcccattcgtcctggaaagggactggggggtcccaacttagccctgggtgggccgggccgggntgggctggggtgggccccagtcggctctggttgttggcagctttggggctgtttttgagcttctcattgtgtagaatttctagatcccccgattacatttctaagcgtgaaaaaaaaaaaaaaaaaaaaaa

SEQ ID NO: 6550 - DNA, 1400 bp, Homo sapiens
tgttggaattgtcatctgtacaattagtccataatgtttcatgtttgtcctaagtgtgctgttgctatgcagtgtgatctttatttatagtaaattatgtttcatgtaaatgatatatttttggtgaaatgcaaccttttctataaaatgtgggcaacattttaaagtttttttaaaatcctattttgataagtcagtatgccatatttaatgaaatgttattatataatttttttttcttaggcaagaaacctattggaattcgagacttaattaatgaagctttgcatcgagaaacgatgggtctgaagtccaaagtgaaacagataaaggaacttttattaaagcctgagactcaggccagaattaggagggagctttttgaaggaagacttattaacaacagtaattcagcaaatgacgttgatttcagcacaactttgacataagctctacattgcgattgtgacaacatagcttatgaaatcttttcagcttattaagtagctctttggtaaacaccaaagaagtttctgatagtgtctgcacaacagcaaaccaacatttggtgaggaattagcaatttcttgccaaagaaaattgattctgcccaattattttttgagctacacttgtgttttagaatatctgtttctgtaatattgagagttattttatagaaatgatttcttaattagctgttgtgagatatttctcgggtccttgcagaaaaaaacatacagactgtgaacaaatcattcacaaacagaataaaacagagccaacaacagtattttaagggtcacttgcctcctgttgacacaattgttgctaaatcaaaagaagcgttgtccaggtgtgtctacatctagtgttacttttaatgagaatttgaatgtttattgaacaatagtacttgaatgaacatttataaatgtaattattgcgatcactggttaagaatgttttatatatccttataatatttttcactgatcaaaatgttgttctgctttttcatttcttaaggaatacatgtttgggatttttattttttacgtgtccgaagataagctccaggtcttatcgtatcccttgccatctgaacttgtttgcactgcttctgtttgaaagagcatcttgaaaaacttccccggtatgatgattgttggtaacaactttttctatagtcattgatggagtagatcatgatggaggggaaatcactggagatcaaatatgtaaaatcatttcaaatataaaatccagtttactcatggattttagctattttttcactgggtaaattatactacatttatttacaaatgagtttatgcattttcatggctcttaataaacatattgttttcccttgaaaaaaaaaaaaaaaaaaaaaa

SEQ ID NO: 6551 - DNA, 1400 bp, Homo sapiens
aacaaccggggcctcagcagtagcagtggcagtggtggcagcagtaagagccaaagcagcacctcccctgagggccaggccttggagaaccggatgaagcagctctccctacagtgctcaaagggaagagatggaattattgctgacataaaaatggtgcagattggctgattcatcctgggccctggccgatgtgcatatcaacatttatacatggaactggagaacattgtgccaataatcatttaatatatgccaaatcttacacgtctactctaaactgctctaatgaagtttcagtgaccttgagggctaaagattgttcttctgggtaagagctcttgggctggtttttcagagcagagttcttgttgtgggtagactgtgactaggttcacagcctttgtggaacattccgtataacggcattgtggaagcaataactagttcctatgaaagaaccagagctgggaagatggctgggaagccaggccaaagtgggggcaacagcttgcttctctttctcttctcaccctcagtttgtatgggaaaatggagatgtcctctccactttatcccacgatatctaaatgaaaaagaaagaaaacccacacacaaagcaaaaactcaagtattaagagcacatatttttgacccagtggaggcttaaaaaaaaaaaaatccaagaacacaattcattttcaccacctctggtgttcagagggggcttttaaaaaagcgtgtatgctgggatacccattaaaaccattttctagaaggctaccatgagctgcactttttggggtgggaaaggtgaatgccagtggggatgcggggggatgagggtaggagggacttatagaaggggatttgtggctgtgggggagaaggttctacagcataagccttatcctgccagccaaggggatttattctaagagaagtgcatgtgaagaatggttgccactgttattagattgacaagatgttaatttctctgtaggttgtaactttaaaaataaatgaaattatttaagggttatgctgcactagtattccttagaggaaacagttctttaaagttaggaaagggagtaggcaggcatgtgttggcaaaggctgttaatagtagttaagtgttaagactgcttttctttaacgttttcatggtaatgcatatttagagcactgtatttttgtcttgttaagaaaatttagcatttctaaaagaaaaaagcaaccctctttcaaactgttaattctgtcacagcctgtatattttagtcatttgtaaatctcttcatacaatagtgacttcttttttgactgatacagtatcttaattacaaggttattttgtacttgtcttaatacactaagtgtaataaaaacggcttgag

SEQ ID NO: 6552 - DNA, 1400 bp, Homo sapiens; identical to SEQ ID NO: 6551

SEQ ID NO: 6553 - DNA, 974 bp, Homo sapiens; identical to SEQ ID NO: 1318

SEQ ID NO: 6554 - DNA, 1400 bp, Homo sapiens
ccattttgactggtcgtcattggcatggggtggatatagggcataggattacttgtctcagaagctgtcatagaatttcttgctgccaattaaaaaacctgtgttctttacacactacacgtataaatattgtaactgttcatctttgttgttttatcactgtaagcctgtcaaatcatagtatcctaagcatctgtaaatgctaattttgcatttttggaaaaacccattccttccaagctagtgtttttcattggctccaggtctaatttttcactgtggtccctggcagccagtcttttgaagtttaaagattacctgtctcttgactgcagtaccttttctttaatttttaccaaaaatatccagaggttactggagttcttattcaatataaggaaagtttgctgcactttattaccaagcctctgggattttaccagtcaaacatatttgtgcattacatttcatttcttgtgagctagctggctgtccatattgaatgttgacccatttgagtacgctaaaaggcttacagtatcagacacgatcatggttttagatcccataataaaaatgratgtttttcttataaaaaattatacaaatgctgaagtgagattctactattgttcattgcttccttttctttttccttttgcgattttcactgattaatagcacatttcttcacaaaattagataaagttggtcaaagaccagatattctggaatggaaattgtaaagcttaatcaaaaagaatagccagtacagcatacaatctcagaaacttagaagcaagtagaaaataattggttgatgtaaacgaaagtgccattttagtaaaggcaggaaaaaaatagcaatatttgagttatgtaaggataaaaaatccactgacttgtatttttgcacaagaggctggtctgaatatgattgttcacattaagagtgtttattcgtcggttcattttggggattttcccccttgatgttttgacagattgaagtgagctttagtgagcaaaaggatcagaatgcagggaacactaagctgtgatgaagaaagtgtggtaaaaagccagagtagttttatacagacaaaaccagtgtcaggcctttgcagtaggcttgagtgaacttctgatctagatttgaaagtaaattttatgaagacattgcccatttttacttcctcattcattattgtaccagcatcatagctttattactctaatcccaggtaagtcaagcctacaatgccctagaggaagagtaaaaccagaaattcatgctggcttaaataatctatttttgtttcttttcatttgaatatttaaattttatggtttattaaaaaattaaataaaaaagaaaaaaaaaaaaaaaaaaaactcga

SEQ ID NO: 6555 - DNA, 600 bp, Homo sapiens
cagacatgcagctgtgtgtggcagtattttagtaccgggttaagaaaactggcaactgggaagaagtggcctcaaaggcacttaatttgatttttattttttaaatgctgtcaaagttacagtttacgcaggacattcttgccgtattctcatgatcccagataagtgtgtgttttatactgcaacaatatgcagcaatggtaagcgtaaagtttttttttgtttttgtttttgtttttttttatattatgaagtcttttaacagtctctctttatataaatacacagagtttggtatgatatttaaatacatcatctggccaggcatggtggcttacgcctgtaatcctagcactttgggaggccaagacgggcggatcacctgaggtgaggagttcaagaccagcctgcccaacatagtgaaactccgtctctaccaatatacaaaaattagccgggcatgatggtggtggcctgtaatcccagctacttgggaggctgagacaggagaatcgcttgaacccaggagacggtggttgcagtgagcgaagatcgagccactgcactccagcctgggcagctgaacaagactccgtctcc

SEQ ID NO: 6556 - DNA, 600 bp, Homo sapiens
ggagcgtgtgaaggtgggcccagggctgactctctgtgccaagggctgtgctgccatcctggatacgggcacgtccctcatcacaggacccactgaggagatccgggccctgcatgcagccattgggggaatccccttgctggctggggagtacatcatcctgtgctcggaaatcccaaagctccccgcagtctccttccttcttgggggggtctggtttaacctcacggcccatgattacgtcatccagactactcgaaatggcgtccgcctctgcttgtccggtttccaggccctggatgtccctccgcctgcagggcccttctggatcctcggtgacgtcttcttggggacgtatgtggccgtcttcgaccgcggggacatgaagagcagcgcccgggtgggcctggcgcgcgctcgcactcgcggagcggacctcggatggggagagactgcgcaggcgcagttccccgggtgacgcccaagtgaagcgcatgcgcagcgggtggtcgcggaggtcctgctacccagtaaaaatccactatttccattgaaaaaaaaaaaaaaaaaaaaaaaaaaaaaaaaaaaaaaaaaaaaaaa

SEQ ID NO: 6557 - DNA, 1400 bp, Homo sapiens
ctcttcaaaggcaacaatcgctggaaacagagtgtagagctgtgcaagaaagacagcctttacaaggatgcaatgcagtatgcttctgaatctaaagatactgaattggctgaagaactcctgcagtggtttttgcaggaagaaaaaagagagtgctttggagcttgtctgtttacctgttacgatcttttaaggccagatgtcgtcctagaaactgcatggaggcacaatatcatggattttgccatgccctatttcatccaggtcatgaaggagtacttgacaaaggtggataaattagatgcttcagaatcactgagaaaagaagaagaacaagctacagagacacaacccattgtttatggtcagccccagttgatgctgacagcaggacccagtgttgccgtccctccccaggcaccttttggttatggttataccgcaccaccgtatggacagccacagcctggctttgggtacagcatgtgagatgaagcgctgatcctgtagtcacctattttcgtactgaaacatcgtctttacccacttctcagtttataatgggggaaaacaggcaacgtgttcttgtaacctttatttcatgaaggacttctttttgtttctaactataaacttggatcacctatgttaaaaccttatttcacattccacatcattttagaatttattttcgaaggggaatagtttcaatgttttattcacttgggctttttttcttccccctctttctttaaagaactgctcaatattcaatctgttgtgaagaacctgatttgcactctgtagtgtttaaagaaacaaagaaactctaatattgaatctcttaaatttagtgtatgtaaacagcttacaaatacgtattgtctaaatgcatttaaatctgttttattcaaagaaaagctaaagcaaaaacactggcatatgaccatgcaagactgtcagtgccaacaaagacaacactaatcagcacatcgtacactggattgcagtgcttcccagattattgaaaaatgttacagacaacttgcctgatttttaaatgagcgtaaaaggccctctaacctatgcaggtttccccattatgcatatagaaaatgctagtatgttttgctcacttcatatgtaacaggtgcccttatgttgtgctgtatcctgtgctttttctgtgggaccattccattcaggagcaaagagcaccatgattccaatcttgtgtgtgtttactaacccttccctgaggcttgtgtatgttggatattgtggtgttttagatcactgagtgtacagaagagagaaattcaaacaaaatattgctgttcttcagttttgtttgtggaatttgaaattactcaaatttaaaataaattactggactgtgg

SEQ ID NO: 6558 - DNA, 600 bp, Homo sapiens
ttatccgtctcttcccgtccctgatgacaaagatcttgccttacagactttacaggcttggctttgagattctgtaactgcagacttcattagcacacagattcactttaatttcttaattttttttttaaatacaaggagggggctattaacacccagtacagacatatccacaaggtcgtaaatgcatgctagaaaaatagggctggatcttatcactgccctgtctccccttgtttctctgtgccagatcttcagtgcccctttccatacagggatttttttctcatagagtaattatatgaacagtttttatgacctccttttggtctgaaatacttttgaacagaatttcttttttttaaaaaaaaacagagatggggtcttactatgttgcccaggctggtgtcgaactcctgggctcaagcgatccttctgccttggcctcccgaagtgctgggattgcaggcataagctaccatgctgggcctgaacataatttcaagaggaggatttataaaaccattttctgtaatcaaatgattggtgtcattttcccatttgccaatgtagtctcacttaaaaaaaaaaaaaaaaaaa

SEQ ID NO: 6559 - DNA, 600 bp, Homo sapiens
agaatttgagcgtagcctgggcaacacagcaagaccccatctaagaaaaaaatgttttttaaatcagcttagcccaaaggggttgtgaatggggaggtataaaaagcaaagattattttttggctactaagccaagaacttacagggattttttttttcagtcccagaacctacagataccctgctacttgcttcacgtggatgctcagtgcccagcagccatcttaatacattaaaccagtttaaaaaataccttccatgtggagaaaaacatgtctttttctcgcctcaactttatccacatgaaatgtgtgcccatggctgggcgcagtggctcacctgtaatcccaacactttgggaggctgaagcaggcagattgcttgaggccaggagttcgagaacagtctggccaacatggcgaaacctcatctctactaaaattacaaaaattagccgggcatggtggcacatgcctgtaatcccagctacgtcaggaggctgaggcacaggaattgcttgaacccaagaggcagaggatgcaatgagccaagatcacaccactgcactccagccttggcgacagagggagactctgtctc

SEQ ID NO: 6560 - DNA, 600 bp, Homo sapiens
taaataaatattctccatatttttgggggatgacattcagtgaattatttcagtggtgacccactgaaaattaataatggtacttatgattaaaaacgcatttaatactaactgcagtagttctttcaagaatctttagagataaggattgcacattggaaaagtaaaccatgtttcattcctttttccctatttatattgaaagaaataggccagcagagacttagggattttaaattggcttgctttttagctgtttcagtcaccagtgaagagcctatgtgcattttgtagtagataatgtaaaatttgtcatctttttcttttcttttttttagaatagctgatattttgataacaatctctaatttgcatgggcaccacatttcttatattaaaagaattagtgttttggcttctgtactgcttatggttgtaggattcaggggttaatggaatcacagaaatgatattctgcaagaatttcttttaaataaaaagtttgggggtgcaatataagaagtttatataatatgcagtacattatccaaaagagaaggtagttaatgcagtagaaagtagtggtaataattccttttt

SEQ ID NO: 6561 - DNA, 600 bp, Homo sapiens
ctgacattcgtgaggatgacaacattgcaatcattgatgtgcctgtccccagtttctctgatagtgaccctgcagcaattattcatgactttgaaaagggaatgactgcttacctggacttgttgctggggaactgctatctgatgcccctcaatacttctattgttatgcctccaaaaaatctggtagagctctttggcaaactggcgagtggcagatatctgcctcaaacttatgtggttcgagaagacctagttgctgtggaggaaattcgtgatgttagtaaccttggcatctttatttaccaactttgcaataacagaaagtccttccgccttcgtcgcagagacctcttgctgggtttcaacaaacgtgccattgataaatgctggaagattagacacttccccaacgaatttattgttgagaccaagatctgtcaagagtaagaggcaacagatagagtgtccttggtaataagaagtcagagatttacaatatgactttaacattaaggtttatgggatactcaagatatttactcatgcatttactctattgcttatgccgtaaaaaaaaaaaaaaaaaaaaaaaaaaaaa

SEQ ID NO: 6562 - DNA, 600 bp, Homo sapiens
cagcttcttctcttgtggttgttagatctaaaactgaagatcatgaagaagcagggcctctacctacaaaagtgaatcttgctcattctgaaatttaagcatttttcttttaaaagacaagtgtaatagacatctaaaattccactcctcatagagcttttaaaatggtttcattggatataggccttaagaaatcactataaaatgcaaataaagttactcaaatctgtgaagactgtatttgctataactttattggtattgtttttgtagtaatttaagaggtggatgtttgggattgtattattattttactaatatctgtagctattttgttttttgctttggttattgtttttttcccttttcttagctatgagctgatcattgctccttctcacctcctgccatgatactgtcagttaccttagttaacaagctgaatatttagtagaaatgatgcttctgctcaggaatggcccacaaatctgtaatttgaaatttagcaggaaatgacctttaatgacactacattttcaggaactgaaatcattaaaattttatttgaataattatgtgctgaaaaaaaaaaaaaaaaaa

SEQ ID NO: 6563 - DNA, 600 bp, Homo sapiens
ctgtgctcagccaccatctggagttttaaaaggctcccatgtgagtccctgtgatggccaggccaggggacccctgccagttctctgtggaagcaaggctggggtcttgggttcctgtatggtggaagctgggtgagccaaggacagggctggctcctctgcccccgctgacgcttcccttgccgttggctttggatgtctttgctgcagtcttctctctggctcaggtgtgggtgggaggggcccacaggaagctcagccttctcctcccaaggtttgagtccctccaaagggcagtgggtggaggaccgggagctttgggtgaccagccactcaaaggaactttctggtcccttcagtatcttcaaggtttggaaactgcaaatgtccccttgatggggaatccgtgtgtgtgtgtgtgtgtgtgtgtgtgtgtgtgtgtgtgtgtgttttctcctagacccgtgacctgagatgtgtgatttttagtcattaaatggaagtgtctgccaaaaaaaaaaaaaaaaaaaaaaaaaaaaaaaaaaaaaaaaaaaaaaaaaaaaaaaaaaaaaaaaaaaaaaaaaaaaaaaaaaaaaaaaa

SEQ ID NO: 6564 - DNA, 600 bp, Homo sapiens
agcacagctctagttacattcttatgatatggcattaaattatttccatatattatataataggtccttccactttttggagagtagcaaatctagcttttttgtacagacttagaaattatctaaagatttcatctttttacctcatatttcttaggaatttaatggttatatgttgtctttttttcctatgtcttttggctcaagcaacatgtatatcagtgttgactttttctttcttagatctagtttaaaaaaaaaaaaaaccacataacaattctttgaagaaaggaagggattaaataatttttttccctaacactttcttgaaggtcaggggctttatctatgaaaaagtagtaaatagttctttgtaacctgtgtgaagcagcagccagccttaaagtagtccattcttgctaatggttagaacagtgaatactagtggaattgtttgggctgcttttagtttctcttaatcaaaattactagatgatagaattcaagaacttgttacatgtattacttggtgtatcgataatcatttaaaagtaaagactctgtcatgcaaaaaaaaaaaaaaaaaaaaaaaaaaaaaaa

SEQ ID NO: 6565 - DNA, 1027 bp, Homo sapiens; identical to SEQ ID NO: 1330

SEQ ID NO: 6566 - DNA, 600 bp, Homo sapiens
cccaccttcagtttaaaagaaaaaaaaaatccccttcactcctactgggaggtgggacccctttcattttcagttttgctcatctagggaaaataaggctttggtttccagtttaattgtttttgaccttctaaaatgtttttatgttagcactgatagttggcattactgttgttaagcactgtgttccagaccgtgtctgacttagtgtaacctaggagattttatagttttattttaatgaaaccctgattgacgcacagcagtggggagaacagcgtcttttacctgtcaccgaagccaggaagccccgtttgtaagcgtgtgttgtggtgctttattgtacatcctccagtggcgttctttttactctaatgttcttttggtttcccccctcagaagaatcatgaatttgcaacagacctaatttttggttactttttgtcttattgatggatttgaaaatgaaagatttaataaggcaaagcagaatctgttgtccttaattatatttgcaatttggaatttgtgtgagttgatttagtaaaatgttaaaccgttaaaaaaaaaaaaaaaaaaaaaaaaaaaaaaaaaaaaaaa

SEQ ID NO: 6567 - DNA, 600 bp, Homo sapiens
acctgcctctgtttttccctcgagaccagccaactctcacatttcagtccgtttatcactttaccaacagtggacagctttactcccaggcccaaaaaaattatccgtacagccccagatgggatggaaatgaaatggccaaaagagcaaaggcttatttcaaaacctttgtccctcagttccaggaggcagcatttgccaatggaaagctctaggaaacaccagtcttgagaggtggccagccagactgcctgtccacatgcgtgtcagcacatacagccgcttcctggaagccgcctggaatgtcttcacggcagcgttttgctcacacagcagcttttgcacgccccaggcagccccgactgctgaaatccaacttgagctggctggtggtccctggatcctagagcccttcacttcgggttactccctctttcttgcctctatttcttagttggaagaaataaactcacaaattatggtgcagtaattttccggggaaagtaaagcctcaggaatgcccacgcctttcttccaaagcctttgtctctgagacctcttaagttctaagattaaatgcccctcgctgttcttcctctg

SEQ ID NO: 6568 - DNA, 600 bp, Homo sapiens
acaaggaggttcagtggacccttggagccatcctctacaggacccgctttctaccgttaagagacatccagcaggaggccttccgagccagtcacacccactggcggggcgtttcctttgtctacaaccactacctgttctctggctgcttcctggtggtgctgctggccatcctgctgtacctgctgcggctgcggcgcatccacaggcgcactccccggagcagctcggccgccgccctctggatggaggagggccttcccgcccagaatgccccggggaccttgtgatccagctcacagctccacgaagactcaaaaggaaaagccatttttgcctcagggtttctcctctttattttcctgtggttttgttttttctttcccttttttgttcctccaaacaaaaacaaaatgcaggccgagcgcggtggctcacgcctgtaatcccagcactttgggaggccgaggcgggcggatcatgaggtcaggagatcgagaccatcctggctaacacggtgaaaccccgtctctactaaaaatacaaaaaattagctgggtgtggtggcgggcgcccgttagtccaactactcaggaaggc

SEQ ID NO: 6569 - DNA, 1400 bp, Homo sapiens
tgatttgggaacaactggtcgtcttcagttaatggcaagacttgcagagggtacaggtttgcagattccgccagcagcacagcaagctctacagatgagtggctctttggcatttggtgctgtggcagatttgcaaacaagactttcccagcagactgaagcttcagctttagctgcagctgcctctgttcagccacttgcaacacaatgtttccaactctctaacatgtttaaccctcaaacagaagaagaagttggatgggataccgagattaaggatgatgtgattgaagaatgtaataaacatggaggagttattcatatttatgttgacaaaaattcagctcagggcaatgtgtatgtgaagtgcccatcaattgctgcagctattgctgctgtcaatgcattgcatggcaggtggtttgctggtaaaatgataacagcagcatatgtacctcttccaacttaccacaacctgtttcctgattctatgacagcaacacagctactggttccaagtagacgatgaaggaagatatagtcccttatgtatatagctttttttctttcttgagaattcatcttgagttatcttttatttagataaaaataaagaggcaaggatctactgtcatttgtatgcaatttcctgttaccttgaaaaaataaaaatgttaacaggaatgcagtgtgctcattctccctaaatagtaaatcccactgtatacaaaactgttctcttgttctgccttttaaaatgttcatgtagaaaattaatgaactataggaatagctctaggagaacaaatgtgctttctgtaaaaaggcagaccagggatgtaatgtttttaatgtttcagaagcctaactttttacacagtggttacatttcacatttcactaatgttgatatttggctgatggttgagcagtttctgaaatacacatttagtgtatggaaatacaagacagctaaagggctgtttggttagcatctcatcttgcattctgatcaattggcaagaaagggagatttcaaaattatatttcttgatggtatcttttcaattaatgtatctgtaaaagtttctttgtaaatactatgtgttctggtgtgtcttaaaattccaaacaaaatgatccctgcatttcctgaagatgtttaaacgtgagagtctggtaggcaaagcagtctgagaaagaaataggaaatgcagaaataggttttgtctggttgcatataatctttgctctttttaagctctgtgagctctgaaatatatttttgggttacttcagtgtgtttgacaagacagcttgatatttctatcaaacaaatgactttcatattgcaacaatctttgtaagaaccactcaaataaaagtctcttaaaaaggcc

SEQ ID NO: 6570 - DNA, 1400 bp, Homo sapiens
ctttcaatagacagtgttgaggaccatcttgcctggagcaaggatatcaatgcttacaattgtgaagagcccacagaaaagttaccttttcccatcatcgatgataggaatcgggagcttgccatcctgttgggcatgctggatccagcagagaaggatgaaaagggcatgcctgtgacagctcgtgtggtgtttgtttttggtcctgataagaagctgaagctgtctatcctctacccagctaccactggcaggaactttgatgagattctcagggtagtcatctctctccagctgacagcagaaaaaagggttgccaccccagttgattggaaggatggggatagtgtgatggtccttccaaccatccctgaagaagaagccaaaaaacttttcccgaaaggagtcttcaccaaagagctcccatctggcaagaaatacctccgctacacaccccagccttaagtctcttggagaagttggtgctgtgagccagaggatgtcagctgccaattgtgttttcctgcagcaattccataaacacatcctggtgtcatcacagccaaggtttttaggttgctataccaatggcttattaaatgaaaatggcactaaaagtttcttgagattctttatactctctgccttcagcaatcaattccattcatacatcagcactctgctggttctgtttgaaatatgttctgtatttaaaactcaaatcttgttggatctctgcagggcttgtgaccaatgaagtcatatttgttgatggttgacaaagcttgcttcactccatcagagaatgactatcaatttttttttaactgtcctatcacgtcctctcctgtcacccattttgaagagtggcagaacttgaagttcaacttcctctgtaaatatccaagtataaagcccaggaacttctagaataacccagatgcgctttaattttttttaatatgttttgatcacagaacttctagaataacccagatgctctttcatattcttttaatacatcttgatcacagctgggggaaaaaaagctttttaattctgtaccttcctagtagataagtgaagagcagggaaagagacctttaaatattttgctataaaaaaatttgtgataagtttctatcaaaatggggagattgcagaaaaggcttcccttggctcccaaggaggtgtagcaggtgtgagcaatattagtgccatgtgcctttcacacagggtttgcatttatcagtctgttttccgatgatgtgtacatgaaagagtacaccatgtgaagagaagagagaatgattgaaaatgttttagtatagaactcttcttgcagtgggttgctattttctagattttactttttagggaacaaaataaaatcctttgtt

SEQ ID NO: 6571 - DNA, 1400 bp, Homo sapiens
gtcaatgccgccatcctggacgagagtgggaagaagttcgccatggagccagaggagtttgactctgacaccctccgcgagtttgtcactgctttcaaaaaaggaaaactgaagccagtcatcaaatcccagccagtgcccaagaacaacaagggacccgtcaaggtcgtggtgggaaagacctttgactccattgtgatggaccccaagaaggacgtcctcatcgagttctacgcgccatggtgcgggcactgcaagcagctagagcccgtgtacaacagcctggccaagaagtacaagggccaaaagggcctggtcatcgccaagatggacgccactgccaacgacgtccccagcgaccgctataaggtggagggcttccccaccatctacttcgcccccagtggggacaaaaagaacccagttaaatttgagggtggagacagagatctggagcatttgagcaagtttatagaagaacatgccacaaaactgagcaggaccaaggaagagctttgaaggcctgaggtctgcggaaggtgggaggaggcagacgccctgcgtggcccatggtcggggcgtccaccggaggccggcaacaaacgacagtatctcggattcctttttttttttttttaattttttatactttgttgtttcacttcatgctctgaatactgaataaccatgaatgactgaatagtttagtccagatttttacagaggatacatctatttttatcattatttggggtttgaaaaatttttttttacaccttctaatttctttatttctcaaagcagataattcttctgtgtgaaaatgttttctttttttaatttaaggtttaaaattccttttccaaatcatgttgattttgctctttaaaaaaaaaaaaaaaaaaaaaaaaaaaaaaaaaaaaagaagggctgggaccaaccgggtgagatccacaagtctctggatgtggctgaaggcaaatacacaattgaagtactttctgttttgaagtgctttcccttttgaatctggtttgaaacatgcagcttctgtctctagcccaaggaaagaccaaaacatagggaaataaaagcatttatctttgtcttggaagtaattgttgaagttgtgcagttgatcagtgcacagttagctgcaatgtttatagaaattgattgttaaaccaaatttacactggcatgtgtggtgtagtttctaaaaggcacttcacatttgaaatttttcttaccttagaaagtttctagtgatctaaatgtctagttttgtattcttttgtgtgtgttcactgtttctcagtattaccacttgaataattctctgtacaggggggtttgtgctatacactgggatgtctaattgcagcaataaagcctttctt

SEQ ID NO: 6572 - DNA, 1368 bp, Homo sapiens; identical to SEQ ID NO: 1337

SEQ ID NO: 6573 - DNA, 1400 bp, Homo sapiens
agaatgggctcaacctcttcctctgggtgggagcaagcgtccaacagggtgttgtccagagccttttcagcgtctcctccttcagtcagatcaccagtggtttgagtgttctgccagttctggataatccactgtccaagaaggttcgaggcctcattgatagcttacggggcacagagatcccggtacatgaagcttaccgtggtgaaacaggaagacaagatggagatgctgttcaagcacttcctggtggaagacaagagtctgagtgggggagcatcttatgtggactttctctgtcatatgcacaaggagattcggcagctactgagctaaagcaagtgggtaaatggcatagggcccaggctagcttccagaaagcaccccaggatgtcagagaaattgggacagtaacatatcttatgtaagctgacctcagtctctctggggggagggggagatataaggagacaccttctttctgggctcaagtatcctgccactctgtcatgtcctgctgatggaaggtgcccctgttccctcattctaccctctttttcctgctaatcctgtcataatgaatgtagcttctcagttcactgtatatgattcggtattgggggtttggaggcacccagaccctggcaatattatgtgtccctttggaccagtctcccaagaggagaggggcaggcaggaaagagtggggatcctaaggttactacagggggctcagtgtcatccacaacttcctatattagggataaaacatataggtgcacaagagctggggtatagcccataggtggtggagagaaaagtggtcagtccttcttgggcctggaggttagcagtcaagtttctctgctttcactgctcgctcgctctctcctgcaatgattgatgatcactccgtggatagagaggcacactgtcagaggtgaccggagaactgagttgcaaaatatattaagatctggtagaggtaccagcttcctttccagctggagaggccccaacactggatggttctgtagggagcctagggagcctggtcatcaacttgcaatacctcacagagccagttcacatcccactctgagctcccacgagaaacactgcttctccaggcccggggttgttggggagagaggcagaggcagctggagcgccgttctctcctgctgggacaccgcttgggctttggtattgactgagtggctgacagttatcttccaaccccaactggcttgggggcaggacaagggctaggcttgatggtggccaggcttgcctgctccccacctgggatgcccctgctctggacctctcatttctcttcattggtttatttttcaatgcatctttaatttgtaaagaaataaaataaattaagatgt

SEQ ID NO: 6574 - DNA, 600 bp, Homo sapiens
tccagcggtcgcaccgcccattacaagttgacctccacggtgatgctgtggctgcagaccaacaaatctggctctggcaccatgaacctcggaggcagccttaccagacagatggagaaggatgaaactgtgagtgactgctccccacacatagccaacatcgggcgcctggtagaggacatggaaaataaaatcagaagtacgctgaacgagatctactttggaaaaacaaaggatatcgtcaatgggctgaggtctgtgcagacttttgcagacaaatcaaaacaagaagctctgaagaatgacctggtggaggctttgaagagaaagcagcaatgctaaacctctgtttcatgctaaccagacacgccgtgcactcgttagattcctttcttagaaaactcgttttctgctcccttccctcgtcccttccctccccgacaggtcacataacagctgcatcattgaccgcacagcgccatctctccctgagaataaagccgatagccacctcctccggctccgagcctgcttctgccacacctcgctctcagtctctccacatttccatagagaccgtgtggtttttgttcacccggg

SEQ ID NO: 6575 - DNA, 1400 bp, Homo sapiens
cgccgagcccccggggccaggtgtcccgggcgcgccacgatgcggccgcggctgtggctcctcctggccgcgcagctgacagttctccatggcaactcagtcctccagcagacccctgcatacataaaggtgcaaaccaacaagatggtgatgctgtcctgcgaggctaaaatctccctcagtaacatgcgcatctactggctgagacagcgccaggcaccgagcagtgacagtcaccacgagttcctggccctctgggattccgcaaaagggactatccacggtgaagaggtggaacaggagaagatagctgtgtttcgggatgcaagccggttcattctcaatctcacaagcgtgaagccggaagacagtggcatctacttctgcatgatcgtcgggagccccgagctgaccttcgggaagggaactcagctgagtgtggttgatttccttcccaccactgcccagcccaccaagaagtccaccctcaagaagagagtgtgccggttacccaggccagagacccagaagggcccactttgtagccccatcacccttggcctgctggtggctggcgtcctggttctgctggtttccctgggagtggccatccacctgtgctgccggcggaggagagcccggcttcgtttcatgaaacaattttacaaataagcagagaatacggttttggtgtcctgctacaaaaagacatcggtcagtaatgagcacgatgtggaaaaatgagagaagggacacattcaaccctggagagttcaatggctgctgaagctgcctgcttttcactgctgcaaggcctttctgtgtgtgatgtgcatgggagcaacttgttcgtgggtcatcgggaatactagggagaaggtttcattgcccccagggcacttcacagagtgtgctggaggactgagtaagaaatgctgcccatgccaccgcttccggctcctgtgctttccctgaactgggacctttagtggtggccatttagccaccatctttgcaggttgctttgccctggtagggcagtaacattgggtcctgggtctttcatggggtgatgctgggctggctccctcttggtcttcccaggctggggctgaccttcctcgcagagaggccaggtgcaggttgggaatgaggcttgctgagaggggctgtccagttcccagaaggcatatcagtctctgagggcttcctttggggccgggaacttgcgggtttgaggataggagttcacttcatcttctcagctcccatttctactcttaagtttctccccatttctactcttaagtttctcagctcccatttctactctcccatggcttcatgcttctttcatttttctgtttgttttatacaaatgtgttagttgtacaaataaa

SEQ ID NO: 6576 - DNA, 1400 bp, Homo sapiens
tagatatagttgtaggtactccgggaagactagatgacttggtgtcaactggaaagctgaacttatctcaagttagattcctggtcctggatgaagctgatgggcttctttctcaaggttattctgattttataaataggatgcacaatcagattcctcaggttacctctgatggaaaaagacttcaggtgattgtttgctctgccactttgcattctttcgatgtaaagaaactgtccgagaagataatgcattttcctacatgggttgacttaaaaggagaagactctgttccagatactgtacaccatgttgttgtcccagtaaatcccaaaactgacagactctgggaaaggcttggaaagagccacattagaactgatgatgtacatgcaaaagataacacaagacctggtgctaatagtccagagatgtggtctgaagctattaaaatcctgaaaggggagtatgctgtccgggcaatcaaggaacataagatggatcaagcaattatcttctgtagaaccaaaattgactgtgataacttggagcagtactttatacaacaaggaggaggacctgataaaaaaggacaccagttctcatgtgtttgtcttcatggtgacagaaagcctcatgagagaaagcaaaacttggaaagatttaagaaaggagatgtaagattcttgatttgcacagatgtagctgctagaggaattgatatccacggtgttccttatgttataaatgtcactctgcccgatgaaaagcaaaactacgtacatcgaattggcagagtaggaagagctgaaaggatgggtctggcaatttccctggtggcaacagaaaaagaaaaggtttggtaccatgtatgtagcagccgtggaaaagggtgttataacacaagactcaaggaagatggaggctgtaccatatggtacaacgagatgcagttactatctgagatagaagaacacctgaactgtaccatttctcaggttgagccggatataaaggtaccagtggatgaatttgatgggaaagttacctacggtcagaaaagggctgctggtggtggaagctataaaggccatgtggatattttggcacctactgttcaagagttggctgcccttgaaaaggaggcgcagacatctttcctgcatcttggctaccttcctaaccagctgttcagaaccttctgatttttacatttactgaataagatttgagtaatgaaagtctgtagtcttaaaactctaaaacagttgtactgcttccaagcagcagtatttatagtaacgtaagctattaatgctaactcttgcatgtcaagaaacattagtcttaggaattcttcaaaaaatggcatcccaatgaaaataaatttgatgactata

SEQ ID NO: 6577 - DNA, 600 bp, Homo sapiens
gacgaggacgtggtgaaggaggatgccttctacagttgggagagtagcaaggaccccgctgagcagcagggcaagggtgtggcccttaaatctgtcacagccttcttcaagtggctccgtgaagtcagaggaggagtctgaccacaactgagggctggtggggccggggacctggagccccatggacacacagatggctccggctagccgcctggactgcaggggggcggcagcagcggcggtggcagtgggtgcctgtagtgtgatgtgtctgaactaataaagtggctgaagaggcaggatggcttggggctgcctgggcccccctccaggatgccgccaggtgtccctctcctcccctggggcacagagatatattatatataaagtcttgaaaattttgaaatttggtgtgtcttggggtggggaggggcaccaacgcctgcccctggggtccttttttttattttctgaaaatcactctcggactgccgtcctcgctgctgggcatatgccccagcccctgtaccacccctgctgttgcctgggcagggggaagggggggcacggtgcctgtaattattaaacatgaattcaatt

SEQ ID NO: 6578 - DNA, 1400 bp, Homo sapiens
tgccagtggctcggaactatcagaaagtgccttcggctactttatcacagcctgtgctgttatcattttgaccatcatctgttacctgggcctgccccgcctggaattctaccgctactaccagcagctcaagcttgaaggacccggggagcaggagaccaagttggacctcattagcaaaggagaggagccaagagcaggcaaagaggaatctggagtttcagtctccaactctcagcccaccaatgaaagccactctatcaaagccatcctgaaaaatatctcagtcctggctttctctgtctgcttcatcttcactatcaccattgggatgtttccagccgtgactgttgaggtcaagtccagcatcgcaggcagcagcacctgggaacgttacttcattcctgtgtcctgtttcttgactttcaatatctttgactggttgggccggagcctcacagctgtattcatgtggcctgggaaggacagccgctggctgccaagcctggtgctggcccggctggtgtttgtgccactgctgctgctgtgcaacattaagccccgccgctacctgactgtggtcttcgagcacgatgcctggttcatcttcttcatggctgcctttgccttctccaacggctacctcgccagcctctgcatgtgcttcgggcccaagaaagtgaagccagctgaggcagagaccgcaggagccatcatggccttcttcctgtgtctgggtctggcactgggggctgttttctccttcctgttccgggcaattgtgtgacaaaggatggacagaaggactgcctgcctccctccctgtctgcctcctgccccttccttctgccaggggtgatcctgagtggtctggcggttttttcttctaactgacttctgctttccacggcgtgtgctgggcccggatctccaggccctggggagggagcctctggacggacagtggggacattgtgggtttggggctcagagtcgagggacggggtgtagcctcggcatttgcttgagtttctccactcttggctctgactgatccctgcttgtgcaggccagtggaggctcttgggcttggagaacacgtgtgtctctgtgtatgtgtctgtgtgtctgcgtccgtgtctgtcagactgtctgcctgtcctggggtggctaggagctgggtctgaccgttgtatggtttgacctgatatactccattctcccctgcgcctcctcctctgtgttttttccatgtccccctcccaactccccatgcccagtttttacccatcatgcaccctgtacagttgccacgttactgccttttttaaaaatatatttgacagaaaccaggtgccttcagaggctctctgatttaaataaacctttcttgttttttt

SEQ ID NO: 6579 - DNA, 1400 bp, Homo sapiens
ttctcagcagaccatttcaaattattaataaatgggccacctccctcttcttcaaggagcatccgtgatgctcagtgttcaaaaccacagccacttagtgatcagctccctaaaaccatgcctaagtacaggcggattagctatcttccaacaatgctgaccaccagacaattactgcatttttccagaagcccactattgcctttgtagtgctttcggcccagttctggcctcagcctcaaagtgcaccgactagttgcttgcctatacctggcacctcattaagatgctgggcagcagtataacaggaggaagagatccctctcctttggtcagattattatgttctcagttctctctccctgctacccctttctctgcagatagatagacactggcattatccctttaggaagaggggggggcagcaagagagcctatttgggacagcattcctctctctctgctgctgtgacatctccctctccttgctggctccatctttcgtctgcactaccaattcaatgcccttcatccaatgggtatctatttttgtgtgtgattatagtaactactccctgctttatatgccaccctcttccttctctttgacccctgtgactctttctgtaactttcccagtgacttcccctagccctgacccaggcactaggccttggtgacttcctggggccaagaaactaaggaaactcggctttgcaacaggcattactcgccattgattggtgcccacccagggcacactgtcggagttctatcacttgcttgacccctggacccataaaccagtccactgttatacccggggcactctaaccatcacaatcaatcaatcaaattcccttaaatttgtatggcactggaactttggcaaagcacttttgacaagttgtgtctgattggagcttcatgatagccttgtgacatctttagggcaggattcttatccccattttgcagatgaaaaccctgagtcacagatttctgtgggactgtggatctcactggaagctatccaagagcccactgtcaccttctagaccacatgatagggctagacagctcagttcaccatgattctcttctgtcacctctgctggcacaccagtggcaaggcccagaatggcgacctctctttagctcaatttctgggcctgaggtgctcagactgcccccaagatcaaatctctcctggctgtagtaacccagtggaatgaatttggacatgccccaatgcttctatatgctaagtgaaatctgtgtctgtaatttgttggggggtggatagggtggggtctccatctactttttgtcaccatcatctgaaatggggaaatatgtaaataaatatatcagcaaagcaaaaagaaaaaaaaaaa

SEQ ID NO: 6580 - DNA, 1400 bp, Homo sapiens; identical to SEQ ID NO: 6579

SEQ ID NO: 6581 - DNA, 1400 bp, Homo sapiens
ccccgagccccgcgcagcccccaacaactcagcggacccccgcgtgcgccgagccgcgcaggccactgggcccctccaggacaacgagctgccggggctggatgagaggccgccgcgcgcccacgcacagcacttccacaagcaccagctgtggcccagccccttccgggcgctgaaaccccggccagggcgcaaagaccgcaggaagaagggccaggaggtgttcatggccgcctcgcaggtgctggactttgacgagaagacgatgcagaaagcccggaggaagcagtgggatgagccgagggtgtgctcccggaggtacctgaaggtggacttcgcagacatcggctggaatgaatggataatctcaccgaaatcttttgatgcctactactgcgcgggagcatgtgagttccccatgcctaagatcgttcgtccatccaaccatgccaccatccagagcattgtcagggctgtgggcatcatccctggcatcccagagccctgctgtgttcccgataagatgaactcccttggggtcctcttcctggatgagaatcggaatgtggttctgaaggtgtaccccaacatgtccgtggacacctgtgcctgccggtgagaccactccagggtggaaagaagccacgcccagcagagctgccttctcggagccttctgcaaccaggacttgtggtgcagctgcagacacagagcacagctcatgggcaacatcactggggcccagagagagctgtccgccagtgcatcattagggggtctttcattgctagtgactagccccttaaatgccagcctgagtacctgaaggaatctgggaattagccctggcctgaaagtggcccatcattcatacccactgttctgaaggcttgaaaacaaaacatatccacaacattggcttgatgtgatcatcatctcataactgagcaagaagactatgcaaatcttagggcgctcgctccctgcacacggaaagaactctgtttaaatgctcagttcagaacactttgggccacatagtgattttggaaaacaggataatcgtggtgtaaatgagtgtttcctttcaaagtccactgcagagcttttatccatatggtatgcacatgtagccaatattggtttctttttcttaatatatatattttattttaaaacaacaaaaagggagggcgttgacaccattccccacagagatagtcatgctgagtgtgggttgtttaaacatgcatattgaaataacacatatagtaacgtgggaatactaaaaaataaccaagattttatatttttgtaaattatactttctatactgtagattgtgtatgttatgtgtttttatggaaagctaataaattaaaggtacagtggtatcttga

SEQ ID NO: 6582 - DNA, 1240 bp, Homo sapiens; identical to SEQ ID NO: 1347

SEQ ID NO: 6583 - DNA, 600 bp, Homo sapiens
gggtatacagggttagctgcaatccagcttcccaagaaggctggggatataacaaacaaagctacaaaagagaaggaaagtgatgaagaagaagaggaggaagaggaaggaaatgaaaacgaagaaagcgaagcagaagtggatgaaaacgaacaaggcataaacggcaccagtaccaacagcacagaggcagaaaacggcaacggcagcagcggaggagacaatggagaagaaggggaagaagaaagtgtcactggagccaatgcagaaggcaccacagagaccggagggcagggcaagggcacctcgaagacaacaacctctccaaatggtgggtttgaacctacaaccccaccacaagtctatagaaccacttccccaccttttgggaaaaccaccaccgttgaatacgagggggagtacgaatacacgggcgtcaatgaatacgacaatggatatgaaatctatgaaagtgagaacggggaacctcgtggggacaattaccgagcctatgaagatgagtacagctactttaaaggacaaggctacgatggctatgatggtcagaattactaccaccaccagtgaagctccagcctg

SEQ ID NO: 6584 - DNA, 600 bp, Homo sapiens
gaggacatgacagaagaggccttccaaaaacacattcaggcattagcaattcgtcgactagacaaaccaaagaagctatctgctgagtgtgctaaatactggggagaaatcatctcccagcaatataattttgacagagataacactgaggttgcatatttaaagacacttaccaaggaagatatcatcaaattctacaaggaaatgttggcagtagatgctccaaggagacataaggtatccgtccatgttcttgccagggaaatggattcttgtcctgttgttggagagttcccatgtcaaaatgacataaatttgtcacaagcaccagccttgccacaacctgaagtgattcagaacatgaccgaattcaagcgtggtctgccactgtttccccttgtgaaaccacatattaacttcatggctgcaaaactctgaagattccccatgcatgggaaagtgcaagtggatgcattcctgagtcttccagagcctaagaaaatcatcttggccactttaatagtttctgattcactattagagaaacaaacaaaaaattgtcaaatgtcattatgtagaaatattataaatccaaagtaa

SEQ ID NO: 6585 - DNA, 600 bp, Homo sapiens
ccatgtactgtaaatatttttcacataaagggaacaaatgtctagttttatttgtataggaaatttccctgaccctaaataatacattttgaaatgaaacaagcttacaaagatataatctattttattatggtttcccttgtatctatttgtggtgaatgtgttttttaaatggaactatctccaaatttttctaagactactatgaacagttttcttttaaaattttgagattaagaatgccaggaatattgtcatcctttgagctgctgactgccaataacattcttcgatctctgggatttatgctcatgaactaaatttaagcttaagccataaaatagattagattgttttttaaaaatggatagctcattaagaagtgcagcaggttaagaattttttcctaaagactgtatatttgaggggtttcagaattttgcattgcagtcatagaagagatttatttcctttttagaggggaaatgaggtaaataagtaaaaaagtatgcttgttaattttattcaagaatgccagtagaaaattcataacgtgtatctttaagaaaaatgagcatacatcttaaatcttttcaatta

SEQ ID NO: 6586 - DNA, 1400 bp, Homo sapiens
cccctcatgaagaattattaaaagtaatttcagaaagagagaaagaaataagtggtctctggaatgagttagattctttgaaggatgcagttgaacaccagaggaagaaaaacaatgaaaggcagcaacaggtggaagctgttgagttggaggctaaagaagttctcaaaaaattatttccaaaggtgtctgtcccttctaatttgagttatggtgaatggttgcatggatttgaaaaaaaggcaaaagaatgtatggctggaacttcagggtcagaggaggttaaggttctagagcacaagttgaaagaagctgatgaaatgcacacattgttacagctagagtgtgaaaaatacaaatccgtccttgcagaaacagaaggaattttacagaagctacagagaagtgttgagcaagaagaaaataaatggaaagttaaggtcgatgaatcacacaagactattaaacagatgcagtcatcatttacatcttcagaacaagagctagagcgattaagaagcgaaaataaggatattgaaaatctgagaagagaacgagaacatttggaaatggaactagaaaaggcagagatggaacgatctacctatgttacagaagtcagagagttgaaggcacagttaaatgaaacactcacaaaacttagaactgaacaaaatgaaagacagaaggtagctggtgatttgcataaggctcaacagtcactggagcttatccagtcaaaaatagtaaaagctgctggagacactactgttattgaaaatagtgatgtttccccagaaacggagtcttctgagaaggagacaatgtctgtaagtctaaatcagactgtaacacagttacagcagttgcttcaggcggtaaaccaacagctcacaaaggagaaagagcactaccaggtgttagagtgaagtaattgggaaactgttcatttgaggataaaaaaggcattgtattatattttgccaaattaaagccttatttatgttttcaccctttctactttgtcagaaacactgaacagagttttgtcttttctaatccttgttagactactgatttaaagaaggaaaaaaaaagccaactctgtagacaccttcagagtttagttttataataaaaactgtttgaataattagacctttacattcctgaagataaacatgtaatcttttatcttattttgctcaataaaattgttcagaagatcaaagtggtaaagacaatgtaaaatttaacattttaatactgatgttgtacactgttttacttaacattttgggaagtaactgcctctgacttcaactcaagaaaacacttttttgttgctaatgtaatcggtttttgtaatggcgtcacaaataaaaggatgcttattattc

SEQ ID NO: 6587 - DNA, 1400 bp, Homo sapiens
ggtcgctccgacggctaccgctggtgcgccaccaccgccaactacgaccgggacaagctcttcggcttctgcccgacccgagctgactcgacggtgatggggggcaactcggcgggggagctgtgcgtcttccccttcactttcctgggtaaggagtactcgacctgtaccagcgagggccgcggagatgggcgcctctggtgcgctaccacctcgaactttgacagcgacaagaagtggggcttctgcccggaccaaggatacagtttgttcctcgtggcggcgcatgagttcggccacgcgctgggcttagatcattcctcagtgccggaggcgctcatgtaccctatgtaccgcttcactgaggggccccccttgcataaggacgacgtgaatggcatccggcacctctatggtcctcgccctgaacctgagccacggcctccaaccaccaccacaccgcagcccacggctcccccgacggtctgccccaccggaccccccactgtccacccctcagagcgccccacagctggccccacaggtcccccctcagctggccccacaggtccccccactgctggcccttctacggccactactgtgcctttgagtccggtggacgatgcctgcaacgtgaacatcttcgacgccatcgcggagattgggaaccagctgtatttgttcaaggatgggaagtactggcgattctctgagggcagggggagccggccgcagggccccttccttatcgccgacaagtggcccgcgctgccccgcaagctggactcggtctttgaggagccgctctccaagaagcttttcttcttctctgggcgccaggtgtgggtgtacacaggcgcgtcggtgctgggcccgaggcgtctggacaagctgggcctgggagccgacgtggcccaggtgaccggggccctccggagtggcagggggaagatgctgctgttcagcgggcggcgcctctggaggttcgacgtgaaggcgcagatggtggatccccggagcgccagcgaggtggaccggatgttccccggggtgcctttggacacgcacgacgtcttccagtaccgagagaaagcctatttctgccaggaccgcttctactggcgcgtgagttcccggagtgagttgaaccaggtggaccaagtgggctacgtgacctatgacatcctgcagtgccctgaggactagggctcccgtcctgctttgcagtgccatgtaaatccccactgggaccaaccctggggaaggagccagtttgccggatacaaactggtattctgttctggaggaaagggaggagtggaggtgggctgggccctctcttctcacctttgttttttgttggagtgtttctaataaacttggattctctaaccttt

SEQ ID NO: 6588 - DNA, 600 bp, Homo sapiens
ggcaggccaggccaagccaagcagggggccacagggtgggctgtggagctctcaggaagggccctgaggaaggcacacttgctcctgttggtccctgtccttgctgcccaggcagcgtggaggggaagggtagggcagccagagaaaggagcagagaaggcacacaaacgaggaatgaggggcttcacgagaggccacagggcctggctggccacgctgtcccggcctgctcaccatctcagtgaggggcaggagctggggctcgcttaggctgggtccacgcttccctggtgccagcacccctcaagcctgtctcaccagtggcctgccctctcgctcccccacccagcccacccattgaagtctccttgggccaccaaaggtggtggccatggtaccggggacttgggagagtgagacccagtggagggagcaagaggagagggatgtcgggggggtggggcacggggtaggggaaatggggtgaacggtgctggcagttcggctagatttctgtcttgtttgtttttttgttttgtttaatgtatatttttattataattattatatatgaattccaaaaaaaaaaaaaaaaaaaaa

SEQ ID NO: 6589 - DNA, 600 bp, Homo sapiens
gtggcggctgagaagtgcctttagttgaagagcacatttctttcatctctcttgtctatacctgatagacacattcctctctgccaccttccttcagggaggacccgccctctgcagactgggcttagcgtgagcaggcacttcccatgtacgtgccaagggtaagctggcctgctgagcccagggcgacagaggggcactggtttacactttgccgggaccatcagggccgccaagcaggtcaggggctgggggctggtcctgctggctttgatttctctgggtcttcaattagaatgtggctgggcccatattggtttgtgttaaatgctgtacttactacaagaatcttttttcaagcatgtacatttataaaaacaggatcatatactgtatatataaaaatcttgagatggtagaaacatgtatgaatgtactaagtagtattccactgtactcattcataaggtaggttttcttacaaaactcacaccaggtacttaaagatgtgctctgcttttttccaactacggagtgtcactgctttctaggtcagtccctgcagactcttctcaactctttccctataggaaacttact

SEQ ID NO: 6590 - DNA, 1400 bp, Homo sapiens
ggctgtgtgcaatactcctcacgagaggctaagaatattgtacacaaagattcttgatgttcttgaggaaatccctaaaaatgcagcatatagaaagtatacagaacagattacaaatgagaagctggctatggttaaagcggaaccagatgttaaaaaattagaagaccaacttcaaggcggtcaattagaagaggtgattcttcaggctgaacatgaactaaatctggcaagaaaaatgagggaatggaaactatgggagccattagtggaagagcctcctgccgatcagtggaaatggccaatataattattaagtgactttggtgtgttcatgggaaactgatgtaattaaatattctgttatattaagagcgtgttcttattactgacattttgtaatcaagaaaagtgatatagaaaatatgtaggagactgttaaaattggtgattatggtaatatggtcatgtgaatcaatttttgatttataaagtactcacacaagttgtttcaaagatgatatttctgtgaacagagaggccatgggaagatttgaaaattattaaagaaaaattcctacagattttcaatgcagagaccataatcaaaaagtaaactttctttagtagtatgttcaatacatcatttaattttttaagttatcctgaagaaggaaaggtccttaattattatagtctaaacaaatttatagattactgtttgaagtaaataatacgagtgaatattttcaaatgtgataaaatagcacaagtggctggtgataaaatttgaaattatggttaacctcagctgtgatcttatgtatgtaaagtgaaatttaaatagataattataggttgattacaaaatccatagtgtcattttattttagtcattattgaattataccatttactctgttttcttatagtcttaattttattatattttgttgttactgtattatatttgaaaaccttcaaattagaatacattgtacagttaaagaaattgacttggtacttaaaagaaagatttcccattgcatacaggttattggagaaattttccttttgttgcatttgtggaagttagttttctggcccgtggcctttaattttcttaatcaacctaattacatcaggatagaggtagagtttctgtaaaagaagagacattaagagttcctgaaatttatatctggcataccgataggcttatattcaaaacatcttagtcatacgaccataaattaaaagtggagtcactaaatagtttgcagtacgtttctaatataagtgtaggtgggtatcaaaacaagacaaatgctgttcagggaaagaagttggcaagcttaaggttaaacaaaaataaaattacatgtgttttcgccttccta

SEQ ID NO: 6591 - DNA, 600 bp, Homo sapiens
tcgtagatgtatccaaaggaattgttaatgcagttaaggatcctgatgccaatgggaaatcctttgctttcgttggtcccagtcggtacctccttttccacctggtgaagtacatctttgctgtggctcacagattgttcctcccattccccttgccgctttttgcctatcgatgggtagcaagagtctttgaaataagcccatttgagccctggataacaagggataaagtggagcggatgcacatcacagacatgaaattgcctcacctgcctggcttagaagaccttggtattcaggcaacaccactggaactcaaggccattgaggtgctgcggcgtcatcgcacttaccgctggctgtctgctgaaattgaggatgtgaagccggccaagaccgtcaacatttagtgcctcctgagcagctcttggttttggcgtcttttgggtcggcccatgtggtttgagcacccagccaggcggtctctttagaggatcctgtacacagttccactattaaaacatttcaggttgaaaaaaaaaaaaaaaaaaaaaaaaaaaaaaaaaaaaaaaaaaaaaaaaaaaaaaaaaaaaaaaaaaa

SEQ ID NO: 6592 - DNA, 1400 bp, Homo sapiens
aacttccaaaacttcatactctaagaatgtcacacaacaaactacaagacatcccatataatatttttaatcttcccaacattgtagaactcagtgttggacacaacaaattgaagcaagcattctatattccaagaaatttggaacacctatacctacaaaataatgaaatagaaaagatgaatcttacagtgatgtgtccttctattgacccactacattaccaccatttaacatacattcgtgtggaccaaaataaactaaaagaaccaataagctcatacatcttcttctgcttccctcatatacacactatttattatggtgaacaacgaagcactaatggtcaaacaatacaactaaagacacaagttttcaggagatttccagatgatgatgatgaaagtgaagatcacgatgatcctgacaatgctcatgagagcccagaacaagaaggagcagaagggcactttgaccttcattattatgaaaatcaagaatagcaagaaactatataggtatacacttacgacttcacaaaacctatacttaatatagtaaatctaagtaaacatgtattactcaaagtaatatatttagaattatgtattagtataagatcagaattgaatttaagttgttggtgacatctgcatcatttcataggattagaacttactcaaaataatgtaaatctttaaaaatataaattagaatgacaagtgggaatcataaattaaacgttaatggtttcttatgctctttttaaatatagaaatatcatgttaaagaaagtgagtgtatcatttctattaacagtaatttttctaaaaatgaggaaggaagtagcattagcagtaaagacccacaggccacgaccctcctgatcactctgaggacaatatttaaatgacaggaaggtatattaatgtaacaagcattcatttaaggaatagaccattttctctgacctcttcttcaggaaagctttcacactggtatttgtgatctcaccattatgacatccatccccctagctcaccacatagcacatagaatgatatttttgatttgtaagaggccatccaggtactaaggacccaaggcatacagattcacaaaattaactaatctttttgcctcagaataccaaaacaacaaaattataaagctgttatttggacaactaaaaaacaccaaactatctcattgcaatttgtattttagcagatttcagcaactatcctaaacaatgttattgtgttccattttaactgggataaatgtttttgtaaaaatacaaccatagaaaggcctctttgttacaaaatgatttgcaaagaaataactgctttgtttgcaagattaaattagtgttggcaaaataaagttctaaagat

SEQ ID NO: 6593 - DNA, 600 bp, Homo sapiens
acctctagaggcctataccattcaaggacagtatgccattccacagccagatttgaccaagctgcaccagttggcaatgcaacagtctcattttcccatgacgcatggcaacaccggattcagtggcattgaatccagctctccagaggtgaaaggctattgggcaggtttggatgcatctgctcagactacttctcatgaactcaccattccaaacgatttgattggctgcataatcgggcgtcaaggcgccaaaatcaatgagatccgtcagatgtctggggcgcagatcaaaattgcgaacccagtggaaggatctactgataggcaggttaccatcactggatctgctgccagcattagcctggctcaatatctaatcaatgtcaggctttcctcggagacgggtggcatggggagcagctagaacaatgcagattcatccataatccctttctgctgttcaccaccacccatgatccatctgtgtagtttctgaacagtcagcgattccaggttttaaatagtttgtaaattttcagtttctacacactttatcatccactcgtgattttttaattaaagcgttttaattccttt

SEQ ID NO: 6594 - DNA, 847 bp, Homo sapiens; identical to SEQ ID NO: 1359

SEQ ID NO: 6595 - DNA, 1194 bp, Homo sapiens; identical to SEQ ID NO: 1360

SEQ ID NO: 6596 - DNA, 1400 bp, Homo sapiens
gctgacttgtcagtgaatatgtataatcgtcttagagccactggtgaagatgaaaatattctcttctctccattgagtattgctcttgcaatgggaatgatggaacttggggcccaaggatctacccagaaagaaatccgccactcaatgggatatgacagcctaaaaaatggtgaagaattttctttcttgaaggagttttcaaacatggtaactgctaaagagagccaatatgtgatgaaaattgccaattccttgtttgtgcaaaatggatttcatgtcaatgaggagtttttgcaaatgatgaaaaaatattttaatgcagcagtaaatcatgtggacttcagtcaaaatgtagccgtggccaactacatcaataagtgggtggagaataacacaaacaatctggtgaaagatttggtatccccaagggattttgatgctgccacttatctggccctcattaatgctgtctatttcaaggggaactggaagtcgcagtttaggcctgaaaatactagaaccttttctttcactaaagatgatgaaagtgaagtccaaattccaatgatgtatcagcaaggagaattttattatggggaatttagtgatggctccaatgaagctggtggtatctaccaagtcctagaaataccatatgaaggagatgaaataagcatgatgctggtgctgtccagacaggaagttcctcttgctactctggagccattagtcaaagcacagctggttgaagaatgggcaaactctgtgaagaagcaaaaagtagaagtatacctgcccaggttcacagtggaacaggaaattgatttaaaagatgttttgaaggctcttggaataactgaaattttcatcaaagatgcaaatttgacaggcctctctgataataaggagatttttctttccaaagcaattcacaagtccttcctagaggttaatgaagaaggctcagaagctgctgctgtctcaggaatgattgcaattagtaggatggctgtgctgtatcctcaagttattgtcgaccatccatttttctttcttatcagaaacaggagaactggtacaattctattcatgggacgagtcatgcatcctgaaacaatgaacacaagtggacatgatttcgaagaactttaagttactttatttgaataacaaggaaaacagtaactaagcacattatgtttgcaactggtatatatttaggatttgtgttttacagtatatcttaagataatatttaaaatagttccagataaaaacaatatatgtaaattataagtaacttgtcaaggaatgttatcagtattaagctaatggtcctgttatgtcattgtgtttgtgtgctgttgtttaaaataaaagtacctattgaacatgtg

SEQ ID NO: 6597 - DNA, 540 bp, Homo sapiens; identical to SEQ ID NO: 1362

SEQ ID NO: 6598 - DNA, 1400 bp, Homo sapiens
atttagtaccttgtggtgtatttatgaagatcgtaactacagattttaggaaaagcggtccacattgttcagagagcatccacaggtcctgggatgccattaatcgactctcaaatactggcagtggtttgcagtggcttactggagcccttcacttatgcagcccattaacttctcaggacatccaacatttgaaagactggatctctgaaacctgggtgaatctggcaatggtggactatccttatgcctctaactttttacagcctttgcctgcttggcctatcaaggtagtgtgccagtatttgaaaaatcccaacgtatctgattcactgctgctgcagaatattttccaagctctgaatgtatattacaattattcgggccaggtgaaatgcctgaatatttcagagacagcaactagcagtctgggaacactgggttggagctatcaggcctgcacagaagtagtcatgcccttttgtactaatggtgtcgatgacatgtttgaacctcactcatggaacttaaaggaactttctgatgactgttttcaacagtggggtgtgagaccaaggccctcctggatcactactatgtatggaggcaaaaacattagttcacacacaaacattgttttcagcaatggtgaactagacccctggtcaggaggtggagtaactaaggatatcacagacactctggttgcagtcaccatctcagagggggcccaccacttagatctccgcaccaagaatgccttggatcctatgtctgtgctgttagcccgctccttggaagttagacatatgaagaattggatcagagatttctatgacagtgcaggaaagcagcactgagaaacttttgattgttttcaatttcttcttttatgttcacaccaccacattcccattcactttgattttctacatgtaattaccttcttttgtttatcattagatttgatggggccaaagttgagatagaatagagggtgatgacggtaagagcaagtgtcccatgaatgtgatttcctgggttctcactgtctttgcaccacgtctaggaagaatcttcttgatagctctcccacaccatcagtggccctcataactggagtagagttcctggttgcttttcataagagggagagttactttctttgtatctctgcaagcagagatttctctttggttttgaggttgaagtgtctttggcccatttgtaagtccccatccctaccctacacaaagtaaaagcagaagatagataaaaaatgatgtaattgcagctggtaggatgtctggtgcccaatcccaggaagtgagagccatttcttttgtactggatttaatgactttgaactgtgctgtaaataaataatacagctggacctt

SEQ ID NO: 6599 - DNA, 969 bp, Homo sapiens; identical to SEQ ID NO: 1364

SEQ ID NO: 6600 - DNA, 600 bp, Homo sapiens
atggagctgttccgagccttgggctgcagcgagctcatcagctccatctttgacttctcccactccctaagtgccttgcacttttccgaggatgagattgccctctacacagcccttgttctcatcaatgcccatcggccagggctccaagagaaaaggaaagtagaacagctgcagtacaatctggagctggcctttcatcatcatctctgcaagactcatcgccaaagcatcctggcaaagctgccacccaaggggaagcttcggagcctgtgtagccagcatgtggaaaggctgcagatcttccagcacctccaccccatcgtggtccaagccgctttccctccactctacaaggagctcttcagcactgaaaccgagtcacctgtggggctgtccaagtgacctggaagagggactccttgcctctccctatggcctgctggcccacctccctggaccccgttccaccctcacccttttcctttcccatgaaccctggagggtggtccccaccagctctttggaagtgagcagatgctgcggctggctttctgtcagcaggccggcctggcagtgggacaatcgccagagggtggg

SEQ ID NO: 6601 - DNA, 600 bp, Homo sapiens
tgccactgaatttccaaagtgtaccaatttttttttttttactgtgcttcaaataaatagaaaaatagttataatattggatcttcaactttgccattcatgcttctatgcatattaggctacgtattccacattgaaagcatgagagtgtctaggcctttgaatggcatatgccatttctgggaaatgcatctggaggctaagtattgctttctacaaataattgccccctttgttttaaaaagaagaaatgcatattgaagtagtttgatgatttgtttggcatataggaagcacgctggtgctaagtattttttaaatggttatgtaagcaaagctgaactgtaaatcttcaggaatatgtattaagattgtggaatgggtgtaagacaattggtagggggtgaaagtgggtttgattaaatggatcttttatggccctatgatctatcctttacttgaaagcttttgaaaagtggaaaggtcattttgttgcatttccccatttcttgtttttaaaagaccaacaaatctcaagccctataaatggcttgtattgaacttttacatttgaattaaagatgttaaacatgaaaaaaa

SEQ ID NO: 6602 - DNA, 600 bp, Homo sapiens
atctggcttcgacccaacaaagttcattaacctgggatgaatggggttggcctgttggtgatttggatgctgttctgtgatctaaaacaactcttattgaattgtatttactccctaaacaacacttgacaggctgttgcacagggcttctatagatcagtgtgttaggaatgggaggccccttcctgcctgccttcccatattggtcccttgacattgacaaaagcacagtgactgtcagcagattcctttacttttgtttgtgggaggtaggaattgttttaatgcattttaaacagtgtttctgaaattggatggctggctaatagacactgaatcacccggagtgcttatcttaaaattgcagatttagggagcctgccaatttaacagtctcatcagtgatctttcaacagtaatgtttgagaattactgggttaaattgtggaaagggtccagattttaaaggtgctttaaggttgccctctgccgatactgtttgtctttctactgtttcatcccctaacttcccccaaccctcaaattaaaactagaactatagatccacatgaacgcacgcctgagatttggccactcacc

SEQ ID NO: 6603 - DNA, 1400 bp, Homo sapiens
ctaccaccttttccttatactgtatatgattatggcctacaatgttgtatttgttatttattaaattgtgattgttttattattgtttatgccaaatgttaactgccaagcttggagtgacctaaagcattttttaaaagcatggctagatttacttcagtataaattatcttatgaaaaccaaattttaaaagccacaggtgttgattgttataaaataacatgctgccattcttgattgctagagtttttgttagtactttggatgcaattaaaactatgtgctatcacatgtgaaaagcttaataaattccatctatcagtagtataggtctcaatatttattatgagaccagtggtctggaaacagcttgttgtaccgaatcaactggagtctatgcttaaaaaaaaaaatttttttttaaccatccttaaattattgcttaatggtatcatattaacatattctaaataagggctttaaggcacaggctgttgaagcattttctcagaggagtggatctgtagaagtctgtctttctatagaaatattgtgcttactcaagtgttaaattattttttctatgaactagtctacttcttaaaattcaaacatattcttttgatcacattgtttcttgagcatcctgccctgctactaacttttcaacaaggcaaaatggagtaaagtggcaatttctttagatgagtgaaataccctcaagtctcttttctgcccaaaaagggaaaagtgatagaaatgggggtggcaagtggggtgagtggatgaaggtgggtattgggggtggctgtgaaagaaaataatggagaatcacttttctagacatctacctatacttaatctaagaaacaaagtaatctactgtaaagtactctgccccttgaaagaagtattaaaaagagtgaggatggatttagaaaaaaacatgaatttagaaatattcaaaatggtttttgtggcagattcaatattatgaattcacagatatttaaagaatgagaaacatagtaattagtagaaatgccagaaacagttcctggttcctcttgtgtttgacactaagaaaatagcaagagtgtgaaatctcagatacttatgaaatctcacagatgtaaggactcaagtgtagaagaaaatatccccttcttacaaaaagaaatgtcaatttatggagtttgtgggaaatagggcaagaattcttatgcttatgagagccaagtagtcagtggaagagagtagagctcaaaactggattatcaccttagcaacttagaatagtttgaaatagaaaaaaagtatttaatttggatctggatctgttaagatatgcacagtctattttttgtatagtattggaaaataaaaatgctataatttg

SEQ ID NO: 6604 - DNA, 600 bp, Homo sapiens
gactattacactgcctggaggatagcagagaagcctgtctgtacttcattcaaaaagccaaaatagagagtatacagtcctagagaattcctctatttgttcagatctcatagatgacccccaggtattgtcttttgacatccagcagtccaaggtattgagacatattactggaagtaagaaatattactataattgagaactacagcttttaagattgtacttttatcttaaaagggtggtagttttccctaaaatacttattatgtaagggtcattagacaaatgtcttgaagtagacatggaatttatgaatggttctttatcatttctcttccccctttttggcatcctggcttgcctccagttttaggtcctttagtttgcttctgtaagcaacgggaacacctgctgagggggctctttccctcatgtatacttcaagtaagatcaagaatcttttgtgaaattatagaaatttactatgtaaatgcttgatggaattttttcctgctagtgtagcttctgaaaggtgctttctccatttatttaaaactacccatgcaattaaaaggtacaatgcaaaaaaaaaaaaaaaaa

SEQ ID NO: 6605 - DNA, 600 bp, Homo sapiens
cacaccgaccgccaccccttcttttgccgcctctgcaactacaaggccaagcaaaagttccaggtggtcaagcacgtacgcaggcaccaccctgaccaagccgacccaaaccagggtgtgggcaaagaccccaccacccccacagtgcacctgcatgatgtgcagctggaggatcccagccctcctgctcctgccgctccccacactggacctgagggctgaaagcctgccccacctcctgtataggaagagggtatggtctgagatgtgcagactgggaccagcgctagcctgaggagctcagagcctaaggaaagactggcttttggggtacaagggtgactagaaccttcctgggactctggctatagtactttgaaattatcacccatataaaagagggacatggactataacgttgatttcttattgctgtacattgcgtttttaacctgcaagttctcagtttcttcaccatcactccatcaaagtccctggctataagatctggattttacccactccatcttctctttccttcttactgtgtcaattcctattttctttcagaatcttctaaaaacagttgtatctaaccgc

SEQ ID NO: 6606 - DNA, 600 bp, Homo sapiens
tgtgattattgttgctattaaattctgaactgtatccatattttaaggaaggagctaaaaatggaaattcatgaaacataaatggtatcaagaactttatcagtatgctttgttgaaagcagaaattaagataataattgagttcaattcgcctctccgcattgcctattgatacactttactaatcatgaaattctaacctaaaaggaaaacattttcctgcttgtcttagaagaaagtggaataattccactgattgtgataatggtttcaatttctacacaatataaatatccagtataaaggaaagcgttaagtcggtaagctagaggattgtaaatatcttttatgtcctctagataaaacacccgattaacagatgttaaaccttttaatgttttgatttgctttaaaaatggccttcctacacattagctccagctaaaaagacacattggagagcttagaggataagtctctggagcagaatttatcacacacaaaagttacaccaacagaataccaagcagaatgatgaggacctgtaaaataccttgtgccctattaaaaaaaaaaaaaaaaaaaaaaaaaaaaaaaaaa

SEQ ID NO: 6607 - DNA, 600 bp, Homo sapiens
tagacgaaggactgatgaagatgctgttctgatggatggaatgactgaatctgatacagcttcagttaatgaaaatgggctagtcacagttgcagattatatttctagagctgagtctcagagcagacaaagaaacctcccaagggaaactttggctaaaaacaagaaagaaatggcaaaagatgtgattgaagagcatggtccttcagaaaaggcaataaacggcccaactagtgcttctggcgatgacatttctaagctacagcgtactccaggagaagaaaagattaataccttaaaagaagaaaacactcaagaagcagcagtcctgaatggtgtttcataaactgaagaagttcctagtttacagttcttttacattacatttacaatagtgcttgtacaagcttgccaaagatagaatatggatcgccagtctttacatcgcactttcagttcctccatttggaattcaaaaaggggagggatcctgaagaaatcatatgttaaacatactttgacacctactgtgttataaaatatatcatcagatgtgccttgagaatagtatatgtaacattaaaaaaaagttgctggcta

SEQ ID NO: 6608 - DNA, 1400 bp, Homo sapiens
gggcaggaaataacctcactatcccggctgccctttctgggcaccggggcctcggacttagctgggagaaagagagagcttctgttgctgcctcatgctaagactcagtggggaggggctgtgggcgtgagacctgcccctcctctctgccctaatgcgcaggctggccctgccctggtttcctgccctgggaggcagtgatgggttagtggatggaaggggctgacagacagccctccatctaaactgccccctctgccctgcgggtcacaggagggagggggaaggcagggagggcctgggccccagttgtatttatttagtatttattcacttttatttagcaccagggaaggggacaaggactagggtcctggggaacctgacccctgacccctcatagccctcaccctggggctaggaaatccagggtggtggtgataggtataagtggtgtgtgtatgcgtgtgtgtgtgtgtgtgaaaatgtgtgtgtgcttatgtatgaggtacaacctgttctgctttcctcttcctgaattttattttttgggaaaagaaaagtcaagggtagggtgggccttcagggagtgagggattatctttttttttttttctttctttctttcttttttttttttgagacagaatctcgctctgtcgcccaggctggagtgcaatggcacaatctcggctcactgcatcctccgcctcccgggttcaagtgattctcatgcctcagcctcctgagtagctgggattacaggctcctgccaccacgcccagctaatttttgttttgttttgtttggagacagagtctcgctattgtcaccagggctggaatgatttcagctcactgcaaccttcgccacctgggttccagcaattctcctgcctcagcctcccgagtagctgagattataggcacctaccaccacgcccggctaatttttgtatttttagtagagacggggtttcaccatgttggccaggctggtctcgaactcctgaccttaggtgatccactcgccttcatctcccaaagtgctgggattacaggcgtgagccaccgtgcctggccacgcccaactaatttttgtatttttagtagagacagggtttcaccatgttggccaggctgctcttgaactcctgacctcaggtaatcgacctgcctcggcctcccaaagtgctgggattacaggtgtgagccaccacgcccggtacatattttttaaattgaattctactatttatgtgatccttttggagtcagacagatgtggttgcatcctaactccatgtctctgagcattagatttctcatttgccaataataatacctcccttagaagtttgttgtgaggattaaataatgtaaataaagaactagcataac

SEQ ID NO: 6609 - DNA, 1400 bp, Homo sapiens
tgaacaactggctgctctgtcccagggtccaatatccaagcccaagaggaaaagagagaaaaaagagaaaaagaagaaacggaaggcagagaagcatcgaggccgagctggggccgatgaagatgacaaggggcctagggcaccccgcccacctcaacctaagaagtccaagaaagcaagtggcagtgggggtggcagtgctgctttaggcccttctggctttggaccttctggaggaagtggcaccaagctccccaaaaaggccacaaagacagccccacctgccctgcctacaggttatgattcagaggaggaggaagagagcaggcccatgagttacgatgagaagcggcagctgagcctggacatcaacaaattacctggggagaagctgggccgagttgtgcatataatccaagccagggagccctctttacgtgattcaaacccagaagagattgagattgattttgaaacactcaagccatccacacttagagagcttgagcgctatgtcctttcctgcctacgtaagaaaccccggaagccctacaccattaagaagcctgtgggaaagacaaaggaggaactggctttggagaaaaagcgggaattagaaaagcggttacaagatgtcagcggacagctcaattctactaaaaagccccccaagaaagcgaatgagaaaacagagtcatcctctgcacagcaagtagcagtgtcacgccttagcgcttccagctccagctcagattccagctcctcctcttcctcgtcgtcgtcttcagacaccagtgattcagactcaggctaaggggtcaggccagatggggcaggaaggctccgcaggaccggacccctagaccaccctgccccacctgccccttccccctttgctgtgacacttcttcatctcacccccccccgcccccctctaggagagctggctctgcagtgggggagggatgcagggacatttactgaaggagggacatggacaaaacaacattgaattcccagccccattggggagtgatctcttggacacagagcccccattcaaaatggggcagggcaagggtgggagtgtgcaaagccctgatctggagttacctgaggccatagctgccctattcacttctaagggccctgttttgagattgtttgttctaatttattttaagctaggtaaggctggggggagggtggggccgtggtcccctcagcctccatggggagggaagaagggggagctctttttttacgttgatttttttttttctactctgttttccctttttccttccgctccatttggggccctgggggtttcagtcatctccccatttggtcccctggactgtctttgttgattctaacttgtaaataaagaaaatatt

SEQ ID NO: 6610 - DNA, 1400 bp, Homo sapiens
gagatcatccgtggcttgagatctttacctgagctgatcaaggaagtgctgtctctggaggagaagatccacgacttggccctggagctctacacgcagagatcgctgctggtgatggggcggggctacaactatgccacctgcctggaaggagccctgaaaattaaagagataacctacatgcactcagaaggcatcctggctggggagctgaagcacgggcccctggcactgattgacaagcagatgcccgtcatcatggtcattatgaaggatccttgcttcgccaaatgccagaacgccctgcagcaagtcacggcccgccagggtcgccccattatactgtgctccaaggacgatactgaaagttccaagtttgcgtataagacaattgagctgccccacactgtggactgcctccagggcatcctgagcgtgattccgctgcagctgctgtccttccacctggctgttctccgaggatatgacgttgacttccccagaaatctggccaagtctgtaactgtggaatgaggctgagaccgtgacaagaccatcaccacctttcatctgattccagacctgtcccaacagcagggatgctacatgggaagagaagtggacatcccacatgttctgcgtgctcctgtagagcttgacagcttccacgtgccttctacccaagtgcttttgcttacagcagatactgtttctctgtgtcctgaagtcgccagaggagaagggaatcattgtttacacatggggatcagagcagacttctccactactgtgcaatagagatacagctctcttcagagtaactgtgaaccttttataaccaacactagagttagttttaaaagacaagatatttataatgacgactgtatagcttttaagttatttttctagtatgtggctttctgtagccgtggtaacggccaaactgttcatcctagctacccatgctctgtgtccaggcttgctcctggcaggtggcattcatctcagatgtgagcacaaggcattggccctctggactcctttctccttttctttcctctctaggctgctcctgaatcctgttctctgacatccgtggagcccctcctgcatccacctatgcctcctataagtccagttgaaatctcagcctccttcaacattttcttctcgtgtgtggcccacatccctccacttctccaacttctgtttaatctgatcacggctctttttaagccctggcagcattttggtccctgctccttgcccatagtaaaacagcttgaaatatcccatgcaagagagtagtttcaagtgggcgactctgctctctatttaaaagcgtgcacaatcaaaagtactatgcaattttaggacaataaagaacatacagttcc

SEQ ID NO: 6611 - DNA, 600 bp, Homo sapiens
ggcggcccctgctggcaggctatgccctgggtgtgggactcttcctgcttctgctccagcccctcacggaccccaagctctacggcagccttcccctttgtgtgcttttggagcgggcaggggactcagaggctcccctgtgctcctgacctatgctcctgggatacgctatgaactctcaccggctccccaagccctccccaccaaggggtactgcaggggaagggctggctggggtccccgaagatctcaggaatttttgtagggattgaagccagagctagttgcgtcccagggaccaagagaaagaagcagatatccaaagggtgcagccccttttgaaaggggtgtttacgagcagctgtgagtgaggggacaaggggcaggtcccaggagccacacactcccttcctcactttggactgctgcttctcttagctcctctgcctctgaaaagctgctcggggttttttatttataaaacctctccccaccccccaccccccaacttcctgggttttctcattgtctttttgcatcagtactttgtatgggatattaaagagatttaacttgggtaacatggcttgggcctttggg

SEQ ID NO: 6612 - DNA, 600 bp, Homo sapiens
gagaggctgcagcagcaaaagcgaacagaagccctgcgccaggcagctgtgggccagggcgacttccacctgctggatcacagaggccgggctcgctgcaaggctgacttccggggccagtgggtgctgatgtactttggcttcactcactgccctgacatctgcccagacgagctggagaagctggtgcaggtggtgcggcagctggaagcagagcctggtttgcctccagtgcagcctgtcttcatcactgtggaccccgagcgggacgacgttgaagccatggcccgctacgtccaggacttccacccaagactgttgggtctgaccggctccaccaaacaggttgcccaggctagtcacagttaccgcgtgtactacaatgccggccccaaggatgaggaccaggactacatcgtggaccactccattgccatctacctgctcaaccctgacggcctcttcacggattactacggccggagcagatcggctgagcagatctcagacagtgtgcggcggcacatggcggctttccgcagtgtcctgtcttgagccactgcagtctgggccccatcattaaacgggctgcgtttaaaa

SEQ ID NO: 6613 - DNA, 1400 bp, Homo sapiens
caagaccaaccaagatgagtgccttgggagctgtcattgccctcctgctctggggacagctttttgcagtggactcaggcaatgatgtcacggatatcgcagatgacggctgcccgaagccccccgagattgcacatggctatgtggagcactcggttcgctaccagtgtaagaactactacaaactgcgcacagaaggagatggagtatacaccttaaatgataagaagcagtggataaataaggctgttggagataaacttcctgaatgtgaagcagatgacggctgcccgaagccccccgagattgcacatggctatgtggagcactcggttcgctaccagtgtaagaactactacaaactgcgcacagaaggagatggagtgtacaccttaaacaatgagaagcagtggataaataaggctgttggagataaacttcctgaatgtgaagcagtatgtgggaagcccaagaatccggcaaacccagtgcagcggatcctgggtggacacctggatgccaaaggcagctttccctggcaggctaagatggtttcccaccataatctcaccacaggtgccacgctgatcaatgaacaatggctgctgaccacggctaaaaatctcttcctgaaccattcagaaaatgcaacagcgaaagacattgcccccactttaacactctatgtggggaaaaagcagcttgtagagattgagaaggttgttctacaccctaactactcccaagtagatattgggctcatcaaactcaaacagaaggtgtctgttaatgagagagtgatgcccatctgcctaccatccaaggattatgcagaagtagggcgtgtgggttatgtttctggctgggggcgaaatgccaattttaaatttactgaccatctgaagtatgtcatgctgcctgtggctgaccaagaccaatgcataaggcattatgaaggcagcacagtccccgaaaagaagacaccgaagagccctgtaggggtgcagcccatactgaatgaacacaccttctgtgctggcatgtctaagtaccaagaagacacctgctatggcgatgcgggcagtgcctttgccgttcacgacctggaggaggacacctggtatgcgactgggatcttaagctttgataagagctgtgctgtggctgagtatggtgtgtatgtgaaggtgacttccatccaggactgggttcagaagaccatagctgagaactaatgcaaggctggccggaagcccttgcctgaaagcaagatttcagcctggaagagggcaaagtggacgggagtggacaggagtggatgcgataagatgtggtttgaagctgatgggtgccagccctgcattgctgagtcaatcaataaagagctttcttttgaccca

SEQ ID NO: 6614 - DNA, 600 bp, Homo sapiens
acaagaaaccttgtattattttataactgtgttctcatatgttctctctctctctctttctttctctctctctctctgtctctgtctctgtctcaggcagggcatcattcagtaattagctcaaacaaaacatctcaagtccccaaaacctttaattccaaaagaaatcccccctctaccccgccaaaaaaggcgttcccaccgcccggatggggtagaatggaccttgtaggtggagatgaattttcaggtccgaccccatggccttctcagtttgggccaaaagggatggaggctttacggccacttcccgttcggaataactgaaatccccagcgatggggtaacaattttttaaaactctcgattgccgtttcaattgtggaccggcgccgagggggaaagggaggtgacttcgcccggtggcaatagttccgggagaattggccattggtaaaaagacttcatagggtcactggaatgctttgtgttgtttttaagtagaggtaaaattgagatggggggcgggaggtgacatcatgaagttttttggaaatatctctttatttaaaaaattgttactccatacggctaaaaaag

SEQ ID NO: 6615 - DNA, 600 bp, Homo sapiens
taataataataaaaaaaaagggattaatagcttttgacctcaagtcttttgtcttctgagtgttggagcttggctgaagacatgtttaatactgtacaatttctgaagatggttattaacactgtgctgttaagcatccatttaaaaatatttgttatcttctttgcctgcctgtattttaaaaagaaatacaaagttgtaaaagtaatggatttctttggatgctgaatgcagtgatgttatcagtcagattctttccttggctcagttgtgtttgtatttcctttcttaattccccaaatcttggctgggcacggtggctcacgcctgtaatcccagcactttgggaggctgaggcaggtggttcactggaggttgagttcgagaccagcctggccacatggtgaaaccctgtctctactaaagatataaaaattagctggatgtggtggtgcacacctgtgatcccagctacttgggaggctgaggtgggagaattgcttgaacctggaaggcagaagttgcagtgagctgagatcacaccactgcactccagcctgggtgacagagagactctgtctcaaaaaaaaaaaaaaaaaa

SEQ ID NO: 6616 - DNA, 600 bp, Homo sapiens
gctggccatttagaggaattctaggacagtgggagctgtgttactagcactatataattccggtcagtgctgacaaataacatttaacaagtattgcagtaatcatcacttacaggtaccatttatttcaaaacaacttttttagtctgctccaaagttaaaataattaactagctaagcattattattcaactggtctaaaaactattgttatctttttttttccttttcactgttatggccttttcacatttctaaatcccatcttgatatactatgaatactctagaatgatgtaaagcagataggaatgtatgtgtacatatttattgcatacttgcacatcaaatcgatgtacatagtttaacacgtggtccttttgtgaaacctagaactcagaggattgctttttttctttcagcctattttgagttaacttcagtcctttcttagggaaatgacagggcaaagcaatttttctgttggctttgggctgtatttgtgcactaaatctttattctaaaaaaaaaaatggaaactttaatttttttaaaacgggaatttcatttacagctacattaaaatcttaatgagaaaaat

SEQ ID NO: 6617 - DNA, 600 bp, Homo sapiens
tgggctgtctgtcaccagctatctgtcatctctctggggccctgggcctcagttcaacctggtggcaccagatgcaacctcactatggtatgctggccagcaccctctcctgggggtggcaggcacacagcagccccccagcactaaggccgtgtctctgaggacgtcatcggaggctgggcccctgggatgggaccagggatgggggatgggccagggtttacccagtgggacagaggagcaaggtttaaatttgttattgtgtattatgttgttcaaatgcattttgggggtttttaatctttgtgacaggaaagccctcccccttccccttctgtgtcacagttcttggtgactgtcccaccggagcctccccctcagatgatctctccacggtagcacttgaccttttcgacgcttaacctttccgctgtcgccccaggccctccctgactccctgtgggggtggccatccctgggcccctccacgcctcctggccagacgctgccgctgccgctgcaccacggcgtttttttacaacattcaactttagtatttttactattataatataatatggaaccttccctccaaattct

SEQ ID NO: 6618 - DNA, 1400 bp, Homo sapiens
cggctgagccaaattggggtggaaaacacagaggagaaccgccggctgtaccgccaggtcctgttcagtgctgatgaccgtgtgaaaaagtgcattggaggcgtcattttcttccatgagaccctctaccagaaagatgataatggtgttcccttcgtccgaaccatccaggataagggcatcgtcgtgggcatcaaggttgacaagggtgtggtgcctctagctgggactgatggagaaaccaccactcaagggctggatgggctctcagaacgctgtgcccaatacaagaaggatggtgctgactttgccaagtggcgctgtgtgctgaaaatcagtgagcgtacaccctctgcacttgccattctggagaacgccaacgtgctggcccgttatgccagtatctgccagcagaatggcattgtgcctattgtggaacctgaaatattgcctgatggagaccacgacctcaaacgttgtcagtatgttacagagaaggtcttggctgctgtgtacaaggccctgagtgaccatcatgtatacctggaggggaccctgctcaagcccaacatggtgaccccgggccatgcctgtcccatcaagtataccccagaggagattgccatggcaactgtcactgccctgcgtcgcactgtgcccccagctgtcccaggagtgaccttcctgtctgggggtcagagcgaagaagaggcatcattcaacctcaatgccatcaaccgctgcccccttccccgaccctgggcgcttaccttctcctatgggcgtgccctgcaagcctctgcactcaatgcctggcgagggcaacgggacaatgctggggctgccactgaggagttcatcaagcgggctgaggtgaatgggcttgcagcccagggcaagtatgaaggcagtggagaagatggtggagcagcagcacagtcactctacattgccaaccatgcctactgagtatccactccataccacagcccttggcccagccatctgcacccacttttgcttgtagtcatggccagggccaaatagctatgcagagcagagatgccttcacctggcaccaacttgtcttcctttctctcttcccttcccctctctcattgctgcacctgggaccataggatgggaggatagggagcccctcatgactgagggcagaagaaattgctagaagtcagaacaggatggctgggtctccccctacctcttccagctcccacaattttcccatgatgaggtagcttctccctgggctctccttcttgcctgccctgtctcctgggatcagagggtagtacagaagccctgactcatgccttgagtacataccatacagcaaataaatggtagcaaaacaaaaaaaaaaaaaaaaaaaaaaaaaa

SEQ ID NO: 6619 - DNA, 1058 bp, Homo sapiens; identical to SEQ ID NO: 1384

SEQ ID NO: 6620 - DNA, 1078 bp, Homo sapiens; identical to SEQ ID NO: 1385

SEQ ID NO: 6621 - DNA, 1400 bp, Homo sapiens
gcctacattacattctccttgatcgttcttgttattacgctgttttgtgaacctgtagaaaaacaagtgctttttatcttgaaattcaaccaacggaaagaatatgcatagaataatgcattctatgatgccatgtcactgtgaataacgatttcttgcagctatttagccattttgattgctgtttgatttatacttctctgttgctacgcaaaaccgatcaaagaaaagtgaacttcagttttacaatctgtatgcctaaaagcgggtactaccgtttattttactgacttgtttaaatgattcgcttttgtaagaatcagatggcattatgcttgttgtacaatgccatattggtatatgacataacaggaaacagtattgtatgatatatctataaatgctataaagaaatattgtgtttcatgcattcagaaatgattgttaaaattctcccaactggttcgacctttgcagatacccataacctatgttgagccttgcttaccagcaaagaatatttttaatgtggatatctaattctaaagtctgttccattagaagcaattggcacatctttctatactttatatacttttctccagtaatacatgtttactttaaaaattgttgcagtgaagaaaaacctttaactgagaaatatggaaaccgtcttaattttccattggctatgatggaattaatattgtattttaaaaatgcatattgatcactataattctaaaacaattttttaaataaaccagcaggttgctaaaagaaggcattttatctaaagttattttaataggtggtatagcagtaattttaaatttaagagttgcttttacagttaacaatggaatatgccttctctgctatgtctgaaaatagaagctatttattatgagcttctacaggtatttttaaatagagcaagcatgttgaatttaaaatatgaataaccccacccaacaattttcagtttattttttgctttggtcgaacttggtgtgtgttcatcagttatttgtgagggtgtttattctatatgaatattgtttcatgtttgtagggaaattgtagctaaacatttcattgtccccagtctgcaaaagaagcacaattctattgctttgtcttgcttatagtcattaaatcattacttttacatatattgctgttacttctgctttctttaaaaatatagtaaaggatgttttatgaagtcacaagatacatatatttttattttgacctaaatttgtacagtcccattgtaagtgttgtttctaattatagatgtaaaatgaaatttcatttgtaattggaaaaaatccaataaaaaggatattcatttagaaaatagctaagatctttaataaaaatttgatatgaaa

SEQ ID NO: 6622 - DNA, 1400 bp, Homo sapiens
ctgccacccggggagtatgtggtggtgccctccaccttcgagcccaacaaggagggcgacttcgtgctgcgcttcttctcagagaagagtgctgggactgtggagctggatgaccagatccaggccaatctccccgatgagcaagtgctctcagaagaggagattgacgagaacttcaaggccctcttcaggcagctggcaggggaggacatggagatcagcgtgaaggagttgcggacaatcctcaataggatcatcagcaaacacaaagacctgcggaccaagggcttcagcctagagtcgtgccgcagcatggtgaacctcatggatcgtgatggcaatgggaagctgggcctggtggagttcaacatcctgtggaaccgcatccggaattacctgtccatcttccggaagtttgacctggacaagtcgggcagcatgagtgcctacgagatgcggatggccattgagtcggcaggcttcaagctcaacaagaagctgtacgagctcatcatcacccgctactcggagcccgacctggcggtcgactttgacaatttcgtttgctgcctggtgcggctagagaccatgttccgatttttcaaaactctggacacagatctggatggagttgtgacctttgacttgtttaagtggttgcagctgaccatgtttgcatgaggcagggactcggtcccccttgccgtgctcccctccctcctcgtctgccaagcctcgcctcctaccacaccacaccaggccaccccagctgcaagtgccttccttggagcagagaggcagcctcgtcctcctgtcccctctcctcccagccaccatcgttcatctgctccgggcagaactgtgtggcccctgcctgtgccagccatgggctcgggatggactccctgggccccacccattgccaagccaggaaggcagctttcgcttgttcctgcctcgggacagccccgggtttccccagcatcctgatgtgtcccctctccccacttcagaggccacccactcagcaccaccggcctggccttgcctgcagactataaactataaccactagctcgacacagtctgcagtccaggcgtgtggagccgcctcccggctcggggaggccccggggctgggaacgcctgtgccttcctgcgccgaagccaacgccccctctgtccttccctggccctgctgccgaccaggagctgcccagcctgtgggcggtcggccttccctccttcgctccttttttatattagtgattttaaaggggactcttcagggacttgtgtactggttatgggggtgccagaggcactaggcttggggtggggaggtcccgtgttccatatagaggaaccccaaataataaaaggccccacatctgtctgtg

SEQ ID NO: 6623 - DNA, 1248 bp, Homo sapiens; identical to SEQ ID NO: 1388

SEQ ID NO: 6624 - DNA, 600 bp, Homo sapiens
aggtcacttcccattcacacatgtccgtctgctggatcaacagaatcccgatgaggacttcagctgagtatagttcaacagttttgctgacagatgggaacaatcttttttttttttttttccaactgccatctatacaattttcttacagatgtcaaaagcagtctagtttatataagcattctgttacctgtgatattttttagactgaactgctccattcctagtcttaattaccatattcagggtacgaactggagggcttgtgtgttagcttctgaattggcaattggaggcggtagtggtcgtgcctgtgtgtatcagaagggataggtatcttgcctcctttctctcaggcagtgcaaatcaccctgtggaaaaccgatggacaggaaggagtgttacacactgcttaccctgatttattcagtggttttgttttcattctggaaccatactatcaaatggcgacagactgttccgttccacccccgtgaagagtaatcatgcaccgtgtgaatagtatcaagcaggattgctttcattgtatggagcgtgaccagggtatgactcattctgacattcagatcctaagaattc

SEQ ID NO: 6625 - DNA, 451 bp, Homo sapiens; identical to SEQ ID NO: 1390

SEQ ID NO: 6626 - DNA, 1400 bp, Homo sapiens
tctttcgaggtgttgggatggtggccgatcctgataaccctttggtgctggacatcctgacgggctcttccacctcttactccttcttcccggacaagcctatcacccagtatccacatgcggtggggaagaacaccctcctcattgctgggctccaggccaggaacaatgcccgcgtcatcttcagcggctccctcgacttcttcagcgactccttcttcaactcagcagtgcagaaggcggcgcccggctcccagaggtattcccagacaggcaactatgaactagctgtggccctctcccgctgggtgttcaaggaggagggtgtcctccgtgtggggcctgtgtcccatcatcgggtgggtgagacagccccacccaatgcctacactgtcactgacctagtggagtatagcatcgtgatccagcagctctcaaatggcaaatgggtcccctttgatggcgatgacattcagctggagtttgtccgcattgatccttttgtgaggaccttcctgaagaagaaaggtggcaaatacagtgttcagttcaagttgcccgacgtgtatggtgtattccagtttaaagtggattacaaccggctaggctacacacacctgtactcttccactcaggtatccgtgcggccactccagcacacgcagtatgagcgcttcatcccctcggcctacccctactacgccagcgccttctccatgatgctggggctcttcatcttcagcatcgtcttcttgcacatgaaggagaaggagaagtccgactgaggggctagagccctctccgcacagcgtggagacggggcagggaggggggttattaggattggtggttttgttttgctttgtttaaagccgtgggaaaatggcacaactttacctctgtgggagatgcaacactgagagccaaggggtgggagttgggataatttttatataaaagaagtttttccactttgaattgctaaaagtggcatttttcctatgtgcagtcactcctctcatttctaaaatagggacgtggccaggcacggtggctcatgcctgtaatcccagcactttgggaggccgaggcaggcggctcacgaggtcaggagatcgagactatcctggctaacacggtaaaaccctgtctctactaaaagtacaaaaaattagctgggcgtggtggtgggcacctgtagtcccagctactcgggaggctgaggcaggagaaaggcatgaatccaggaggcagagcttgcagtgagctgagatcacgccattgcactccagcctgggcaacagtgttaagactctgtctcaaatataaataaataaataaataaataaaaataaagcgagatgttgccctcaaaaaaaaaaaaaaaaaaaaaaaaaaaa

SEQ ID NO: 6627 - DNA, 600 bp, Homo sapiens
gcttatgccgactatagctacgctagctcctaccaccagtacggcggcgcctacaaccgcgtcccaagcgccaccaaccagccagagaaagaagtgaccgagcccgaggtgagaatggtgaatggcaaaccaaagaaagttcgtaaacccaggactatttattccagctttcagctggccgcattacagagaaggtttcagaagactcagtacctcgccttgccggaacgcgccgagctggccgcctcgctgggattgacacaaacacaggtgaaaatctggtttcagaacaaaagatccaagatcaagaagatcatgaaaaacggggagatgcccccggagcacagtcccagctccagcgacccaatggcgtgtaactcgccgcagtctccagcggtgtgggagccccagggctcgtcccgctcgctcagccaccaccctcatgcccaccctccgacctccaaccagtccccagcgtccagctacctggagaactctgcatcctggtacacaagtgcagccagctcaatcaattcccacctgccgccgccgggctccttacagcacccgctggcgctggcctccgggacactctattag

SEQ ID NO: 6628 - DNA, 1400 bp, Homo sapiens
tattgattggggatcttggagtttttcattgtcgctattgatttttacttcaatgggctcttccaacaaggaagaagcttgctggtagcacttgctaccctgagttcatccaggcccaactgtgagcaaggagcacaagccacaagtcttccagaggatgcttgattccagtggttctgcttcaaggcttccactgcaaaacactaaagatccaagaaggccttcatggccccagcaggccggatcggtactgtatcaagtcatggcaggtacagtaggataagccactctgtcccttcctgggcaaagaagaaacggaggggatgaattcttccttagacttacttttgtaaaaatgtccccacggtacttactccccactgatggaccagtggtttccagtcatgagcgttagactgacttgtttgtcttccattccattgttttgaaactcagtatgccgcccctgtcttgctgtcatgaaatcagcaagagaggatgacacatcaaataataactcggattccagcccacattggattcatcagcatttggaccaatagcccacagctgagaatgtggaatacctaaggataacaccgcttttgttctcgcaaaaacgtatctcctaatttgaggctcagatgaaatgcatcaggtcctttggggcatagatcagaagactacaaaaatgaagctgctctgaaatctcctttagccatcaccccaaccccccaaaattagtttgtgttacttatggaagatagttttctccttttacttcacttcaaaagctttttactcaaagagtatatgttccctccaggtcagctgcccccaaaccccctccttacgctttgtcacacaaaaagtgtctctgccttgagtcatctattcaagcacttacagctctggccacaacagggcattttacaggtgcgaatgacagtagcattatgagtagtgtgaattcaggtagtaaatatgaaactagggtttgaaattgataatgctttcacaacatttgcagatgttttagaaggaaaaaagttccttcctaaaataatttctctacaattggaagattggaagattcagctagttaggagcccattttttcctaatctgtgtgtgccctgtaacctgactggttaacagcagtcctttgtaaacagtgttttaaactctcctagtcaatatccaccccatccaatttatcaaggaagaaatggttcagaaaatattttcagcctacagttatgttcagtcacacacacatacaaaatgttccttttgcttttaaagtaatttttgactcccagatcagtcagagcccctacagcattgttaagaaagtatttgatttttgtctcaatgaaaataaaactatattcatttcc

SEQ ID NO: 6629 - DNA, 600 bp, Homo sapiens
ctcggtccccgtccctgtcccccaagtcacccctcccttctgaacacagaagcctcttcctggaggccgcctgccatgactccgattccctggagcccttgaacctgtcatcgggctccaagaccaagtctccatctcttcccccaaaggccaaaaaacccaaaggcttggaaatctcagcgcccccgctggtgctctccggcaccgacatcggctccatcgccctcaacagcccagccctcccctcgggatccctcaccccagccttcttcaccgcacagacaccaaatggattgcttctgactccgagtccactgctctccagcatacatttctggagcagccttagtccagttgctccgctgagtcctgccaggctgcaagggccaagcacgctgttccagttccccacactgcttaatggccacatgccagtgccaatccccagtctggacagagctgcttctccagtactgctttcttcaaactctcagaaatcctgatgacgtctggccacaattaaggactcattaactgatgaaacaaatttgtccccacgggctagtttacctgtgtcgtgagaaggacattgtgaaactc

SEQ ID NO: 6630 - DNA, 600 bp, Homo sapiens
gacacacacagactatttttagattttcttttgccttttgcaaccaggaacagcaaatgcaaaaactctttgagagggtaggagggtgggaaggaaacaaccatgtcatttcagaagttagtttgtatatattattataatcttataattgttctcagaatcccttaacagttgtatttaacagaaattgtatattgtaatttaaaataattatataactgtatttgaaataagaattcagacatctgaggttttatttcatttttcaatagcacatatggaattttgcaaagatttaatctgccaagggccgactaagagaagttgtaaagtatgtattatttacatttaatagacttacagggataaggcctgtggggggtaatccctgctttttgtgtttttttgtttgtttgtttgtttgtttttggggggttttcttgccttggttgtctggcaaggactttgtacatttgggagtttttatgagaaacttaaatgttattatctgggcttatatctggcctctgctttctcctttaattgtaaagtaaaagctataaagcagtatttttcttgacaaaaaaaaaaaaaaaaaaa

SEQ ID NO: 6631 - DNA, 600 bp, Homo sapiens
ggtgggagacatgttcaattacttcctctctctggccattggggtctttctgttcccagccttcctcacagcctctgcctatgtgctgatgatcagaatgctgcgatcttctgccatggatgaaaactcagagaagaaaaggaagagggccatcaaactcattgtcactgtcctggccatgtacctgatctgcttcactcctagtaaccttctgcttgtggtgcattattttctgattaagagccagggccagagccatgtctatgccctgtacattgtagccctctgcctctctacccttaacagctgcatcgacccctttgtctattactttgtttcacatgatttcagggatcatgcaaagaacgctctcctttgccgaagtgtccgcactgtaaagcagatgcaagtatccctcacctcaaagaaacactccaggaaatccagctcttactcttcaagttcaaccactgttaagacctcctattgagttttccaggtcctcagatgggaattgcacagtaggatgtggaacctgtttaatgttatgaggacgtgtctgttatttcctaatcaaaaaggtctcaccacataccaccg

SEQ ID NO: 6632 - DNA, 1400 bp, Homo sapiens
gcggggaggaggacgcggtggaatgggcagcgctggagagcgaggtggcttcaataagcctggtggacccatggatgaaggaccagatcttgatctaggccctcctgtagatccagatgaagactctgacaacagtgcaatttatgtacaaggattaaatgacagtgtgactctagatgatctggcagacttctttaagcagtgtggggttgttaagatgaacaagagaactgggcaacccatgatccacatctacctggacaaggaaacaggaaagcccaaaggcgatgccacagtgtcctatgaagacccacccactgccaaggctgccgtggaatggtttgatgggaaagattttcaagggagcaaacttaaagtctcccttgctcggaagaagcctccaatgaacagtatgcggggtggtctgccaccccgtgagggcagaggcatgccaccaccactccgtggaggtccaggaggcccaggaggtcctgggggacccatgggtcgcatgggaggccgtggaggagatagaggaggcttccctccaagaggaccccggggttcccgagggaacccctctggaggaggaaacgtccagcaccgagctggagactggcagtgtcccaatccgggttgtggaaaccagaacttcgcctggagaacagagtgcaaccagtgtaaggccccaaagcctgaaggcttcctcccgccaccctttccgcccccgggtggtgatcgtggcagaggtggccctggtggcatgcggggaggaagaggtggcctcatggatcgtggtggtcccggtggaatgttcagaggtggccgtggtggagacagaggtggcttccgtggtggccggggcatggaccgaggtggctttggtggaggaagacgaggtggccctggggggccccctggacctttgatggaacagatgggaggaagaagaggaggacgtggaggacctggaaaaatggataaaggcgagcaccgtcaggagcgcagagatcggccctactagatgcagagaccccgcagagctgcattgactaccagatttattttttaaaccagaaaatgttttaaatttataattccatatttataatgttggccacaacattatgattattccttgtctgtactttagtatttttcaccatttgtgaagaaacattaaaacaagttaaatggtagtgtgcggagtttttttttcttccttcttttaaaaatggttgtttaagactttaacaatgggaaccccttgtgagcatgctcagtatcattgtggagaaccaagagggcctcttaactgtaacaatgttcatggttgtgatgttttttttttttttttaaaataaaattccaaatgtttaataaaaaaaaaaaaaaaaaaa

SEQ ID NO: 6633 - DNA, 1400 bp, Homo sapiens
ctgctttgcagaccgagattgccaacctgctgaaggagaaggaaaaactagagttcatcctggcagctcaccgacctgcctgcaagatccctgatgacctgggcttcccagaagagatgtctgtggcttcccttgatctgactgggggcctgccagaggttgccaccccggagtctgaggaggccttcaccctgcctctcctcaatgaccctgagcccaagccctcagtggaacctgtcaagagcatcagcagcatggagctgaagaccgagccctttgatgacttcctgttcccagcatcatccaggcccagtggctctgagacagcccgctccgtgccagacatggacctatctgggtccttctatgcagcagactgggagcctctgcacagtggctccctggggatggggcccatggccacagagctggagcccctgtgcactccggtggtcacctgtactcccagctgcactgcttacacgtcttccttcgtcttcacctaccccgaggctgactccttccccagctgtgcagctgcccaccgcaagggcagcagcagcaatgagccttcctctgactcgctcagctcacccacgctgctggccctgtgagggggcagggaaggggaggcagccggcacccacaagtgccactgcccgagctggtgcattacagagaggagaaacacatcttccctagagggttcctgtagacctagggaggaccttatctgtgcgtgaaacacaccaggctgtgggcctcaaggacttgaaagcatccatgtgtggactcaagtccttacctcttccggagatgtagcaaaacgcatggagtgtgtattgttcccagtgacacttcagagagctggtagttagtagcatgttgagccaggcctgggtctgtgtctcttttctctttctccttagtcttctcatagcattaactaatctattgggttcattattggaattaacctggtgctggatattttcaaattgtatctagtgcagctgattttaacaataactactgtgttcctggcaatagtgtgttctgattagaaatgaccaatattatactaagaaaagatacgactttattttctggtagatagaaataaatagctatatccatgtactgtagtttttcttcaacatcaatgttcattgtaatgttactgatcatgcattgttgaggtggtctgaatgttctgacattaacagttttccatgaaaacgttttattgtgtttttaatttatttattaagatggattctcagatatttatatttttattttatttttttctaccttgaggtcttttgacatgtggaaagtgaatttgaatgaaaaatttaagcattgtttgcttattgttccaagacattgtcaataaa

SEQ ID NO: 6634 - DNA, 600 bp, Homo sapiens
tctgtggcatcacctctgttgccttctcgcgcagcggacggctgctgctcgctggctacgacgacttcaactgcaacatctgggatgccatgaagggcgaccgtgcaggagtcctcgctggccacgacaaccgcgtgagctgcctcggggtcaccgacgatggcatggctgtggccacgggctcctgggactccttcctcaagatctggaactaatggccccacccccactgggcccaggccaggaggggccctgcccatgcccacactacaggccagggctgcggggctggcgcaatcccagcccccttccccgggccacggggccttgggtccctgccctcccacccaggtttggttcctcccggggcccccactgtggagataagaaggggatggaatgggggaagaggaggagcaggaggccctcatccttctgctgccctggggttggggcctcacccctctggagggccggaggcaggaggtggaaaccccaggggctggcttttttaaaactggttttattttaatttttattatattttcagtttttccataaaggagccaattccaactctgtaaaaaaaaaaaaaaaaaa

SEQ ID NO: 6635 - DNA, 600 bp, Homo sapiens
aatgatgggcctgtgaaggtagtggtagcagagaattttgatgaaatagtgaataatgaaaataaagatgtgctgattgaattttatgccccttggtgtggtcactgtaagaacctggagcccaagtataaagaacttggcgagaagctcagcaaagacccaaatatcgtcatagccaagatggatgccacagccaatgatgtgccttctccatatgaagtcagaggttttcctaccatatacttctctccagccaacaagaagctaaatccaaagaaatatgaaggtggccgtgaattaagtgattttattagctatctacaaagagaagctacaaacccccctgtaattcaagaagaaaaacccaagaagaagaagaaggcacaggaggatctctaaagcagtagccaaacaccactttgtaaaaggactcttccatcagagatgggaaaaccattggggaggactaggacccatatgggaattattacctctcagggccgagaggacagaatggatataatctgaatcctgttaaattttctctaaactgtttcttagctgcactgtttatggaaataccaggaccagtttatgttt

SEQ ID NO: 6636 - DNA, 600 bp, Homo sapiens
agactgttgctcaaccatcaggaaacagttgtcagaagacatcattggttctgtgtttcctacggaaataagaaacgataaatattgcactgaatgtttgtggtttggagtccctgaataataaagagggaatatatttgcagaaagtcgcatagggttttttaatgcagaattttgtcagaagacaatggcgctgcatgtttttctttgagtgcaaatgtacattgctaagatttttttaagatggcatgtgctttgaaaagaagatattgcatttttaagagtttaaaaatcttatgagtgagaaatattaaaaaaatcttattttcacctctttagaagaaataaaagatgtttctcctatctccttttctctagtatttgactgttactgtccttggcgaatcgataatcattgcatagtgactgaaaagcctaagtgcaaaaaaaaaaaaaaaaagatgttcttgtttctgaacttcgtgccatattttgttcctgatgggatcaacttaatgtttaagactttagatgtcttgtattaaaaattacacaaaaaaagtaaaactttttatacttaaaaaaaaaaaaaaaaaaaaa

SEQ ID NO: 6637 - DNA, 947 bp, Homo sapiens; identical to SEQ ID NO: 1402

SEQ ID NO: 6638 - DNA, 411 bp, Homo sapiens; identical to SEQ ID NO: 1403

SEQ ID NO: 6639 - DNA, 1400 bp, Homo sapiens
actacaagggagagacggagaaacacgagtcccagagagattatgccaagggctttggtggccagtatggaatccagaaggaccgagtggataagagcgctgtcggcttcaatgaaatggaggccccgaccacagcttataagaagacgacgcccatagaagccgcttctagtggtgcccgtgggctgaaggcgaaatttgagtccatggctgaggagaagaggaagcgagaggaagaggagaaggcacagcaggtggccaggaggcaacaggagcgaaaggctgtgacaaagaggagccctgaggctccacagccagtgatagctatggaagagccagcagtaccggccccactgcccaagaaaatctcctcagaggcctggcctccagttgggactcctccatcatcagagtctgagcctgtgagaaccagcagggaacacccagtgcccttgctgcccattaggcagactctcccggaggacaatgaggagcccccagctctgccccctaggactctggaaggcctccaggtggaggaagagccagtgtacgaagcagagcctgagcctgagcccgagcctgagcccgagcctgagaatgactatgaggacgttgaggagatggacaggcatgagcaggaggatgaaccagagggggactatgaggaggtgctcgagcctgaagattcttctttttcttctgctctggctggatcatcaggctgcccggctggggctggggctggggctgtggctctggggatctcagctgtggctctatatgattaccaaggagagggaagtgatgagctttcctttgatccggacgacgtaatcactgacattgagatggtggacgagggctggtggcggggacgttgccatggccactttggactcttccctgcaaattatgtcaagcttctggagtgactagagctcactgtctactgcaactgtgatttcccatgtccaaagtggctctgctccaccccctccctattcctgatgcaaatgtctaaccagatgagtttctggacagacttccctctcctgcttcattaagggcttggggcagagacagcatggggaaggaggtccccttccccaagagtcctctctatcctggatgagctcatgaacatttctcttgtgttcctgactccttcccaatgaacacctctctgccaccccaagctctgctctcctcctctgtgagctctgggcttcccagtttgtttacccgggaaagtacgtctagattgtgtggtttgcctcattgtgctatttgcccactttccttccctgaagaaatatctgtgaaccttctttctgttcagtcctaaaattcgaaataaagtgagactatggttcacctgtaaaaaaaaaaaaggaatt

SEQ ID NO: 6640 - DNA, 600 bp, Homo sapiens
aaggaatttgaggggaagactttagtgtcagtcaccaaagaaggcctggaacttccagaggatgaagaagagaaaaagaagcaggaagagaaaaaaacaaagtttgagaacctctgcaaaatcatgaaagacatattggagaaaaaagttgaaaaggtggttgtgtcaaaccgattggtgacatctccatgctgtattgtcacaagcacatatggctggacagcaaacatggagagaatcatgaaagctcaagccctaagagacaactcaacaatgggttacatggcagcaaagaaacacctggagataaaccctgaccattccattattgagaccttaaggcaaaaggcagaggctgataagaacgacaagtctgtgaaggatctggtcatcttgctttatgaaactgcgctcctgtcttctggcttcagtctggaagatccccagacacatgctaacaggatctacaggatgatcaaacttggtctgggtattgatgaagatgaccctactgctgatgataccagtgctgctgtaactgaagaaatgccaccccttgaaggagatgacgacacatcacgcatggaagaagtagactaa

SEQ ID NO: 6641 - DNA, 600 bp, Homo sapiens
tgcggccctccacccccccctccccgagtgtgcccaggaactcagagaggcgcggccccggggattcccccccgaggtgcccaggactcggaaggggcgccccggactcgacaagctggaccccctgctcccgggggcgagcgcatgacccccccgccctcgcgctgcctctttcccccgcgcggccgccccgtgttgcacaaacccgcgcgtctcggctgcccctttgtacaccgcgccgcaagggggctccgagggggcgcacgtcaaaccctgcctttcctttacttttactttttttttttctttggaagagagaagaacagagtgttcgattctgccctatttatgtttctactcggggaacaaacgttggttgtgtgtgtgtgtgttttcttgtgttggttttttaaagaaatgggaagaagaaaaaaaaattctccgcccctttcctcgatctcgctcccccttcggtctttcgaccgtccccccctcccctttttttgttctgttttgttttgttttgctacgagtccacattcctgtttgtaatccttggttcgcccggttttctgttttcagtaaagtctcgttacgcca

SEQ ID NO: 6642 - DNA, 1400 bp, Homo sapiens
  misc_feature (569)..(569): n is a, c, g, or t
  misc_feature (893)..(893): n is a, c, g, or t
  misc_feature (896)..(896): n is a, c, g, or t
  misc_feature (966)..(966): n is a, c, g, or t
ctaaagatcgcctggctcagtcagacatggccaaacgtgtagccaacctgctgcgcgtggtgctgagtctgcatcatcctcctgatagaacctccgactcaacaccagaccctcagcgagtccctttgcgcctcttggctccccacattggccggcttcccatgcctgaggactatgccatggacgaactgcgcagccttacccagtcctatctgcgagaactggctgttgggagcctgtgagccccaggcactttgcatcacagtcacatgcccattcacaccacacagaggttccctgccttgtttggattggcactgtttgccattctctgggttggctgtggcatctaccctcccgtcccctgctgccagaagcagcatcctccacttgttcagggcttttcttaatactgaacgtagcataagggcttctggaacccagaagaggagacagtttaccatcctcaagatcattcagtgtttttcctttaaaaaaatggtcaataaagctcctttggcagaatcccccaaagaaccagggtattctttttccatccttagccattntggatcttgtgaccttccatgccaaccagtttccttattcttaccatggccgttttatattaggactccttaggaggagtgagacaggtgataatggatccttaacagatgaactatccacagaaggaagagggatccgtctcttaagtaattggttagttaacactgaattttggaggcaaaggagggttggcctgagttaggaaacaaaatgggatctttctgacacacttagggcagaagtgaatgcctgtcacggagggattgatcttcagggctgtttttgttcctgcctttagagttccatgaacaccatacctttgntantactatgtgcaggaacccttggtcacatgtgacatgtctgtgggaagctcccagagtttggtttggtccntggttttcagtcttgctgagactctgtctggatttgcctgcagagtttggataaaaaataacaggttggtaaccttccaagttcatcccatgttagctccaaagcatttcccaccctccatctaccccttccagaaggcaaaacaaaccatgactgaggcaggcatggagttgggcgttaggggcaggcagagggcctttgctacactgctgacagctatagggagccccaggtaatggcatgagatagctggtgttagggctatctcaggcaatatggccagcacctgggtctttatgcatgaagataatgtaaaggtttttattaaaaaatatatatatgtataaataaatgatctagatattttcctctttttctgaagctactttcttaaaaaataaataaaatgtttatagcattcctattaaaaaaaa

SEQ ID NO: 6643 - DNA, 600 bp, Homo sapiens
ttagtagaaaacagtctggatgctggtgccactaatgttgatctaaagcttaaggactatggagtggatctcattgaagtttcaggcaatggatgtggggtagaagaagaaaacttcgaaggctttactctgaaacatcacacatgtaagattcaagagtttgccgacctaactcaggtggaaacttttggctttcggggggaagctctgagctcactttgtgcactgagtgatgtcaccatttctacctgccgtgtatcagcgaaggttgggactcgactggtgtttgatcactatgggaaaatcatccagaaaaccccctacccccgccccagagggatgacagtcagcgtgaagcagttattttctacgctacctgtgcaccataaagaatttcaaaggaatattaagaagaaacgtgcctgcttccccttcgccttctgccgtgattgtcagtttcctgaggcctccccagccatgcttcctgtacagcctgtagaactgactcctagaagtaccccaccccacccctgctccttggaggacaacgtgatcactgtattcagctctgtcaagaatggtccaggttcttctagatga

SEQ ID NO: 6644 - DNA, 600 bp, Homo sapiens
ccccggcctctcgggagccggggggcagaggctgcggagccccaggagggtctatcagccacagtctctgcatgtttccaagagcaacaggaaatgaacacattgcaggggccagtgtcattcaaagatgtggctgtggatttcacccaggaggagtggcggcaactggaccctgatgagaagatagcatacggggatgtgatgttggagaactacagccatctagtttctgtggggtatgattatcaccaagccaaacatcatcatggagtggaggtgaaggaagtggagcagggagaggagccgtggataatggaaggtgaatttccatgtcaacatagtccagaacctgctaaggccatcaaacctattgatcggaagtcagtccatcagatttgctctgggccagtggtactgagtctaagcactgcagtgaaggagttagtagaaaacagtctggatgctggtgccactaatattgatctaaagcttaaggactatggagtggatctcattgaagtttcagacaatggatgtggggtagaagaagaaaactttgaaggcttaatctctttcagctctgaaacatcacacatgtaa

SEQ ID NO: 6645 - DNA, 600 bp, Homo sapiens
tgtctgtctggagaactgctcattgcaagagcgaacagtgacagggactgttaaagtcaaaaatgtgagttttgagaagaaagttcagatccgtatcactttcgattcttggaaaaactacactgacgtagactgtgtctatatgaaaaatgtgtatggtggcacagatagtgataccttctcatttgccattgacttaccccctgtcattccaactgagcagaaaattgagttctgcatttcttaccatgctaatgggcaagtcttttgggacaacaatgatggtcagaattatagaattgttcatgttcaatggaagcctgatggggtgcagacacagatggcaccccaggactgtgcattccaccagacgtctcctaagacagagttagagtcaacaatctttggcagtccgaggctggctagtgggctcttcccagagtggcagagctgggggagaatggagaacttggcctcttatcgatgaattaagcaacaatgtaactggtcttgacttgtcatattcccccatgcaatcctaggtctgtattgctcaattttaggaagcctttgctactccatcagtaggtttagatttga

SEQ ID NO: 6646 - DNA, 600 bp, Homo sapiens
agagctcagcgacttttattgcagatgtctttagaggctcttggacacacagtgtcttcctgtttctcatcctccttgcaggttggactcttcacagaaattgggcccatgtcttgcttcatctctcgacattccatcccttcagagatggagtttgatcctaactccaacccaccatgttacaagacaatggatgaggatattgtgattcagcaggacgatgagatccgcttaaagattgtggggacccgtgtggacaagaatgacatttttgctattggctccctgatggacgattacttggggcttgtaagctgagcctggtggcctcctacccttggtcctactctaggaagtgtgattgtcacacttatcatgttgtccagaggtccagtctggctgctgttgtggaggcaaggaaggcaactcatcccagaaggcatctggtgcttcttgtagcttaactactgcctcctcatttttcagtatgtgttctaagtataaaaagtccttggttctcaaaaaaaaaaaaaaaaaaaaaaaaaaaaaaaaaaaaaaaaaaaaaaaaaaaaaaaaaaaaaaaaaaaaaaaaaaaaaaaa

SEQ ID NO: 6647 - DNA, 1400 bp, Homo sapiens
actccagttttcaaatcatgtttgaatctacattcacttttttttgttttcttttttgagacggagtctcgctctgccgcccaggctggagtgcagtggcgcgatctcggctcactgcaagctctgcctcccaggttcacaccattctcctgcctcagcctcccgagtagctgggactacaggtgcccaccaccacgcctggctagttttttgtatttttagtagagacgcagtttcaccgtgttagccaggatggtctcgatctcctgaccttgtgatctgcccgcctcggcctcccaaagtgctgggattacaggtgtgagccaccgcgcccagcctacattcacttctaaagtctatgtaatggtggtcattttttcccttttagaatacattaaatggttgatttggggaggaaaacttattctgaatattaacggtggtgaaaaggggacagtttttaccctaaagtgcaaaagtgaaacatacaaaataagactaatttttaagagtaactcagtaatttcaaaatacagatttgaatagcagcattagtggtttgagtgtctagcaaaggaaaaattgatgaataaaatgaaggtctggtgtatatgttttaaaatactctcatatagtcacactttaaattaagccttatattaggcccctctattttcaggatataattcttaactatcattatttacctgattttaatcatcagattcgaaattctgtgccatggcgtatatgttcaaattcaaaccatttttaaaatgtgaagatggacttcatgcaagttggcagtggttctggtactaaaaattgtggttgttttttctgtttacgtaacctgcttagtattgacactctctaccaagagggtcttcctaagaagagtgctgtcattatttcctcttatcaacaacttgtgacatgagattttttaagggctttatgtgaactatgatattgtaatttttctaagcatattcaaaagggtgacaaaattacgtttatgtactaaatctaatcaggaaagtaaggcaggaaaagttgatggtattcattaggttttaactgaatggagcagttccttatataataacaattgtatagtagggataaaacactaacaatgtgtattcattttaaattgttctgtatttttaaattgccaagaaaaacaactttgtaaatttggagatattttccaacagcttttcgtcttcagtgtcttaatgtggaagttaacccttaccaaaaaaggaagttggcaaaaacagccttctagcacacttttttaaatgaataatggtagcctaaacttaatatttttataaagtattgtaatattgttttgtggataattgaaataaaaagttctcattgaatgcacc

SEQ ID NO: 6648 - DNA, 600 bp, Homo sapiens
ccgccgagtaaggcgcgagcggaacaagctggctgcggccaagtgcaggaaccggaggaaggaactgaccgacttcctgcaggcggagactgacaaactggaagatgagaaatctgggctgcagcgagagattgaggagctgcagaagcagaaggagcgcctagagctggtgctggaagcccaccgacccatctgcaaaatcccggaaggagccaaggagggggacacaggcagtaccagtggcaccagcagcccaccagccccctgccgccctgtaccttgtatctccctttccccagggcctgtgcttgaacctgaggcactgcacacccccacactcatgaccacaccctccctaactcctttcacccccagcctggtcttcacctaccccagcactcctgagccttgtgcctcagctcatcgcaagagtagcagcagcagcggagacccatcctctgacccccttggctctccaaccctcctcgctttgtgaggcgcctgagccctactccctgcagatgccaccctagccaatgtctcctccccttcccccaccggtccagctggcctggacagtatcccacatccaactccagc

SEQ ID NO: 6649 - DNA, 1400 bp, Homo sapiens
tgagcccgaatcgggcactgtgtggagccccctggagctgagatcaggatgttccgcttcatgagggacgtggagcctgaggatcccatgttcctgatggatccctttgctattcaccgtcagcatatgagccgtatgttgtcaggtggctttggatatagccccttcctcagcatcacagatggcaacatgccagggaccaggcctgccagccgccggatgcagcaggctggagctgtctccccctttgggatgctgggaatgtcgggtggtttcatggacatgtttgggatgatgaatgacatgattggaaacatggaacacatgacagctggaggcaattgccagaccttctcatcttccactgtcatctcctactccaatacgggtgatggtgcccccaaggtctaccaagagacatcagagatgcgctcggcaccaggcgggatccgggagacacggaggactgttcgggattcagacagtggactggagcagatgtccattgggcatcacatccgggacagggctcacatcctccagcgctcccgaaaccatcgcacgggggaccaggaggagcggcaggactatatcaacctggatgagagtgaggccgcagcgtttgatgacgagtggcggcgggagacctcccgattccggcagcagcgtcccctggagtttcggcggcttgagtcctcaggggctgggggacgaagggcggaggggcctccccgcctggccatccagggacctgaggactccccttcccgacagtcccgccgctatgactggtgaggccccgggccctcagcctctcttgtacaggctgagaggctgagaaatcatcccctgaataactttttcctctcgattcccatccccaatttaatattaaattaacaggcaagccggcccccacctctccctgggggtctcagggagaacctttcacggcaccctttccctaccttttccttctttaatctcctggtttaccattgatgacttcgcctctgcatctactgacttgatttttcattctgccactccatcttcaaaccccctcacctttcccatcctactcctgccatgcattgaagggtcaatgcattttggggtgagctctgggtttaggggccccctccatccctcagctaccctggatctttgcccacctcttcctcagagcccccactgaggggccgtagccctatctagggctgtggaaggagcagactggttcctaactctctccctcctcctgcccacacacatcaaaagaatcttccctacacccttctctgcctttattttttgatttgtgcaacttgtaactaggtgtttatggaataaaggagaatggaaaaaagaaaaaaaaaaaaaaaaaaaaaaaaaaaaaa

SEQ ID NO: 6650 - DNA, 600 bp, Homo sapiens
agtaattttgcaactttcaagtgcgttctttagaccaatgcattgcgtttctttccctgcttttgagatagtaggaagagttcttggtggtgtccccccccttcaattcttcagttgtatagtagttatagggaagatatgggtgtttttctttattattacttttttttttctgcaggtcagtaaaaggatttaagttgcactgacaaaaataccaaaataaaagtgtatttttaagttcccatttgaaattgctggcgctgctggccggatgcatttttgagtttgtattagttgataaattaacagtaataacaagattgtatgaaccgcatggtgcttgcagttttaaatattgtggatatttgtcctgcatcagaaacgagctttggtttttacagattcaactgtgttgaaatcaaacctgccgcaacagaaattgtttttatttcatgtaaaataagggatcaatttcaaaccctgcttatgatatgaaaatattaaaacctagtctattgtagttttattcagactggtttctgttttttggttattaaaatggtttcctattttgcttattaaaaaaaaaaaaaaaaaaaa

SEQ ID NO: 6651 - DNA, 1400 bp, Homo sapiens
tgtttttactttgtcctttgctatctgtgttatgactcaatgtggatttgtttatacacattttatttgtatcatttcatgttaaacctcaaataaatgcttccttatgtgattgcttttctgcgtcaggtactacatagctctgtaaaaaatgtaatttaaaataagcaataattaaggcacagttgattttgtagagtattggtccatacagagaaactgtggtcctttataaatagccagccagcgtcaccctcttctccaatttgtaggtgtattttatgctcttaaggcttcatcttctccctgtaactgagatttctaccacacctttgaacaatgttctttcccttctggttatctgaagactgtcctgaaaggaagacataagtgttgtgattagtagaagctttgtaatcataacacaatgagtaattcttgtataaaagttcagatacaaaaggagcactgtaaaactggtaggagctatggtttaagagcattggaagtagttacaactcaaggattttggtagaaaggtatgagtttggtcgaaaaattaaaatagtggcaaaataagatttagttgtgttttctcagagccgccacaagattgaacaaaatgttttctgtttgggcatcctgaggaagttgtattagctgttaatgctctgtgagtttagagaaaagtcttgatagtaaatctagtttttgacacagtgcatgaactaagtagttaaatatttacatattcagaaaggaatagtggaaaaggtatcttggttatgacaaagtcattacaaatgtgactaagtcattacaaatgtgactgagtcattacagtggaccctctgggtgcattgaaaagaatccgttttatatccaggtttcagaggacctggaataataataagctttggattttgcattcagtgtagttggattttgggaccttggcctcagtgttatttactgggattggcatacgtgttcacaggcagagtagttgatctcacacaacgggtgatctcacaaaactggtaagtttcttatgctcatgagccctccctttttttttttaatttggtgcctgcaactttcttaacaatgattctacttcctgggctatcacattataatgctcttggcctcttttttgctgctgttttgctattcttaaacttaggccaagtaccaatgttggctgttagaagggattctgttcattcaacatgcaactttagggaatggaagtaagttcatttttaagttgtgtggtcagtaggtgcggtgtctagggtagtgaatcctgtaagttcaaatttatgattaggtgacgagttgacattgagattgtccttttcccctgatcaaaaaaatgaataaagcctttttaaacg

SEQ ID NO: 6652 - DNA, 1400 bp, Homo sapiens
actttctgtggctcaattacgaggagcactggtatatgagcttgtggattctaaaatcattccttttaatattcaagactatgcagaagctttgaaaaactatgcagcaagtatctataatctatctaagaaacatgatcaacaattaacagaccatggagtatcatttgactccttattttctgctgtgaaaaacttctcagaggctgcttcagattttcataaacgacttatacaagttgatcttaacaatcccattgcagtgagaatgatgaatgaccaactgatgctcctggaaagagcattcatcgatcctcttggtttaccaggaaagctgttctataggcacatcatatttgctccaagtagccacaacaaatatgctggagaatcatttcctggaatctatgatgctatctttgatattgaaaataaagccaactctcgtttggcctggaaagaagtaaagaaacatatttctattgcagcttttacaattcaagcagcagcaggaactctgaaagaagtattatagaaggtctcaagtggctagccattaaaggtgttgctaaaagtctgaggataaaattcacctttctgataacttatgaagccagggtgttctaaactcttttcatgtcatgttttgattataggctttggtcttttcatctgcaaagccttttttttttttgctctttaaaagttaataattatattagcaaagtgttaatctaatgaagtaaaaaactcctgtgtggcagaaagtaaaagaaaattccctaaattatagcaaggaacatgaattctcagacattgtgagtgtgggaatgtaaaatggtaaaatcacttttgaaaacagtttggcagtttcctataaagttaaacatacacttttactttaggactccagaattccacttctagttatttattcaagagaaggaaaaacaatgatcacagcaatacttgtatgcatgttcattgcaacttaaaagcgtaaaaaccccaaatgtccatccacagacgaatgtataaactgtggtatccattacacaatagactacttactactcagcaataaaaatgaagtaactttcaataaatgcaatattattggcagacattgttgaaggaaaaaagccagacaaacaactacataaaatatgtttctatttagatgaagtggcaaactaatctgtagtgttaaaaattagattagtgattgcctgggccaagtggcaggttggggaggatggctgcaaagaagtatgaggaaactttctccaatagatgagaattttccgtatcttgatctgagtggcaaattgtaaacttaaaatatatataaaatttattgaaagaaaattaagcctcaataaacgtgattataaaaaaaa

SEQ ID NO: 6653 - DNA, 1157 bp, Homo sapiens; identical to SEQ ID NO: 1418

SEQ ID NO: 6654 - DNA, 1400 bp, Homo sapiens
cagctcctggttcccagtatggcacaatgaccaggcagatatctcgacacaactctactacttcttcgacatcttctggtggatacagacgaactccctctgtgactgctcaattttctgctcagcctcatgttaatggaggtccactttattctcaaaattcaatttctattgctccaccccctccccctatgcctcagttgactccacagatacctctcacaggcttcgtggccagggtgcaggaaaacattgctgatagtccaactccaccgccaccacctccaccagatgacattcccatgtttgatgactttccacctcccccaccaccaccaccagtggattatgaagatgaggaggctgcagtagttcagtataatgatccatatgcagatggggatcctgcttgggcccccaagaattatattgagaaagttgttgcaatatatgattatacaaaagacaaggatgatgagctgtcatttatggagggtgcaatcatttatgttataaagaagaatgatgatggctggtatgaaggagtctgcaatcgagtgactggtctgttccctgggaactatgttgaatcaatcatgcactatactgattaatttttttttttcttttgaagtagattcttattactcagtcatactgtgggactattatggttaacagaactgtcttaatatgttttaaaatgtgcccatattttcagaacatgctgttttattggtaaattgaatgtctacctgtaagcataaatctttgaggcagtttatgtattgctgaatagcaatttatacaagaagctgtccataactgattatgcttatgtacttacttacacatttttaactttatgaccagcctaaatattctggggggagtggggtataatatttaacgaatcatgattcaggttgtaccattacatgtttcagtgcagcatggttactaacgctatgtcagactaatattaaaatcagaaaatttaaatgctggtgctggtcagactttttttgttagattctctcatttaaaaaaaatactgtttgtttaaagcatgcataaaaatttatgtattgaaatatacttaaaaattcaagatgcttcccatttgtgtaatatttacctggaggactccgtacttaggtgtcttaacgtggattgggtttcccaggtttccatgtggaacaagccaaaagaggattatttgtaatgttgtaatttgtacctaagttttttaatgagtggaatttgcattataaactttttccatttataaaaacataagtggacccaaggtttttgtcctttccttcactgatttgcttttaaaaaaataaaagataatgatttattggaaaaaaaaaaaaaaaaaaaaaaaaaaaaaa

SEQ ID NO: 6655 - DNA, 600 bp, Homo sapiens
ctcctctgttttacatactcattagtaagtgggaggtccactggggcaacagacactgccacaatttcagtgttgtgttcagccaaggggacggtctggacaggcagcttaagtgtgagtttagtcacaactcctgagtgtcccgctctcctgcttacctaggaggtgagtgccaggaaaatacaccaaatgcttctagtattgtttccccacttaaaatagtcctgcttaaattcacatggtgtggtctgatgttctgagagcatcaggaaatacaacccttttgcccatttacccttctccccggatcccaaggtggtctgttgctctggcttcctttcattgtcttaggccttcatggagtggatgctgcctcctcctggctgtttttgtgcctgtttgaagctactgctgcctccatttctgggaaagacctttgagagcctagcccaggcctaagggctatgtttggtaccagtgttttgtctttagcttttctatgtgattgtgccgtcattctgttttaagctcatggatcaatggatttgtttacaatgtgatattttctattaaatccagtattttcaaaaaaaaaaaaaa

SEQ ID NO: 6656 - DNA, 600 bp, Homo sapiens
acctcggatacccaggacagcatgtccctgctcttccgcctgctcaccaagctctggatctgctgtcgcgatgagggcccagcgagcgagccggacgaggcgctggtggatgaatgctgcctgctgcccagccagctgcttatccccagcctggactggctgccagccagcgacggcctggtcagccgcctgcagcccaagcagccccttcgtctgcagtttggccgggcgcccacgctgcctggcagtgctgccaccctgcagctcgacggcctcgccagggccccaggccagcccaagatcgaccacctgcggaggctgcaccttggcgcttgccccacggaggaatgcaaggcctgcaccaggtgcggctgtgtcaccatgctcaagtcgcccaacagaaccacggcggtgaagcagtgggagcagcgctggatcaagaattgcctggctgttgaaggccgtgggccggacgcctgcgtgaccagcagagcttctgaggaagcccctgcctttgtccagctgggcccgcagtccacacaccactctcccaggacccccagatccctggaccatctgcatccagaggaccgtccgtga

SEQ ID NO: 6657 - DNA, 600 bp, Homo sapiens
tgggatgaactgggggacaggtctgcgctgcagtgggatctggctgctctgcctcctttcccaccccagctgaccatgagactttgctgagaagtggaggccccaggacaggctggctggctggctggctgcttgacccagtgtgactctccttcactgagtgataccctgctccgggcccatgccccaaggagcccttcagagcccacactgccagtcgaggcctggctggaggctggccacagtggaaattctgccgagcctcttgtcccttccctgctctgctgcatggggccccatggctttggctggccactgagggtagggtgtggaggtgtggaggccccctgaggagctgcggcggcccaggtacgaagctgcaactctgcgcgcagtgggcgagatctcatcagccccaggctgcaggtgaggcttcaggggatgctgggccccactgcccctccgctgccttgccctccatccttcctctgttccttctggccgggcaccacagcactggggctcacctcttggttgatcctcttgtactgggagaggtgccttttgtatccccaattaaaggtagaaaaccaccctgct

SEQ ID NO: 6658 - DNA, 600 bp, Homo sapiens
agcccagtgggaccttatttttcaagtggaacctttaatccagtgtccctgtgggccaatcccaagtatgtaagagcctggaaaggtggaactggggactgcaagatgggagggaattacggctcatctctttttgcccaatgtgaagacgtagataatgggtgtcagcaggtcctgtggctctatggcagagaccatcagatcactgaagtgggaactatgaatctttttctttactggataaatgaagatggagaagaagaactggcaactcctccactagatggcatcattcttccaggagtgacaaggcggtgcattctggacctggcacatcagtggggtgaatttaaggtgtcagagagatacctcaccatggatgacttgacaacagccctggaggggaacagagtgagagagatgtttagctctggtacagcctgtgttgtttgcccagtttctgatatactgtacaaaggcgagacaatacacattccaactatggagaatggtcctaagctggcaagccgcatcttgagcaaattaactgatatccagtatggaagagaagagagcgactggacaattgtgctatcctga

SEQ ID NO: 6659 - DNA, 1400 bp, Homo sapiens
ggcacactccttgttcctggacatccacccggtcacgggaatccccatgaactgctctgtgaaactgcagctgagcctctacatgaaatctgtcgcaggcattggacaaactgggaagattgagcctgtggtcctgccgctgctctggtttgcagagagcggggccatggagggggagactcttcacacattctacactcagctggtgttgatgcccaaggtgatgcactatgcccagtacgtcctcctggcgctgggctgcgtcctgctgctggtccctgtcatctgccaaatccggagccaagagaaatgctatttattttggagtagtagtaaaaagggctcaaaggataaggaggccattcaggcctattctgaatccctgatgacatcagctcccaagggctctgtgctgcaggaagcaaaactgtagggtcctgaggacaccgtgagccagccaggcctggccgctgggcctgaccggccccccagcccctacaccccgcttctcccggactctcccagcagacagccccccagccccacagcctgagcctcccagctgccatgtgcctgttgcacacctgcacacacgccctggcacacatacacacatgcgtgcaggcttgtgcagacactcagggatggagctgctgctgaagggacttgtagggagaggctcgtcaacaagcactgttctggaaccttctctccacgtggcccacaggctgaccacaggggctgtgggtcctgcgtccccttcctcgggtgagcctggcctgtcccgttcagccgttgggccaggcttcctcccctccaaggtgaaacactgcagtcccggtgtggtggctccccatgcaggacgggccaggctgggagtgccgccttcctgtgccaaattcagtggggactcagtgcccaggccctggcacgagctttggccttggtctacctgccaggccaggcaaagcgcctttacacaggcctcggaaaacaatggagtgagcacaagatgccctgtgcagctgcccgagggtctccgcccaccccggccggactttgatccccccgaagtcttcacaggcactgcatcgggttgtctggcgcccttttcctccagcctaaactgacatcatcctatggactgagccggccactctctggccgaagtggcgcaggctgtgcccccgagctgcccccaccccctcacagggtccctcagattataggtgcccaggctgaggtgaagaggcctgggggccctgccttccgggcgctcctggaccctggggcaaacctgtgacccttttctactggaatagaaatgagttttatcatctttgaaaaataattcactcttgaagtaataaacgtttaaaaaaatggaaaaaaaaaaaaaa

SEQ ID NO: 6660 - DNA, 600 bp, Homo sapiens
gcaaactgctacgaggaggtcaaggaccgctgcaccctggcagagaagctggggggcagtgcggtcatctccctggagggcaagcctttgtgagccccttctggccccctgcctggagcatctggcagccccacacctgcccttgggggttgcaggctgcccccttcctgccagaccggaggggctggggggatcccagcagggggaggcaatcccttcaccccagttgccaaacagaccccccaccccctggattttccttctccctccatcccttgacggttctggccttcccaaactgcttttgatcttttgattcctcttgggctgaagcagaccaagttccccccaggcaccccagttgtgggggagcctgtattttttttaacaacatccccattccccacctggtcctcccccttcccatgctgccaacttctaaccgcaatagtgactctgtgcttgtctgtttagttctgtgtataaatggaatgttgtggagatgacccctccctgtgccggctggttcctctcccttttcccctggtcacggctactcatggaagcaggaccagtaagggaccttcgattaaaaaaaaa

SEQ ID NO: 6661 - DNA, 600 bp, Homo sapiens
ctatcacatcacaagataatgctggctccaaacttcctttctgtgcctcatcatgcaaggatcttttttccctcttacaaaaacaggtaaaaagcctcacccagatgacccccatccctcataccatggagtcatgagctgtctgggaagaatggacgtgctgggaccaactcaagaccttgttttgctgtcttcatcatcttacctgtgcttggcccacagtctggctcatgatgtgggctcagtaatgtgcgagaaagtgaaaatgccactctctccaccccattttacagaggagaacaccaaggcccagaggaagttaagggagagtcaatgggcagagccagggctaggccctggtggtgtgtggagcacccaggcagacccagtcctggttgggatcacacccacgggtgctactgcacgtaacactcctccttaggcctggaggccaaggtgtgggtccccacgcctgatctttgaaaacactacacagggctgctgtcacttcccagggcccaggcctcagcccaggcctcgggaccaactctttgtataacctacctgaatgtattaaaaactaattttggaaaaaaaaaa

SEQ ID NO: 6662 - DNA, 1400 bp, Homo sapiens
agcgccagggacaccgcacagattttccgagtgaacctgcggacgctgcgcggctactacaatcagagcgaggccgggtctcacaccctgcagtggatgcatggctgcgagctggggcccgacaggcgcttcctccgcgggtatgaacagttcgcctacgacggcaaggattatctcaccctgaatgaggacctgcgctcctggaccgcggtggacacggcggctcagatctccgagcaaaagtcaaatgatgcctctgaggcggagcaccagagagcctacctggaagacacatgcgtggagtggctccacaaatacctggagaaggggaaggagacgctgcttcacctggagcccccaaagacacacgtgactcaccaccccatctctgaccatgaggccaccctgaggtgctgggccctgggcttctaccctgcggagatcacactgacctggcagcaggatggggagggccatacccaggacacggagctcgtggagaccaggcctgcaggggatggaaccttccagaagtgggcagctgtggtggtgccttctggagaggagcagagatacacgtgccatgtgcagcatgaggggctacccgagcccgtcaccctgagatggaagccggcttcccagcccaccatccccatcgtgggcatcattgctggcctggttctccttggatctgtggtctctggagctgtggttgctgctgtgatatggaggaagaagagctcaggtggaaaaggagggagctactctaaggctgagtggagcgacagtgcccaggggtctgagtctcacagcttgtaaagcctgagacagctgccttgtgtgcgactgagatgcacagctgccttgtgtgcgactgagatgcaggatttcctcacgcctcccctatgtgtcttaggggactctggcttctctttttgcaagggcctctgaatctgtctgtgtccctgttagcacaatgtgaggaggtagagaaacagtccacctctgtgtctaccatgacccccttcctcacactgacctgtgttccttccctgttctcttttctattaaaaataagaacctgggcagagtgcggcagctcatgcctgtaatcccagcacttagggaggccgaggagggcagatcacgaggtcaggagatcgaaaccatcctggctaacacggtgaaaccccgtctctactaaaaaatacaaaaaattagctgggcgcagaggcacgggcctgtagtcccagctactcaggaggcggaggcatggagaatggcgtcaacccgggaggcggaggttgcagtgagccaggattgtgcgactgcactccagcctgggtgacagggtgaaacgccatctcaaaaaataaaaattaaaaaataaaaaaagaacc

SEQ ID NO: 6663 - DNA, 1198 bp, Homo sapiens; identical to SEQ ID NO: 1428

SEQ ID NO: 6664 - DNA, 600 bp, Homo sapiens
taccaccaccccacccccgcagtctcgtccaatttctatagcaccgtgggcaggaacggcgtcctgccacaggctttcgaccagtttttcgagacagcctacggcaccccggaaaacctcgcctcctccgactaccccggggacaagagcgccgagaaggggcccccggcggccacggcgacctccgcggcggcggcggcggctgcaacgggcgcgccggcaacttcaagttcggacagcggcggcggcggcggctgccgggagacggcggcggcagcagaggagaaagagcggcggcggcgccccgagagcagcagcagccccgagtcgtcttccggccacactgaggacaaggccggcggctccagtggccaacgcacccgcaaaaagcgctgcccctataccaagtaccagatccgagagctggaacgggagttcttcttcagcgtctacattaacaaagagaagcgcctgcaactgtcccgcatgctcaacctcactgatcgtcaagtcaaaatctggtttcagaacaggagaatgaaggaaaaaaaaattaacagagaccgtttacagtactactcagcaaatccactcctctaa

SEQ ID NO: 6665 - DNA, 600 bp, Homo sapiens
ttatgaagtttatttcgaaatccatagtcatctaagaatgaatacctgtctgccatgtatttcaatcttagtgagccaaaattgtttgtttgttactacagaatagagatgactgttttttggcacagccctatggaatttgcaatctgtgattgccttgtaaaaaggagagtgcatatggcactgcattaaacgtgtggtgtttctagtcaatgatattggtgagcacaatgtattcatttaatggcatagaccataccagacctaatttgcaagtattgggtcttcaaacttcaagtgcaatgtattatgaaaaccaatctgagccttgtatctcttaaatatttattccttctaacgtgtgagatgtcccgagagaagggttctccattcatttcagtgctgcctggaggaaactcggcaatgatttcttcagttgtgaagttcctttcgggttacaacctccactggaaccctcaaccttcgaaatactccagttttgggggttggggccatttacttataaatttaccgccgggtttttggaatctacatgtcttgggggcgggctcaaattcttcgaaagtggttggattaaaa

SEQ ID NO: 6666 - DNA, 1400 bp, Homo sapiens
caggacaacatcgcctgcacctcaccccatgtgctcaagggtacgccgctgagccgcctgccgccactgccatgctcggcgccctcagtgcagctcagctaccaacccagccaggatggtgccgagctgcggcctggttttgtgctggcactgcactgtgatgtggacgggcagccggcccctcagcttcactggcacatccagatacccagtggcattgtggagatcaccagccccaacgtgggcactgatgggcgtgccctgcctggcacccctgtggccagctcccagccgcgcttccaggcctttgccaatggcagcctgcttatccccgactttggcaagctggaggaaggcacctacagctgcctggccaccaatgagctgggcagtgctgagagctcagtggacgtggcactggccacgcccggtgagggtggtgaggacacactggggcgcaggttccatggcaaagcggttgagggaaagggctgctatacggttgacaacgaggtgcagccatcagggccggaggacaatgtggtcatcatctacctcagccgtgctgggaaccctgaggctgcagtcgcagaaggggtccctgggcagctgcccccaggcctgctcctgctgggccaaagcctcctcctcttcttcttcctcacctccttctagccccacccagggcttccctaactcctccccttgcccctaccaatgcccctttaagtgctgcaggggtctggggttggcaactcctgaggcctgcatgggtgacttcacattttcctacctctccttctaatctcttctagagcacctgctatccccaacttctagacctgctccaaactagtgactaggatagaatttgatcccctaactcactgtctgcggtgctcattgctgctaacagcattgcctgtgctctcctctcaggggcagcatgctaacggggcgacgtcctaatccaactgggagaagcctcagtggtggaattccaggcactgtgactgtcaagctggcaagggccaggattgggggaatggagctggggcttagctgggaggtggtctgaagcagacagggaatgggagaggaggatgggaagtagacagtggctggtatggctctgaggctccctggggcctgctcaagctcctcctgctccttgctgttttctgatgatttgggggcttgggagtccctttgtcctcatctgagactgaaatgtggggatccaggatggcttccttcctcttacccttcctccctcagcctgcaacctctatcctggaacctgtcctccctttctccccaactatgcatctgttgtctgctcctctgcaaaggccagccagcttgggagcagcagagaaataaacagcatttctgatgcc

SEQ ID NO: 6667 - DNA, 600 bp, Homo sapiens
aagtgacttgcatcaatcctacattcatctgtgatcacccacagataatgagccctttggctaaatggcaccgctctaaagagggtctgactgagcgctttgagctgtttgtcatgaagaaagagatatgcaatgcgtatactgagctgaatgatcccatgcggcagcggcagctttttgaagaacaggccaaggccaaggctgcaggtgatgatgaggccatgttcatagatgaaaacttctgtactgccctggaatatgggctgccccccacagctggctggggcatgggcattgatcgagtcgccatgtttctcacggactccaacaacatcaaggaagtacttctgtttcctgccatgaaacccgaagacaagaaggagaatgtagcaaccactgatacactggaaagcacaacagttggcacttctgtctagaaaataataattgcaagttgtataactcaggcgtctttgcatttctgcgaaagatcaaggtctgcaagggaattcttgtgtgctgctttccatttgacaccgcagttctgttcagccatcagaagagagacaaggaattaaaaatttctttttaatcctgtta

SEQ ID NO: 6668 - DNA, 600 bp, Homo sapiens
ccagagggtccctgtcagccacagcttcccacacccgctctacaatatgagccttctgaagcatcaaagccttagaccagatgaagactccagccatgacctcatgctgcttcgcctgtcagagcctgccaagatcacagatgttgtgaaggtcctgggcctgcccacccaggagccagcactggggaccacctgctacgcctcaggctggggcagcatcgaaccagaggagttcttgcgccccaggagtcttcagtgtgtgagcctccatctcctgtccaatgacatgtgtgctagagcttactctgagaaggtgacagagttcatgttgtgtgctgggctctggacaggtggtaaagacacttgtgggggtgattctgggggtccacttgtctgtaatggtgtgcttcaaggtatcacatcatggggccctgagccatgtgccctgcctgaaaagcctgctgtgtacaccaaggtggtgcattaccggaagtggatcaaggacaccatcgcagccaacccctgagtgcccctgtcccacccctacctctagtaaatttaagtccacctcaaaaaaaaaaaaaaaaaaaaaaaaaaaaa

SEQ ID NO: 6669 - DNA, 597 bp, Homo sapiens; identical to SEQ ID NO: 1434

SEQ ID NO: 6670 - DNA, 1400 bp, Homo sapiens
agacaaattgaagggagagatgatggatctccaacatggcagccttttccttagaacaccaaagattgtctctggcaaagactataatgtaactgcaaactccaagctggtcattatcacggctggggcacgtcagcaagagggagaaagccgtcttaatttggtccagcgtaacgtgaacatatttaaattcatcattcctaatgttgtaaaatacagcccgaactgcaagttgcttattgtttcaaatccagtggatatcttgacctacgtggcttggaagataagtggttttcccaaaaaccgtgttattggaagtggttgcaatctggattcagcccgattccgttacctgatgggggaaaggctgggagttcacccattaagctgtcatgggtgggtccttggggaacatggagattccagtgtgcctgtatggagtggaatgaatgttgctggtgtctctctgaagactctgcacccagatttagggactgataaagataaggaacagtggaaagaggttcacaagcaggtggttgagagtgcttatgaggtgatcaaactcaaaggctacacatcctgggctattggactctctgtagcagatttggcagagagtataatgaagaatcttaggcgggtgcacccagtttccaccatgattaagggtctttacggaataaaggatgatgtcttccttagtgttccttgcattttgggacagaatggaatctcagaccttgtgaaggtgactctgacttctgaggaagaggcccgtttgaagaagagtgcagatacactttgggggatccaaaaggagctgcaattttaaagtcttctgatgtcatatcatttcactgtctaggctacaacaggattctaggtggaggttgtgcatgttgtcctttttatctgatctgtgattaaagcagtaatattttaagatggactgggaaaaacatcaactcctgaagttagaaataagaatggtttgtaaaatccacagctatatcctgatgctggatggtattaatcttgtgtagtcttcaactggttagtgtgaaatagttctgccacctctgacgcaccactgccaatgctgtacgtactgcatttgccccttgagccaggtggatgtttaccgtgtgttatataacttcctggctccttcactgaacatgcctagtccaacattttttcccagtgagtcacatcctgggatccagtgtataaatccaatatcatgtcttgtgcataattcttccaaaggatcttattttgtgaactatatcagtagtgtacattaccatataatgtaaaaagatctacatacaaacaatgcaaccaactatccaagtgttataccaactaaaacccccaataaaccttgaacagtg

SEQ ID NO: 6671 - DNA, 600 bp, Homo sapiens
cccagacacagggtgggggcagcgtcaccaaaaagcgcaaactggagtccactgagagccgcagcagcttctcacagcacgcacgcactagcgggcgcgtggccgtggaggaggtggatgaggagggcaagtttgtccggctgcgcaacaagtccaatgaggaccagtccatgggcaattggcagatcaagcgccagaatggagatgatcccttgctgacttaccggttcccaccaaagttcaccctgaaggctgggcaggtggtgacgatctgggctgcaggagctggggccacccacagcccccctaccgacctggtgtggaaggcacagaacacctggggctgcgggaacagcctgcgtacggctctcatcaactccactggggaagaagtggccatgcgcaagctggtgcgctcagtgactgtggttgaggacgacgaggatgaggatggagatgacctgctccatcaccaccatgtgagtggtagccgccgctgaggccgagcctgcactggggccacccagccaggcctgggggcagcctctccccagcctccccgtgccaaaaatcttttcattaaagaatgtttggaacttt

SEQ ID NO: 6672 - DNA, 1400 bp, Homo sapiens
cgagccaaccttatcaacaacatctttgaacttgcaggcctaggcaaggtacctctcaagagggcctttgatttgattaattatcttggaaatgagaaccatactgcacccatcaccgaagccctgtttcagacagacctcatctataacctccttgaaaaactgggatacatggatctggcctcaagactggtgactagggtatttaaattacttcaaaaccaaattcaacaacaaacttggactgatgagggcactccatctatgcgagagcttcggtcagccctgctagagtttgcttgcacccacaacctggggaactgctctactactgccatgaaactgtttgatgactggatggcatccaatggaactcaaagcctacctactgatgtcatgacaactgtgttcaaagttggagcaaaaactgacaaaggctggtcattccttttgggcaaatacatttctataggctctgaagcagagaagaacaaaatactagaagcacttgccagctcagaggatgtgcggaagctttactggttaatgaaaagtagcctgaatggagataacttccgaacacagaagctgtcttttatcattagaacagtgggtcgacattttcctggacacttactggcatgggattttgtcaaagagaactggaataagcttgtacagaagttccctctggggtcctataccatacaaaatattgttgctggatcaacttacctgttttcaacaaagacacatttatctgaggttcaggcattctttgaaaatcagtcagaggcaaccttccggcttcgttgtgtccaggaggctttggaagtcattcagttgaatatccagtggatggagaagaacctcaaaagtctcacatggtggctgtagcatgcacaaccgcacctcattttgttgcccattcagagagcttgtaagcttgggctctgccgcttttgcaaaagccaaggtaaagccaggatcgctgccaagttgtttgcactctttggagttctagttagctcagggcctgactgtatttttcatccatcttttctgaagtgtctttgggcagtatgtagttatttattacaaaattatattcacgtaaatgccaaccatctacaaaaacaatgagtaatttttctactttgaagatacacagatggggacaaaaaccctgttttggaattctgttctattcctcagtatccagaaagttactgacacagtaaaacaaggaaagttctaccctaagagccgccatcacttcaggccgctggtttgtcagccatctgctgcttcttattgatagatggcattggaatgtggtacaaagttagctctgaagaatatggtaacgaagacaataaagcatgcactgtaagaactga

SEQ ID NO: 6673 - DNA, 1400 bp, Homo sapiens
atgatggcctgacaatgaactactgcaggaatccagatgccgatacaggcccttggtgttttaccatggaccccagcatcaggtgggagtactgcaacctgacgcgatgctcagacacagaagggactgtggtcgctcctccgactgtcatccaggttccaagcctagggcctccttctgaacaagactgtatgtttgggaatgggaaaggataccggggcaagaaggcaaccactgttactgggacgccatgccaggaatgggctgcccaggagccccatagacacagcacgttcattccagggacaaataaatgggcaggtctggaaaaaaattactgccgtaaccctgatggtgacatcaatggtccctggtgctacacaatgaatccaagaaaactttttgactactgtgatatccctctctgtgcatcctcttcatttgattgtgggaagcctcaagtggagccgaagaaatgtcctggaagcattgtaggggggtgtgtggcccacccacattcctggccctggcaagtcagtctcagaacaaggtttggaaagcacttctgtggaggcaccttaatatccccagagtgggtgctgactgctgctcactgcttgaagaagtcctcaaggccttcatcctacaaggtcatcctgggtgcacaccaagaagtgaacctcgaatctcatgttcaggaaatagaagtgtctaggctgttcttggagcccacacaagcagatattgccttgctaaagctaagcaggcctgccgtcatcactgacaaagtaatgccagcttgtctgccatccccagactacatggtcaccgccaggactgaatgttacatcactggctggggagaaacccaaggtacctttgggactggccttctcaaggaagcccagctccttgttattgagaatgaagtgtgcaatcactataagtatatttgtgctgagcatttggccagaggcactgacagttgccagggtgacagtggagggcctctggtttgcttcgagaaggacaaatacattttacaaggagtcacttcttggggtcttggctgtgcacgccccaataagcctggtgtctatgctcgtgtttcaaggtttgttacttggattgagggaatgatgagaaataattaattggacgggagacagagtgaagcatcaacctacttagaagctgaaacgtgggtaaggatttagcatgctggaaataatagacagcaatcaaacgaagacactgttcccagctaccagctatgccaaaccttggcatttttggtatttttgtgtataagcttttaaggtctgactgacaaattctgtattaaggtgtcatagctatgacatttgttaaaaataaactctgcacttattttgatttga

SEQ ID NO: 6674 - DNA, 600 bp, Homo sapiens
ggctctgcagaacatatcaaaataggatttcttaaatttttcaacccccagaccatactgactcaacatggagtctcactggccaagaaaattgcctttaaaactcgaaaataaggccaggtgtggtgactcacacttgtaatcccagcaatttgggaggctgagacaggaggattgcctgaggccaggagtttgacaccagcctgggcaacatagtgagaccttgtctctacaaaaaataaaataaaataaaaaaccaaattagccagacatggtggcatgcgcttgtttaaaaaaacaaataaataaataatcgactcaaaaataagtcatgtgtcccagcataaggcatcaggttgttagatgctggcatctctgcagctcaaagatgtgggttctttttcttgtcattaacacattgttatttctgtaggaccaacttctctgatcaaaattacttttctgggtatgtgctgattaagggggtggacttatcaacactataattgttccctatgaaagattccacagagatgtttatggtgaggtttaaaggatatgaaactctacatttaaaacaagtattttatatttgggcac

SEQ ID NO: 6675 - DNA, 1400 bp, Homo sapiens
gtgagcggccagcgcccctctggctgcgacgcgccctatggagcccccagcgcagccccgggcccagcccagaccctatccctccttcctgggctggaggtagtaacaggatccactcaccctgcggaggcagcaccagaggagggctccctggaggaggcggcaacccccatgccccaaggcaatggccctggcatcccccagggcctggacagcactgacctcgacgtccccacagaagctgttacatgccagcctcaggggaaccccttgggctgcaccccacttctgccgaatgactctggccacccctcagagctgggcggcaccagacgggcggggaatggtgccctgggtggccccaaggcccaccggaagttgcagacacacccatctctcgccagccagggcagcaagaagagtaagagcagcagcaaatccaccacctcccagatccccctccaggcacaggaagactgctgtgtccactgcatcctgtcctgcctgttctgcgagttcctgacgctgtgcaacatcgtcctggactgcgccacctgtggctcctgcagctcggaggactcgtgcctctgctgctgctgctgtggctctggcgagtgtgccgactgcgacctgccctgcgacctggactgcggcatcctggatgcctgctgcgagtccgcggactgcctggagatctgcatggagtgctgtgggctctgcttctcctcctgagcctctgtcgggggctaagccagcctggcgcccctgcagattccagcagggtccctctgagtggggccaggcccaggactgtcacacaaggcttgagaagccccctctccctggtcctctcctacccacccatgtcctctcagaaccccagccttgaaaatagtggggggcactcagaggggccacctcctcagccgtgggtggtgggcccatggcagagaagcctgaactctttactgggttaccaggttcatacattgctgaggacctgacaggacaacctaggggcagggctggggtgggggccgcagagggcagccagggctggggaacactgtgaaagttacttggggagggtgggccggtggggccgtagctctctacctctccctgctcctggtgcctgcctctctcctccaccccaggcttagaggacagaaaaatgtgaagagacgccccacccaccctcagccagccctctccagtctcctttcctaggcttttttgggggcctaacccacgcagtcaccccagagggcagggctaggcgagagcctggggtggggcgggagggggaacagtatggaaaagactggaaggggaaaggaagggaagggagggaggtctgttctatctgttgctgtaaataaagatatttgtccatctct

SEQ ID NO: 6676 - DNA, 1400 bp, Homo sapiens
acaggtgataattaccatccttgaccaggagcctgatgtccggaacaggatgtcctcaagcatggtgttcactacctcgaagtcgcacacatctccagcgataaatgacactgtcatctgggacaggccgtccagggtgggaacctatcatacagactgtaattgttttagaagcatcgacttgggctggagtggtttcatttcccaccaaatgctgaaaaggaggagtttcctgaaaaatgatgacctcatcatatttgtggactttgaagatatcacccacctcagccagactgaagttccctctaaaggcaaaagactgagcccccaaggcctcattctccaaggccaggagcagcaggtctccgaagaaggttcgggaaaggccatgttagaggaagccctacctgtcagcctgagccaggggcagcccagccgacagaagcggtcggtggagaacacaggccccctggaggaccataactggccacagtacttcagagacccatgtgacccaaacccttgccaaaatgacggcatctgtgtgaacgtgaaggggatggcgagctgcaggtgcatctctggacatgctttcttctacacgggggagcgctgtcagtcggccgaggtgcacggcagtgtcctgggcatggtgatcggaggcacggctggcgtgatcttcttgaccttctccatcatcgccatcctttcccaaaggccaaggaagtgacctgcctgctggcattggccagaccacagcagcacctcctccatgcaggccttaactttcccatgttcaatgcagtttggggcagcttttttatcagccttgctttggataggacctccaaggactaagcctccagccccatgtgtgacccttgtcatctctctgccccacataattatgttactttgctatgtgctcctaatgtatctagtgtgtcctgtgacaacactcatcacacttcattgtaaatcacttgttttattgactgtctttcctatagactgtaagctccatgagggcaggcacatgttgttctcattgaccgtgctggccccagtgcctagatgcatggctggcacattgttggcactcaacaatggttgaatgaataaaacaataaatgaatgaataactaagatatagaaactctcatttatattgcagattgaatatatatgatgaaattcttatgttgaatatgttagaatcaaatactcatttttcattagatacagtagtgtcatcactcttttaagatcttgttaaagatttcaaataaaggtacttctggcgagccaggctgcacagcatttgctttcctctgagattctaagagaaggcctttaataaatttaataaatattgagttagcaaaaaaaaaaaaaaaaaa

SEQ ID NO: 6677 - DNA, 600 bp, Homo sapiens
ccatccttcttgatggacgaaaaattaaagtgaaaggctatgaaaatggcaactttgttggaccaaccatcatctcgaatgtcaagccaaatatgacctgttacaaagaggagatttttggtccagttcttgtggttctggagacagaaacattggatgaagccatccagattgtaaataacaacccatatggaaatggaactgccatcttcaccaccaatggagccactgctcggaaatatgcccacttggtggatgttggacaggtgggagtgaatgtccccattccagtgcctttgccaatgttctcattcaccggctctcgatcctccttcaggggagacaccaatttctatggcaaacagggcatccaattctacactcagttaaagaccattacttctcagtggaaagaagaagatgctactctttcctcacctgctgttgtcatgcctaccatgggccgttagaaacaagtttgtttaagactgactccatcctgagtaatctccctttatttttgaccagcttcatttgtcagctttgctcagatcagatcgatgggattggaatacattgtaactaaaatcttaaaaaaaa

SEQ ID NO: 6678 - DNA, 1400 bp, Homo sapiens
aatactggtttttcccaatgaagatcttcatgtaaaggacctgaatgagaccatccattacatgtacaaacacaaaatgtaccgaaagatggtgttctacattgaagcctgtgagtctgggtccatgatgaaccacctgccggataacatcaatgtttatgcaactactgctgccaaccccagagagtcgtcctacgcctgttactatgatgagaagaggtccacgtacctgggggactggtacagcgtcaactggatggaagactcggacgtggaagatctgactaaagagaccctgcacaagcagtaccacctggtaaaatcgcacaccaacaccagccacgtcatgcagtatggaaacaaaacaatctccaccatgaaagtgatgcagtttcagggtatgaaacgcaaagccagttctcccgtccccctacctccagtcacacaccttgacctcacccccagccctgatgtgcctctcaccatcatgaaaaggaaactgatgaacaccaatgatctggaggagtccaggcagctcacggaggagatccagcggcatctggatgccaggcacctcattgagaagtcagtgcgtaagatcgtctccttgctggcagcgtccgaggctgaggtggagcagctcctgtccgagagagccccgctcacggggcacagctgctacccagaggccctgctgcacttccggacccactgcttcaactggcactcccccacgtacgagtatgcgttgagacatttgtacgtgctggtcaacctttgtgagaagccgtatccacttcacaggataaaattgtccatggaccacgtgtgccttggtcactactgaagagctgcctcctggaagcttttccaagtgtgagcgccccaccgactgtgtgctgatcagagactggagaggtggagtgagaagtctccgctgctcgggccctcctggggagcccccgctccagggctcgctccaggaccttcttcacaagatgacttgctcgctgttacctgcttccccagtcttttctgaaaaactacaaattagggtgggaaaagctctgtattgagaagggtcatatttgctttctaggaggtttgttgttttgcctgttagttttgaggagcaggaagctcatgggggcttctgtagcccctctcaaaaggagtctttattctgagaatttgaagctgaaacctctttaaatcttcagaatgattttattgaagagggccgcaagccccaaatggaaaactgtttttagaaaatatgatgatttttgattgcttttgtatttaattctgcaggtgttcaagtcttaaaaaataaagatttataacagaacccaaaaaaaaaaaaaaaaaaaaaaaaaaaaaaaaaaaaaaaaaaaaac

SEQ ID NO: 6679 - DNA, 1396 bp, Homo sapiens; identical to SEQ ID NO: 1444

SEQ ID NO: 6680 - DNA, 589 bp, Homo sapiens; identical to SEQ ID NO: 1445

SEQ ID NO: 6681 - DNA, 1400 bp, Homo sapiens
cgtggagatggaggatgtgggtttactctttgcccgccttggcaagtacattctgtgctgcctgctgggtcacgccatccatgggctcctggtactgcccctcatctacttcctcttcacccgcaaaaacccctaccgcttcctgtggggcatcgtgacgccgctggccactgcctttgggacctcttccagttccgccacgctgccgctgatgatgaagtgcgtggaggagaataatggcgtggccaagcacatcagccgtttcatcctgcccatcggcgccaccgtcaacatggacggtgccgcgctcttccagtgcgtggccgcagtgttcattgcacagctcagccagcagtccttggacttcgtaaagatcatcaccatcctggtcacggccacagcgtccagcgtgggggcagcgggcatccctgctggaggtgtcctcactctggccatcatcctcgaagcagtcaacctcccggtcgaccatatctccttgatcctggctgtggactggctagtcgaccggtcctgtaccgtcctcaatgtagaaggtgacgctctgggggcaggactcctccaaaattatgtggaccgtacggagtcgagaagcacagagcctgagttgatacaagtgaagagtgagctgcccctggatccgctgccagtccccactgaggaaggaaaccccctcctcaaacactatcgggggcccgcaggggatgccacggtcgcctctgagaaggaatcagtcatgtaaaccccgggagggaccttccctgccctgctgggggtgctctttggacactggattatgaggaatggataaatggatgagctagggctctgggggtctgcctgcacactctggggagccaggggccccagcaccctccaggacaggagatctgggatgcctggctgctggagtacatgtgttcacaagggttactcctcaaaacccccagttctcactcatgtccccaactcaaggctagaaaacagcaagatggagaaataatgttctgctgcgtccccaccgtgacctgcctggcctcccctgtctcagggagcaggtcacaggtcaccatggggaattctagcccccactggggggatgttacaacaccatgctggttattttggcggctgtagttgtggggggatgtgtgtgtgcacgtgtgtgtgtgtgtgtgtgtgtgtgtgtgtgtgtgttctgtgacctcctgtccccatggtacgtcccaccctgtccccagatcccctattccctccacaataacagaaacactcccagggactctggggagaggctgaggacaaatacctgctgtcactccagaggacattttttttagcaataaaattgagtgtcaactatttaaaaaaaaaaaaaaaaa

SEQ ID NO: 6682 - DNA, 1400 bp, Homo sapiens
ccagtaccattcctcgactgcctcagctgccccggcagaaatgcctggtggctgcaggtgcctggggagctggggactcttgccgacagggagcgtggaccctggtctccaacccattctgcccagagcccagtccccctcaggatccatttctgcccagtgcaccggcccccgtggcatgggctcatggccgccgacagggcctggggcctattcactcccgcaccaacctgatggacacagaactcatggatgcagactcggacttctgagcctgcagagcaggacctgggacaggaaagagaggaaccaataccttcaaggctcttcttcctcaccgagcatgcttccctaggatcccgtcttccagagaacctgtgggctgactgccctccgaagagagttctggatgtctggctcaaagcagcaggactgtgggaaagagcctaacatctccatggggaggcctcaccccagggacagggccctggagctcagggtccttgtttctgccctgccagctgcagcctggttggcagcatctgctccatcggggcagggggtatgcagagcttgtggtggggcaggaacggtggaggcagaggtgacagttcccagagtgggctttggtggccagggaggcagcctagcctatgtctggcagatgagggctggctgccgttttctgggctgatgggtgccctttcctggcagtctcagtccaaaagtgttgactgtgtcattagtcctttgtctaagtagggccagggcaccgtattcctctcccaggtgtttgtggggctggaaggacctgctcccacaggggccatgtcctctcttaataggtggcactaccccaaacccatcttttgttctcctatatcctccttctcctgttccatttcagttcagtttcagcggtgccaacctctttgcgtttcctttttgttgatgaggacccagagctgctgcacacactcacctctaaccccctcccctcgctgctgggccccatctccacaggagagactggttcggctctagggcctcagtctggagtgggataggagcagtgagtgacaaagcctctgaaagatgcatcatctcttcctcacacccatttagtgggggatgggtcctctagacttgaggggctaccctgggaagctgccgtagcttcagccaggcaagaaagcttccttcaacctgcatagccggtgggtgaggagattcccaccttccatagcctccaaacatgttcccaaggccccactttcaagaatcagacagcaggaagccatagatgctggctgggttccaggttatggggagaagaaatacagtcaataaaaggtttttgtataaaaaaaaaaaaaaaaaaaaaaaaaaaaaaaaaaaaa

SEQ ID NO: 6683 - DNA, 600 bp, Homo sapiens
gacccacagccccccactcacgccagaggtcgccggtctgcatgggccccgaccgctgtgaccaccatgcctggggcaggggctgtgcacagacggaccccccacccccacacgcactttatgagggagaccccgacagaggacgcttgagccagaatctcaggaccccgcccagggagctgccagcccagggctcagcttcccatgggccccccgcccccctccttcccctccctgaaccccacagtccgcctggccagacctcctggccgccacgcagaatacctcgaaccaggcgggctgtgaaccagccccgctcacctgccagccccaacacccgacgggggccgaggccaggctgcccctccctgtgggctcagggtctcctgcgggctaggcagccaggagctctgtccgcaaaaccaaatctgggtgtcagaggccaagaccctggggtgggatcagggaccacccctcacggggcataaggtcagttttcccccagagcccgggtccctgtcccccacagggcaggcggggtccctggagccctggtgtggagcggcgagtcccggggcggtgcctgtctcagaagaaggg

SEQ ID NO: 6684 - DNA, 1400 bp, Homo sapiens
agtggaccgtgttccattggcctcaaaattagtagacctgccctgtgttatggaaagcttgaaaaccattgataaaaaaactttttacaagacagctgatatctgtcagatgcttgtatccacagttgatggtgatctctatcctcctgtggaggagccagttgctagcactgatcctaaagcaagcaagaaaaaggataaggacaaagagaaaaagtttatctggaaccacggaattactctgcctctaaagaatgtcaggaagagaaggttccggaagacagcaaagaagaaatatattgaatctccagatgttgaaaaagaagtgaaacgattgctgagtacagatgctgaagctgttagtactcggtgggaaataattgccgaagatgaaacaaaggaggcagaaaatcaaggcctggatatctcttctccaggaatgtctggtcacaggcagggccatgactcattagaacatgatgagcttcgggagatattcaatgacctcagcagcagcagtgaggatgaagatgagacccagcatcaagatgaagaagatataaacatcattgacacggaggaagatctggagagacagctacaggacaagctaaatgaatcagatgaacagcaccaggaaaatgaaggaaccaatcagctggttatgggaattcagaagcagattgacaacatgaaaggcaagctccaagagacccaggacagggcaaaacgacaagaggatctcatcatgaaagtggaaaatctggctctcaagaacagatttcaggctgtactggatgagctcaaacaaaaggaagaccgagaaaaggagcaactcagctctttgcaagaggagctagaatcactcctagagaagtaaaaagaactgatatttaatttcagtcttcagactggtcagcattagaaaattcttggctttattgtactgggtattaagaccttgctcttcctagtccttttaatgctgtgtgttctgttaagttctttcatttgtttgtaattttgtttttcagcaaatttatattgttttgctaggtgttcatcctataagaagcaggattgtataggcagaaaaatgattgtaggaaagttgcaggattagcggaatgtatggttcaaccttaattatagcttcattgcaggactttactgtttctccattttctagaagctgctgttgctgctttgtgatgacgtgagatcaataagaagaacctagtctagagacaatgatgctagtttgcatatgttttcctatgcaataattgttttcccagttattcaaagcagctttctatatgtagagatgcaaattattaagttgtttccaatacaataaataaaagcatctgtttttcactttaaaaaaaaaaaaaaaa

SEQ ID NO: 6685 - DNA, 1400 bp, Homo sapiens
agaaatcctacagatgtaaagaatgtggtaaatccttcagccgaaggtcaggcctttttatacatcaaaaaattcatgctgaagaaaacccttgtaagtataatccgggtaggaaggcatctagttgcagcacatccctttctggatgtcaaagaattcattctagaaagaagtcctacttatgtaatgaatgtggcaacacctttaagtctagctcatcccttcgttatcatcagagaattcacactggagagaagccttttaaatgtagtgaatgtgggagagccttcagccagagtgcctctcttattcaacatgaaagaattcacaccggagaaaagccctatagatgcaatgaatgtgggaaaggctttacttctatttcacgacttaatagacaccgaatcattcatactggagagaagtattataattgtaatgaatgtggtaaagccttaagctcccactcaacacttattattcacgagcgaattcatactggagaaaaaccatgtaaatgtaaagtatgtggaaaagccttcagacagagttcagctctcattcaacatcagagaatgcatactggagaaagaccctataaatgtaacgagtgtgggaaaacattcaggtgtaactcatcacttagtaatcaccagagaattcatactggagagaaaccatatcgatgtgaggaatgtgggatatcttttggccaaagttcagctcttattcagcatcgaaggattcatacaggagaaaaaccctttaaatgtaatacatgtggaaaaacttttagacaaagctcatcacgtattgcacatcagagaattcatactggagagaaaccctatgaatgtaatacatgtgggaaacttttcaaccataggtcatcccttactaatcattataaaattcatatcgaagaggacccctagaaagtagatttgtatgtgtgaaagccttaaaccaaagctcatcgaagaatacatccttgagagagatgtaataaatgtaatggatgtgaaaaaaactgtaataatttagccctcattaggtatttaatcccatggataaacctcagctatataatagatatgaggaaagtgtttgtgcctgtcagacacttaaaaaaataacctgagatgaagaatttacaattgaagacattgactttagccatttgtgaaatgggtttgctttttcccttttcctacagacgtatatgctagatgtcacgtgatcatcagaaacagatatccgagtgggtggggaggtgtgctttagatttctcattagaagaccaccaaactggtaatatttttatagcattttaatagcttgatcaaattgtacctttttagagaaaaggaccaaaataaaagaaaaatgaattatgaact

SEQ ID NO: 6686 - DNA, 600 bp, Homo sapiens
  misc_feature (81)..(81): n is a, c, g, or t
  misc_feature (199)..(199): n is a, c, g, or t
  misc_feature (202)..(202): n is a, c, g, or t
cagcaatgtgagtattatttggagtaaatttgttccacgtcaagttctggccttctgatgcaaatgcaaaggaacttagtntgttatgaacccaggttgatgacagaccagtccttgtggaataagattccctttaaaaactctttagccagtcgtgacatcaaccctagacctgtctgccttggcatttgctgtcaanatntgctgggctatgtaggcaggttaatcctccacttctcatgtggttgaaccagtgtgttttttggtaaaatggtgattgtagataagattagttccctgatcccctgccccctgtcccctgcctcttttcccaattcccttccttatgctggacttttaaagcttaaaaaaaatccgattgaatataaatgcctaatttcattcttttgtgaaatggttgcttcctcctgattccctaattgtgctgtgttcgtgtcttgcactggaattcaacattcccttctccttttgtactgtgttgtgcttgctgtctctcccggacacccttaaagactgtctttttagcaaaaaatttcagtaaagtgttttctgtaatctttttttaaaaaaaaaaaaaaa

SEQ ID NO: 6687 - DNA, 1400 bp, Homo sapiens
gccggctggttgtgggcactggcggtcaagtgtggaggagaggggtggaggctgccccattgagatcttcctgctgagtcctttccaggggccaattttggatgagcatggagctgtcacctctcagctgctggatgacttgagatgaaaaaggagagacatggaaagggagacagccaggtggcacctgcagcggctgccctctggggccacttggtagtgtccccagcctacctctccacaaggggattttgctgatgggttcttagagccttagcagccctggatggtggccagaaataaagggaccagcccttcatgggtggtgacgtggtagtcacttgtaaggggaacagaaacatttttgttcttatggggtgagaatatagacagtgcccttggtgcgagggaagcaattgaaaaggaacttgccctgagcactcctggtgcaggtctccacctgcacattgggtggggctcctgggagggagactcagccttcctcctcatcctccctgaccctgctcctagcaccctggagagtgcacatgccccttggtcctggcagggcgccaagtctggcaccatgttggcctcttcaggcctgctagtcactggaaattgaggtccatgggggaaatcaaggatgctcagtttaaggtacactgtttccatgttatgtttctacacattgctacctcagtgctcctggaaacttagcttttgatgtctccaagtagtccaccttcatttaactctttgaaactgtatcacctttgccaagtaagagtggtggcctatttcagctgctttgacaaaatgactggctcctgacttaacgttctataaatgaatgtgctgaagcaaagtgcccatggtggcggcgaagaagagaaagatgtgttttgttttggactctctgtggtcccttccaatgctgtgggtttccaaccaggggaagggtcccttttgcattgccaagtgccataaccatgagcactactctaccatggttctgcctcctggccaagcaggctggtttgcaagaatgaaatgaatgattctacagctaggacttaaccttgaaatggaaagtcttgcaatcccatttgcaggatccgtctgtgcacatgcctctgtagagagcagcattcccagggaccttggaaacagttggcactgtaaggtgcttgctccccaagacacatcctaaaaggtgttgtaatggtgaaaacgtcttccttctttattgccccttcttatttatgtgaacaactgtttgtctttttttgtatcttttttaaactgtaaagttcaattgtgaaaatgaatatcatgcaaataaattatgcgatttttttttcaaagcaaaaaaaaaaaaaaaaaaaaaaaaaaaaaaa

SEQ ID NO: 6688 - DNA, 1156 bp, Homo sapiens; identical to SEQ ID NO: 1453

SEQ ID NO: 6689 - DNA, 1040 bp, Homo sapiens; identical to SEQ ID NO: 1454

SEQ ID NO: 6690 - DNA, 1162 bp, Homo sapiens; identical to SEQ ID NO: 1455

SEQ ID NO: 6691 - DNA, 1400 bp, Homo sapiens
gttctgctctcccaccggctaccagccccactgcccaggaatcctacagccagtaccctgttcccgacgtctctacctaccagtacgatgagacctccggctactactatgacccccagaccggcctctactatgaccccaactcccagtattactacaatgctcagagccagcagtacctgtactgggatggggagaggcggacctatgttcccgccctggagcagtcggccgacggacataaggagacaggggcaccctcgaaggagggcaaagagaagaaggagaagcacaagaccaagacagctcaacagattgccaaggacatggaacgctgggcccgcagtctcaacaaacaaaaagaaaacttcaaaaatagcttccagcctatcagctccctgcgagatgacgagaggcgggagtcagccactgcagatgctggctatgccatcctcgagaagaagggagcactagccgagagacagcacaccagcatggatctcccgaaattggccagtgacgaccgcccaagccctccgcgaggactggtggcagcctacagcggggagagtgacagtgaggaggagcaggagcgtgggggccctgagcgggaggagaagctcaccgactggcagaagctggcctgtctgctctgccgacgccagttccccagcaaagaggcgctcatccggcaccagcagctctcagggctccacaagcaaaaccttgagattcaccggcgagcccacttgtcagaaaacgagctagaagcactagagaagaatgacatggagcaaatgaagtaccgggaccgtgcagctgaacgcagagaaaagtatggcatccccgagccgccagagcccaagaggaggaagtacggcggcatatccacagcctctgtagacttcgagcagcctactcgggacgggctgggcagtgacaacattggcagtcggatgctgcaggccatgggctggaaagagggcagcggcctgggccgcaagaagcagggcattgtaacgcctatcgaggcccaaacacgggtgcggggctccggcctgggtgcacggggcagctcctacggggtcacctcaaccgagtcctacaaggagacactgcacaagacaatggtgacccgcttcaacgaggcccagtgagcagcttcaagagcaacttctccacatgttgggtgtccatcctggggcagggaaggacagagtgttggatggctgggacggggccttgctcttgtcggccagcccactccccagccagagagggcttgaccaaatcaaattgaggtggtgacttttgttggaaaattgggctgggatcacgtcctgttttgtaataaaagctgaaaagtctgaaaaaaaaaaaaaaaaaaaaaaaaaaaaaaa

SEQ ID NO: 6692 - DNA, 1326 bp, Homo sapiens; identical to SEQ ID NO: 1457

SEQ ID NO: 6693 - DNA, 600 bp, Homo sapiens
ggccctgggcctgaaccggccggtgctggtcccttataaactaatccgggacagcccagacgccgtggaggtcacgggtctgcctgatgacatccccttccggaaccccaacacgtacgacatccaccggctggagaagatcctgaaggcccgagagcatgtccgcatggtcatcattaaccagctccaaccctttgcagaaatctgcaatgatgccaaggtgccagccaaagacagcagcattcccaagcgcaagagaaagcgggtctcggaaggaaattccgtctcctcttcctcctcgtcttcctcttcctcgtcctctaacccggattcagtggcatcggccaaccagatctcactcgtgcaatggccaatgtacatggtggactatgccggcctgaacgtgcagctcccgggacctcttaattactagacctcagtactgaatcaggacctcactcagaaagactaaaggaaatgtaatttatgtacaaaatgtatattcggatatgtatcgatgccttttagtttttccaatgatttttacactatattcctgccaccaaggcctttttaaataagtaaaaaaaaaaaaaaaaa

SEQ ID NO: 6694 - DNA, 1400 bp, Homo sapiens
tcctggatgagcctaccaaccacctggacctagatgcttgcgtgtggttggaagaagaactaaaaacttttaagcgcatcttggtcctcgtctcccattcccaggattttctgaatggtgtctgtaccaatatcattcacatgcacaacaagaaactgaagtattatacgggtaattatgatcagtatgtgaagacgcggctagagctggaggagaaccagatgaagaggtttcactgggagcaagatcagattgcacacatgaagaactacattgcgaggtttggtcatggcagtgccaagctggcccggcaggcccagagcaaggagaagacgctacagaaaatgatggcatcaggactgacagagagggtcgtgagcgataagacactgtcattttatttcccaccatgtggcaagatccctccacctgtcattatggtgcaaaatgtgagcttcaagtatacaaaagatgggccttgcatctacaataatctagaatttggaattgaccttgacacacgagtggctctggtagggcccaatggagcagggaagtcaactcttctgaagctgctaactggagagctactacccacagatggcatgatccgaaaacactctcatgtcaagatagggcgttaccatcagcatttacaagagcagctggacttagatctctcacctttggagtacatgatgaagtgctacccagagatcaaggagaaggaagaaatgaggaagatcattgggcgatacggtctcactgggaaacaacaggtgagcccaatccggaacttgtcagacgggcagaagtgccgagtgtgtctggcctggctggcctggcagaacccccacatgctcttcctggatgaacccaccaatcacctggatatcgagaccatcgacgccctggcagatgccatcaatgagtttgagggtggtatgatgctggtcagccatgacttcagactcattcagcaggttgcacaggaaatttgggtctgtgagaagcagacaatcaccaagtggcctggagacatcctggcttacaaggagcacctcaagtccaagctggtggatgaggagccccagctcaccaagaggacccacaacgtgtgcaccctgacattggcatctctgccaaggccatgagcatcatgaactcgtttgtaaacgacgtgtttgagcagctggcgtgtgaggctgcccggctggcccagtactcgggccggaccaccctgacatcccgagaagtccagacggctgtgcgtctgctgctgcctggggagctggccaagcacgctgtgtctgagggcaccaaggctgtcaccaagtacaccagctccaagtgacccagggcctgacaaaaataaagggtgaactgttaaaaaaaaaaaa

SEQ ID NO: 6695 - DNA, 1400 bp, Homo sapiens
tggctgtggcctacgccacgcagcgggagaagcttacctttctggaggaggatgacaaggacctgtacatcctctggaaggggccctccttcgatgtgcaggtgggcctgcacgagctgctgggccatggcagtggcaagctcttcgtacaggacgaaaaaggagcattcaactttgaccaggaaacagtgatcaacccagagacgggcgagcagattcagagctggtatcggagcggggagacctgggatagcaagttcagcaccatcgcctccagctacgaagagtgccgggctgagagcgtgggtctctacctctgtctccacccgcaagtgctggagatctttggctttgagggggctgatgcggaggacgtgatctacgtgaactggctcaacatggttcgggccgggctgctcgctctggagttctacacacctgaggccttcaactggcgacaggcccatatgcaggcccggtttgtgatcctgagagtcttgctggaggctggcgagggactcgttaccatcactcccaccacaggctccgatgggcgcccagatgcccgggtccgcctcgaccgcagcaagatccggtctgtgggcaagcctgctctagagcgcttcctgcggagacttcaggtgctgaagtccacaggggatgtggccggagggcgggccctgtacgaggggtatgcaacggtcactgatgcgccccccgagtgcttcctcaccctcagggacacggtgctgctgcgtaaggaatctcggaagctcattgttcagcccaacactcgccttgaaggctcagacgtgcagcttctggaatacgaggcgtcagctgctggcctcatccgatccttctctgagcgtttcccagaggatggacccgagttggaggagatcctcacacagctggccacagccgatgcccgattctggaagggccccagtgaggccccatctggccaagcttgaggaagatgtgtggccttgcccccaattccatcagaccaaggctgcaagtggccctccattcgtgtgtgtatttaggggctggggagggggaggggcaggagcttggaccttggtactacctcagctgagggtggtgacacaaccccttccatttgtcagcactttccagcctgccaattgcttcccctctgtgatctcatttcatctgcactgccatacgtggagtgagcaagacagggcttaccatcctgtctaccagatgaggaaatggcagttctgagaagtcactggtctagatcccgcaggtggcacgtgacagctagggttcaaaacgttctcaccaaatccaatgctcctcacatattaattttataaccagacaaataaatattagagacaaccaaaaaaaaaaaaaaaaaaaaa

SEQ ID NO: 6696 - DNA, 1400 bp, Homo sapiens
caggccgagagtggggatgggcgcaccatcgtgcactgcctaaacgggggaggacgcagcggcaccttctgcgcctgcgccacggtcctggagatgatccgctgccacaacttggtggacgttttctttgctgccaaaaccctccggaactacaaacccaacatggtggagaccatggatcagtaccacttttgctacgatgtggccctggagtacttggaggggctggagtcaagatagcggggccctggcctggggcacccactgcacactcagggccagacccaccatcctggactggcgaggaagatcagtgcctcctgctctgcccaaacacactcccatggggcaagcactggagtggatgctgggctatcttgctcccccttccactgtgggcagggcctttcgcttgtcccatgggcgggtggtgggccaaggaggagcttagcaagtctgcagcccagccccacctccatagggtcctgcaggcctgtgctgagaggcctggtgctgcctggcagagtgacaaaggctcaggacggctggctctgggggactcaggccaagccccttggcaccatcctggcttttggcagggatgagtgaggccctgcagagagcatcccaggccaaggttcccactcagcctgccccctctgcatgtgggtagaggatgtactgggacttggcatttaggattccatctggcccagcccctgaaggtcctggggaagcaggtctcaattctgaatagccagtggggcacactgactgtcctccccaggggaactgcagcgccctcctccccactgccccctgcagcccctgagatattttgctcactatccctccccacttgcttccctgatatgtgctctgagcttccctgaaccaggatctgcctattactgctgtgccccatggggggctccttccctgcctgacccactgttgcagaatgaagtcacctcgcccccctcttcctttaatcttcaggcctcactggcctgtcctgctcagcttgggccagtgacaatctgcaaggctgaacaacagcccctggggttgaggcccctgtggctcctggtcaggctgcccgttgtggggaggggcagtgttagagcagggctggtcataccctctggagttcagaggaagaggtaggaccagtgcttttttgtttcttttgttatttttggttgggtgggtgggaaggtctctttaaaatggggcaggccacacccccattccgtgcctcaatttccccatctgtaaactgtagatatgactactgacctacctcgcagggggctgtggggaggcataagctgatgtttgtaaagcgctttgtaaataaacgtgctctctgaatgccaaaaaaaaaaaaaaaaaaaaaa

SEQ ID NO: 6697 - DNA, 1113 bp, Homo sapiens; identical to SEQ ID NO: 1462

SEQ ID NO: 6698 - DNA, 600 bp, Homo sapiens
cctccagcatcttcagaacgctcaacatggacatgttcacttgggaaccaaggaaagctcggctggacaagcaaggcaaagtgaatgcctggacctctggccacaatgaccagtcacaatggttacaggtggatcttcttgttccaaccaaagtgactggcatcattacacaaggagctaaagattttggtcatgtacagtttgttggctcctacaaactggcttacagcaatgatggagaacactggactgtataccaggatgaaaagcaaagaaaagataaggttttccagggaaattttgacaatgacactcacagaaaaaatgtcatcgaccctcccatctatgcacgacacataagaatccttccttggtcctggtacgggaggatcacattgcggtcagagctgctgggctgcacagaggaggaatgaggggaggctacatttcacaaccctcttccctatttccctaaaagtatctccatggaatgaactgtgcaaaatctgtaggaaactgaatggtttttttttttttttcatgaaaaagtgctcaaattatggtaggcaactaacggtgtttttaagggggccggaattc

SEQ ID NO: 6699 - DNA, 600 bp, Homo sapiens
ctgtccgggtcagcattgctgtgaaacaggctgatgagatcgagaagattttgtgccacaagttcatgcgcttcatgatgatgcgagcagagaacttctttatccttcgaaggaagcctgtggaggggtatgatatcagctttctgatcaccaacttccacacagagcagatgtacaaacacaagttggtggactttgtgatccacttcatggaggagattgacaaggagatcagtgagatgaagctgtcagtcaatgcccgtgcccgcattgtggctgaagagttccttaagaatttttaaaccatctggctggatctcgtggccttccccctcagactacccatgtctccacgaaggcgtcctggagtcactccccgagcagcgcggcggcggcagggagttgggttggggtgggcatttgatgcgggaggtgggtggtgtgcttgctagctgggcaagaaagcagcagtggacctgccccaaggccacacgtgcctggtcaggctggcttctgatgttcagtcccctgggccgggacagattttttttaacgtcttgaaacttaaactctgtgcttgtaaaaaaaaaaaaaaaaaaa

SEQ ID NO: 6700 - DNA, 840 bp, Homo sapiens; identical to SEQ ID NO: 1465

SEQ ID NO: 6701 - DNA, 600 bp, Homo sapiens
tgaccttcatcacagacaacagcctggtggcagcgggccacgactgcttcccggtgctgttcacctatgacgccgccgcggggatgctgagcttcggcgggcggctggacgttcctaagcagagctcgcagcgtggcttgacggcccgcgagcgcttccagaacctggacaagaaggcgagctccgagggtggcacggctgcgggcgcgggcctagactcgctgcacaagaacagcgtcagccagatctcggtgctcagcggcggcaaggccaagtgctcgcagttctgcaccactggcatggatggcggcatgagtatctgggatgtgaagagcttggagtcagccttgaaggacctcaagatcaaatgacctgtgaggaatatgttgccttcatcctaactgctggggaagcggggagaggggtcagggaggctaatggttgctttgctgaatgtttctggggtaccaatacgagttcccataggggctgctccctcaaaaagggaggggacagatggggagcttttcttacctattcaaggaatacgtgcctttttcttaaatgctttcatttattgaaaaaaaaaaaaaaaaaaaa

SEQ ID NO: 6702 - DNA, 1400 bp, Homo sapiens
ctttattgccaatctttgaactcattcaactccaggacatggaagaggcctctctctgccctttgactggaaaggtcaagttttattctggtgtcttggggaagctttgttaaatttttgttaatgtgggtaaatctgagtttaattcaactgcttccctatatagactagagggctaaggattctgtctgctgctttgtttcttctaagtaggcatttagatcattcctgtaggcttcctattttcactttactgctctaatgctgctagtcgtagtctttagcacactaggtggtatgcctttattagcataaaacaaaaaaaactttaacaggagcttttacatattactgggatggggggtggttcgggatgggtgggcagctgctgaaccctttagggcatttcctctgtaatgtggcgctttcaactgtactgctgcagctttaagtaccttaaagcttctcctgtgaacttcttagggaaatgttaggttcagaactaaagtgttttgggtgggttttgttgcgggggggagggtaacaatgggtggtcttctgatttttatttttgaggttttgtcaactggagtacgtagaggaactttatttacagtactttgatttggcaggttttcttctacttgtgctctgcctggagctgtttccatatgatataaaaagcaagtgtagtattccattactatgtggcttagggatttatttgttttttaaaatcaaccatgttagctgggattagactccctacagtccttcaatggaaaagtaacatttaaaaatcctttgggtaattcaaattacagatttaaaagagcttaagatctggtgttttgttaatgcttctgtttattccagaagcattaaggtaacccattgccaagtatcattcttgcaaattattcttttatataactgaccagtgcttaataaaacaagcaggtacttacaaataattactggcagtaggttataattggtggtttaaaaataacattggaatacaggacttgttgccaattgggtaattttcattagttgttttgtttgttttgatttgaaacctggaaatacagtaaaatttgactgtttaaaatgttggccaaaaaaatcaagatttaatttttttatttgtactgaaaaactaatcataactgttaattctcagccatctttgaagcttgaaagaagagtctttggtattttgtaaacgttagcagactttcctgccagtgtcagaaaatcctatttatgaatcctgtcggtattccttggtatctgaaaaaaataccaaatagtaccatacatgagttatttctaagtttgaaaaataaaaagaaattgcatcacactaattacaaaataaaaaaaaaaaaaaaaaa

SEQ ID NO: 6703 - DNA, 1400 bp, Homo sapiens
gcttttcatcattgggctaattggctgctgtgccacaatccgggaaagtcgctgtggacttgccacgtttgtcatcatcctgctcttggtttttgtcacagaagttgttgtagtggttttgggatatgtttacagagcaaaggtggaaaatgaggttgatcgcagcattcagaaagtgtataagacctacaatggaaccaaccctgatgctgctagccgggctattgattatgtacagagacagctgcattgttgtggaattcacaactactcagactgggaaaatacagattggttcaaagaaaccaaaaaccagagtgtccctcttagctgctgcagagagactgccagcaattgtaatggcagcctggcccacccttccgacctctatgctgaggggtgtgaggctctagtagtgaagaagctacaagaaatcatgatgcatgtgatctgggccgcactggcatttgcagctattcagctgctgggcatgctgtgtgcttgcatcgtgttgtgcagaaggagtagagatcctgcttacgagctcctcatcactggcggaacctatgcatagttgacaactcaagcctgagctttttggtcttgttctgatttggaaggtgaattgagcaggtctgctgctgttggcctctggagttcatttagttaaagcacatgtacactggtgttggacagagcagcttggcttttcatgtgcccacctacttacctactacctgcgactttctttttccttgttctagctgactcttcatgcccctaagattttaagtacgatggtgaacgttctaatttcagaaccaattgcgagtcatgtagtgtggtagaattaaaggaggacacgagcctgcttctgttacctccaagtggtaacaggactgatgccgaaatgtcaccaggtcctttcagtcttcacagtggagaactcttggccaaaggtttttgcggggaggaggaggaaaccagctttctggttaaggttaacaccagatggtgcccctcattggtgtccttttaaaaaatatttactgtagtccaataagatagcagctgtacaaaatgactaaaatagattgtaggatcatatggcgtatatcttggttcatcttcaaaatcagagactgagctttgaaactagtggtttttaatcaaagttggctttataggaggagtataatgtatgcactactgttttaaaagaattagtgtgagtgtgtttttgtatgaatgagcccattcatggtaagtcttaagcttgttggaaataatgtacccatgtagactagcaaaatagtatgtagatgtgatctcagttgtaaatagaaaaatctaattcaataaactctgtatcagcccccaacaaaaaaaaaaaaaaaaaa

SEQ ID NO: 6704 - DNA, 600 bp, Homo sapiens
ctggctggatcggccgtcattgcttttggactatggtttcggttcggaggtgccataaaggagttatcatcagaggacaagtccccagagtatttctatgtggggctgtatgttctggttggagccggggccctgatgatggccgtggggttcttcgggtgctgcggaccatgctgggagtcgcaatgtgtgcttggatcattttttacctgcctcctggtgatatttgctgctgaagtaaccactggagtatttgcttttataggcaagggggtagctatccgacatgttcagaccatgtatgaagaggcttacaatgattaccttaaagacaggggaaaaggcaatgggacactcatcacctttccacttcaacatttccagtgctgtggaaaagaaagctccgaacaggtccaacctacatgcccaaaggagcttcttagacacaagaattgcatcgatgaaattgagaccataatcagtgttaagctccagctcattggaattgtcggtattggaattgcaggtctgacgatctttggcatgatattcagcatggtcctctgctgtgcgatacgaaactcacgagatgtgatatga

SEQ ID NO: 6705 - DNA, 1400 bp, Homo sapiens
cctcactcccatcagaaccctgcctgcccacctgcaactcccccccaacaatgccattcccacttgccccagagaagctactcggccaaacctagccagggtctgttcttgtggaccagagccagcctagtcattatttgctgtcgggtttccagtttcaccgtgtgttagggtgagggatgattgtaaaatttgctcctcaaaggaatcaggccagactcaattttgggagggcaagacagggaggaggccgcttcatcccagactctcttctagggcttcccaccatcagcccctcccacttgagactggtctttgggaggcaataggccaccatgcctggtcagcaccaattcaagccatgccaggaatctgcctacctgccaggttcagttcttttaaggtgcctcttcagggacacagtgtgtctctctgattgggcttctaaatcaaaagcctgatgttcgtgtccctctcatagggggagctttggacacaggaccagtttggaaaagggtcaggtaagggtttccactctgcacattgtagagggaacactctgtaggcccatgggtcccttactagagaggttgagtgaatttgccttcagttaacatgggaccttctgtttagcttcctcttgcttcccaaagattttaagcattttgtaaatgtataaactcacctctggtaacagtggcccagacgctgctttgtgctaaaagcatgggaaatgtaaaggcagtctttctctgggaaatggatgctattctattctgctgcccctacctgttcctgaggcctcatttagaaagaaaatcccctcagaaggctgtctggcacccagtgtcctagccaggccaagtatatgagaaaggtaagtccattttccccttcaggtcctcagtggattacttaaccactgctgtccctcggtccctttttcctaaacgggtttagttctgtcttttttctccttttttctaaatgctggtaaatatttacattcagccagggaagaggaggccagaggtcgggccagctgccccattcttttaacgttgtagggcctgcccatggagcggaccctcctctttgggcctcgtgagcttttttgcttatcatgttccatttcgtgccgctttcccccttcaagatgccatttggagggtaggggatctgcttcccactgtgactgggctatgggattctgactaccttgcttacagattcatggtttgataaatttgttgtattccaaaacttgaaatgcaggacgccattaagtgtctgtttatatttttggaatatttgtattacttacaattaattaataaaagtgggtttaaaaaacctttccaggaaaaaaaaaaaaaaaaaaaaaaaaaaaaaaaaaaaaa

SEQ ID NO: 6706 - DNA, 1400 bp, Homo sapiens
cgctggcagaggctgtgctccctcctcaggtggcctctggctggctgtgggggactccgtttactaccacagggagacagagggaggtaagccatcccccgggagaccttgctgctgaccatcctaggctgggctggcccaccctcacccccacccccagggtgccctgaggccccaggcagctgctgcctccactatcgatgcctcctgactgcacactgaggactgggactggggttgagttctgtctggttttgttgccattttggtttgggaggctggaaaagcaccccaagaagctattacagagactggagtcaggagagagcaggaggccctcatgttcaccagggaacaggaccacaccggccactgaaggagggcaggagcagtcctccctctgaatggctgcagagttaatgttcccagcccagtcccctttcgggggccttgggagagtttaaggcacctgctggttccaggacctcgctttccatctgttcttgttgcaatgccatcttcaaaccgttttatttattgaagtgtttgttcagttaggggctggagagagggagcttgctgcctcctgccttgctacactaatgtttacagcacctaagcttagcctccagggccccacctctcccagctgatggtgagctgacagtgtccacaggttccaggaccatttgagattggaagctacactcaaagacactcccaccaggctctttctcccttttcctcttctcactgccctggaatcaacaggctggttgctggttagattttctgaaacaggaggtaaaatttttctttggcagaggcccctaagcaagggaggggtgttggagagccagtgcccttaagactggagaaagctgcaatttaccaagttgccttttgccactgtagctgaccaggggactaggttgtagaggtgggaaggcccctctgggctgatcttgtgccattcttgaccttggacctgcttggttaaggagggagtgggccagaccagagtgccaggagctaatggagccaggcctgacacctaggagtggtccaaagccttcagcctagatggtgcaaagctggggccagcctgtcttcaccggcaccctcacctgtgacaccaagacccaccccaatccagacttcacacagtattctcccccacgccgtctatgaccaaaggcccctgccaggtgtgggtccacagcagcaggtatgtgtgaaagcaacgtagcgccccgcggactgcagtgcgcttaaccaactcacctcccttctcttagcccaagcctgtccctcgcacagcctcgcacaaaccacattgcctggtggggcccagtgtactgaaataaagtcgttccgatagacacgtcaaaaaaaaaaaa

SEQ ID NO: 6707 - DNA, 1400 bp, Homo sapiens
ccttataagtgtcccgagtgtgggaaaagtttctctcggagttcacacctcgtcattcacgaaagaactcatgagagagagagactttaccccttctctgagtgtggggaagctgtgagtgacagcaccccctttcttacaaaccatggagcccataaggcagagaagaagctctttgaatgtttgacttgtgggaaaagcttccggcagggcatgcacctcaccagacatcagagaacacacacaggagagaaaccgtataaatgtaccctttgtggggaaaacttctctcatagatccaatttaatcaggcaccagagaatccacacaggagaaaaaccctatacctgtcatgagtgcggagacagcttctctcacagctccaatcggattcgccacctgagaacgcatacgggagagagaccctataaatgttctgaatgtggagaaagcttctctcggagttcccgtcttatgagtcatcagagaactcacacaggttagtaacagtggggtttctctttgccccaggtgaggtggcatattcagaggagcctgttggcaagagctggtattccctgcccagccgaccaaatgacctctgcattcttcaggtaatgggggctcattgtgagggaggtgcagaggcagcagaggattggcataaaactgaaaaggagttctgtctgcatgagaaaggatggcaagtctctgaggtgacctcagggtggaattctctgttaagtccaccctgccccagggtgctcctaccctcttggtctttttaaagccaaggtgcgatttgggcacctgactgtccagtttaccttaacaagtttgggaatccatgtgatgtttttgatacttcttcctcatttgggacattcagtaggagcatttgggcttccggggcccctgagaccaaagaagaggggccaagtaccctgggaaatcagctgaaggtcaacaaaagactggttgtgagttgcagctgtcccgaaggccccagttgggaagccatgggcagtccagatcaagccaccacgtgccctacgatggcctaacaggagtgcccattggcagattacacatgtaaatatgacctcagacaaaaaggaaccagaggcccaagggcaataataaggtggaatttgcaggtcagcccaggaattggcagaggaagtaggtgtctgataaccctttgtggagaatgagattccccccacctgtgtgagaaaaataaacagctctggagtcttgttcctgactccagaggaacgagagcattccaggaaagagagattccctggaaaattgaaaatgtgaatcctagggggaaattggggattgtgtctttccctgttgaaaatgtttggatgggaataaatatcttcaggaaa

SEQ ID NO: 6708 - DNA, 1400 bp, Homo sapiens
ctctgcgccagctcgtgaaggatcgcctcgggggacggagcggaggatacagttctggaaaacaaggcagaagtgatagttcaagtaagaaggatgtgattgagctgacagacgacagctttgataagaatgttctggacagtgaagatgtttggatggttgagttctatgctccttggtgtggacactgcaaaaacctagagccagagtgggctgccgcagcttcagaagtaaaagagcagacgaaaggaaaagtgaaactggcagctgtggatgctacagtcaatcaggttctggcctcccgatacgggattagaggatttcctacaatcaagatatttcagaaaggcgagtctcctgtggattatgacggtgggcggacaagatccgacatcgtgtcccgggcccttgatttgttttctgataacgccccacctcctgagctgcttgagattatcaacgaggacattgccaagaggacgtgtgaggagcaccagctctgtgttgtggctgtgctgccccatatccttgatactggagctgcaggcagaaattcttatctggaagttcttctgaagttggcagacaaatacaaaaagaaaatgtgggggtggctgtggacagaagctggagcccagtctgaacttgagaccgcgttggggattggagggtttgggtaccccgccatggccgccatcaatgcacgcaagatgaaatttgctctgctaaaaggctccttcagtgagcaaggcatcaacgagtttctcagggagctctcttttgggcgtggctccacggcacctgtaggaggcggggctttccctaccatcgttgagagagagccttgggacggcagggatggcgagcttcccgtggaggatgacattgacctcagtgatgtggagcttgatgacttagggaaagatgagttgtgagagccacaacagaggcttcagaccattttcttttcttgggagccagtggatttttccagcagtgaagggacattctctactttcttttcttgggagccagtggatttttccagcagtgaagggacattctctacactcagatgactctaccagtggccttttaaccaagaagtagtacttgattggtcatttgaaaacactgcaacagtgaacttttgcatctcaagaaaacattgaaaaattctatgaattgttgtagccggtgaattgagtcgtattctgtcacataatattttgaagaaaacttggctgtcgaaacatttttctctctgactgctgcttgaatgttcttggaggctgtttcttatgtatgggttttttttaatgtgatcccttcatttgaatattaatggctttttccattaaagaataaattggaaaaaagaaaaaaaaaaaaaggaattc

SEQ ID NO: 6709 - DNA, 600 bp, Homo sapiens
gccggccactgcatctcgagggatctgacctaccaggtggtgttgggtgagtacaaccttgctgtgaaggagggccccgagcaggtgatccccatcaactctgagctgtttgtgcatccactctggaaccgctcgtgtgtggcctgtggcaatgacatcgccctcatcaagctctcacgcagcgcccagctgggagatgccgtccagctcgcctcactccctcccgctggtgacatccttcccaacaagacaccctgctacatcaccggctggggccgtctctataccaatgggccactcccagacaagctgcagcaggcccggctgcccgtggtggactataagcactgctccaggtggaactggtggggttccaccgtgaagaaaaccatggtgtgtgctggagggtacatccgctccggctgcaacggtgactctggaggacccctcaactgccccacagaggatggtggctggcaggtccacggtgtgaccagctttgtttctggctttggctgcaacttcatctggaagcctacggtgttcactcgagtctccgccttcatcgactggattgaggagaccatagcaagccactag

SEQ ID NO: 6710 - DNA, 600 bp, Homo sapiens
agagccatggcaaagaatggacttgtaatttgcatcctggtgatcaccttactcctggaccagaccaccagccacacatccagattaaaagccaggaagcacagcaaacgtcgagtgagagacaaggatggagatctgaagactcaaattgaaaagctctggacagaagtcaatgccttgaaggaaattcaagccctgcagacagtctgtctgcgaggcactaaagttcacaagaaatgctaccttgcttcagaaggtttgaagcatttccatgaggccaatgaagactgcatttccaaaggaggaatcctggttatccccaggaactccgacgaaatcaacgccctccaagactatggtaaaaggagcctgccaggtgtcaatgacttttggctgggcatcaatgacatggtcacggaaggcaagtttgttgacgtcaacggaatcgctatctccttcctcaactgggaccgtgcacagcctaacggtggcaagcgagaaaactgtgtcctgttctcccaatcagctcagggcaagtggagtgatgaggcctgtcgcagcagcaagagatacatatgcgagttcaccatccctcaatag

SEQ ID NO: 6711 - DNA, 1400 bp, Homo sapiens
attacaagaagaaaccaagacattacaccatggtttttagacatttctgatttggtttcttatctttcattttataagaaggttggttttaaacaatacactaagaatgactcctataaagaaaacaaaaaaaggtagtgaactttcagctaccttttaaagaggctaagttatctttgataacatcatataaagcaactgttgacttcagcctgttggtgagtttagttgtgcatgcctttgttgtatataagctaaattctagtgacccatgtgtcaaaaatcttacttctacatttttttgtatttattttctactgtgtaaatgtattcctttgtagaatcatggttgttttgtctcacgtgataattcagaaaatccttgctcgttccgcaaatcctaaagctccttttggagatgatataggatgtgaaatacagaaacctcagtgaaatcaagaaataatgatcccagccagactgagaaaatgtaagcagacagtgccacagttagctcatacagtgcctttgagcaagttaggaaaagatgcccccactgggcagacacagccctatgggtcatggtttgacaaacagagtgagagaccatattttagccccactcaccctcttgggtgcacgacctgtacagccaaacacagcatccaatatgaatacccatcccctgaccgcatccccagtagtcagattatagaatctgcaccaagatgtttagctttataccttggccacagagagggatgaactgtcatccagaccatgtgtcaggaaaattgtgaacgtagatgaggtacatacactgccgcttctcaaatccccagagcctttaggaacaggagagtagactaggattccttctcttaaaaaggtacatatatatggaaaaaaatcatattgccgttctttaaaaggcaactgcatggtacattgttgattgttatgactggtacactctggcccagccagagctataattgttttttaaatgtgtcttgaagaatgcacagtgacaaggggagtagctattgggaacagggaactgtcctacactgctattgttgctacatgtatcgagccttgattgctcctagttatatacagggtctatcttgcttcctacctacatctgcttgagcagtgcctcaagtacatccttattaggaacatttcaaaccccttttagttaagtctttcactaaggttctcttgcatatatttcaagtgaatgttggatctcagactaaccatagtaataatacacatttctgtgagtgctgacttgtctttgcaatatttcttttctgatttatttaattttcttgtatttatatgttaaaatcaaaaatgttaaaatcaatgaaataaatttgcagttaaga

SEQ ID NO: 6712 - DNA, 1400 bp, Homo sapiens
gctctttctttctgaactgcaagtgctacatgatatttcaagcttgctgtctcgtcataagcatctagccaaggatcattctcctgatttatattcactggagctggcaggtttggatgaaattgggaagcgttatggggaagactctgaacaattcagagatgcttctaagatccttgttgacgctctgcaaaagtttgcagatgacatgtacagtctttatggtgggaatgcagtggtagagttagtcactgtcaagtcatttgacacctccctcattaggaagacaaggactatccttgaggcaaaacaagcgaagaacccagcaagtccctataaccttgcatataagtataattttgaatattccgtggttttcaacatggtactttggataatgatcgccttggccttggctgtgattatcacctcttacaatatttggaacatggatcctggatatgatagcatcatttataggatgacaaaccagaagattcgaatggattgaatgttacctgtgccagaattagaaaagggggttggaaattggctgttttgttaaaatatatcttttagtgtgctttaaagtagatagtatactttacatttataaaaaaaaatcaaattttgttctttattttgtgtgtgcctgtgatgtttttctagagtgaattatagtattgacgtgaatcccactgtggtatagattccataatatgcttgaatattatgatatagccatttaataacattgatttcattctgtttaatgaatttggaaatatgcactgaaagaaatgtaaaacatttagaatagctcgtgttatggaaaaaagtgcactgaatttattagacaaacttacgaatgcttaacttctttacacagcataggtgaaaatcatatttgggctattgtatactatgaacaatttgtaaatgtcttaatttgatgtaaataactctgaaacaagagaaaaggtttttaacttagagtagccctaaaatatggatgtgcttatataatcgcttagttttggaactgtatctgagtaacagaggacagctgttttttaaccctcttctgcaagtttgttgacctacatgggctaatatggatactaaaaatactacattgatctaagaagaaactagccttgtggagtatatagatgcttttcattatacacacaaaaatccctgagggacattttgaggcatgaatataaaacatttttatttcagtaacttttccccctgtgtaagttactatggtttgtggtacaacttcattctatagaatattaagtggaagtgggtgaattctactttttatgttggagtggaccaatgtctatcaagagtgacaaataaagttaatgatgattccaaaaaaaaaa

SEQ ID NO: 6713 - DNA, 600 bp, Homo sapiens
gccagccaagtcttcatttggggccaaaggggaaacttttttttggagaaggcgtcttgctttgtcacccacgctggaatgcagtggcgggatctcagctcaccgcaacctccacctcctgggttcaagtgattttcctgcctcagcctcccaagtagctgggaatacaggcacgccaccatgcccagctaatttttgtattttcagtagaaacgggatttcaccacgttggccaggctggtctcgaactcctgaccgcaagtgatccacccgcctccgcctcccaaagtgctgggattacaggcgtgagccaccgtgcccggcccaaaggggaaactcttgtgggaggagcagaggggctcacatctcccctctgattcccccatgcacattgccttatctctccccatctagccaggaatctattgtgtttttcttctgccaatttactatgattgtgtatgtgccgctaccaccaccccccccatgggggggtggagaggggtgcaaggccctgcctgctccactttttctaccttggaactgtattagataaaatcacttctgtttgttcagtttttcaaaaaaaaaaaaaaaaaa

SEQ ID NO: 6714 - DNA, 530 bp, Homo sapiens; identical to SEQ ID NO: 1479

SEQ ID NO: 6715 - DNA, 1398 bp, Homo sapiens; identical to SEQ ID NO: 1480
  misc_feature (1120)..(1121): n is a, c, g, or t
  misc_feature (1369)..(1369): n is a, c, g, or t

SEQ ID NO: 6716 - DNA, 1400 bp, Homo sapiens
cagcacccaggctgaactctgtaccatttggaagaatggaagctgatgcatctgttgacatgttttccaaagtcctggagcatcagctgcttcagactaccaaactggtggaagaacatttggattctgaaattcaaaaactggatcagatggatgaggatgaattggaacgccttaaagaaaagagactccaggcactaaggaaagctcaacagcagaaacaagaatggctttctaaaggacatggggaatacagagaaatccctagtgaaagagacttttttcaagaagtcaaggagagtgaaaatgtggtttgccatttctacagagactccacattcaggtgtaaaatactagacagacatctggcaatattgtccaagaaacacctcgagaccaaatttttgaagctgaatgtggaaaaagcacctttcctttgtgagagactgcatatcaaagtcattcccacactagcactgctaaaagatgggaaaacacaagattatgttgttgggtttactgacctaggaaatacagatgacttcaccacagaaactttagaatggaggctcggttcttctgacattcttaattacagtggaaatttaatggagccaccatttcagaaccaaaagaaatttggaacaaacttcacaaagctggaaaagaaaactatccgaggaaagaaatatgattcagactctgatgatgattagagctcaataattctttgtaaattgtctttttttttctgcttcagatttaaatgtgtttttaaaattctattaatgtctatacattggtcacctaaatactcatattctcgagttttatacagttgtatcacatcgaaaagtgtctttactgttttctgtgtggccatcatgtttaagttgaggaaaactcagttcttaaattatctgggaagggtctggattctctatttttgagattgactttatcacaatatgattcttacatctttataccatttacaattgtgttttagatctacagagttagaaattcgaaaactattccaggactaattcttaatcggcattatttatacaagaggtcaagtaacatttactagcgcaatactgcacttgtaaatgaattataaacgctcttctggaatatatttaaataaccattaaagaactgcttattcattctggacactgcatgttgatgttgaatcaactgatgccagcagaaagctattttgatttgtgaacatactgccttatttaaagggtcctgattgcttgtattttaagacattcattaaaaagaaaccaggaaacacttttgaaataacagcataaggaacttcactgtctctgctcaataaaatacctgtaactggaaaaaaaaaaaaaaaaaaaaaaaaaaaa

SEQ ID NO: 6717 - DNA, 600 bp, Homo sapiens
  misc_feature (444)..(444): n is a, c, g, or t
tctgtcttccaacccccaataatatttcccaccggggatgcatcatttttactcccaatattctgtagagagggagtcaggatgctgtcttcccacgaatagtactcagtaacaaaccaattgcattttagttgggcagtgctcccacccaccctgcagatccctccagctaaaacccttcccccttccctccatgtgtttctcagtttcccgttcgtttgttggactgttccactgcccctcctcctcaccctatcacccatggatcgtaatgtaaaattcttttaccatgtcaagaaattattaaaaatacaggtactttgacctctttctaaagccgcagaccctggtgcaatgctctggtggctagggatgtactcatgctcatatgtgtgcacgcttggacacccacctccatggacacctagccaccctgttgtgtgnccttatgccagttgagctgaatcttttccccagtatagtggaaagactgaggcttctgcctactgagcaaggttgggtgcttcatttgtgttcagtctgaattatgggaaagttagctcttcccagacctaagctgccttctctccctactttcag

SEQ ID NO: 6718 - DNA, 1324 bp, Homo sapiens; identical to SEQ ID NO: 1483

SEQ ID NO: 6719 - DNA, 1400 bp, Homo sapiens
ctgtgaaggaaaaactttcttctttaaggattctcagtactggcgttttaccaatgatataaaagatgcagggtaccccaaaccaattttcaaaggatttggaggactaactggacaaatagtggcagcgctttcaacagctaaatataagaactggcctgaatctgtgtattttttcaagagaggtggcagcattcagcagtatatttataaacaggaacctgtacagaagtgccctggaagaaggcctgctctaaattatccagtgtatggagaaatgacacaggttaggagacgtcgctttgaacgtgctataggaccttctcaaacacacaccatcagaattcaatattcacctgccagactggcttatcaagacaaaggtgtccttcataatgaagttaaagtgagtatactgtggagaggacttccaaatgtggttacctcagctatatcactgcccaacatcagaaaacctgacggctatgattactatgccttttctaaagatcaatactataacattgatgtgcctagtagaacagcaagagcaattactactcgttctgggcagaccttatccaaagtctggtacaactgtccttagactgatgagcaaaggaggagtcaactaatgaagaaatgaataataaattttgacactgaaaaacattttattaataaagaatattgacatgagtataccagtttatatataaaaatgtttttaaacttgacaatcattacactaaaacagatttgataatcttattcacagttgttattgtttacagaccatttaattaatatttcctctgtttattcctcctctccctcccattgcatggctcacacctgtaaaagaaaaaagaatcaaattgaatatatcttttaagaattcaaaactagtgtattcacttaccctagttcattataaaaaatatctaggcattgtggatataaaactgttgggtattctacaacttcaatggaaattattacaagcagattaatccctctttttgtgacacaagtacaatctaaaagttatattggaaaacatggaaatattaaaattttacacttttactagctaaaacataatcacaaagctttatcgtgttgtataaaaaaattaacaatataatggcaataggtagagatacaacaaatgaatataacactataacacttcatattttccaaatcttaatttggatttaaggaagaaatcaataaatataaaatataagcacatatttattatatatctaaggtatacaaatctgtctacatgaagtttacagattggtaaatatcacctgctcaacatgtaattatttaataaaactttggaacattaaaaaaataaattggaggcttaaaaaaaaaaaaaaaaa

SEQ ID NO: 6720 - DNA, 937 bp, Homo sapiens; identical to SEQ ID NO: 1485

SEQ ID NO: 6721 - DNA, 600 bp, Homo sapiens
cagagcactgcagcatccagcctttcaaagctgactcttctcaatcatctgtgggtcatttgacttgattttttaagctaccctgaatttccagaatgcaggttctaaagaaatctagatgagagaaagtatttgaaaatgatttttaaatgttttttaaaagacacatctgacatttttaacaacttagtaaaagttgaaatgaccattctgtgtagtcataaaagaaacacaatgaagtgtatggcctctggagttagtcttagtaaaacttattgctctgtgtcaatgttaacctgtctcagatcaagtaattccttcactaggttgggtttggggaggggggaaaagaggggcttttcctaggagaacgataagaaatggaaagactccttgaagtgttgcaagggaacctcctagcactgtgaaagtcagaatcgcctcagcatttccatgacgcacattatgcaaatctctttagcactattttaaggttgaaaactttaacaatgaaggggaaggggaagatttccaccaactgaatcatttgtgcacgtgtatagctcaaagagcttagacttcaaatatatctggtgaatg

SEQ ID NO: 6722 - DNA, 1400 bp, Homo sapiens
aaaagcctggatctgcagcagaatgagatctctaaaattgagagtgaggcgttctttggtttaaacaaactcaccaccctcttactgcagcacaaccagatcaaagtcttgacggaggaagtgttcatttacacacctctcttgagctacctgcgtctttatgacaacccctggcactgtacttgtgagatagaaacgcttatttcaatgttgcagattcccaggaaccggaatttggcgaactacgccaagtgtgaaagtccacaagaacaaaaaaataaaaaactgcggcagataaaatctgaacagttgtgtaatgaagaagaaaaggaacaattggacccgaaaccccaagtgtcagggagacccccagtcatcaagcctgaggtggactcaactttttgccacaattatgtgtttcccatacaaacactggactgcaaaaggaaagagttgaaaaaagtgccaaacaacatccctccagatattgttaaacttgacttgtcatacaataaaatcaaccaacttcgacccaaggaatttgaagatgttcatgagctgaagaaattaaacctcagcagcaatggcattgaattcatcgatcctgggtctttgagatgaaaccctgcaagtagacttacgtgaatgatttttgctgtgccgcttttttagggctcacacatttagaagaattagatttatcaaacaacagtctgcaaaactttgactatggcgtattagaagacttgtattttttgaaactcttgtggctcagagataacccttggagatgtgactacaacattcactacctctactactggttaaagcaccactacaatgtccattttaatggcctggaatgcaaaacgcctgaagaatacaaaggatggtctgtgggaaaatatattagaagttactatgaagaatgccccaaagacaagttaccagcatatcctgagtcatttgaccaagacacagaagatgatgaatgggaaaaaaaacatagagatcacaccgcaaagaagcaaagcgtaataattactatagtaggataaggtagaaattgttctgattgtaattagttttgtattttctatactggtgttagaaaacatatgtttacatttgattaactgtgttgcctatttatgcagggtaatccagctaaaggaagctttctttaattataagtattattgtgactattatagtaatcaagagaatgctatcatcctgcttgcctgtccatttgtggaacagcatctggtgatatgcaattccacactggtaacctgcagcagttgggtcctaatgatggcattagactttcataatgtcctgtataaatgtttttactgcttttagaaaataaagaaaaaaaacttggttcatgttta

SEQ ID NO: 6723 - DNA, 600 bp, Homo sapiens
ggaccctaactacctggccaccatggccatggatggaatggaggtggtgattctagatgtccgggttccctgcacacctgtcgccaggttaaacaaccatcgagcatgtgtcaatggcattgcttgggccccacattcatcctgccacatctgcactgcagcggatgaccaccaggctctcatctgggacatccagcaaatgccccgagccattgaggaccctatcctggcctacacagctgaaggagagatcaacaatgtgcagtgggcatcaactcagcccgactggatcgccatctgctacaacaactgcctggagatactcagagtgtagtgttggtggcgctgtgcccacgaggcaggggcttttgtatttcctgcctctgccccacccccaaagtaagaagaaacatgtttccagtggccagtatgtctttcattgctttgcacccactgttaccagaagctgctctaggagttcctggccagtcaccccatcgccctctgtggcagactcagtgctgtgtggcgccctcctagcccagggctgagttttaagattttctctcctttcctcttctcctttggttcctcaattaa

SEQ ID NO: 6724 - DNA, 1297 bp, Homo sapiens; identical to SEQ ID NO: 1489

SEQ ID NO: 6725 - DNA, 600 bp, Homo sapiens
atctctgtgacattacagggaaaaaaatatagttttctatctctttcaagggcagaagagttttcatttttatttttgtaattttatctgtaagtcataaatattacttaatcaggcctgattctacttttgaaaattacagttcttgaaatgcagataatgtttactttgaaaacaaatgtcatgaatgatttccagtttttaaagctatatgtttcactgcttcatatctctgtccactttctgaatgagaacttattttgtgcctagagctctcactcactgataatgcttattaccttctgggcatttattccaaagtgggatcaactgtacgcctttggtatctgaccataaagtcttttgctccgctgacatttgggtgatgtcttcacatggaaatataataaaaataaaaatctagtttaatactgcattatttattttcctaaggctaaagaggagcagtcctatgcttttattcagcatcctttatctgtgacttcatgctctgataactgcctttccttccttctgtgcctttgaatacaaatttcagttctgcaaaagtgaaacattaaacattgccaacgcaaatgt

SEQ ID NO: 6726 - DNA, 1400 bp, Homo sapiens
gctcctttggggataaacctattaattattgctactatcaagagggctgggcattctctgctggtaattcctgaagaggcatgactgcttttctcagccccaagcctctagtctgggtgtgtacggagggtctagcctgggtgtgtacggagggtctagcctgggtgagtacggagggtctagcctgggtgagtacggagggtctagcctgggtgagtacggagagtctagcctgggtgtgtatggaggatctagcctgggtgagtatggagggtctagcctgggtgagtatggagggtctagcctgggtgtgtatggagggtctagcctgggtgagtatggagggtctagcctgggtgtgtatggagggtctagcctgggtgagtatggagggtctagcctgggtgtgtacggagggtctagtctgagtgcgtgtggggacctcagaacactgtgaccttagcccagcaagccaggcccttcatgaaggccaagaaggctgccaccattccctgccagcccaagaactccagcttccccactgcctctgtgtgcccctttgcgtcctgtgaaggccattgagaaatgcccagtgtgccccctgggaaagggcacggcctgtgctcctgacacgggctgtgcttggccacagaaccacccagcgtctcccctgctgctgtccacgtcagttcatgaggcaacgtcgcgtggtctcagacgtggagcagccagcggcagctcagagcagggcactgtgtccggcggagccaagtccactctgggggagctctggcggggaccacgggccactgctcacccactggccccgaggggggtgtagacgccaagactcacgcatgtgtgacatccggagtcctggagccgggtgtcccagtggcaccactaggtgcctgctgcctccacagtggggttcacacccagggctccttggtcccccacaacctgccccggccaggcctgcagacccagactccagccagacctgcctcacccaccaatgcagccggggctggcgacaccagccaggtgctggtcttgggccagttctcccacgacggctcaccctcccctccatctgcgttgatgctcagaatcgcctacctgtgcctgcgtgtaaaccacagcctcagaccagctatggggagaggacaacacggaggatatccagcttccccggtctggggtgaggagtgtggggagcttgggcatcctcctccagcctcctccagcccccaggcagtgccttacctgtggtgcccagaaaagtgcccctaggttggtgggtctacaggagcctcagccaggcagcccaccccaccctggggccctgcctcaccaaggaaataaagactcaaagaagccttttttttttttttttt

SEQ ID NO: 6727 - DNA, 1226 bp, Homo sapiens; identical to SEQ ID NO: 1492

SEQ ID NO: 6728 - DNA, 1400 bp, Homo sapiens
ggtggccagacccctggggctaacaaagtgctgtttgttaatggggacacagacccctggcatgtgctaagtgtaacacaggctttaggatcctcagaatcaactcttcttatccgcactggctcccactgcttggacatggcacctgagaggccctcagactcccccagcctccgcctagggcgccagaacatcttccagcagctacagacctggctcaagctggcaaaggagagccagattaagggtgaagtctgaatctcataccctttccactccctgcatggtcacctcagtcctggacatacttgttcactgaacaaaagaaagcagcttgttttgaaagaagaaactcccaggaattggaattcagcacctgttccgcacgtaattggcatgtgtctgcaaacatccttattcccaacttaaagtgctttattgcagagagttatggaaatataagtggatgattattctcattgtaaatattggtattttgaatgttaaatgtcaaacaaatgtgacttatgctggtgccctcgccctgctgatcagattctggttcaaattctgccactccagctcctgggttaggggctttgctgtaagtttctttttctggactttagatcctgaacctgtccttgcttctcagtttctctcactgtacccctttccctcagtctcttcctctctctttcccctgtcactatttgtctttctaatctccttctgtttctctgaatatcttcatttctatctctgtgtttctgtctatttctctgtttatctttctgtccttcaatctgtgtttttgtttctggctctccgtcagtgtctttttctctcctctctctcttgctctgccatggctatttccactgctctatttctgactctcatttttggtctctgtgtgtctcctagtcactttctttctcactctgtctctgtctctatttctgtctctcctctgctgtgtcctcaatctctctgtctccctgaggctctatttctgtctctcctctgctgtgtcctcaatctctctgtctccctgaggctctatttctgtctctgatgctcttcttctgtgtctctatttctcttcctgtcacttaatcttttccttctctatctctcttatttagtcttccttccacacccttcactcaccatcttttcccacaatcaaatatcactcccctggtacttccagcttccaactctagggattcatgattctggtggagattccttcttccagggcctgggaggatagggctaatcccaagggtgcctgcttaggctatgttagctgtgacaggaacctgccatagatttgcactgttctttcctaaagatcaattattttcagcaataaatacttctcagctttttgt

SEQ ID NO: 6729 - DNA, 600 bp, Homo sapiens
gaagttggtgtttcgctgggccctggtactgaagacgcggtccgggtcgcccctagctgtttcctactcacccaaagccccgcacccgccttttctctctctcctctggcaggatgaggcgtgcaggcctgggtgaaggagtacctcctggcaactatgggaactatggctatgctaatagtgggtatagtgcctgtgaagaagaaaatgagaggctcactgaaagtctgagaagcaaagtaactgctataaaatctctttccattgaaataggccatgaagttaaaacccagaataaattattagctgaaatggattcacaatttgattccacaactggatttctaggtaaaactatgggcaaactgaagattttatccagagggagccaaacaaagctgctgtgctatatgatgctgttttctttatttgtcttttttatcatttattggattattaaactgaggtgatgcatgtaattgtgaatttggaatttgttccaacttaatggcttgcagtaccactttgataaaaatcagcatcaaaacattcctagtgttcaaatactgtggcattttccattgaaaattgctgaatttt

SEQ ID NO: 6730 - DNA, 1292 bp, Homo sapiens; identical to SEQ ID NO: 1495

SEQ ID NO: 6731 - DNA, 600 bp, Homo sapiens
  misc_feature (294)..(294): n is a, c, g, or t
  misc_feature (309)..(309): n is a, c, g, or t
  misc_feature (343)..(343): n is a, c, g, or t
  misc_feature (467)..(467): n is a, c, g, or t
  misc_feature (469)..(469): n is a, c, g, or t
  misc_feature (472)..(472): n is a, c, g, or t
  misc_feature (474)..(474): n is a, c, g, or t
acttcttttattcccaactgcagataagaattacataaaattctcactctgagggagggaggctgcagaggtcactccaccaaacacggcactacctctgtagcttctctcccagcttgcatgatcccaggctctgggtggtgggaagcaggggacattcagggctgtctacaacagttttataaggccctgagcagccttcgagttttttaaattttattttagtgaatacatgcattaaaataaaacaacaacaacaacaacaacaaaaacacaaagaggctagagatttcnccgtttctacccccnaaataacgcttgctatcaagactttggagggggntgggggaaaagaatttaaaagccaaataatttttttttcataaaaagtaaaagctaccataaaacatttttttttctgtcacactgattaaatttcttctgaaaagccgcacatatagacaaancnaancnaaaattcctgaactggacaaacagcaaatactcaacagggttgttaacctaggtaacagttcagtagtttaaagaatcttttagacatctggaagcctttctattcattcctcagtacagtgttcc

SEQ ID NO: 6732 - DNA, 600 bp, Homo sapiens
catgttcttctgtctccaggaagggcagcggccctcccatcactggaagtctgcagtgggggtcgctgggggtggagagaacactaagaggtgaacatgtatgagtgtgtgcacgcgtgtgagtgtgcatgtgtgtgtgtgtgcaaaggtccagccaccccgtcctccagcccgcaaggggtgtctggcgccttgcctgacacccagccccctctccccctgagccattgtgggggtcgatcatgaatgtccgaagagtggccttttcccgtagccctgcgccccctttctgtggctggatggggagacaggtcagggccccccaccctctccagcccctgcagcaaatgactactgcacctggacagcctcctcttttctagaagtctatttatattgtcattttataacactctagcccctgcccttattgggggacagatggtccctgtcctgcggggtggccctggcagaaccactgcctgaagaaccaggttcctgcccggtcagcgcagccccagcccgcccacccctgcctcgagttagttttacaattaaaacattgtcttgtttaaaaaaaaaaaaaaaaaaaaaaaaaaa

SEQ ID NO: 6733 - DNA, 1400 bp, Homo sapiens
gatagccatcccaccataggatgtgtacatagatactgaatatcataatccaatctttgtttttttttttttttttttgagacagagtctcgctttgttgcccaggctggagtgcagtggcacactctccgctcactgcaagctccgcctcccaggttcatgcgattctcctgcctcagcctctcgagtagctgggattacaggcgtgcgccactatgccaggctaatgtttgtatttttagtagcaatggggtttcaccatgttggccaggatggtctcgatctcctgacctcaagtgatctgcccatctcagcctcccaaagtgctggaattataggcgtgaaccaccgcccccggctgcagttggatttttaaattgcttttttttattgttgaggtttttttatctccaagggactctcccggcacttctaccttccagagttacttcagtgcataaagtttgaattattttgttcttgtgggcagaagtgggaatgatggaatatcctcacggaaaaggcagtgaagttgggagtactgcttacaaaacagggtcaccagtgcattatgtggcgtgttcatccccacgccgtgtgtcacgggctagggcggcgtgttcatccccacaccgtgtgtcacaacaggctagggcacttcacgatgtcactacttgtttttctgacgttccaaaaacaacgtaacttggttttcatgtgtttttccatggtatatgtgagattgatgctacgggtcttacggactcacacccgttcccactctctgcaatatggatcaggcagtgtttctgataggatgtgaaatggactctcctcgggtgggtccagcaggggccctgcccaccagaacacagtccgtgctgtgctgcgctaaggagctggccctcaactctccttggtgcagggttcccacaaccgagttctagttccctgaggtctttaaaaacaaaaacagaatgttgtacgtgaagattctaggaggggagggaccagcaaatctgagagaaccgtcctggggcctcccttcgaggagccctctgatgtgaggagggacttgagttgagtgacgctgtggtgtgaggtgttctgagctcactgaccggaaggtccaggtgaatctcgtcataagtgatctcaggctctcacaggatccggagggaaatgtgttagagggtctggaaaattcagtgcttttgagttacttgtttttattaaaaatttcctcacaaaagagagtcctcaagttgtggctgttcttgggaaaggggtcaccgtgtctgacaaagtgtaactttaaaaagcacgttcattttttacaaatgtaagtgtgcttgggaattccttaaattttgtgcaataaactattttttggtaaagat

SEQ ID NO: 6734 - DNA, 600 bp, Homo sapiens
gtattcactgtcactttttctcatgttctaattataaatgaccaaaatcaagattgctcaaaagggtaaatgatagccacagtattgctccctaaaatatgcataaagtagaaattcactgccttcccctcctgtccatgaccttgggcacagggaagttctggtgtcatagatatcccgttttgtgaggtagagctgtgcattaaacttgcacatgactggaacgaagtatgagtgcaactcaaatgtgttgaagatactgcagtcatttttgtaaagaccttgctgaatgtttccaatagactaaatactgtttaggccgcaggagagtttggaatccggaataaatactacctggagtcttgtcctctccatttttctctttctcctcctggcctggcctgaatattatactactctaaatagcatatttcatccaagtgcaataatgtaagctgaatcttttttggacttctgctggcctgttttatttcttttatataaatgtgatttctcagaaattgatattaaacactatcttatcttctcctgaactgttgattttaattaaaattaagtgctaattaccaaaaaaaaaaa

SEQ ID NO: 6735 - DNA, 1400 bp, Homo sapiens
tgtattaaataactgcctgctgctcagagatgatctttattctgtcattggggtatgggatagaagcccttgcttatttttaatctgatgaatctgtatagagcccatcgttgagttaccaagacaatacctgctacagtattttggggagcaaactaaagaccagaacttaaattttcactttagacattggatgaatagtatgaagacagtttttcagttgatttggataaaactattttagtgcattgacaagtgtaacttcaacttcatatagaaccatttttctttctgcttttattgaaactgagtatttttctttggctaatgtggattttttatggggatatctgttaattttcaggttttgaaagacattaacctcggaagttgtttttaagaattattctcataattcttattctcataatttctgtaatccacctcaagcttcatagttatttggcattgaaataacacccagagcatgatagaaatgttgttactcttcctctctcaaggagaaagtaattttcctgcaatacttaataattggcaccgttgctttctaaagactccatggtgcattcaagagtatccaacttcaagggaatctccgcatttcaatgaaaggaggaagagtgtgctgataaacctaccagcacctattgagcaatgtctattatagtaattttgcatacatttttatttaagggaaaaaatataggtattgtgaaatattttgctaatcttatagaaaaggaaaaaatcccgttatttaaagggaaaagtaaatttaacagttgccttttttcttaatgtcagggcagatcttattttacagtacagtgggggaaatagaaaacatgtgaaaggcaaaaggcaggctcctaaattaatgtcagtgaagttcagggtgggcaaatgagtgtgtgtgaggtataggaaatgctgatgacttctttaatgcttgaagtccgttcacaggtatctagccctagaatgcctagaacaggaagaggcagctggtgttctgcaaaacttggacaggggcaaagttgctgaaaaagttttggtttaacccgaagataagtggaaaagagcttgtccatgaacccaggttctcactctgtttacagaagtgtgttgagtacagttggtgaaggaagaggtaacaaaaaatgctaaatattttatccatgaaaatgacttccagaaaaggaagaatatgaaccccagaccgaaggggaaaagatagttaatagtattatctaacctggttggtatttgtaatgaatggtgattttaattagtcattagccataatgatgtttatttacagtataactcctgaatgctacttaaataaaccaggattcaaactgcaaaaaaaaaaaaaa

SEQ ID NO: 6736 - DNA, 600 bp, Homo sapiens
gcggggatgtccctgggagggacatgcttagcagtccccttccctccaagaaggatttggtccgtcataacccaaggtaccatcctaggctgacacctaactcttctttcatttcttctacaactcatacactcgtatgatacttcgacactgttcttagctcaatgagcatgtttagactttaacataagctatttttctaactacaaaggtttaaatgaacaagagaagcattctcattggaaatttagcattgtagtgctttgagagagaaaggactcctgaaaaaaaacctgagatttattaaagaaaaaaatgtattttatgttatatataaatatattattacttgtaaatataaagacgttttataagcatcattatttatgtattgtgcaatgtgtataaacaagaaaaataaagaaaagatgcactttgctttaatataaatgcaaataacaaatgccaaattaaaaaagataaacacaagattggtgttttttcctatgggtgttatcacctagctgaatgtttttctaaaggagtttatgttccattaaacgatttttaaaatgtacacttgaaaaaaaaaaaaaaaaa

SEQ ID NO: 6737 - DNA, 1400 bp, Homo sapiens
actctagtcaatgacatgaattttagcttttgtgggggactgtaagttgggcttgctattctgtccctaggtgttttgttcaccattataatgaatttagtgagcataggtgatccatgtaactgcctagaaacaacactgtagtaaataatgctttgaaattgaacctttgtgccctatcacccaacgctccaaagtcataattgcattgactttccccaccagatgctgaaaatgtccttgtgatgtgcacgtaaagtacttgtagttccacttatagcctctgtctggcaatgccacagccctgtcagcatgaatttgtaatgtcttgagctctattatgaatgtgaagccttccccttatcctccctgtaacttgatccatttctaattatgtagctctttgtcagggagtgttccctatccaatcaatcttgcatgtaacgcaagttcccagttggagctccagcctgacatcaaaaaaggcagttaccattaaaccatctccctggtgcttatgctcttaattgccacctctaacagcaccaaatcaaaatctctccactttcagctgtcttttggaggacgtacgtaataaggttttaatttagtaaaccaatcctatgcatggtttcagcactagccaaacctcaccaactcctagttctagaaaaacaggcacttggcagccttgtgatgtcatacagagaagtcacagggcagtacctgagggtctgtaggttgcacactttggtaccagataacttttttttttctttataagaaagcctgagtactccacactgcacaataactcctcccagggttttaactttgttttattttcaaaaccaggtccaatgagctttctgaacagctggtgtagctacagagaaaccagcttccttcagagagcagtgcttttggcggggaggaggaaatcccttcatacttgaacgttttctaattgcttatttattgtattctggggtatggcgtaagtacagagaagccatcacctcagatggcagcttttaaaagattttttttttttctctcaacaccatgattcctttaacaacatgtttccagcattcccaggtaggccaaggtgtcctacagaaaaaccttgggttagacctacagggggtctggctggtgttaacagaagggagggcagagctggtgcggctggccatggagaaagctgacttggctggtgtggtacagagaagccagcttgtttacatgcttattccatgactgcttgccctaagcagaaagtgcctttcaggatctatttttggaggtttattacgtatgtctggttctcaattccaacagtttaatgaagatctaaataaaatgctaggttctaccttaaaaaaaaaaaaaaaaaa

SEQ ID NO: 6738 - DNA, 1267 bp, Homo sapiens; identical to SEQ ID NO: 1503

SEQ ID NO: 6739 - DNA, 1321 bp, Homo sapiens; identical to SEQ ID NO: 1504

SEQ ID NO: 6740 - DNA, 600 bp, Homo sapiens
gcctttataacccacgaaaggctgaaaagcagagattttataaaaggagatgatgtttatatcctactgacagtggaagacatatctcacctcaactctacacaaatccagctaacaccagcccctagtgttcaagacctctgctcaaaaaccacctgtaaaaatgacggtgtctgcactgttcgagatggcaaagctgagtgcaggtgccagtcaggggaagactggtggtacatgggagaaaggtgtgaaaagagaggctccacccgagacaccatagtcattgctgtttcatctactgttgctgtgtttgccttgatgctgatcatcacccttgtcagtgtctattgcaccaggaagaaatatcgtgaaaggatgagctcaaatcgaccaaatttgactctgcaaaatcatgctttttgaagattaactcgacaatatggccagctaatgaaattaaaaaggattcttcatcatggatttcgcctaagtgatattacagccacctcattcttctaaaagtggatatttttctgtaaatagctggaaatattataaatcactattttggtcaaagtcaaaaaaaaaaaaaaaaaaaaa

SEQ ID NO: 6741 - DNA, 600 bp, Homo sapiens
tcagaggcagcaccaccacacagtcacccctccctccctctttcccaccctccacctctcacgggccctgccccagcccctaagccccgtcccctaacccccagtcctcactgtcctgttttcttaggcactgagggatctgagtaggtctgggatggacaggaaagggcaaagtagggcgtgtggtttccctgcccctgtccggaccgccgatcccaggtgcgtgtgtctctgtctctcctagcccctctctcacacatcacattcccatggtggcctcaagaaaggcccggaagccccaggctggagataacagcctcttgcccgtcggccctgcgtcggccctggggtaccatgtgccacaactgctgtggccccctgtccccaagacacttccccttgtctccctggttgcctctcttgccccttgtcctgaagcccagcgacacagaagggggtggggcgggtctatggggagaaagggagcgaggtcagaggagccggcatgggttggcagggtgggcgtttggggccctcatgctggcttttcaccccagaggacacaggcagcttccaaaatatatttatcttcttcacggg

SEQ ID NO: 6742 - DNA, 1400 bp, Homo sapiens
caaggaacgatagctaaaaatccagagactgtcatgcagttccttgaaaaactatctgacaaactttctgaaagaactctgaaagattttgagatgatacgagggatgaaaatgaaactgaatgctcaaaattccgaagtaatgccctgggaccccccttactacagtggtgtgattcgtgcagaaaggtataatattgagcccagcctatattgcccgtttttctctcttggagcatgcatggaaggcctgaatattttgcttaacagactgttggggatttcattatatgcagagcagcctgcaaaaggagaggtgtggagcgaagatgtccgaaaactggctgttgttcatgaatctgaaggattgttggggtacatttactgtgatttttttcagcgagcagacaaaccacatcaggattgccatttcactatccgtggaggcagactaaaggaagatggagactatcaactcccacttgtagttcttatgctgaatcttccccgttcctcaaggagttctccaactttgctaactcctggcatgatggaaaatcttttccatgaaatgggacatgccatgcattcaatgctaggacgtactcgttaccaacacgtcactgggaccaggtgccctactgattttgctgaggttccttctattctgatggagtactttgcaaatgattatcgagtagttaaccaatttgccagacattatcagactggacagccactgccaaaaaatatggtgtctcgtctttgtgaatctaaaaaggtttgtgctgcagctgatatgcaacttcaggtcttttatgccactctggatcaaatctaccatgggaagcatcccctgaggaattcaaccacagacattctcaaggaaacacaagagaaattctatggcctaccatatgttccaaatactgcctggcagctgcgattcagccacctcgtggggtatggtgctagatattactcttacctcatgtccagagcggtcgcctccatggtttggaaggagtgttttctacaggatcctttcaacagggctgccggggagcgctatcgcagggagatgctggcccacggtggaggcagggagcccatgctcatggttgaaggtatgcttcagaagtgtccttctgttgatgacttcgtaagtgccctcgtttccgacttggatctggacttcgaaactttcctcatggattctgaataaaagaaacactctacacctctaatcaaggtcatgtagtaatgactttgttataaatgctacagctgtgagagcttgtttctgattgtttcattgttcgcttctgtaattctgaaaaactttaaactggtagaacttggaataaataatttgttttaattaaaaaaaaaaaaaaaaaa

SEQ ID NO: 6743 - DNA, 600 bp, Homo sapiens
gcaggtcgtggtcacctgccagcgactgtctcagactgggcagggaggctttggcatgacttaagaggaagggcagtcttgggacccgctatgcaggtcctggcaaacctggctgccctgtctcatccctgtccctcagggtagcaccatggcaggactgggggaactggagtgtccttgctgtatccctgttgtgaggttccttccaggggctggcactgaagcaagggtgctggggccccatggccttcagccctggctgagcaactgggctgtagggcagggccacttcctgaggtcaggtcttggtaggtgcctgcatctgtctgccttctggctgacaatcctggaaatctgttctccagaatccaggccaaaaagttcacagtcaaatggggaggggtattcttcatgcaggagaccccaggccctggaggctgcaacatacctcaatcctgtcccaggccggatcctcctgaagcccttttcgcagcactgctatcctccaaagccattgtaaatgtgtgtacagtgtgtataaaccttcttcttcttttttttttttaaactgaggattgtcattaaacacagttgttttct

SEQ ID NO: 6744 - DNA, 600 bp, Homo sapiens
ttcaagacaagagctgttatgctgtttcctagctaggagcaggcttgtggcagcctgattcggggctgacctttcaaaccagagggttgctggtcctgcacatgagtggaaatacactcatggggaagcttccatgatgcacagtatctgctgttcttcagtcctttgtctttctttgtcattcagttctaggcctttcctctgcacgctcaatgcccagtaaaatttcaggattaactaaagaagaggagaaaaagaagaaaagattctttcttaaaagtttctaatgttattttccttctgaagtctgagcccatttctggggggagaaaaaaaaagcaaatcagaaaacccacggtttttctttttttctttttttctttttttcttttttggctttaaaacaaagggaaaaaagagtttaaacaaaaaacccacaattgaacttccaggaaagtgtgaagacccaaaacagctttgtctccaaagaagatagctctctgactgctttggatagtctcctacgcaccattttgtcaggtgggagatttggaatacacatgcaggacgttagactgttgggacagccattttccaaca

SEQ ID NO: 6745 - DNA, 396 bp, Homo sapiens; identical to SEQ ID NO: 1510

SEQ ID NO: 6746 - DNA, 186 bp, Homo sapiens; identical to SEQ ID NO: 1511

SEQ ID NO: 6747 - DNA, 1400 bp, Homo sapiens
agcagaaaacttgtgtgaaattttcttgatttgagttgattgagaagaggacattggagatgccatcctctttctcttttctagtttgctcatactacattgagtagacacatttaaggatggggttatgaacccttcctgagctttatggtcctaaaagcaaaataaaaactattcgaatgaaaagacaagaaaatcaggtattaatcttggatagctaataatgagctattaaaactcagcctgggacagtttatcatgaagcctgtggatgatcaatcctttattattattttttttttttgaaaaaagctcatttcatgctctgcaaaaggagagactcccatgaagccttttgaaagggatcatcatgcagctcaactttctgttggattccatgctaagcaagctaaccttatcctgcattgttagcactaggcacccagctgccacctctccatcctgctgcccttaggccacatgggagcagtccatgcatgacagcctctatcctacaaggcctatgagtatggattgggggggccaaaaggaaaaagctccatgtgcctctttgtctgcgtgggtcagaagagttgtgcacgcagattagcaggccaaggtctgagccacagcagcatttttatttcagattttgataactgtttatatgtgttgaaaaccaaaatgacatctttttaaagcttatccataaaaaaaaatagatgtcttttatagtggaaaaacacatggggaaaaaaatcatctattttgatgcagcatttgataatgataaaacacctcacacctcactctttatagtgcacaaaatgaatgaggtctgggctaggtagaaaaagggtcaatgctatttttgtttttagaatcattaccttttaccagcttttaaccatctgatatctatagtagacacactatcatagttaacatagttaagttcagcacttgtctcattttaatgtaaagatttgcttccattttcctacaggcagtctctctcttcctcacagtcccactgtgcaggtgctattgttactcttacgaatattttcagtaatgttattttcttctaagtgaaatttctagcctgcactttgatgtcatgtgttccctttgtctttcaaactccaaggttcccctgtggccctctcccttaccctgggaaggcctcttggagaccttacccctggctgtttggactttgtatactttaaataatttaactacccttaattacttaaaaaaaaaaaaaagctttatgattttcataacttattgctgattttaatggattgttaatttcagtcctgtagttttattttatgtttagatagggctgggcaaggaaaaagaaaataaagacaaccatatttagcagtgca

SEQ ID NO: 6748 - DNA, 481 bp, Homo sapiens; identical to SEQ ID NO: 1513

SEQ ID NO: 6749 - DNA, 600 bp, Homo sapiens
atcagggatagggccaaggagaaaacaaccaagaactctttcctgtaataagcaggatccagtttgagaaagtttagcgaatataaaagtaaaagccatttaaaaatctatattctttttttttttttgacacagagtcttgctctgttgcccaggctggagtgcaatggcatgatctcggctcaccgcaacctctgcctcccgggttcaagcgatcctcctgcctcagtctcccaagtagctgggattacaggtgtgcaccaccacgcctgactaattttgtatttttagtagagacagggtttcaccatgttagtcaggctggtctcgaactcctgacctcaggtgatccacccgcgttggcctcccaacgtgctgggattataggcgtgagccaccacgccccgcctaaaatccatattcaaagaagcaatttcagttcctttctaagctttgtcagtcaaggggctccactgacttcctaggccctgtaatttaaccagtctttaaggttttgcaggaaagtcccttcttccaagtggtttttccaaatcgcacaatggcaaagccaaacagaggaagaaacattaaaaaaaaaaa

SEQ ID NO: 6750 - DNA, 600 bp, Homo sapiens
cagcaactggtttaagaaccggaggcaaagagaccgggccgcggaggccaaggaaagggagaacaccgaaaacaataactcctcctccaacaagcagaaccaactctctcctctggaagggggcaagccgctcatgtccagctcagaagaggaattctcacctccccaaagtccagaccagaactcggtccttctgctgcagggcaatatgggccacgccaggagctcaaactattctctcccgggcttaacagcctcgcagcccagtcacggcctgcagacccaccagcatcagctccaagactctctgctcggccccctcacctccagtctggtggacttggggtcctaagtggggagggactggggcctcgaagggattcctggagcagcaaccactgcagcgactagggacacttgtaaatagaaatcaggaacatttttgcagcttgtttctggagttgtttgcgcataaaggaatggtggactttcacaaatatctttttaaaaatcaaaaccaacagcgatctcaagcttaatctcctcttctctccaactctttccacttttgcattttccttcccaatgcagagatcaggg

SEQ ID NO: 6751 - DNA, 600 bp, Homo sapiens
gccatacagggctgttgcccaggccctagaggtcattcctcgtaccctgatccagaactgtggggccagcaccatccgtctacttacctcccttcgggccaagcacacccaggagaactgtgagacctggggtgtaaatggtgagacgggtactttggtggacatgaaggaactgggcatatgggagccattggctgtgaagctgcagacttataagacagcagtggagacggcagttctgctactgcgaattgatgacatcgtttcaggccacaaaaagaaaggcgatgaccagagccggcaaggcggggctcctgatgctggccaggagtgagtgctaggcaaggctacttcaatgcacagaaccagcagagtctccccttttcctgagccagagtgccaggaacactgtggacgtctttgttcagaagggatcaggttggggggcagcccccagtccctttctgtcccagctcagttttccaaaagacactgacatgtaattcttctctattgtaaggtttccatttagtttgcttccgatgattaaatctaagtcatttgaaaaaaaaaaaaaaaaaaaaaaaaaaaaaaaaaaaa

SEQ ID NO: 6752 - DNA, 600 bp, Homo sapiens
aatcagcaatgcctgtggaacaattggactgattcatgctattgcaaacaataaagacaagatgcactttgaatctggatcaaccttgaaaaaattcctggaggaatctgtgtcaatgagccctgaagaacgagccagatacctggagaactatgatgccatccgagttactcatgagaccagtgcccatgaaggtcagactgaggcaccaagtatagatgagaaagtagatcttcattttattgcattagttcatgtagatgggcatctctatgaattagatgggcggaagccatttccaattaaccatggtgaaactagtgatgaaactttattagaggatgccatagaagtttgcaagaagtttatggagcgcgaccctgatgaactaagatttaatgcgattgctctttctgcagcatagcttgtcaataatggaaacaccaaaaactgtattatttgcaactaaattttctctgccatacactaactcaaaaattttgatattttcattaacttgatgattaaactttatgtgagttaaaaaaaaaaaaaaaaaaaaaaaaaaaaaaaaaaaaaaaaaaaaaaaaaaaaaaaaaa

SEQ ID NO: 6753 - DNA, 515 bp, Homo sapiens; identical to SEQ ID NO: 1518

SEQ ID NO: 6754 - DNA, 1400 bp, Homo sapiens
gaagacggagatgatgcaggtggatgaggtgcccagccaggacagccctggggcagccgagtccagcatctcaggagggatgggggacaaggttgaggaaagaggcaaagaggggcctgggaccccgactcgaagcagcgtcatcaccagtgctagggagctacactatgggcgagaggagagtgccgagcaggtgccacccccagctgaggctggccaggcccccactggccgacctgagcacccagcacccccgcctgagaagcatctgggcatctactccgtgttgcccaaccacaaggctgacgctgtattgagcatgccgtcttccgtgacctctggcctccacgtgcagcctgccctggctgtctccatggacttcagcacctatggggggctgctgccccagggcttcatccagagggagctgttcagcaagctgggggagctggctgtgggcatgaagtcagagagccggaccatcggagagcagtgcagcgtgtgtggggtcgagcttcctgataacgaggctgtggagcagcacaggaagctgcacagtgggatgaagacgtacgggtgcgagctctgcgggaagcggttcctggatagtttgcggctgagaatgcacttactggctcattcagcgggtgccaaagcctttgtctgtgatcagtgcggtgcacagttttcgaaggaggatgccctggagacacacaggcagacccatactggcactgacatggccgtcttctgtctgctgtgtgggaagcgcttccaggcgcagagcgcactgcagcagcacatggaggtccacgcgggcgtgcgcagctacatctgcagtgagtgcaaccgcaccttccccagccacacggctctcaaacgccacctgcgctcacatacaggcgaccacccctacgagtgtgagttctgtggcagctgcttccgggatgagagcacactcaagagccacaaacgcatccacacgggtgagaaaccctacgagtgcaatggctgtgacaagaagttcagcctcaagcatcagctggagacgcactatagggtgcacacaggtgagaagccctttgagtgtaagctctgccaccagcgctcccgggactactcggccatgatcaagcacctgagaacgcacaacggcgcctcgccctaccagtgcaccatctgcacagagtactgccccagcctctcctccatgcagaagcacatgaagggccacaagcccgaggagatcccgcccgactggaggatagagaagacgtacctctacctgtgctatgtgtgaagggaggcccgcggcggtggagccgagcggggagccaggaaagaagagttggagtgagatgaaggaaggactatgacaaataaaaaaaaaaaaggaattc

SEQ ID NO: 6755 - DNA, 1400 bp, Homo sapiens
tctccagagttttacattacacttgtctgtcttataattgatattttaggatgtttgggtgtttgttacaggcagaattggatagatacagccctacaaatgtatatgccctcccctgaaaaaaattggatgaaaatctgcacagcaaagtgaaacacacagataataggaacaaaatgtagttcccatgtgccaaacaaaataaatgaaatctctgcatgtttgcagcatatctgccttttgggaatgtaatcaaggtataatctttggctagtgttatgtgcctgtatttttttaaaatggtacaccagaaaaggactggcagtctacttctaccatagttaaacttcaccctctttaatttcacaacatattctttggaagcaggaagaaatgctcataaagaggatcagaccttctttcccgtgaaaccagtatttggcgccatatataagcctggttaaattggtcatctaaagctgtcaaataagacattctgtgaaaggtaaacatcgaaactggttataagtaaaaccatcaagccaacaacagggtcttgagataacctttgaagcttattgtactggcctgcaccagaagatgtctgcattactcattgctaaaaatgtgtagcacagaactgcactaggattaatttgtttacaagaagaaatttaaactctacgtttggttttcacatacagcagctctattgaataacatgcatctgaattttaagttgcaaaggtatctgaataatttttcatgtgcatcttttgtcgaatgttttggttcaagaaagaatgtttaaagctttttaaaagacttcagttcttaatgtaactgtacccttctgcatggaaaatcataaccaacatggctgcagtagacttcttagtggtatccagcgccacttgcagagggctgctttatcatattgtacttgggtgtaggactctagtgttcttgggtgtattgcatgggctgcattatctacagcattgtacaataacaactagaaaaggcagtatacttcactgatgcttgtctggtaataatcacttctgtgttataatggaaggttttttgtgatgtatgaaacttgtgttttttatatataaatgagtatagttagtgttgtggtaatgcctgttttcatctgtaaatagttaagtatgtacacgaggcactacttctgatttattgcaatgttcagtcctagtttttacttttattcttaaagcattcagttttgctttcaattttatgtaccttagttctgagttagacctgcagatgtgtacagatagttcatatttatgtattgcacataatcatgctattcagcattgatgctatattgtattatgtaaataataaaagccatgtacagagggaaa

SEQ ID NO: 6756 - DNA, 1400 bp, Homo sapiens
agcatgtgccccgggcagtgtttgtagacttggaacccacagtcattgatgaagttcgcactggcacctaccgccagctcttccaccctgagcaacttatcacaggcaaagaagatgctgccaataactatgcccgagggcactacaccattggcaaggagatcattgacctcgtgttggaccgaattcgcaagctggccgaccagtgcacgggtctccagggcttcttggttttccacagctttggtgggggaactggttctgggttcacctcgctgctcatggaacgtctctcagttgattatggcaagaagtccaagctggagttctctatttacccggcgccccaggtttccacagctgtagttgagccctacaactccatcctcaccacccacaccaccctggagcactctgattgtgccttcatggtagacaatgaggccatctatgacatctgtcgtagaaacctcgatattgagcgtccaacctatactaacctgaataggttaataggtcaaattgtgtcctccatcactgcttccctgagatttgatggagccctgaatgttgacctgacagaattccagaccaacctggtgccctatccccgcatccacttccctctggccacatatgcccctgtcatctctgctgagaaagcctaccatgaacagctttctgtagcagagatcaccaatgcttgctttgagccagccaaccagatggtgaaatgtgaccctcgccatggtaaatacatggcttgctgcctgttgtaccgtggtgacgtggttcccaaagatgtcaatgctgccattgccaccatcaagaccaagcgtaccatccagtttgtggattggtgccccactggcttcaaggttggcatcaactaccagcctcccactgtggtgcctggtggagacctggccaaggtacagagagctgtgtgcatgctgagcaacaccacagccattgctgaggcctgggctcgcctggaccacaagtttgacctgatgtatgccaaacgtgcctttgttcactggtacgttggggaggggatggaggaaggtgagttttcagaggcccgtgaggacatggctgcccttgagaaggattatgaggaggttggtgtggattctgttgaaggagagggtgaggaagaaggagaggaatactaaagttaaaacgtcacaaaggtgctgcttttacagggaagcttattctgttttaaacattgaaaagttgtggtctgatcagttaatttgtatgtagcagtgtatgctctcatatacaattactgacctatgctctaaaacatgaatgctttgttacagacccaagctgtccatttctgtgatgggttttgaataaagtattccctgtcttaaaaaaaaaaaaaa

SEQ ID NO: 6757 - DNA, 600 bp, Homo sapiens
gatctgcacctggtgcgtgggccaggccgccagcatgggctccctgcttctcgccgccggcaccccaggcatgcgccactcgctccccaactcccgtatcatgatccaccagccctcaggaggcgcccggggccaagccacagacattgccatccaggcagaggagatcatgaagctcaagaagcagctctataacatctacgccaagcacaccaaacagagcctgcaggtgatcgagtccgccatggagagggaccgctacatgagccccatggaggcccaggagtttggcatcttagacaaggttctggtccaccctccccaggacggtgaggatgagcccacgctggtgcagaaggagcctgtagaagcagcgccggcagcagaacctgtcccagctagcacctgagagctgggcctcctctccagaatcatgtggaggggccagaggcttgccagacccccagctgggccctgctcaccccttgttgctgggcttggaggggcctcttgaggaacttttaatttgcaggggtgcccgctatggacggggcattccagctgagacactgtgattttaaattaaatctttgtggtctt

SEQ ID NO: 6758 - DNA, 1400 bp, Homo sapiens
tctgggaacctttgggtcattgccctttcacttcagaaacaggttgacaactcagccctgctcatgaggcagcaaaccctgcaaagggctgggactggtggccttatgtcagttgtctactctggagcttgacttggacctccccaggtcctaggcagtaggttgaaaaacactgaagtgcttttcatgaagcacagctgcagcaaagccttgcaatcccaggctggggtcagcctacagttgtgttgcttattacaacacatgcggaccaagaggggcttgtgggctagaggctgaccagcagcgtttatttagcaagggtaggtgtgcatcacattgggcttgttctcacccatctggtttggccattcctccttggtgggaatcatccaggtactgctgaggtcacctgcgatttgccccatttcctatctctagcaacctcctgggccccatgcccccaccccttctagaacctgcattcccagggccttcaccacctgaccaaaggtctaggctaacctttggtcatttgtaacaagacctcggaacagacacgtgtgtggcatggtttggcctggggatcttagatgtctgacctgaactattgtagaacagcgctggcttttgggggagcagcaaaaatgagaggagtgctaggtgggtggcctgagcatctgtatccagggacaggactccaaaggcttttggtcccagagctggggtatgttggccccagcccccagcctgtggctcccaaaaggcctctggttttttgtaatctcagtttacagccatttcttaggtttttaattacctttattttattttgccaaacatacctgggaataccttttattttttttttaccttggggtgatggttccaaaccataaatgtgattatagttaacacatgacccttctagcgtcccagccagtgtttttcctgacctctcttctttggagaggaggatggaagggaggggtccggcatgctgctggcattttgctgtgtcctgcagcccctttccgggacacctgggttcacacagctttttagcttacataactggtgcagattttctgtgtggagatgttgccttgaccagccttggctggactttaccaggcatgcagaagcctgtaccaacacagactacagcacccaggaggtgcgagtgtggctgctcagcggttataacaggcctgactgcattgttcaccggattataatgagccaaaatgtttcccggtgtttgctggtttcagggaaggagtttgatatagcagattaaccaccctccttgtagctattggggcttaatggtttcctggtgattcttaccaatccacaataaacatggcccattggcatatctgcaaaaaaaaaaaaaaaaa

SEQ ID NO: 6759 - DNA, 1400 bp, Homo sapiens
aaaaagtatgctagcactattgtaccttgaaaggatttccaccagactgtcttgagtagtgacttctttggtgaggcaagaaggatatacattattttagaatcatttactatttaaatgagacaatcatattattttagaatcatttattttaaatgagacaatcattttaagttttaagataacagaagtgaccaatgtaatttcacaacacctaaggattttttggttgatcaggttactgtagatttttactgattgtcctggatgaatagactgtgctttttctttttctctcccttccttcttggtttcccatagtataataagcatgcatactttaacttctatagttttctcctttagagggtcttcttcagttttagaggtttacttctcccttgcctttgactcattggactagtgcagaggctttaagtagtttaaaatgggcttttgcttttctaggtcattaacgttttttatttagtttctttagccaatagtggctgagtttcgcacttgattttcaatattttatagtaagaaatgacaaactgctttggttcatttcataaacaaactctgcatttagataactattaaaggttgttaagatgaagatttactgtttctttgttactcgttggtacagctgtttgttttacttgcacatttgtagatatacttaatgttttcaagtgccttaattgtttaaaatctctggcttcaaagtttcttggggaaaggtcggtttacctcacattttttgtttccattagtaatattctaggtacctcacaaaatgtattatggtgccatggctgttagtttttagtgagtgctgtaggattaattcgaaaataggcagaattccattcctcccaaggtggcaaaaattagctatactgatgtaattgtcatttacctgggtatgaattccctgacacacattcatgtcaacatatgtagcaaattttgtgaaaacacaacaatttgaagcttctgtaattttgagcactgctctaacaacaagcataatataaaattagttagattttgcaagtctacaaatgagctcttgcaacagaactcacagcctttttacttttttcccctaactttagcaatgtagtatcttgagccattaatttttgggtttttttaaaatccagaaggtatatagaaaccttttcagatttttcatctgatttgttcttgcagatgttcttctatcaaataccttattttaccttacagatatttgttgcacaggcagatactgctgtatttagacatttctatttcagttcattaaaaactgcaaaaccaatctgtatcatgtaccaaactgacttaaaataaatctacatgtttattgaattaaaacaaaaaaaaaa

SEQ ID NO: 6760 - DNA, 1400 bp, Homo sapiens
tgcaagtgtggtagctattgacaacaaaatcgagcaagctatggatctagtgaaaagccatttgatgtatgcggtcagagaagaagtggaggtcctcaaagagcaaatcaaagaactaatagagaaaaattcccagctggagcaggagaacaatctgctgaagacactggccagtcctgagcagcttgcccagtttcaggcccagctgcagactggctccccccctgccaccacccagccacagggcaccacacagccccccgcccagccagcatcgcagggctcaggaccaaccgcatagctgcctatgcccccgcagaactggctgctgcgtgtgaactgaacagacggagaagatgtgctagggagaatctgcctccacagtcacccatttcattgctcgctgcgaaagagacgtgagactgacatatgccattatctcttttccagtattaaacactcatatgcttatggcttggagaaatttcttagttgggtgaattaaaggttaatccgagaattagcatggatataccgggacctcatgcagcttggcagatatctgagaaatggtttaattcatgctcaggagctgtgtgcctttccatcccttccggctccctacccctcacttccaagggttctctctcctgcttgcgcttagtgtcctacatggggttgtgaagcgatggagctcctcactggactcgcctctctcctctcctccccccaggaggaacttgaaaggagggtaaaaagactaaaatgagggggaacagagttcactgtacaaatttgacaactgtcaccaaaattcataaaaaacaatagtactgtgcctctttcttctcaaacaatggatgacacaaaactatgagagtgacaaaatggtgacaggtagctgggacctaggctatcttaccatgaaggttgttttgcttattgtatatttgtgtatgtagtgtaactattttgtacaatagaggactgtaactactatttaggttgtacagattgaaatttagttgtttcattggctgtctgaggaggtgtggacttttatatatagatctacataaaaactgctacatgacaaaaaccacacctaaaccccttttaagaatttggcacagttactcactttgtgtaatctgaaatctagctgctgaatacgctgaagtaaatccttgttcactgaagtctttcaattgagctggttgaatactttgaaaaatgctcagttctaactaatgaaatggatttcccagtaggggtttctgcatatcacctgtatagtagttatatgcatatgtttctgtgcatgttctctacacaattgtaaggtgtcactgtatttaactgttgcacttgtcaactttcaataaagcatataaatgttg

SEQ ID NO: 6761 - DNA, 1400 bp, Homo sapiens
  misc_feature (1135)..(1135): n is a, c, g, or t
  misc_feature (1161)..(1161): n is a, c, g, or t
ctccgtcttcagatggctgcagaccattataaagaaaaatttaaggaatgccaaaggctccaaaaacaaataaacaaactttcagatcaatcagctaataataataatgtcttcacaaagaaaacggggaatcagcagaaagtgaatgatgcttcagtaaacacagacccagccacttctgcctctactgtagatgtaaagccatcaccttctgcagcagaggcagattttgacatagtaacaaaggggcaagtctgtgaaatgaccaaagaaattgctgacaaaacagaaaagtataataaatgtaaacaactcttgcaggatgagaaagcaaaatgcaataaatatgctgatgaacttgcaaaaatggagctgaaatggaaagaacaagtgaaaattgctgaaaatgtaaaacttgaactagctgaagtacaggacaattataaagaacttaaaaggagtctagaaaatccagcagaaaggaaaatggaagatggagcagatggtgctttttacccagatgaaatacaaaggccacctgtcagagtcccctcttggggactggaagacaatgttgtctgcagccagcctgctcgaaactttagtcggcctgatggcttagaggactctgaggatagcaaagaagatgagaatgtgcctactgctcctgatcctccaagtcaacatttacgtgggcatgggacaggcttttgctttgattccagctttgatgttcacaagaagtgtcccctctgtgagttaatgtttcctcctaactatgatcagagcaaatttgaagaacatgttgaaagtcactggaaggtgtgcccgatgtgcagcgagcagttccctcctgactatgaccagcaggtgtttgaaaggcatgtgcagacccattttgatcagaatgttctaaattttgactagttactttttattatgagttaatatagtttagcagtaaaaaaaaaaaaaaaaaaaccacacctaaaatagaccactgaggagaccatagagcggatgctttcatgcaccctttactgcactttctgaccaggagctactttgagtttggtgttactaggatcagggtcagtctttggcttatcaataaattttaatttctgttaatctnacctgctttaaaaaaaaagttcttgngtgttcgtatctttatttattccctagtttgcagaactgtctgaataaaggatacaaggattatttcaatgttactgcactgaaaaacgtgtatgtattagtgtgctagattatttagcagaatattcacaagtttctgttgaccttgttgattgagcatgactactaaatattatgtaataaaaagcatttgtcataacaaaaaaaaaaaaaaaaaaaaaaaaaaaaaaaaaaaaaaa

SEQ ID NO: 6762 - DNA, 600 bp, Homo sapiens
tagaaattcaagattactataatggctgttattatacacagctctgtaaactaccactcagccctgtgttggggtcctcaaagaagtaaggccacagtaatcaagcaagggcctttggttttttccagagttagatcctctcagaacagagtctgggagaactccaatgctgaatggagaagggtaataggttggttgcagtgaatgggctgggggtggggtggccttctccaggcctgagtgtttttgtgtccagctcagtatctgcaacaagaagtttcccacttgtggatgtttagtgcagccacagacttgtattttgatccccaattttttttgaaagagttctcctcataggaggatgattcagcatcagaagaagaaggaacccatagcttggtgtcattaacataattattttaagccttatccagcagccataatttgaataactctacgagaccagagagactgtagttccctattttaacctcaattatgcatttgtccccaaccccactgagaactaaatgctgtaccacagagccgggtgtgaactatggtttagaaggttcaagtttccaattaaagtcattgaag

SEQ ID NO: 6763 - DNA, 600 bp, Homo sapiens
tgcgcgagttctaccggcctttcaacctcaagttctaccagatgaccgggcacgactttggctgggattgagcagacccgggctatgtaccttacccacgtggcttatctattgacagagattatatgtatgtaaaatgtacagaaatctattttataataatttatttttaattcataagcaattaattcactaagctgcctagccacactctttagagagttagcttcataatctgttaacattccaaagtgtttaactctagtatttcgttttcttcttcacaattgatggtgcttctattttttcttctcccctacctgttatatttaaaacaaagaaaagcacaacttgagatttttgttgttacgggtattcagccttcagtcaccgtctgagttctccagttgctgcctccttgtcttgtcttgggtctcccattccagcttccctgtctcttcctgcctgtgtacctcgtaggaacgctgagctgcctcaacagggctgtattctgaagggcaggcctcatgcagcagcctccttgcagatgtggtgtcccgtccaatgatgtagcctgaaagccacagccctagggttctg

SEQ ID NO: 6764 - DNA, 1400 bp, Homo sapiens
tcccctggcctgtcagggggtccgggcggctccggggccggaagcaccgtggccgaggccccgccggggaccctggcgctgctcctggacgaaggcagcaagcagctgccgcaggccatcatcatcggagtgaagaagggcggcacgcgggcgctgctggagttcctgcgcgtgcaccccgacgtgcgcgccgtgggcgccgagccccacttcttcgaccgcagctacgacaagggcctcgcctggtaccgggacctgatgcccagaaccctggacgggcagatcaccatggagaagacgcccagttacttcgtcacgcgggaggcccccgcgcgcatctcggccatgtccaaggacaccaagctcatcgtggtggtgcgggacccggtgaccagggccatctcggactacacgcagacgctgtccaagcggcccgacatccccaccttcgagagcttgacgttcaaaaacaggacagcgggcctcatcgacacgtcgtggagcgccatccagatcggcatctacgccaagcacctggagcactggctgcgccacttccccatccgccagatgctcttcgtgagcggcgagcggctcatcagcgacccggccggggagctgggccgcgtgcaagacttcctgggcctcaagaggatcatcacggacaagcacttctacttcaacaagaccaagggcttcccctgcctgaagaaggcggagggcagcagccggccccattgcctgggcaagaccaagggcaggacccatcctgagatcgaccgcgaggtggtgcgcaggctgcgcgagttctaccggcctttcaacctcaagttctaccagatgaccgggcacgactttggctgggatggataaccatataatttaaaaagaaaaaaaaaatcaaaatataatatatttttttaccaatcggtagagaagagacagtttaatatttgtgctgaaaatatgtttcagtatttttttcaatgaatgttaagagattgttctcactcccgccccatcttaatgtataaccaacaccaaacacgtggatcaacagaaaaggaaaatttcactcgtctaaacactttcaattttcagtttttattttatgttctatatacccagtcataaagtataagcatcagttgtcattaaaagttttcagaaaatcttgaggttaaacatctctctctctttttttaaaatacaaggccctgataaaattgatatctatccttatatttttctccctttttcccgtgccactttttcttaaattatttcccagttagtattatcatatgtttgtacccgtcacagttttcatagtgctttcaaatacacctttttgatcattaaaataaaaaaataaatcttggaaaaaaaaaaaaaaaaaa

SEQ ID NO: 6765 - DNA, 1400 bp, Homo sapiens
gcttttgggcctggccccggccccggccccggccctggcccaatccatattggtggtccccctggctttgcatctagttctggaaaaccaggaccgacagtaattaaagtgcaaaacatgccctttactgtgtctattgatgagattttagatttcttttatggctatcaagtaatcccaggctcagtgtgtttaaaatacaatgaaaaaggtatgcccacaggtgaagccatggtggcctttgagtctcgggatgaagccacagctgctgtcattgacttaaatgacaggcctataggttcaagaaaagtaaaacttgtattagggtagccattcacatcattttttatagggtagatcttcatattgctgtgattaatgcatccagattgttttcctagtatttccaggttagaacctgtggattgtttcaattgcatatagcttggtttccataacatagagcattggttgactgtttacagaagactcactcaccaggataaacattgctgtatgttacagtaaagctatctggagagaacacataaatgattttggcataccattagagaaaccatttgtaaaactcaaatgaccacataaagcttatcaaggagtctagattggttttgttttataccatatgggatgaagaaaatagaaatgtcagtagaactcattgagggtgctcttgccagctgctgaaaatagaagttggctactctcagaatttggtttaaagctggacagatttgctttgttatagggtaaagctttgtctaaagtcctcattttcttttaaaattgaataaaatttctgtatacagattcattgtatgtacctttattgcttcttaagggtccttgctgtatagacagtcctgcttcagaaggttgctgctttgtttgtctaattgactcatttgtaaatgagcagaactgttttgttggtttttttccctaaatataaaagtccacacttcgtttgtgctataacctcaaactttgatttctaatgtcacacttaaaactgtgtggaataagacttttgccataaaaataaactatggagtcctttatctaccagagcctttttggtttgaccgccacgatttaggttagtcagtttaaaaattgttcatgttgtttggatggtatcgaaaaccagaaaccacttttaataatgtgtttaagatacttgatttgaagtccttttcatatggactaattgtagtatcaatttcctcctgtcccgattatgtgaaattttggcctttaaacaaagaggggcccattcataagaaagtgttatatctaggtttttaaaactgaagttgaaattatctttgttagcagtagtagtatagaataaaagatccgtatgctggttcgtaaaa

SEQ ID NO: 6766 - DNA, 1400 bp, Homo sapiens
tttagtagagacggggcttcaccatcttggccaggctggtcttgaactcctgacctcgtgacccacccgccttggcctcccaaagtgctgggattacaggtgtgagccaccacacccagcctctgtagttctttttacaacatttttcattataactttaaattttttaagcaactggaaaagtgttccttgctctcttggggggatttggctggtgccgaagtgtttctgaagtctcaagaactgccataaaatctcacgctgccatttccctgaacagatacatacatagagagagacagttttccaaactgtgtcacgcaggctgagtgcactggcaggatcacagctcacggcagcctcaacctccctggctcaagcgatccctcccctcagcctcctgagtagctgagactacaggtgagtgccaccacactcagctaattttcaaattttttgtagacagggtctccctatgttgcccaggctggtcttgaactcctagactcaagtgatcctcctgtcttggcctcccaaagtgctgagattacaggtgtgagccactgtgcccagcagtttcccagaatatatttaaatgcaaagttacatgaggggaaaacatgtatgtttgctcctgttgttactgggtaggttctgaacagcagaaacccatgtgcagggtgggctggtgaaggcccctctccgcaaggtggtagcaggaaaaggtccttgacttgatgaatttggtctgcctctgagccactggaggaagctgttttgagccagggttttttggcctaaagccagcatttcctcagtctccctttgtggttcgaaggatatggactattgcaatacatttcttccttcaaatcctgccactgttttgttggcccacaactaataggacctcaaaataagccatgctgctttgcacacacactagccttcttttgtacttttcattctggatgggcttggccaaaacaggctcaggccaaagacctcccaagctgtatgtacttccagtatcctgaaacagtgtttggtgacataatgccaagggtaaacaagcctgatttaggcactgctttatccaggggcttcacccatgaaattaataaaacttatctgagtcacttgaaacttggttcccagaaaacacatttctggtttataatctccttttatgctcacctgacattaattatctatccttgatgatgtgtttaaactgagtagcagaaaacagaggccacactttctgggaaattttaaaggaagaaaccatttttaatgagatgaaaatatttaacgaatttaaaaagctaatgacaattttgagaaaaggtttgggatgtatattgctatgtaatttaataaactgattttatggatat

SEQ ID NO: 6767 - DNA, 1400 bp, Homo sapiens
ctatgcttttagctgcgttactaagcaagggaaaaataacagtttctctgagccagagaagacttgatcacagttctccaagcatcgtgatagcaatgcttaaccccaggaagatttcaaggcagggagaagaacatttcaaataagattcttgttaacccatttatgcctagtgttccattattggaatgctaagcttgtgggagtcatttacatcctactgctcaaagtcattgccaaggtctgatttttcacacaaaaaattgcaacccccagcataaatgggttagctactgtcatcagttagcaaattcatccacacaaacacaattagagtttggtttttttttaagcttttcaaaacttactaaactggcacaattttatatgtatgctatttgttgtatttatgcttaagagcaaaaaagttttgatgggattttaaattcagcaaagcctacaacgctgagacaatcccctaacaacatggtagtaactaaagaaacttttatactaggcttcttagttttaaaaggaagtggcatcattgtttcagttctagtttgtatttttctctcagatatttttcttctttaaaaatctttcccagaagttggttcctagaaaactcaataccatcatctcttatctctatacagggactaggtaataaaaccttcaaaggttgtcaaaggtcatcaagcagtgttcatttatcctgtcacatgtttctgtttctatagtaatttagaaattgcaaatagttaacttttcatcatgtaaaaagttaacattatcctatttccatagataccatggacggcggtgtggcctgagttgtcagtctttaatcctgagtcatgtggctctcttttcatctttgatgtcagttccaattatttggcatcaaaaaccttcatggtaggtagagttttaggtaaaagtggatctagggttactttctttattaacatttcctaaataactgaattgagagacatactctgctactatgtcctcaggttaatttttgtctgatcttacgatgccctgccttttactagctactttagaaatagaaaatgtgaagagtgactatttacatgtatactcctttggctgctagaactcatctgtagtcctttattatttacactgaattccaatttcatttctcttccgctaagtaagagcacctcattcctgtgttttctctactattgagctgtagacgaactgtttctctaattataaagcaaactgtttgggatattcagggaaactaccccaatgttatgttgtcatttaatgggaaaggctgggatcatatgtatttctatgttctgtaaagtatttgacttactagttctcaataaaattttattaggactataaaaaaa

SEQ ID NO: 6768 - DNA, 1132 bp, Homo sapiens; identical to SEQ ID NO: 1533

SEQ ID NO: 6769 - DNA, 1400 bp, Homo sapiens
tgcagcatgatgttctgaagcttgagtttgaacgccatgaccctgtggatgggagaattactgagaggcagtttggtggcatgctacttgcctacagtggggtgcagtccaagaagctgaccgccatgcagaggcagctcaagaagcacttcaaagaaggaaagggtctgacatttcaggaggtggagaacttctttactttcctaaagaacattaatgatgtggacactgcattgagtttttaccatatggctggagcatctcttgataaagtgaccatgcagcaggtggccaggacagtggctaaagtggagctctcagaccacgtgtgtgatgtggtgtttgcactctttgactgtgatggcaatggcgaactgagcaataaggaatttgtttccatcatgaagcaacggctgatgagaggcctggaaaagcccaaagacatgggtttcactcgcctcatgcaggccatgtggaaatgtgcacaggaaactgcctgggacttcgctttacccaaacagtaaccccacactgcaagaggggacccctccacccccagtaccctggaccccctccgcagagtctcggcagagccctttgtgctgctgcttctggaagtagtctcccttcctcccgggatgacctcaggactctgtcggtttcccctctttacccttccccgtccccgtgttctgctgggctctgattctgcccaatgagtatccccataggttctcaaaaacatgaacaagtctgtaaagctcagacatttgtcagcctcaacagcaccacccattcaagcatcctgtggataaagaattcagggaaccatccacacacctgccaaccctgggaagcatccagttctcaaatcgtttttgctatggatttatactaacaagaacattccttgacttccctcctgctggtgttttaaagccacaagtagggaagatatctggcaggcagaaagaagtctgtgatgataaacaatgatgaggatgacctaggcaccctacgctagtgtgagaagcctgcgccccaggaaggatctgtgttagtccctgggatggctccaaggcctgctctaggaaggcagcatgctcagtgggaacacagcaagattcagaatttaaagtagttgcttcatggctctgtgcactcccttttcttcctcgcagcctccctaagatgactccagtgtgaccctgtgcttagtgagcaatagtgattgagctcatgttccctgcaagtgccatttcctctccaggatgggcctctaaagctgaggcctggctcagagcctgtttgccctctgtcttaaacaattgtaaatatcacttaaattataaccatttgcaataaacatccccaaagttaaaaaaaaaaaaaaaaaaaaa

SEQ ID NO: 6770 - DNA, 600 bp, Homo sapiens
taaatacatggcttgctgcctgttgtaccgtggtgacgtggttcccaaagatgtcaatgctgccattgccaccatcaaaaccaagcgcacgatccagtttgtggattggtgccccactggcttcaaggttggcatcaactaccagcctcccactgtggtgcctggtggagacctggccaaggtacagagagctgtgtgcatgctgagcaacaccacagccattgctgaggcctgggctcgcctggaccacaagtttgacctgatgtatgccaagcgtgcctttgttcactggtacgtgggtgaggggatggaggaaggcgagttttcagaggcccgtgaagatatggctgcccttgagaaggattatgaggaggttggtgtggattctgttgaaggagagggtgaggaagaaggagaggaatactaattatccattccttttggccctgcagcatgtcatgctcccagaatttcagcttcagcttaactgacagatgttaaagctttctggttagattgttttcacttggtgatcatgtcttttccatgtgtacctgtaatatttttccatcatatctcaaagtaaagtcattaacatca

SEQ ID NO: 6771 - DNA, 600 bp, Homo sapiens
gagcgagaacgagatcgggaacgagagcgagagcgggaccgagagagagaagaggaaaagaagagacacagttactttgagaagccaaaagtagatgatgagcccatggacgttgacaaaggacctgggtctaccaaggagttgatcaagtccatcaatgaaaagtttgctgggtctgctggctgggaaggcacagaatcgctgaagaagccagaagacaaaaagcagctgggagatttctttggcatgtccaacagttatgcagagtgctacccagccacgatggatgacatggctgtggatagtgatgaggaggtggattatagcaaaatggaccagggtaacaagaaggggcccttaggccgttgggactttgatacccaggaagaatacagcgagtatatgaacaacaaagaagctttgcccaaggctgcattccagtatggtatcaaaatgtctgaagggcggaaaaccaggcgcttcaaggaaaccaatgacaaagcagagcttgatcgccagtggaagaagattagtgcaatcattgagaagaggaagaagatggaagctgatggggttgaagtcaaaagaccaaaatactaa

SEQ ID NO: 6772 - DNA, 1400 bp, Homo sapiens
cgggaggaccaggatgctgccttcttcaaggcctgggcaatatttaagggaaagtataaggagggggacacaggaggtccagctgtctggaagactcgcctgcgctgtgcactcaacaagagttctgaatttaaggaggttcctgagaggggccgcatggatgttgctgagccctacaaggtgtatcagttgctgccaccaggaatcgtctctggccagccagggactcagaaagtaccatcaaagcgacagcacagttctgtgtcctctgagaggaaggaggaagaggatgccatgcagaactgcacactcagtccctctgtgctccaggactccctcaataatgaggaggagggggccagtgggggagcagtccattcagacattgggagcagcagcagcagcagcagccctgagccacaggaagttacagacacaactgaggccccctttcaaggggatcagaggtccctggagtttctgcttcctccagagccagactactcactgctgctcaccttcatctacaacgggcgcgtggtgggcgaggcccaggtgcaaagcctggattgccgccttgtggctgagccctcaggctctgagagcagcatggagcaggtgctgttccccaagcctggcccactggagcccacgcagcgcctgctgagccagcttgagaggggcatcctagtggccagcaacccccgaggcctcttcgtgcagcgcctttgccccatccccatctcctggaatgcaccccaggctccacctgggccaggcccgcatctgctgcccagcaacgagtgcgtggagctcttcagaaccgcctacttctgcagagacttggtcaggtactttcagggcctgggccccccaccgaagttccaggtaacactgaatttctgggaagagagccatggctccagccatactccacagaatcttatcacagtgaagatggagcaggcctttgcccgatacttgctggagcagactccagagcagcaggcagccattctgtccctggtgtagagcctgggggacccatcttccacctcacctctttgttcttcctgtctcctttgaagtagactcattcttcacacgattgacctgtcctctttgtgataattctcagtagttgtccgtgataatcgtgtcctgaaaatcctcgcacacactggctggtggagaactcaaggctaattttttatcctttttttttttttatttttgagatatacgccctctttcatctgtaagggactaggaaattccaaatggtgtgaacccagggggcctttccctcttccctgacctcccaactctaaagccaagcactttatatttttctcttagatattcactaaggacttaaaataaaatttttttgaaagagg

SEQ ID NO: 6773 - DNA, 1400 bp, Homo sapiens
tctcttcaggcctgacaatttcatctttggtcagagtggggccggcaacaactgggccaagggtcactacacggagggggcggagctggtggattcggtcctggatgtggtgcggaaggagtgtgaaaactgcgactgcctgcagggcttccagctgacccactcgctggggggggggacgggctccggcatgggcacgttgctcatcagcaaggtgcgtgaggagtatcccgaccgcatcatgaacaccttcagcgtcgtgccctcacccaaggtgtcagacacggtggtggaaccctacaacgccacgctgtccatccaccagctggtggaaaacacggatgaaacctactgcatcgacaacgaggcgctctacgacatctgcttccgcaccctcaagctggccacgcccacctacggggacctcaaccacctggtatcggccaccatgagcggagtcaccacctccttgcgcttcccgggccagctcaacgctgacctgcgcaagctggccgtcaacatggtgcccttcccgcgcctgcacttcttcatgcccggcttcgcccccctcaccaggcggggcagccagcagtaccgggccctgaccgtgcccgagctcacccagcagatgttcgatgccaagaacatgatggccgcctgcgacccgcgccacggccgctacctgacggtggccaccgtgttccggggccgcatgtccatgaaggaggtggacgagcagatgctggccatccagagcaagaacagcagctacttcgtggagtggatccccaacaacgtgaaggtggccgtgtgtgacatcccgccccgcggcctcaagatgtcctccaccttcatcgggaacagcacggccatccaggagctgttcaagcgcatctccgagcagttcacggccatgttccggcgcaaggccttcctgcactggtacacgggcgagggcatggacgagatggagttcaccgaggccgagagcaacatgaacgacctggtgtccgagtaccagcagtaccaggacgccacggccgaggaagagggcgagatgtacgaagacgacgaggaggagtcggaggcccagggccccaagtgaaactgctcgcagctggagtgagaggcaggtggcggccggggccgaagccagcagtgtctaaacccccggagccatcttgctgccgacaccctgctttccccatcgccctagggctcccttgccgccctcctgcagtatttatggcctcgtcctcccccacctaggccacgtgtgagctgctcctgtctctgtcttattgcagctccaggcctgacgttttacggttttgttttttactggtttgtgtttatattttcggggatacttaataaatctattgctgtcagataccctt

SEQ ID NO: 6774 - DNA, 600 bp, Homo sapiens
ctgaacgccgacctgcgcaagctggccgtcaacatggtcccctttcctcgcctgcacttcttcatgcccgcgttcgcacccctgaccagccggggcagccagcagtaccggggcctgacggtgcccgagctcacccagcagatgttcgatgccaagaacatgatggcggcgtgcgacccgcgccacggccgctacctgaccgtggccgccgtgttccggggccgcatgtccatgaaggaggtggacgagcagatgctgagcgtgcagagcaagaacagcagctacttcgtggagtggatccccaacaacgtgaagacggccgtgtgcgacatcccgccccgcggcctgaagatggccgtgaccttcatcggcaacagcacggccatccaggagctgttcaagcgcatctccgagcagttcacggccatgttccggcgcaaggccttcttgcactggtacacgggcgagggcatggacgagatggagttcaccgaggccgagagcaacatgaatgacctggtatctgagtaccagcagtaccaggacgccacggccgagcagggcgagttcgaggaggaggcggaggaggaggtggcctag

SEQ ID NO: 6775 - DNA, 1400 bp, Homo sapiens
gaggaaagagccttgcgagggccctgcagcagaacacgtctctagaaatactgtggctgacccaaaatgaactcaacgatgaagtggcagagagtttggcagaaatgttgaaagtcaaccagacgttaaagcatttatggcttatccagaatcagatcacagctaaggggactgcccagctggcagatgcgttacagagcaacactggcataacagagatttgcctaaatggaaacctgataaaaccagaggaggccaaagtctatgaagatgagaagcggattatctgtttctgagaggatgctttcctgttcatggggtttttgccctggagcctcagcagcaaatgccactctgggcagtcttttgtgtcagtgtcttaaaggggcctgcgcaggcgggactatcaggagtccactgcctccatgatgcaagccagcttcctgtgcagaaggtctggtcggcaaactccctaagtacccgctacaattctgcagaaaaagaatgtgtcttgcgagctgttgtagttacagtaaatacactgtgaagagactttattgcctattataattatttttatctgaagctagaggaataaagctgtgagcaaacagaggaggccagcctcacctcattccaacacctgccatagggaccaacgggagcgagttggtcaccgctcttttcattgaagagttgaggatgtggcacaaagttggtgccaagcttcttgaataaaacgtgtttgatggattagtattatacctgaaatattttcttccttctcagcactttcccatgtattgatactggtcccacttcacagctggagacaccggagtatgtgcagtgtgggatttgactcctccaaggttttgtggaaagttaatgtcaaggaaaggatgcaccacgggcttttaattttaatcctggagtctcactgtctgctggcaaagatagagaatgccctcagctcttagctggtctaagaatgacgatgccttcaaaatgctgcttccactcagggcttctcctctgctaggctaccctcctctagaaggctgagtaccatgggctacagtgtctggccttgggaagaagtgattctgtccctccaaagaaatagggcatggcttgcccctgtggccctggcatccaaatggctgcttttgtctcccttacctcgtgaagaggggaagtctcttcctgcctcccaagcagctgaagggtgactaaacgggcgccaagactcaggggatcggctgggaactgggccagcagagcatgttggacaccccccaccatggtgggcttgtggtggctgctccatgagggtgggggtgatactactagatcacttgtcctcttgcccgctcatttgttaataaaatactgaaaac

SEQ ID NO: 6776 - DNA, 1400 bp, Homo sapiens
acaaagccaagcctaggccgccctgagcatcctggttcaaacgggtgcctggtcagaaggccagccgcccacttcccgtttcctctttaactgaggagaagctgatccagctttccggaaacaaaatccttttcttcatttggggaggggggtaatagtgacatgcaggcacctcttttaaacaggcaaaacaggaagggggaaaaggtgggattcatgtcgaggctagaggcatttggaacaacaaatctacgtagttaacttgaagaaaccgatttttaaagttggtgcatctagaaagctttgaatgcagaagcaaacaagcttgatttttctagcatcctcttaatgtgcagcaaaagcaggcaacaaaatctcctggctttacagacaaaaatatttcagcaaacgttgggcatcatggtttttgaaggctttagttctgctttctgcctctcctccacagccccaacctcccacccctgatacatgagccagtgattattcttgttcagggagaagatcatttagatttgttttgcattccttagaatggagggcaacattccacagctgccctggctgtgatgagtgtccttgcaggggccggagtaggagcactggggtgggggcggaattggggttactcgatgtaagggattccttgttgttgtgttgagatccagtgcagttgtgatttctgtggatcccagcttggtccaggaattttgagagattggcttaaatccagttttcaatcttcgacagctgggctggaacgtgaactcagtagctgaacctgtctgacccggtcacgttcttggatcctcagaactctttgctcttgtcggggtgggggtgggaactcacgtggggagcggtggctgagaaaatgtaaggattctggaatacatattccatggactttccttccctctcctgcttcctcttttcctgctccctaacctttcgccgaatggggcagacaaacactgacgtttctgggtggccagtgcggctgccaggttcctgtactactgccttgtacttttcattttggctcaccgtggattttctcataggaagtttggtcagagtgaattgaatattgtaagtcagccactgggacccgaggatttctgggaccccgcagttgggaggaggaagtagtccagccttccaggtgggcgtgagaggcaatgactcgttacctgccgcccatcaccttggaggccttccctggccttgagtagaaaagtcggggatcggggcaagagaggctgagtacggatgggaaactattgtgcacaagtctttccagaggagtttcttaatgagatatttgtatttatttccagaccaataaatttgtaactttgcaaaaaaaaaaaaaaaaaaaa

SEQ ID NO: 6777 - DNA, 600 bp, Homo sapiens
aaccatcaagctatggaataccctgggtgtgtgcaaatacactgtccaggatgagagccactcagagtgggtgtcttgtgtccgcttctcgcccaacagcagcaaccctatcatcgtctcctgtggctgggacaagctggtcaaggtatggaacctggctaactgcaagctgaagaccaaccacattggccacacaggctatctgaacacggtgactgtctctccagatggatccctctgtgcttctggaggcaaggatggccaggccatgttatgggatctcaacgaaggcaaacacctttacacgctagatggtggggacatcatcaacgccctgtgcttcagccctaaccgctactggctgtgtgctgccacaggccccagcatcaagatctgggatttagagggaaagatcattgtagatgaactgaagcaagaagttatcagtaccagcagcaaggcagaaccaccccagtgcacttccctggcctggtctgctgatggccagactctgtttgctggctacacggacaacctggtgcgagtgtggcaggtgaccattggcacacgctagaagtttatggcagagctttacaaata

SEQ ID NO: 6778 - DNA, 1400 bp, Homo sapiens
acctcagctgccatcccggccctacctggaagcaaaggagtcctgacatctggccaccagccatcctcggtgctaaggagccctgctatgggcacgttgggtggggatttcctgtccagtctcccactacatgagtacccacctgccttcccactgggagccgacatccaaggtttagatttattttcatttcttcagacagagagtcagcactatggcccctctgtcatcacctcactagatgaacaggatgcccttggccacttcttccagtaccgagggaccccttctcactttctgggcccactggcccccacgctggggagctcccactgcagcgccactccggcgccccctcctggccgtgtcagcagcattgtggcccctgggggggccttgagggaggggcatggaggacccctgccctcaggtccctctttgactggctgtcggtcagacatcatttccctggactgagttccctggattatggaaacttcgctgtcccccaacactgagcaagtatgctgtggagtcccaaccccagctactctgatccctctgggggctctggccaagggccagacagaccttcacagatgcctacttttggcctcatctctgcctgacaaggccagcacccaaagggttaatatttaacctctttttaaggacactggggtctgtttctggaaatgttctttagatggtggcacattcctttgggtatgttaacctaggcagtgggaggcaaatgggatggtatgtgagctaggagaagggctgaaccctcagccttgactatgtctagagcctcttggggaaggggcacctctcttgaaccccaaatgctctctcttcttattacccaaacccatggctctatttcttcttcacatccattgtctcttcatgtctattccattcccttcggccaaacagacaggtggaaaaactgagacaggcagtttcagagatggacagagaactttattttggattgtggatgtggacttttttgtacataaataagaaaaaccaaaatactccaaagatgacttcccctgcctcctactccagtatgacagaggaggatgtaaggccttagccatgatctgcaggggtctgggagtcaggcccggcctattgcttgggtctctctctatttatatatctaagttcacagtgtttcttattccccctaagcttctagaggctcatggccctgtagttaggcctggctcattctgcacctttccagggaggtggaaggaccctgtgccctccttcccaatcttctttttcaggctcgccaaggcctaggacctatgttgtaattttactttttatttctaaagttgtagtgaagctctcacccataataaaggttgtgaatgttc

SEQ ID NO: 6779 - DNA, 1400 bp, Homo sapiens
  misc_feature (1388)..(1388): n is a, c, g, or t
  misc_feature (1394)..(1394): n is a, c, g, or t
agccaagaattcataagatagccatcctgggtcttggcagcagcattgggactcctccagaaggcattacagcagaagttctggtggtgacctctttcgatgaactgcagagaagggcctcagaagcaagagggaagattgttgtttataaccaaccttacatcaactactcaaggacggtgcaataccgaacgcagggggcggtggaagctgccaaggtgggggctttggcatctctcattcgatccgtggcctccttctccatctacagtcctcacacaggtattcaggaataccaggatggcgtgcccaagattccaacagcctgtattacggtggaagatgcagaaatgatgtcaagaatggcttctcatgggatcaaaattgtcattcagctaaagatgggggcaaagacctacccagatactgattccttcaacactgtagcagagatcactgggagcaaatatccagaacaggttgtactggtcagtggacatctggacagctgggatgttgggcagggtgccatggatgatggcggtggagcctttatatcatgggaagcactctcacttattaaagatcttgggctgcgtccaaagaggactctgcggctggtgctctggactgcagaagaacaaggtggagttggtgccttccagtattatcagttacacaaggtaaatatttccaactacagtctggtgatggagtctgacgcaggaaccttcttacccactgggctgcaattcactggcagtgaaaaggccagggccatcatggaggaggttatgagcctgctgcagcccctcaatatcactcaggtcctgagccatggagaagggacagacatcaacttttggatccaagctggagtgcctggagccagtctacttgatgacttatacaagtatttcttcttccatcactcccacggagacaccatgactgtcatggatcccagcagatggatgttgctgctgctgtttgggctgttgtttcttatgttgttgcagacatggaagaaatgctgcctaggtcctagaaacagtaagaaagaaacgttttcatgcttctggccagggatcctgggtctgcaactttggaaaactcctcttcacataacaatttcatccaattcatcttcaaagcacaactctatttcatgctttctgttattatctttcttgatactttccaaattctctgattctagaaaaaggaatcattctcccctccctcccaccacatagaatcaacatatggtagggattacagtgggggcatttctttatatcacctcttaaaaacattgtttccactttaaaagtaaacacttaataaatttttggaagatctctgaaaaaaaaaaaaaaaaaaaaaanaaattncctgcg

SEQ ID NO: 6780 - DNA, 584 bp, Homo sapiens; identical to SEQ ID NO: 1545

SEQ ID NO: 6781 - DNA, 1400 bp, Homo sapiens
tatgaattattgcacctgactaccatacctcacacagcgttggtgttgtgagcggcccatgaaaagccaaattaaaaatcaaggattcagtcaaactaagcaggtactcatgccaggtactcctttctctacccacatccatgtttgaatgctattgcctgtgatctttacgcttaactgttgtgtatcttttttgttctttacaagaagtgcagaggggttttttgtgtattgcgtgaaaacttataaaacaaatgttaacagaatggaattttttttcaactgtatgtagggctgcagtggtggccagaattagatatctttaaagaattttaaatacaataaacacttcatattattcgccttgttacactcaatgcaattctcaagtctataaaaggtatgtgcttaatatttcctactgtgtaggagaatttgcagtcagccataggtatgtaggaatagtcactcactggctgatacatttaaagcagcagtgtgaatagcaaggacagacaccttcaatttgtgaaatcaaagaactgatgcactatatagaacgaatttgggtttttaaagaaatattaaaagttaagtactgtaagtgttcttaaaacctgtaaacttcattctgtgggctaatggtgtgggacaaaatattcctaatgaaaggaagtaccaattagttgatttgttggtggcattccccttttgggaaagcaatgtaaggttatgtctgtgtatgtcattcacacttaggcaagcatacacaggcacatggctttaaaaaccacactgatgccttgataattaaaaagaatacaagcattccatgtacacatgttaattagcagttagtgattgggccaacactttctcataaaaattggccttttacatgttgtctaattatcatttttccccaaattttgcgttgtaggactactgttcgaagatttttggaagaatactgagaacggcataaagtgaagatcgacatttaaaaaatgaggtgaaagaaagctatagtggcatagaaaaagtataaagctcagttagtttttttattattattattattaaaagttaattcaggactgatgtgacctaccagatttcagaacatgtgttaatagtatatatgccactgaaaacttagggtcctgtatcatacttttttctttaagactttttaagaaatattacttaaacatgtggcttgctcagtgtttaattgcaagttttcaatcttggactttgaaaacaggattaaacgttagtattcgtgtgaatcagactaagtgggatttcatttttacaactctgctctacttagcctttggatttagaagtaaaaataaagtatctctgactttctgttaaaaaaaaaaaaaaaaaaa

SEQ ID NO: 6782 - DNA, 1299 bp, Homo sapiens; identical to SEQ ID NO: 1547

SEQ ID NO: 6783 - DNA, 1400 bp, Homo sapiens
tctcacctgaaacagttgacagtgtgattatgggcaatgtcctgcagagttcttcagatgctatatatttggcaaggcatgttggtttgcgtgtgggaatcccaaaggagaccccagctctcacgattaataggctctgtggttctggttttcagtccattgtgaatggatgtcaggaaatttgtgttaaagaagctgaagttgttttatgtggaggaaccgaaagcatgagccaagctccctactgtgtcagaaatgtgcgttttggaaccaagcttggatcagatatcaagctggaagattctttatgggtatcattaacagatcagcatgtccagctccccatggcaatgactgcagagaatcttactgtaaaacacaaaataagcagagaagaatgtgacaaatatgccctgcagtcacagcagagatggaaagctgctaatgatgctggctactttaatgatgaaatggcaccaattgaagtgaagacaaagaaaggaaaacagacaatgcaggtagacgagcatgctcggccccaaaccaccctggaacagttacagaaacttcctccagtattcaagaaagatggaactgttactgcagggaatgcatcgggtgtagctgatggtgctggagctgttatcatagctagtgaagatgctgttaagaaacataacttcacaccactggcaagaattgtgggctactttgtatctggatgtgatccctctatcatgggtattggtcctgtccctgctatcagtggggcactgaagaaagcaggactgagtcttaaggacatggatttggtagaggtgaatgaagcttttgctccccagtacttggctgttgagaggagtttggatcttgacataagtaaaaccaatgtgaatggaggagccattgctttgggtcacccactgggaggatctggatcaagaattactgcacacctggttcacgaattaaggcgtcgaggtggaaaatatgccgttggatcagcttgcattggaggtggccaaggtattgctgtcatcattcagagcacagcctgaagagaccagtgagctcactgtgacccatccttactctacttggccaggccacagtaaaacaagtgaccttcagagcagctgccacaactggccatgccctgccattgaaacagtgattaagtttgatcaagccatggtgacacaaaaatgcattgatcatgaataggagcccatgctagaagtacattctctcagatttgaaccagtgaaatatgatgtatttctgagctaaaactcaactatagaagacattaaaagaaatcgtattcttgccaagtaaccaccacttctgccttagataatatgattataaggaaatcaaataaatgttgccttaacttc

SEQ ID NO: 6784 - DNA, 1196 bp, Homo sapiens; identical to SEQ ID NO: 1549

SEQ ID NO: 6785 - DNA, 600 bp, Homo sapiens
ttaaggaaggaggcaactgatccaagaccctgtgaagtagaaaatgcagttgaatcatggagaacttcagtagaaactgctctgagagcttacgtaaaagaacattacccgaatggagtctgcactgtgtatggcaaaaaaatagatggacagcaaaccattattgcatgcatagaaagccatcagttccaagcaaaaaatttttggaatggtcgttggaggtcagaatggaagtttacaatcactccttcaaccactcaagtggttggcatcttgaaaattcaggttcattattatgaagatggtaatgttcagctagtgagtcataaagatatacaagattccctaacagtgtctaatgaagtgcaaacagcaaaagaatttataaagattgtagaagctgcagaaaatgaataccagactgccatcagtgagaattatcagacaatgtcggacactactttcaaagccttacgtcgacagttgccagttacacgcactaagattgattggaacaagatccttagctacaagattggcaaagagatgcagaatgcataagatgaacattgcatgaccggatcattttagtgtctttgc

SEQ ID NO: 6786 - DNA, 1400 bp, Homo sapiens
gagagccagtctgatccagaaggccaagctggcagagcaggccgaacgctatgaggacatggcagccttcccaggcagcagttagcccgccgcccgcctgtgtgtccccagagccatggagagagccagtctgatccagaaggccaagctggcagagcaggccgaacgctatgaggacatggcagccttcatgaaaggcgccgtggagaagggcgaggagctctcctgcgaagagcgaaacctgctctcagtagcctataagaacgtggtgggcggccagagggctgcctggagggtgctgtccagtattgagcagaaaagcaacgaggagggctcggaggagaaggggcccgaggtgcgtgagtaccgggagaaggtggagactgagctccagggcgtgtgcgacaccgtgctgggcctgctggacagccacctcatcaaggaggccggggacgccgagagccgggtcttctacctgaagatgaagggtgactactaccgctacctggccgaggtggccaccggtgacgacaagaagcgcatcattgactcagcccggtcagcctaccaggaggccatggacatcagcaagaaggagatgccgcccaccaaccccatccgcctgggcctggccctgaacttttccgtcttccactacgagatcgccaacagccccgaggaggccatctctctggccaagaccactttcgacgaggccatggctgatctgcacaccctcagcgaggactcctacaaagacagcaccctcatcatgcagctgctgcgagacaacctgacactgtggacggccgacaacgccggggaagaggggggcgaggctccccaggagccccagagctgagtgttgcccgccaccgccccgccctgccccctccagtccccgccctgccgagaggactagtatggggtgggaggccccacccttctcccctaggcgctgttcttgctccaaagggctccgtggagagggactggcagagctgaggccacctggggctggggatcccactcttcttgcagctgttgagcgcacctaaccactggtcatgcccccacccctgctctccgcacccgcttcctcccgaccccaggaccaggctacttctcccctcctcttgcctccctcctgcccctgctgcctcttgattcgtaggaattgaggagtgtctccgccttgtggctgagaactggacagtggcaggggctggagatgggtgtgtgtgtgtgtgtgtgtgtgtgtgtgtgcgcgcgcgccagtgcaagaccgagactgagggaaagcatgtctgctgggtgtgaccatgtttcctctcaataaagttcccctgtgacactcaaaaaaaaaaaaaaaaaaaaaaaaaaaaaaaaaaaaaaaaaaa

SEQ ID NO: 6787 - DNA, 878 bp, Homo sapiens; identical to SEQ ID NO: 1552

SEQ ID NO: 6788 - DNA, 600 bp, Homo sapiens
agcaggaccaagggagccagcctccagtgagtgactccagcaagtgcagccacctctcccttgatggtctgggagcctggcctcagcaaggggccttcctgacctctggctccagtgaagctgaatgtcctcactttgtgggtcacactctttacatttctgtaaggcaatcttggcacacgtggggcttaccagtggcccaggtaattttttgtttcatggactatggactctttcaaagggatctgatccttttgaattttgcacagccctagatacaatcccttttgataaaagggtctttgcttctgattacaggagcactgtggaacgtctgtaaatatgtttttataattccatgtatagttggtgtacactcaaaacctgtccccggcagccagtgctctctgtatagggccataatggaattctgaagaaatcttggggagggaaggggagttggaacaaatgtctgttccctggaggccagtccagtgctcagacctttagactcattgtaagttgccactgccaacatgagaccaaagtgtgtgactagtcaatgaagtgcgacagcattaaagactgatgctaaacctc

SEQ ID NO: 6789 - DNA, 1400 bp, Homo sapiens
ggaagcacagcctcggggatggggagggaaagacggtgctatatccagttcctgctctctgctcatgggtggctgtgacaaccctggcctcacttgattcatctctggttttcttgccaccctctgggagtccccatcccattttcatcctgagcccaaccaggccctgccattggcctcttgtcccttggcacacttgtacccacaggtgaggggcaggacctgaaggtattggcctgttcaacaatcagtcatcatgggtgtttttgtcaactgcttgttaattgatttggggatgtttgccccgaatgagaggttgaggaaaagactgtgggtggggaggccctgcctgacccatcccttttcctttctggccccagcctaggtggaggcaagtggaatatcttatattgggcgatttgggggctcggggaggcagagaatctcttgggagtcttgggtggcgctggtgcattctgtttcctcttgatctcaaagcacaatgtggatttggggaccaaaggtcagggacacatccccttagaggacctgagtttgggagagtggtgagtggaagggaggagcagcaagaagcagcctgttttcactcagcttaattctccttcccagataaggcaagccagtcatggaatcttgctgcaggccctccctctactcttcctgtcctaaaaataggggccgttttcttacacacccccagagagaggagggactgtcacactggtgctgagtgaccgggggctgctgggcgtctgttctttaccaaaaccatccatccctagaagagcacagagccctgaggggctgggctgggctgggctgagcccctggtcttctctacagttcacagaggtctttcagctcatttaatcccaggaaagaggcatcaaagctagaatgtgaatataacttttgtgggccaatactaagaataacaagaagcccagtggtgaggaaagtgcgttctcccagcactgcctcctgttttctccctctcatgtccctccagggaaaatgactttattgcttaatttctgcctttcccccctcacacatgcacttttgggcctttttttatagctggaaaaaacaaaataccaccctacaaacctgtatttaaaaagaaacagaaatgaccacgtgaaatttgcctctgtccaaacatttcatccgtgtgtatgtgtatgtgtgtgagtgtgtgaagccgccagttcatctttttatatggggttgttgtctcattttggtctgttttggtcccctccctcgtgggcttgtgctcgggatcaaacctttctggcctgttatgattctgaacatttgacttgaaccacaagtgaatctttctcctggtgactcaaataaaagtataattttta

SEQ ID NO: 6790 - DNA, 1400 bp, Homo sapiens
ctctgaacttctaaatgggcccattgatgtttctgatctatcactttgcaaagctttcaaccaaaaccaccctgaaagcacagcagaattcaatgattctgactccggcatttcactaaacacaagtcccagtgtggcatcaccagaacactcagtggaatcttccagctatggagacacactacttggcctcagtgattctgaagtggaagagctagatagtgcccctggaagtgtcaaacagaatggtcctaaaacaccagtacattcttctggggatatggtacaacccttgtcaccatctcaggggcagagcactcacgtgcatgatgcccaatgtgagaacacaccagagaaagaattgcctgtaagtcctggtcatcggaaaaccccattcacaaaagacaaacattcaagccgcttggaggctcatctcacaagagatgaacttagggcaaaagctctccatatcccattccctgtagaaaaaatcattaacctccctgttgttgacttcaacgaaatgatgtccaaagagcagttcaatgaagctcaacttgcattaattcgggatatacgtaggaggggtaagaataaagtggctgctcagaattgcagaaaaagaaaactggaaaatatagtagaactagagcaagatttagatcatttgaaagatgaaaaagaaaaattgctcaaagaaaaaggagaaaatgacaaaagccttcacctactgaaaaaacaactcagcaccttatatctcgaagttttcagcatgctacgtgatgaagatggaaaaccttattctcctagtgaatactccctgcagcaaacaagagatggcaatgttttccttgttcccaaaagtaagaagccagatgttaagaaaaactagatttaggaggatttgaccttttctgagctagtttttttgtactattatactaaaagctcctactgtgatgtgaaatgctcatactttataagtaattctatgcaaaatcatagccaaaactagtatagaaaataatacgaaactttaaaaagcattggagtgtcagtatgttgaatcagtagtttcactttaactgtaaacaatttcttaggacaccatttgggctagtttctgtgtaagtgtaaatactacaaaaacttatttatactgttcttatgtcatttgttatattcatagatttatatgatgatatgacatctggctaaaaagaaattattgcaaaactaaccactatgtacttttttataaatactgtatggacaaaaaatggcattttttatattaaattgtttagctctggcaaaaaaaaaaaattttaagagctggtactaataaaggattattatgactgttaaaaaaaaaaaaaaaaaaaaaaaaaaaaaaaaaa

SEQ ID NO: 6791 - DNA, 1400 bp, Homo sapiens
gactttttaaaaaagtttgggggcagattctgaattggctaaaagacatgcatttttaaaactagcaactcttatttctttcctttaaaaatacatagcattaaatcccaaatcctatttaaagacctgacagcttgagaagggtcactactgcatttataggaccttctggtggttctgctgttacgtttgaagtctgacaatccttgagaatctttgcatgcagaggaggtaagaggtattggattttcacagagggaagaacacagcgcagaatgaaggcgcaggcttactgagctgtccagtggagggctcatgggtgggacatggaaaagaaggcagcctaggccctggggagcccagtccactgagcaagcaagggactgagtgagccttttgcaggaaaaggctaagaaaaaggaaaaccattctaaaacacaacaagaaactgtccaaatgctttgggaactgtgtttattgcctataatggggtccccaaaatgggtaacctagacttcagagagaatgagcagagagcaaaggagaaatctgggctgtccttccattttcattctgttatctcaggtgagctggtagaggggagacattagaaaaaaatgaaacaacaaaacaattactaatgaggtacgctgaggcctgggagtctcttgagctccacgacttcaaaattaaaatgagccatgagtcaaaccactgcaatccagcctgggcaacgagcaagacccagtctctactgttggtggcaaaattgccaacataagttaatagaaagttggccaatttcaccccattttctgtggtttgggctccacattgcaatgttcaatgccacgtgctgctgacaccgaccggagtactagccagcacaaaaggcagggtagcctgaattgctttctgctctttacatttcttttaaaataagcatttagtgctcagtccctactgagtactctttctctcccctcctctgaatttaattctttcaacttgcaatttgcaagggttacacatttcactgtgatgtatattgtgttgcaaaaaaaaaaaagtgtctttgtttaaaattacttggtttgtgaatccatcttgctttccccattggaactagtcattaacccatctctgaactggtagaaaaacatctgaagagctagtctatcagcatctgacaggtgaattggatggttctcagaaccatttcacccagacagcctgtttctatcctgtttaataaattagtttgggttctctacatgcataacaaaccctgctccaatctgtcacataaaagtctgtgacttgaagtttagtcagcacccccaccaaactttatttttctatgtgttttttgcaacatatgagtgttttgaaaataaagt

SEQ ID NO: 6792 - DNA, 600 bp, Homo sapiens
aggagatcgtcgtcactgactactcagaccagaacctgcaggagctggagaagtggctgaagaaagagccagaggcctttgactggtccccagtggtgacctatgtgtgtgatcttgaagggaacagagtcaagggtccagagaaggaggagaagttgagacaggcggtcaagcaggtgctgaagtgtgatgtgactcagagccagccactgggggccgtccccttacccccggctgactgcgtgctcagcacactgtgtctggatgccgcctgcccagacctccccacctactgcagggcgctcaggaacctcggcagcctactgaagccagggggcttcctggtgatcatggatgcgctcaagagcagctactacatgattggtgagcagaagttctccagcctccccctgggccgggaggcagtagaggctgctgtgaaagaggctggctacacaatcgaatggtttgaggtgatctcgcaaagttattcttccaccatggccaacaacgaaggacttttctccctggtggcgaggaagctgagcagacccctgtgatgcctgtgacctcaattaaagcaattcctttgacctgtca

SEQ ID NO: 6793 - DNA, 600 bp, Homo sapiens
cttcacgattcttaccctttcttttgaatcaatctggcttctgcattactattaactctgcatagacaaaggccttaacaaacgtaatttgttatatcagcagacactccagtttgcccaccacaactaacaatgccttgttgtattcctgcctttgatgtggatgaaaaaaagggaaaacaaatatttcacttaaactttgtcacttctgctgtacagatatcgagagtttctatggattcacttctatttatttattattattactgttcttattgtttttggatggcttaagcctgtgtataaaaaagaaaacttgtgttcaatctgtgaagcctttatctatgggagattaaaaccagagagaaagaagatttattatgaaccgcaatatgggaggaacaaagacaaccactgggatcagctggtgtcagtccctacttaggaaatactcagcaactgttagctgggaagaatgtattcggcaccttcccctgaggacctttctgaggagtaaaaagactactggcctctgtgccatggatgattcttttcccatcaccagaaatgatagcgtgcagtagagagcaaagatggctt

SEQ ID NO: 6794 - DNA, 600 bp, Homo sapiens
gtcccaagagggtctgctctgagcctgcgttcctaggtggctcggcctcagctgcctgggttgtggccgccctagcatcctgtatgcccacagctactggaatccccgctgctgctccgggccaagcttctggttgattaatgagggcatggggtggtccctcaagaccttcccctaccttttgtggaaccagtgatgcctcaaagacagtgtcccctccacagctgggtgccaggggcaggggatcctcagtatagccggtgaaccctgataccaggagcctgggcctccctgaacccctggcttccagccatctcatcgccagcctcctcctggacctcttggcccccagccccttccccacacagccccagaagggtcccagagctgaccccactccaggacctaggcccagcccctcagcctcatctggagcccctgaagaccagtcccacccacctttctggcctcatctgacactgctccgcatcctgctgtgtgtcctgttccatgttccggttccatccaaatacactttctggaacaaaaaaaaaaaaaaaaaaaaaaaaaaaaaaaaaaaaaaaaaaaaaaaaaaaaaaa

SEQ ID NO: 6795 - DNA, 600 bp, Homo sapiens
tccaaataacttaattggctgcataatcgggcgccaaggcgccaacattaatgagatccgccagatgtccggggcccagatcaaaattgccaacccagtggaaggctcctctggtaggcaggttactatcactggctctgctgccagtattagtctggcccagtatctaatcaatgccaggctttcctctgagaagggcatggggtgcagctagaacagtgtaggttccctcaataacccctttctgctgttctcccatgatccaactgtgtaatttctggtcagtgattccaggttttaaataatttgtaagtgttcagtttctacacaactttatcatccgctaagaatttaaaaatcacattctctgttcagctgttaatgctgggatccatatttagttttataagcttttccctgtttttagttttgttttgggttttttggctcatgaattttatttctgtttgtcgataagaaatgtaagagtggaatgttaataaatttcagtttagttctgtaatgtcaagaatttaagaattaaaaaacggattggttaaaaaatgcttcatatttgaaaaagctgggaattgctgtctt

SEQ ID NO: 6796 - DNA, 600 bp, Homo sapiens
tgaaaactgcaagacatgtactgaattccataactgtacagaatgtagggatgggttaagcctgcagggatcccggtgctctgtctcctgtgaagatggacggtatttcaacggccaggactgccagccctgccaccgcttctgcgccacttgtgctggggcaggagctgatgggtgcattaactgcacagagggctacttcatggaggatgggagatgcgtgcagagctgtagtatcagctattactttgaccactcttcagagaatggatacaaatcctgcaaaaaatgtgatatcagttgtttgacgtgcaatggcccaggattcaagaactgtacaagctgccctagtgggtatctcttagacttaggaatgtgtcaaatgggagccatttgcaaggatgcaacggaagagtcctgggcggaaggaggcttctgtatgcttgtgaaaaagaacaatctgtgccaacggaaggttcttcaacaactttgctgcaaaacatgtacatttcaaggctgagcagccatcttagatttctttgttcctgtagacttatagattattccatattattaaaaagaaaaaaaaaagccaaaaag

SEQ ID NO: 6797 - DNA, 600 bp, Homo sapiens
acaaagtgaaaagtggggacgacatcagtgtgctctgcactgtcctgggggagcccgatgtggaggtggagttcacctggatcttcccagggcagaaggatgaaaggcctgtgacgatccaagacacttggaggttgatccacagaggactgggacacaccacgagaatctcccagagtgtcattacagtggaagacttcgagacgattgatgcaggatattacatttgcactgctcagaatcttcaaggacagaccacagtagctaccactgttgagttttcctgacttggaaaaggaaatgtaatgaacttatggaaagcccatttgtgtacacagtcagctttggggttccttttattagtgctttgccagaggctgatgtcaagcaccacaccccaaccccagcgtctcgtgagtccgacccagacatccaaactaaaaggaagtcatccagtctattcacagaagtgttaacttttctaacagaaagcatgattttgattgcttacctacatacgtgttcctagtttttatacatgtgtaaacaattttatataatcaatcatttctattaaatgagcacgtttttgtaaaaaat

SEQ ID NO: 6798 - DNA, 600 bp, Homo sapiens
ctgcagctgtccaaaccagagcttcctcaagatggcaccagcaccctcagagaaaatagcaaaccggaagaaagccatttgctagccaaaaggtatgggggcttcatgaaaaggtatggaggcttcatgaagaaaatggatgagctttatcccatggagccagaagaagaggccaatggaagtgagatcctcgccaagcggtatgggggcttcatgaagaaggatgcagaggaggacgactcgctggccaattcctcagacctgctaaaagagcttctggaaacaggggacaaccgagagcgtagccaccaccaggatggcagtgataatgaggaagaagtgagcaagagatatgggggcttcatgagaggcttaaagagaagcccccaactggaagatgaagccaaagagctgcagaagcgatatgggggcttcatgagaagagtaggtcgcccagagtggtggatggactaccagaaacggtatggaggtttcctgaagcgctttgccgaggctctgccctccgacgaagaaggcgaaagttactccaaagaagttcctgaaatggaaaaaagatacggaggatttatgagattttaa

SEQ ID NO: 6799 - DNA, 600 bp, Homo sapiens
actcccaaagacttctatgttgatgagaacacaacagtccgggtgcccatgatgctgcaggaccaggagcatcactggtatcttcatgacagatacttgccctgctcggtgctacggatggattacaaaggagacgcaaccgtgtttttcattctccctaaccaaggcaaaatgagggagattgaagaggttctgactccagagatgctaatgaggtggaacaacttgttgcggaagaggaatttttacaagaagctagagttgcatcttcccaagttctccatttctggctcctatgtattagatcagattttgcccaggctgggcttcacggatctgttctccaagtgggctgacttatccggcatcaccaaacagcaaaaactggaggcatccaaaagtttccacaaggccaccttggacgtggatgaggctggcaccgaggctgcagcagccaccacgttcgcgatcaaattcttctctgcccagaccaatcgccacatcctgcgattcaaccggcccttccttgtggtgatcttttccaccagcacccagagtgtcctctttctgggcaaggtcgtcgaccccacgaaaccatag

SEQ ID NO: 6800 - DNA, 1310 bp, Homo sapiens; identical to SEQ ID NO: 1565

SEQ ID NO: 6801 - DNA, 600 bp, Homo sapiens
gataaattcaaggctgagcgcattatggtagagggcttccatgtggatgataagaccatcatcagagtgcctatgataaaccacctgggtagatttgacatccaccgggacagggagttatccagctgggtgctggcacagcactatgtggggaacgccactgccttcttcatcctgcccgatccaaagaagatgtggcagttggaagaaaaattgacctacagccaccttgaaaatatccagagagcctttgacataaggtctatcaatctacattttcccaaactgtccatttctggaacctacaaactcaagagagtccctaggaatctgggcatcaccaagatcttcagcaacgaggccgacctctctggagtcagtcaggaggcacccctgaagctctccaaggctgtgcatgtggctgtgctcaccattgatgagaaagggaccgaagccaccggagccccccatctggaggagaaggcctggtctaagtatcagacagtcatgttcaaccgacccttcctggtcatcatcaaggagtacatcaccaactttccgctcttcattggaaaagtggtgaatcccacccaaaaataa

SEQ ID NO: 6802 - DNA, 1400 bp, Homo sapiens
cacaacccttccggctaggagagcgcagctttagccggcagtatgcccacatttatgccacccgcctcatccaaatgagacccttcctggagaaccgggcccagcagcactggggcagtggagtgggagtgaagaagctgtgtgaactgcagcctgaggagaagtgctgtgtggtgggcactctgttcaaggccatgccgctgcagccctccatcctgcgggaggtcagcgaggagcacaacctgctcccccagcctcctcggagtaaatacatacacccagatgacgagctggtcttggaagatgaactgcagcgtatcaaactaaaaggcaccattgacgtgtcaaagctggttacggggactgtcctggctgtgtttggctccgtgagagacgacgggaagtttctggtggaggactattgctttgctgaccttgctccccagaagcccgcacccccacttgacacagataggtttgtgctactggtgtccggcctgggcctgggtggcggtggaggcgagagcctgctgggcacccagctgctggtggatgtggtgacggggcagcttggggacgaaggggagcagtgcagcgccgcccacgtctcccgggttatcctcgctggcaacctcctcagccacagcacccagagcagggattctatcaataaggccaaatacctcaccaagaaaacccaggcagccagcgtggaggctgttaagatgctggatgagatcctcctgcagctgagcgcctcagtgcccgtggacgtgatgccaggcgagtttgatcccaccaattacacgctcccccagcagcccctccacccctgcatgttcccgctggccactgcctactccacgctccagctggtcaccaacccctaccaggccaccattgatggagtcagatttttggggacatcaggacagaacgtgagtgacattttccgatacagcagcatggaggatcacttggagatcctggagtggaccctgcgggtccgtcacatcagccccacagccccggacactctaggttgttaccccttctacaaaactgacccgttcatcttcccagagtgcccgcatgtctacttttgtggcaacacccccagctttggctccaaaatcatccgaggtcctgaggaccagacagtgctgttggtgactgtccctgacttcagtgccacgcagaccgcctgccttgtgaacctgcgcagcctggcctgccagcccatcagcttctcgggcttcggggcagaggacgatgacctgggaggcctggggctgggcccctgactcaaaaaagtggttttgaccagagaggcccagatggaggctgttcattccctgcagtgtcggcattgtaaataaagcctggcacttgctgatgcg

SEQ ID NO: 6803 - DNA, 1400 bp, Homo sapiens
ttaagaaaacaactaactgagggttttttttgtttgttttttgagggttttctttgcatgagagttgtatgtaaccagtgatatgattattcctgaatgtacagacagaagtaagcctggacattgttaaatagtccctgctttaagggactacgataatgtgtactatgacaaacgtgctttattcttctaacgcagtaagaattaggtggaattttttccttcaaccaagtgcaggaaagccctgtgtgtcttggtttagttatggtttcatttctagccatacaattgatgaattgtgtacaacttttgttagtaccaaaataatctgttatatgaacagacttctaaaataacgtctgtatattttatatatagatacatatatgaaagaaggcttttattgaacagcttatcttccacttgcaggtttatggaaacagcagtatttgaaaataaataaaaagtgggagaattccttgctgttagaagaatgtggccattattttgattttttgaatgagatatataatcaaagtactgctgaactgtgagtgcagtattctaaacatttcagctaggaataccactgatttagaaacaaaactgtttgtctctggtttctgaatttaaaatgttgggattacctgtttaaatctgtcttgggggatgtagagattaagtctgtacatgtgcgtgcacatatattcatgcaccctctgattttggttttcttgtttctgagttcttagaaagtacccacatactcttttttttttttttgtagaagtagctgtcatagagtgaagaaaaggataagactttaaacagttgattctttttgtgttttctacaaactattttttgaaatttaaatcacaaactcattttctggtttttagaaagtagatgatgatttcagaggagtaaggcatgccaagcagcatgctcagtggggttttaggctgtcacatgcagctgagaaaaggtatgttcaagtcataagtaggtaattgatagggtatgaactagtcaaaatatgaaccattatgattcaagttagattttcctctggagagacagatctgaatgttcagttctagccaaggtagattttactttcaactttttaatcagtatcactttctgtgcttaactatttggtgttaccttgtctgttttcatttgtctaaaattctgcagagatgactaaaatttgacataatggtgtaaatggattgttaaggtaactttcagttgaagattaaagcaagatgccattttccccatgactttggttttgtttacatttttccctttcagttagtatacactacacgtactgtaataaaatacaataatatgaaaaaaaaaaaaaaaaaaaaaaaaaaaaaaaaaaa

SEQ ID NO: 6804 - DNA, 1400 bp, Homo sapiens
gtgagaaaaagaaagaaaaggagcgtgaagaattgtggaaaaaattggaggatctggagttaaagagaggtcttagacgtgatggaataattccaacttaacaaaaacaatgacaacaacattactaacctgtggagtcacacgtttatgtagtagaagatggagcaacagttttctgtattgtgcaactttacagtagatttcacctttgtttcattattacagcagcactgtatatacctgtctctaagtaaaggaaaaaacaaaataaggacttcaatccaaagtttggacagtagatggacttctcagaactttgcaaacataatcattgttctcaccctcttttaaaaaaaaaaaatcggtcttcaaagatctgttgatgaaattgctatgttaaaattccattatcgggagttccttatttatcactagcagagagtatgatacaattttcaaatgtgaacaatcttaaatttagcttgtctttctgctaagctgttaaatgtatttatagtaaaggaagaaaaaaagactgtcatttccttataagtttgtgtaacatcctcctctggataacttgactgtaatttaacatctttttcttttgcacatcttcctgagttgaatgtccacgtggaatggggtcatgaattataaaagtccctgataaaagttttgtttactggggtgaacatctttccagtaaccaggtagtcctggtactcctttagttttaaaattaggagttaagagagaagaggtgataaacatagtagggaagggaatatcggattcatgcatcagtttatggtgaatccaaatcaatgtcttgaatcctttgaaaacaggcactgggacatcacaggcttcagtacctgaccagtattagttgcatatatcattgaacacacataccagagatgttttagaaatgtgagaaaaacatccttttggaccatttgaaataagaaagacaaacactaaacaatacaaccatgaaattgatcaccgggattgcaaatctaattgggaaaagagttgagcaaacagcttggactgtttggagttgttgccttactttttaatatgtatttataaagtattccagcaaaagaggatgtagcctctgggaaaaaacaaacatgttacagtgttttttgtagattctcgttctatatctcatcacagcgccagccctgtttttagccggaaaggattcaggataaacattattatgcattctgaattggatgcatattcctaactactgtatttgttaccaaaagtggttctacaaatgctactgaaaaaaatctggaaattcctaatgtcctgagtattaataataaagtttaaaaatgcttttatatcaaaggtgcatcgtgaccaaattgttt

SEQ ID NO: 6805 - DNA, 985 bp, Homo sapiens; identical to SEQ ID NO: 1570

SEQ ID NO: 6806 - DNA, 1017 bp, Homo sapiens; identical to SEQ ID NO: 1571

SEQ ID NO: 6807 - DNA, 600 bp, Homo sapiens
tgaagacaggtctccacacacagctccagcagccacatttgcaaccttggccatctgtccagaacctgctcccacctcaggcccaggccaaccgtgcactgctgcaatgggctctgagctggagacggcgatggagaccctcatcaacgtgttccacgcccactcgggcaaagagggggacaagtacaagctgagcaagaaggagctgaaagagctgctgcagacggagctctctggcttcctggatgcccagaaggatgtggatgctgtggacaaggtgatgaaggagctagacgagaatggagacggggaggtggacttccaggagtatgtggtgcttgtggctgctctcacagtggcctgtaacaatttcttctgggagaacagttgagcagacagccacattgggcagcgcccttcctctccaccctcccagacctgcctcttccccctgcttccacctcaccccacttatccctctccataaccccacccttgcccaccccacccccacccccaccaagggcgcaagagtagcggtccaagcctgcaactcatctttcattaaaggcttctctctcaccagcaaaaaaaaaaaaa

SEQ ID NO: 6808 - DNA, 1095 bp, Homo sapiens; identical to SEQ ID NO: 1573

SEQ ID NO: 6809 - DNA, 600 bp, Homo sapiens
aatcttcaagctaggttttgcagttcccaaccacaacattcttctattttgccaggctggtgcaaagtaattaaagatgtcaatcagaaatgtcaatgagactaaagtggttttgtaaatctcagctatatttagcaacactccatgtagctaatattttttggtagcatctggtagaccttagaatgttacatagccagtaggttctttattcaaattttaagtatcttaagaatagtagggcagtaacagttacttttgagagttttctggtcaagcttttaccaggcattctctagccttggtacaaaaaaaaaaaaaacctgctggttgcgcagatacctaggcttgtccattttatgcatttcagcaaagtcattggagactattgcaacttgggaatactggtctgcatcaagtttaattcggtagtttgaccgctagtatgttggaagttatttggattgtttttggaattttgactggctgaattatggttggtataaagttatgtgtataactggcaggcttatttatctgttgcacttggttagctttaattgttctgtattatttaaagataagtttactcaacaataa

SEQ ID NO: 6810 - DNA, 600 bp, Homo sapiens
gtagcctgtcggttgcctactctgctgtctgggtgacccccatgcgtggctgtgggggtggctggtgccagtatgacccacttggactcaccccctcttggggagggagttctgggcctggccaggtctgagatgaggccatgcccctggctgctcttatggagccgagatccagtcagggtgggggcgctggagccgtgggagcccggccagggcagggggctcgtcgctgtggcaccccctctctgccagcaccaagagattatttaatgggctatttaattaaggggtaggaaggtgctgtgggctggtcccacacatccaggaaagaggccagtagagaattctgcccactttttataaaaacttacagcgatggccccaccaaggcctagacacggcactggcctcccaggagggcaggggcattgggaatgggtgggtgccctccagagaggggctgctacctcccagcaggcatgggaagagcactggtgtgggggttccaccgagaaggggacctcatctagaaaagaggttacaaacctaccattaaactatttttcctaaaacggaaaaaaaaaaaaaaaaaaaaaaaaa

SEQ ID NO: 6811 - DNA, 1400 bp, Homo sapiens
gtggtcatgtgattgtgagcttgctttctgacttgcatttctgactttatcctgttgttaggaagatagaaactaggttttgaaagattacatgattcaagcgagggattttaaagtaaagatgtatttattctgaagaatctaaaagataacagattatttgcttatgaaagaacaatatagtctgggaatcccagaatgtcaagccaaaggtctaagaagtcatctccttcaaatactttaataaagaagtatttcgaggagatatctgtccaaaaaggtttgactggcctccagattccagttatttttaaaaagcaacttaccactaaatccttgagtctccatagagtaacagtaaagaaactgatgtaacagactctcctctcaaaggatctcctctggaagagactatcagcggcagatctctccagggaagacccatcccctagtgccagagcttgcatcctggagactaaagattgcacttttttgtagttttttgtccaaatgcaatcccatttctgtgcctcttagcatgcagttagatttggacaaacaagattcctaaggaatgactttattaactataatatggttacagctattatataaatatatattctggttatagttctaatatggagatgttgtgtgcaatgctggcctgtggtggtctgtgtaatgctttaacttgtatggaggaggccaggctcagagctgagatgtggcctgaaccttccctgtatcgatcctttaatttagaactgtcaagatgtcactttctccccctctgccttttagtggtatctgacatatactcaaaacagtaatttcctggtcacatcattaactgctaattctgtatttataaagaattttcagatggacatgtacaaatttgaactcaaaccatccccagtccagatacagggcagcgtgtaggtgaccacaccagagcctcagcctcggtccttctcagccgtcgggataggatccaggcatttcttttaaatctcagaggtagcagtaaacttttcagtattgctgttagcaagtgtgtgtttgccaatagatacccattatactaatgtgccaagtaaatgttcattgcacatctgcttccactgtgttcccacgggtgccatgaagtgtgtgaggagcccctcatctggagggatgagtgctgcgttgactactgctatcaggattgtgttgtgtggaatattcatctacataaattttatatgcacagtaatttccctttttatatgtcaagtaactatttgtaaaagttatactcacaaattattataatgattactaatatattttttccatgtttcattgcctgaataaaaactgtttaccactgttaaaaaaaaaaaaaaaaaaaaaaa

SEQ ID NO: 6812 - DNA, 600 bp, Homo sapiens
agagataatgcaaacaggattataaagacaacattgcaacaagaaaagccagatttctgctttttggaagaagatcctggaatatgtcgaggttatattaccaggtatttttataacaatcagacaaaacagtgtgaacgtttcaagtatggtggatgcctgggcaatatgaacaattttgagacactggaagaatgcaagaacatttgtgaagatggtccgaatggtttccaggtggataattatggaacccagctcaatgctgtgaataactccctgactccgcaatcaaccaaggttcccagcctttttgaatttcacggtccctcatggtgtctcactccagcagacagaggattgtgtcgtgccaatgagaacagattctactacaattcagtcattgggaaatgccgcccatttaagtacagtggatgtgggggaaatgaaaacaattttacttccaaacaagaatgtctgagggcatgtaaaaaaggtttcatccaaagaatatcaaaaggaggcctaattaaaaccaaaagaaaaagaaagaagcagagagtgaaaatagcatatgaagaaatttttgttaaaaatatgtga

SEQ ID NO: 6813 - DNA, 1221 bp, Homo sapiens; identical to SEQ ID NO: 1578

SEQ ID NO: 6814 - DNA, 1400 bp, Homo sapiens
ccaccagtacctccttcagcggaaggcctcaccacccacagtgtgaatcctgaggtgccgccattggcggttctgctgcttcgctgcagggataaggtggagctaccgaacagctgattcatatgccaagaatttggagtcttctttcaaaccagtgggggttggacaatgaatgtagttaactggttcctgctcacactccagaattaaattctattgaaaaaggaaaatcagcaattcagcaaaaaaataaataaaaaataaaaatgtaaatatgatagtaataaaatagagcataacgaaactgtgaaactttctgaagccttgtcagtggttaaaagtatttaacactctactgttaatgacagatgttctgtttttataacctaccaaaaggaaactagaggcttcttggtgaagagcatttttgtgaagtgggttctgcaaggagcctataaagccaagggtggtgtccatttctgggaatggttaaacacaaaaggctgatagctggtatcacatagttggagtcagtgcataattccaagtggctttttttttttttggcacggggactgatcaggaagatatattcctgcataactcaatctgaaccaaggattgtagtttagttttcctccttgccttcccttctgtgtgaccgaccccttggccaaaaaaaaaacaaaaagcaaaaaacaaaaacctaccctgttctggtttttttcctccctttagttccacccccaacccccattccctggtgtccttcttagagatgaagaaataataaggaaacatctttcatagccacattaaataagagaaactgatatacattatttttttctttttaaagatgacttataagaaccctgaaatttatataggtgagacaatagaaataaaaagatcttcagccaggcctttctgaaggagttattctgctaaaaatggtcttagttgtctgaaaagccagctcttgaacctcttcacaacagtatcaacactggcttctcccggttcattttatgcgtgcgagaagtcagtggtaactgctgcagggcttaatacattagtggtaactggtttaaaaaacaaagactgtaagcctgtgtgtgccactgtttgcttcaacagtatatcctactaataagcctcacctatttaatccaatgagttttaaatctaaatctcattcccttcttctttccctaccttttttttctttttttcttaaaaaaatattttgtgttattaacagaaattcatatttggtgtggcttaacggtatttcagaaggtcatcagattgtgagactgcttccttgaaacatttttgtgctattgttttaaaaaaataattaaaaaacagttggcgttaataaaaatgtcaatgtg

SEQ ID NO: 6815 - DNA, 600 bp, Homo sapiens
agggtgggcctgggaagacaggccctcttcaacaggctcaactcagtttccttataaccctctgactatgcggatgctcagcagtactccaccaacaccgattgcatgtgctccctctgcggtgaaccaagcagctcctcaccaacagaacaggatctgggagcgagagcctgccccactgctctcagcacagtacgagaccctgtcggatagtgatgactgaactgcacaaagtgaggggaacagggtgcaggagagggatctctagtttttgtggtttaatttttagtagcaggtcaaaaacctgccctcctgtgacttattccctgagacttttcaggagagccagcccacagatgatgaagaaatgatggaagttcatttggagagtcaaatgggaaaaaaacaaacaaaaaactgcctttgatacaggcaattcagtggactataataatagtggagggttgagatgtagagtttttaaaaagtgaacagttgctgttcttacatctgtaaagaaaaccataatgtctttaaatcactcttctgtaaatagatgacctttttgcagtgtaaaaaaaaaaaaaaaaaaaaaaaaaa

SEQ ID NO: 6816 - DNA, 1400 bp, Homo sapiens
tggtcatttattttgctctaataatactgcaagaaaactatggctgaacttagtttttggataatctagttcatgtgcattaggctgccgtatatactactatgatatttagctgcagtatcaatgtggcataaatactgcggcagcattcttcgaaaaccgcattttcaaatttatccccgtaatcaatgtgggcctattaaaaaaccaaatcatgatacaagaaacaaccttggaaaagttatttccctttgtaatacctttaaaaatccagagtattatattcattttactgccactgtggaaacaggttctagatttcatactccatctaaagtcatttttcagttacatgtaagtattatttactgctattgggatctattcttcagatattcaaaaacattttttgctttaaaatgcatatctttaattgggtgttggtccaaaattaaaatttttgctgtctgtttttctctaccccattttgtggtaatttggcaacttgagctctcccaattattgtaatataaggacagacataatagtattctgtacccatagtaataattgcatcaagcttagatgagaaatttttttcatatactggcctttaaatcattaatggacaattggctataaaggtaggtctgttaactttctttgtgtgttcctgatggaattcaccatagccttacagcttttctcagaaggtaacttgttataagagaaatggcatttgcatgttccagagtcagaacctgtacagtatataaagcataaacaccttgaatttgattttagttcaccacattcaaggatccaggatgccaaaaatatgtgtgaacatttgaaacatttttatttgctgctttttccctttgatatagttgaaagaatgtattgtaaattggcatacaatactgcctttaatagaaaacctaaatgctggggcacatttcacatatcgactacctgagaaattgctttgtgtcccactgttattaaagcaaaaagtataatgttcttcacttgaactaatcaaatacaatagattataaattgtgtattgtaaataaaagttcactctgtgagtgcacattttggtaaattatttatttatgttagcatttaaaagtttaaaaaaaatgcatttgaccaggataaatgaggtatgttgatcatggctttgctttatatcttgatattaaagctggtttatcatcctggtattttaaaagctgctttggggttttttttttcttttttttttttttaatgtaaactaacctcctgcatgacagaggttaaaattttgtctgcacttgagttcacttgagtttacatttgaaatgtgcatgtttatttatatagatttcaataaagctattcaaggcctt

SEQ ID NO: 6817 - DNA, 1400 bp, Homo sapiens
acattttgcctagataaagatgcacttagagatgaatatgatgatctctcagatttgaatgcagtacaaatggagagtgttcgagaatgggaaatgcagtttaaagaaaaatatgattatgtaggcagactcctaaaaccaggagaagaaccatcagaatatacagatgaagaagataccaaggatcacaataaacaggattgaactttgtaaacaaccaaagtcaggggccttcagaactgcaattcttactccctttcacagactgtccggagtctttgggtttgattcacctgctgcgaaaaacattcaacaaattgtgtacaagataaattaatctcactatgaagatttgaataactagacattatttatgctgccaaactcatttgttgcagttgtttgtaatgtctagtggggcttcatcatcctgaaaagaaggagacagggatttttttaaagagcaagaaagtcacaatattacttctttccttccttttttccttctttcctttcttctttctctttctttctttttaaaatatattgaagacaaccagatatgtatttgctactcaagtgtacagatctcctcaagaaacatcaagggactcctgtgtcacatactgtgtttttattttaacatgggtgagggaggcgacctgatcaggggaggtgggggtacacatcaatttgagttgttcaggctactgaaacattaaaatgtgaattcccaaacttttctttttggctttgtcagggaaaagaaaaatatctttataaagaaatctttggaaattaggagaaggaatttcaggtgggtttaagtcagagctagttccccaacagaaagatcatttgaaaccagtttttatcccttctctttccttccctttccctaaatcaaatcaatattaattgtgccttatttcacttaacatagacttgaattatttttagggaaagcccctataatgaattcagaaatcactacaagcagcattaagactgaagttggaatattctgttgaccataaaaccttgatatcattctgtgtatatagaatgtaaaaggaatattacagtgttaactgccatatatgtaatatacacaaactcaattagcattgtaatggccaaatgcattcccccatgcttttctgttttcaaaaaaattgaaaaacaaatcaactcttatccccaacagctgcctaattttaggagtctgaccctccacatctcactggtgtgggtgcatggggctgtggagtgggtgtcagtatggatgtgtctgaatgtgtgaggccttggaagggactctttctgcagatactgtaaatacaagtaccattttaataaagcatgtacaataaaccaaaaaaaaaaaaaaaaaaaaaaaa

SEQ ID NO: 6818 - DNA, 600 bp, Homo sapiens
ttactgtcattcccattccttttctttagaatcagaataaagttgtatttcaaatatctaagcaagtgaactcatcccttgtttataaatagcatttggaaaccactaaagtagggaagttttatgccatgttaatatttgaattgccttgcttttatcacttaatttgaaatctattgggttaatttctccctatgtttatttttgtacatttgagccatgtcacacaaactgatgatgacaggtcagcagtattctatttggttagaagggttacatggtgtaaatattagtgcagttaagctaaagcagtgtttgctccaccttcatattggctaggtagggtcacctagggaagcacttgctcaaaatctgtgacctgtcagaataaaaatgtggtttgtacatatcaaatagatattttaagggtaatattttcttttatggcaaaagtaatcatgttttaatgtagaacctcaaacaggatggaacatcagtggatggcaggaggttgggaattcttgctgttaaaaataattacaaattttgcactttttgtttgaatgttagatgcttagtgtgaagttgatacgcaagccg

SEQ ID NO: 6819 - DNA, 1056 bp, Homo sapiens; identical to SEQ ID NO: 1584

SEQ ID NO: 6820 - DNA, 1400 bp, Homo sapiens
gtggggaccttggaaacaagtttgtccgtccactctacaaagtttcctcctctcctacactgaaagactcagtgccatgcagaagccttttttttaagatgaaggaaatattttatgtaaagagcaactcagcaggacacagaactaaaactactacttacatctaacagacacactacaagttgaatcaatttgaaaatcatgtttttatgcttccatagggaacattttggttatttaaattgttcataatgtcccatatttcacctgttcagtgtatactgtactttgcaatcatctttccttttttcacattggtaaaaataagtggcatccataggatcatgatttttaatttgttgcctctgaagatttcactccatcaagatctgccaatcttcaatattctggctaaatcttggtatgtggtttttaaacagtcactccgtttcaaagtctgtctttccttatagaatgtggaaattatttctccataccttgtgattttgacctgagtgctaagagaatcactctccttacctagttatctacaaatgttcattccagaaatgtttagttactgaattgaatgaagacatctcagtacactcttttaggtcatagtagttgccattttgtaaaatttcttttttcttctttgcttttttccccttatttggtttaatttttctaatgttaggagatatagtcctagatatttccatgggccagtgtgatgacttttttttaaatgaggttcagtaccataatgtttatttactggaagataatgcatttataagcattttaaaattctgtaaagtgggttagaaatatttataattttacaggcaggacagcatttgacttttatttaaaaggcggcactacttatgtaaatctgagctgtgggatatttcttgctttaagagagagacagaatctctcactgaaactcatggtcatgattttgtataatatagttcatactgtgtctgtgagtatattcaattacaaatgggcatttagtatagttatattgactataacatgtaagtaaatagctttctactgaccctaagtcatcaaggtggaaaaaaaacatgcaattcagtaattgaaaatgtggtgaaaagctgcagctgtcatcatcaaaacaactcataacatactttaaaatgttcaggtagcagtgagcattgttcatatgagaatggcggctgggtgatctctttgctgaattaatgagttcttaacatgtggacccaactgcctgtgtgagatctgtgtcttaaaacttactggaatggaaatctatgaattattgcaaattgtaatgctggaaacaaaaaataaatccttggttaaagggaaaaaaaaaaaaaaaaaaaaaaaaaaaa

SEQ ID NO: 6821 - DNA, 600 bp, Homo sapiens
aaaaaatgtttatgggatttcaaggttgggagaggccggtgttccctctgtgatgagctgtgccctgacagtaagtcggatgagcctgtctgtgccagtgacaatgccacttatgccagcgagtgtgccatgaaggaagctgcctgctcctcaggtgtgctactggaagtaaagcactccggatcttgcaactgaatctgcccgtaaaacctgagccattgattcttcagaactttctgcagtttttgacttcatagattatgctttaaaaaattttttttaacttattgcataacagcagatgccaaaaacaaaaaaagcatctcactgcaagtcacataaaaatgcaacgctgtaatatggctgtatcagagggctttgaaaacatacactgagctgcttctgcgctgttgttgtccgtatttaaacaacagctcccctgtattcccccatctagccatttcggaagacaccgaggaagaggaggaagatgaagaccaggactacagctttcctatatcttctattctagagtggtaaactctctataagtgttcagtgttcacatagcctttgtgcaaaaaaaaaaaaaaaaaaaaa

SEQ ID NO: 6822 - DNA, 1400 bp, Homo sapiens
atgctcttagttgagtcttgaaaagtaaatattaacgctacagaaatgcatgagttttcaatatattttttgtctttgtttgcattgtataactttaacgagtgagtttaaaattatttaatttccttagaaaaatagcaccatttggaaaaaaaaactggtgttatgaagaacgtaaatgcactgtttttatttttattttatataatttaaattgactttcccactgtctttaagttgaaactgttaagctgaataaaaacttaagctgcaaattgataacttcgctacataacaaggaaaatataaatgtttacaaacagcttaaagatttgcatgtgcagtgtgcatttataacaaacttctaattgcacaaaacccatgccagctcagagtttaggtgtacacatttacccagttgagcgttcttagaataactactgcacaagttgacaataggtcgttctctctttttttttgtttgctccctttttctttttctccccttcctccttaccctccctcccttactctccccccccaccaccaccctccacccccaactcatgaaaagattctatggactgaaaaagccccaggctgaaaggactggactgccttgattgacatggggaagggggttagtagactatgtggattgcggcagcagaggctgcagcctaacgtgtggttttaatgaccagcacgcaaggcaaaagcattttgcacagtgtttgttttcctgtcttgcacttacaaataaggtctatgggagtagcatggaaaacgtttgctgtttttcccttttttttttaattgcttttgtttaaaatttgatcgccttaactactgtaaacatagcctatttttgtgcttaagatactgaatggaaaactccattgtgtgttgctggactgttttggaaatatttggttaaatgtgtgttaatttggctgtaatggcatttaaagcaaacaaacaaacaaaaaaagctgtgaaaatggccttggagcattatctttagttacttgaagagtttctagtttttttaaaatacagtttatgttaaaataatttttattaatttagagaagacaatcaatgtctgtgagaaaacggactttcttttggattttctttttgtggtcattgtgagtgattgctttttccttttcttagtttcacattcttcctttgttctaaaacttagactgacatctagctttgacaatcatagtatgttttattttcctgagggggaataacttataatgctgtttagttttgtactattggtgtgttggtgaatttttaaactgtgtgctaactgcaataaattatatgaactgagaaaaaaaaaaaaaaaaaaaaaaaaaaaaaaaaaaaaaaaaaaaaaaaaa

SEQ ID NO: 6823 - DNA, 1400 bp, Homo sapiens
gtggtgggcattgtggagataatcaacagtaaggatgtcaaagttcaggtaatgggtaaagtgccaaccatatccatcaacaaaacagatggctgccatgcttacctgagcaagaattccctggattgtgaaatagtcagtgccaaatcttccgagatgaatgtcctcattcctacagaaggcggtgactttaatgaattcccagttcctgagcagttcaagaccctatggaacgggcagaagttggtcaccacagtgacagaaattgctggataagcgaagtgccactgggttctttgccctcccttcacaccatgggataaatctgtatcaagacggttcttttctagatttcctctacctttttgctcttaaaactgcttctctgctctgagaagcacagctacctgccttcactgaaatatacctcaggctgagatttggggtgggatagcaggtcagttgatcttctgcaggaaggtgcagcttttccatatcagctcaaccacgccgccagtccattcttaaggaactgccgactaggactgatgatgcattttagctttgagcttttgggggttattctaccaacaaacagtccattggaaagaaaacagtccctggaattaacagatcagaatgttcacactggttaatctttttttaacaatgagcatgaaggtagcagaagctggtgtgtttccagatggttcttctaaccaaactaatttttcactgttgacaagcgaggcaagggttgcactggaccaaaggctgaggcttggccatctagcattccatacaaaattgtttcctataagcattccttttattctctattctatcctgggtctgcctcaaccgtgagataggagagtctctggtactagctgctgtagcagtgcccttcatccagggcagttaatggagtcttggaccctttctttctctgggatccctgcccagcaccttcctatagagatgactttaaaaggaaaaaaaaaaaaaaacccacatgatttcaaggagtctggcattcctgaatccttcttccctgccaggtgcctgtcacctgtcttcactgcctccttttccctgtcatgctcatcagcttatggcttctgtctaagcacctgaacagaggactgaaacctccactgcaggctggttttaggtcttgaattatgtaagaatcttgcacagcactgctaatgtaaatttcagttgtttttccctctaggacaaacacttaccaaaatatgcaacttttttttggtgggaagagagattgtcctgtgatttctacccatttcctgaggcctgtggaaataaacctttatgtacttaaagttatacagaaaatagaataaagttaataccaaacttgaaaaagcggccgc

SEQ ID NO: 6824 - DNA, 1400 bp, Homo sapiens
atcttccgcctgctagacagcctgcgggccctgtcaggccaggctggatgtcgcctccgtgccctgcatctcagtgacctgttctcaccactgcccatcctggagctgacacgtgctatcgtgcgagcactgcccctgctacgggtcctctctattcgtgttgaccacccaagccagcgggacaaccctggtgtgccagggaatgcagggccccctagccacataataggcgatgaggagataccagaaaactgcctggagcagttggagatgggatttccacggggagcccagccagccccactgctgtgctccgttctgaaggcctcgggttctctgcagcagctgtccctggatagtgccacctttgcctctccccaggattttgggcttgttttgcaaacactcaaagagtacaacctagccctgaaaagactgagcttccatgacatgaatctcgctgactgtcagagcgaggtgctctttttgctacagaatctgactctgcaagagattaccttctccttctgccgtctgtttgagaagcgcccagcccaatttctgcctgagatggttgctgctatgaagggcaactccacactgaagggcctccggctgccagggaaccgcctggggaatgctggcctgctggccttggcagatgttttctcagaggattcatcctcctctctctgtcagctggacatcagttccaactgcatcaagccagatgggcttctggagttcgccaagcggctggagcgctggggccgtggagcctttggtcacctgcgcctcttccaaaactggctggaccaggatgcagtcacagccagggaagccatccggcggctccgggctacctgccatgtggttagcgactcatggactcatcccaggccttcgcagattatgttagcaccatgtgatggggcccgtacctcacagtctcatgctcggtaccatcagcttgcaggggctgaagcatgggctgcccagaaccccaaccaccagttctatctttctctttctgtcaccttttttctcttttttccttcttcccttgcactgaggtcctggaggccttgatgaggcccagcaaacaggcattctcacagctgggtttatagtctttgggccccttactcagtatcctgggaaccctgggccaggaggttacagtggtcatcataattgctgaagagatcccctcccctgcccctgggttcctgccttccctcctcaagcaggcacccaggctttagagaagtatagggggcttcttccctgctgggcttaccacactgctctcaggcctcaaaccctttcatacctttattcttttttttaaccaaaaaagtttttcttataaaataaattttgggcaaacatcaaaaaaa

SEQ ID NO: 6825 - DNA, 600 bp, Homo sapiens
  misc_feature (472)..(472): n is a, c, g, or t
  misc_feature (488)..(488): n is a, c, g, or t
gagccaccatgcccggcctctttctcacctttacacctgtcttcttatcctcacatctgttttcacaccttcatccctgtcttcctcatgttcacacttgtcttccccatgttcatagctgcctttcttaccattttggtttgaagggcagtcttctctggcttgtttttttgtttttcccagaaaatcagtattattttttaaataagaaaaacattcctagaagatgataattgtgaaaacctcctttggcttatttgcttttccagattttagtctcctttctccccatccgggaaagatkgtggaagacataggctaaatttctccagcctcacaatggtcttcacttggtctgacttgtaccaattctagcacccactgaaaaacaagttgagtagagagtgtagagtgcagaaatgtggcttttgccccactttgcatctccaaaattacaacggttggccgatcnaaattgaggacaatgnttagttataagtctccgagttggaaaaggaagaaagccagagctgtctagtttcattcattctttcagtaaatatttattgagtaaaaaaaaaaaaaaaaaaaaaaaaaaaa

SEQ ID NO: 6826 - DNA, 600 bp, Homo sapiens
acaacagaaaccacctgacatccacccgctgaagcgcactgctgttcagataggggacggaaggtcgtttgtttttgttctgagctccataagaactgtgctgacttggaaggtgccctgtgctatgtcgtgcctgcagggacacgtcggatcccgtgggcctcacatgccaggtcaccaggtcaccgtctccttccacccctgcagtgtgctgttgtgcacgtcaggacgctgttctctatgccactgcctcctccctctcctggcccagcagtattgctcacgggggctccagccgccggcgtggccctcatgagctacgcctgggtcttctgcagactcatgcagccctatggccgctcagaccaaggcgcagagcaactatcagggcatgctctgcctcctcctcccattgaggtggggagaggcaacagggcagcccccagaggagtgtcctggccgctgtctcccgggcccatgatggccatagatttgccttgtggtgttccatcaggtactgtgtctgctcataagtacttgtgtcatccagaatgttttgttttttaagaaaattgaattacttgtttcctgaaaaaaaaa

SEQ ID NO: 6827 - DNA, 1400 bp, Homo sapiens
tatggctagttttcaacttcagtactcaaattcaatgattcttccttttattaaaaccagtctcagatatcatactgatttttaagtcaacactatatattttatgatcttttcagtgtgatggcaaggtgcttgttatgtctagaaagtaagaaaacaatatgaggagacattctgtctttcaaaaggtaatggtacatacgttcactggtctctaagtgtaaaagtagtaaattttgtgatgaataaaataattatctcctaattgtatgttagaataattttattagaataatttcatactgaaattattttctccaaataaaaattagatggaaaaatgtgaaaaaaattattcatgctctcatatatattttaaaaacactacttttgcttttttatttaccttttaagacattttcatgcttccaggtaaaaacagatattgtaccatgtacctaatccaaatatcatataaacattttatttatagttaataatctatgatgaaggtaattaaagtagattatggcctttttaagtattgcagtctaaaacttcaaaaactaaaatcattgtcaaaattaatatgattattaatcagaatatcagatatgattcactatttaaactatgataaattatgataatatatgaggaggcctcgctatagcaaaaatagttaaaatgctgacataacaccaaacttcattttttaaaaaatctgttgttccaaatgtgtataattttaaagtaatttctaaagcagtttattataatggtttgcctgcttaaaaggtataattaaacttcttttctcttctacattgacacacagaaatgtgtcaatgtaaagccaaaaccatcttctgtgtttatggccaatctattctcaaagttaaaagtaaaattgtttcagagtcacagttccctttatttcacataagcccaaactgatagacagtaacggtgtttagttttatactatatttgtgctatttaattctttctattttcacaattattaaattgtgtacactttcattacttttaaaaatgtagaaattcttcatgaacataactctgctgaatgtaaaagaaaattttttttcaaaaatgctgttaatgtatactactggtggttgattggttttattttatgtagcttgacaattcagtgacttaatatctattccatttgtattgtacataaaattttctagaaatacacttttttccaaagtgtaagtttgtgaatagattttagcatgatgaaactgtcataatggtgaatgttcaatctgtgtaagaaaacaaactaaatgtagttgtcacactaaaatttaattggatattgatgaaatcattggcctggcaaaataaaacatgttgaattcccc

SEQ ID NO: 6828 - DNA, 600 bp, Homo sapiens
ctgttgatcaaaaaagtcaaggcattgtatgttgcttctgtggttattattctgtgatgcttagactacttgaacccataaacttggaagaatctttgagcaaattttctcagttgtctgtatgacttcagtatattcctgggaatgccataggattttttgtgcttgatacatggtatccagtttgcatagtatcacttctttgtaatccagttgctgttaagaatgatgtactttaaaggaaaagagaaaactgcatcacagtcccattctccagtgtccatgcaatgaattgctgagcatttaggaagcagcaccaagtctattacaggcatggtgtgaaacttgatgtttgacctgtgatcaaaattgaaccattgtacagtttggcttctgtttgcttcaaaatatgtagaattgtggttgatgattaatttgcgagactaactttgagagtgtaacagttttgaagaaaacattgaatgttttacaaatgaaggggcttcacggaatgttacaatgttactaatataatttggcttttgttatgcaaattgttaacaccagctattaaaatatattttagtagaaaaaaaaaaa

SEQ ID NO: 6829 - DNA, 600 bp, Homo sapiens
  misc_feature (40)..(41): n is a, c, g, or t
tgtcttatggcccagaactgcatttgattaaagaaggctnncctaaaaaaagagtcatacatattccatttgtcctttcagaaggccgtgaagcatttacactctttaagacaaattcccatccaaaaatagttaagatttctaaaatattttgatgctgaaagaggtgtgcttcagttgggtggcaaatttgcttctatggaagatttttaatacaggttgtttctattttactttttctggctgaaaggattttacatttattcaaagtcaaaagggaaaagaaatccaagaactacagaagagcagttgaagtgatttatgcttgatttctaaatgcaacttatgtttatacataatttaaaactcaaagaaagcatgcttatacaatcatgtgcaactttaaactttaagaactctggatgaatacatggtggcaacagtccatgacacctgaaaacatcatttgtggagtggcgtagagttcagtgttcgcagtcgcatattacaaccatgtttcacacagccctgctcggtttgattttctccacgtggttgataattgtcttcagttgctgctaagtgattttgcaaatttcg

SEQ ID NO: 6830 - DNA, 600 bp, Homo sapiens
gcagctgcacgagcaagccatgcagtttggtcagctcctgacacacttggataccacccagcagatgattgctaattccttgaaggacaataccaccctcttgacccaggtgcagacaaccatgcgtgaaaacctggccacagttgaggggaactttgccagcattgatgaacggatgaagaagctgggaaagtgagcacatttgggagctggagaacaggggttatccctacccctgtgaactctgttaacagcttacatagggtttcccctttactataactctagcatccccatcccatttgacactgggggcaagggttcttcttgcatgtggggtttatacccctcccctgatgaatacagagtggtagctaggggttggttatcatcagaaggtggtctcccctcaggcctgggggataaggacgtgggcccagccacatgccaactcatgtccaatactgctttgcctggtgtggggaaggattgggtcttgtcccccaacacagcttctgtggctgactgtaatactgtacaactgtttctgaccattaaatgctgttgtactctgaaaaaaaaaaaaaaaaaaaaaaaaaa

SEQ ID NO: 6831 - DNA, 1284 bp, Homo sapiens; identical to SEQ ID NO: 1596

SEQ ID NO: 6832 - DNA, 921 bp, Homo sapiens; identical to SEQ ID NO: 1597

SEQ ID NO: 6833 - DNA, 1400 bp, Homo sapiens
aattgagttgcagcttgcccttgtccagacctatgttctgcttgcgtttttgaaacaggaggtgcacgtaccacccaattatctatggcagcatgcatgtataggccgaactattatcagctctgatgtttcagagagaagacctcagaaaccgaaagaaaaccaccaccctcctattgtgtctgaagtttcacgtgtgtttatgaaatctaatgggaaatggatcacacgatttctttaagggaattaaaaaaaataaaagaattacggcttttacagcaacaatacgattatcttataggaaaaaaaaaaatcattgtaaagtatcaagacaatacgagtaaatgaaaaggctgttaaagtagatgacatcatgtgttagcctgttcctaaatccctagaattgtaatgtgtgggatataaattagtttttattattctcttaaaaatcaaagatgatctctatcactttgccacctgtttgatgtgcagtggaaactggttaagccagttgttcatacttcctttacaaatataaagatagctgtttaggatattttgttacatttttgtaaatttttgaaatgctagtaatgtgttttcaccagcaagtatttgttgcaaacttaatgtcattttccttaagatggttacagctatgtaacctgtattattctggacggacttattaaaatacaaacagacaaaaaataaaacaaaacttgagttctatttaccttgcacattttttgttgttacagtgaaaaaaatggtccaagaaaatgtttgccatttttgcattgtttcgtttttaactggaacatttagaaagaaggaaatgaatgtgcattttattaattccttaggggcacaaggaggacaataatagctgatcttttgaaatttgaaaaacgtctttagatgaccaagcaaaaagactttaaaaaatggtaatgaaaatggaatgcagctactgcagctaataaaaaattttagatagcaattgttacaaccatatgcctttatagctagacattagaattatgatagcatgagtttatacattctattatttttcctccctttctcatgtttttataaataggtaataaaaaatgttttgcctgccaattgaatgatttcgtagctgaagtagaaacatttaggtttctgtagcattaaattgtgaagacaactggagtggtacttactgaagaaactctctgtatgtcctagaataagaagcaatgatgtgctgcttctgatttttcttgcattttaaattctcagccaacctacagccatgatctttagcacagtgatatcaccatgacttcacagacatggtctagaatctgtacccttacccacatatgaagaataaaattgattaaaggtta

SEQ ID NO: 6834 - DNA, 1400 bp, Homo sapiens
cggcggcggctgctctggcggccgccctgctcctgctgcgtcgtgaggacccggggccgggggctggccccagcatggccgaaacagaagccctgtcgaagcttcgggaagacttcaggatgcagaataaatccgtctttattttgggcgccagcggagaaaccggcagagtgctcttaaaggaaatcctggagcagggcctgttttccaaagtcacgctcattggccggaggaagctcaccttcgacgaggaagcttataaaaatgtgaatcaagaagtggtggactttgaaaagttggatgactacgcctctgcctttcaaggtcatgatgttggattctgttgcctgggtaccaccagagggaaagctggggcggagggatttgttcgtgttgaccgagattatgtgctgaagtctgcagagctggcaaaagctggagggtgcaaacatttcaacttgctatcctctaaaggagctgataaatcaagcaattttttatatctacaagttaagggagaagtagaagccaaggttgaagaattaaaatttgatcgttactctgtatttaggcctggagttctgttatgtgataggcaagaatctcgcccaggtgaatggctggttagaaagttctttggctccttaccagactcttgggccagggggcattctgtgcctgtggtgaccgtggttagagcaatgctgaacaatgtggtgagaccaagagacaagcagatggaactgctggagaacaaggccatccatgacctggggaaagcgcatggctctctcaagccatgaccacactggagaaatggtttttattgtcaaccttaacacccatcaccaaatcggtaatttcagggtctaaaaaaagtcagcatgttttaactttgttgttttactatcctcaggcatccattccaatcaagaaatgatggtgctctgcatcagtggttcagagcctggttatacatatagatcactcagggagctttggaaaaataaagatttgtcagccctatctcaaacttgaatcaaaatttctggggtgtgggcacaataatctgtaattttctttgtttatacttcccctgatgccactggttccgatgccactggctggggggcctgctttgaaatgcttgtctgcagagtcacagcagccatgaaaaccttatgaccgtgcaaatgagctctgctctaaaattgttgacattcatgtctctgagttacaaaagtgctaattcactacatgtaattgtgtaagtaaacattgtgcctttactacttctttatgtaatagaagttatatacctaagcttatataatacatggggaggattaaataaaggaataaagatgaatggacaactccaaaaaaaaaaaaaaaaaaaa

SEQ ID NO: 6835 - DNA, 1400 bp, Homo sapiens
gtttcctgagggaacgagaaaccacaatggctccatgctgcccttcaaacgtggcgccttccatcttgcagtgcaggcccaggttcccattgtccccatagtcatgtcctcctaccaagacttctactgcaagaaggagcgtcgcttcacctcgggacaatgtcaggtgcgggtgctgcccccagtgcccacggaagggctgacaccagatgacgtcccagctctggctgacagagtccggcactccatgctcactgttttccgggaaatctccactgatggccggggtggtggtgactatctgaagaagcctgggggcggtgggtgaaccctggctctgagctctcctcccatctgtccccatcttcctccccacacctacccacccagtgggccctgaagcagggccaaaccctcttccttgtctcccctctccccacttattctcctctttggaatcttcaacttctgaagtgaatgtggatacagcgccactcctgccccctcttggccccatccatggactcttgcctcggtgcagtttccactcttgacccccacctcctactgtcttgtctgtgggacagttgcctccccctcatctccagtgactcagcctacacaagggaggggaacattccatccccagtggagtctcttcctatgtggtcttctctacccctctacccccacattggccagtggactcatccattctttggaacaaatccccccccactccaaagtccatggattcaatggactcatccatttgtgaggaggacttctcgccctctggctggaagctgatacctgaagcactcccaggctcatcctgggagctttcctcagcaccttcaccttccctcccagtgtagcctcctgtcagtgggggctggacccttctaattcagaggtctcatgcctgcccttgcccagatgcccagggtcgtgcactctctgggataccagttcagtctccacatttctggttttctgtccccatagtacagttcttcagtggacatgaccccacccagccccctgcagccctgctgaccatctcaccagacacaaggggaagaagcagacatcaggtgctgcactcacttctgccccctggggagttggggaaaggaacgaaccctggctggaggggataggagggcttttaatttatttctttttctgttgaggcttccccctctctgagccagttttcatttcttcctggtggcattagccactccctgcctctcactccagacctgttcccacaactggggaggtaggctgggagcaaaaggagagggtgggacccagttttgcgtggttggtttttattaattatctggataacagcaaaaaaactgaaaataaagagagagagaaaaaaaaaa

SEQ ID NO: 6836 - DNA, 1400 bp, Homo sapiens
tccattaaaacaacaaacgaaacctagtgaagcatctttttaaaaggctgccagcttaatgaatttagatgtactttaagagagaaagactggttatttctcctttgtgtaagtgataaacaacagcaaatatacttgaataaaatgtttcaggtatttttgtttcattttgtttttgagatagggtctttgttgctcaggctggagtacagtggcataatcacagctcactgcaacctcaatcctgggctcaagtgatcctcccgcttcagcctctcaagcagcgggaactacaggtgtgcactaccacacctggctattttttttttttttttttttttcccttgtagagacatggtctcactatgttgctgaggctggtctcaaactcctaggatcaagccatcctcccgctttggcctcctaaagtgctgggattacatgagccaccacatgcagccagatgtttgaatattttaagagcttctttcgaaagtttcttgttcatactcaaatagtagttattttgaagatattcaaacttatattgaagaagtgactttagttcctcttgttttaagcttctttcatgtattcaaatcagcatttttttctaagaaattgctatagaatttgtggaaggagagaggatacacatgtaaaattacatctggtctcttccttcactgcttcatgcctacgtaaggtctttgaaataggattccttacttttagttagaaacccctaaaacgctaatattgattttcctgatagctgtattaaaaatagcaaagcatcggactgaaccaactttggaaataatttatttttataatgggatcatgttaagtagaagtagctttttatgcaaatacatgcatttatgcaatattaatgtaagggctctaaaacaatggagtagagccagaggtataactgaataagaaatttttttaagcaagagaaagacaactgttctgcgggttggagaaaatacaattttttttttttttttttttgagacagtctcgctctgtcccccaggctggagtgcagtggctcgatctctgctcactgcaagctccgcctcctgggttcatgccattctcctgcctcagcctcctgagtagctgggactacaggcgctcgccatgtatttagcagagacggggtttcaccgtgttagccaggatggtctcaatctcctgacctcatattccacccgcctcggcctcccaaagtgctgggattacaggcgttagccactgcgcccggcccgagaaaatacagttttaaaaagagaaagctttataacctcaccaatgaatacaaatgtttaaataaaatattgattaaaaaaacattaaaagcgaaaaaaaaaaaaaaaaaaaaaaaaaaa

SEQ ID NO: 6837 - DNA, 991 bp, Homo sapiens; identical to SEQ ID NO: 1602

SEQ ID NO: 6838 - DNA, 1400 bp, Homo sapiens
tgaatattgcgggcacaacattatcctcaaaacttcttactcatcacaaagaccactttacaaagttagctgtagaagcagttctcagactgaaaggctctggcaacctggaggcaattcatattatcaagaagctaggaggaagtttggcagattcctatttagatgaaggcttcctgttggataaaaaaattggagtaaatcaaccaaaacgaattgaaaatgctaaaattcttattgcaaatactggtatggatacagacaaaataaagatatttggttcccgggtaagagttgactctacagcaaaggttgcagaaatagaacatgcggaaaaggaaaaaatgaaggagaaagttgaacgtattcttaagcatggaataaattgctttattaacaggcaattaatttataattatcctgaacagctctttggtgctgctggtgtcatggctattgagcatgcagattttgcaggtgtggaacgcctagctcttgtcacaggtggtgaaattgcctctacctttgatcacccagaactggtgaagcttggaagttgcaaacttatcgaggaagtcatgattggagaagacaaactcattcacttttctggggttgcccttggtgaggcttgtaccattgttttgcgtggtgccactcaacaaattttagatgaagcagaaagatcattgcatgatgctctttgtgttcttgcgcaaactgtaaaggactctagaacagtttatggaggaggctgttctgagatgttgatggctcatgctgtgacacagcttgccaatagaacaccaggcaaagaagctgttgcaatggagtcttatgctaaagcactgagaatgttgccaaccatcatagctgacaatgcaggctatgacagtgcagacctggtggcacagctcagggctgctcacagtgaaggcaataccactgctggattggatatgagggaaggcaccattggagatatggctatcctgggtataacagaaagttttcaagtgaagcgacaggttcttctgagtgcagctgaagcagcagaggtgattctgcgtgtggacaacatcatcaaagcggcacccaggaaacgtgtccctgatcaccacccctgttaagcattcccacgtgctgtcgatctttggaccagtttctagcaaagttgtgtttgaaagatactctattaaagaagactgtggaatctgtttatcggtgcccattatatccttaagtttggatatttagctgaccttcgctttaacataggtctaatttatttgccgtgtcattttccatacaaatcagttgatttaaaggagttcatttcgcatactgggcattaaaataaaaatttgaacaatgaaaggaaaaaaaggagaaaaaaaaaa

SEQ ID NO: 6839 - DNA, 929 bp, Homo sapiens; identical to SEQ ID NO: 1604

SEQ ID NO: 6840 - DNA, 905 bp, Homo sapiens; identical to SEQ ID NO: 1605

SEQ ID NO: 6841 - DNA, 600 bp, Homo sapiens
ggtaccggttccagagcaatcacatggatatggtgagaatagaatcaccagaggaaatttctttacttcccaaaacatcctggaatatccctcagcctggtgagggtgatgttcgggaggaggccttgtccacagggggacttgatctcatcttcatgccaggccttgggtttgacaaacatggcaaccgactggggaggggcaagggctactatgatgcctatctgaagcgctgtttgcagcatcaggaagtgaagccctacaccctggcgttggctttcaaagaacagatttgcctccaggtcccagtgaatgaaaacgacatgaaggtagatgaagtcctttacgaagactcgtcaacagcttaaatctggattactacagccaaataatcagtgttttatatgagagtaaagcaaagtatgtgtatttttcccttgtcaaaaattagttgaaattgttcattaatgtgaatacagactgcattttaaaattgtaattatgaaataccttatataaaaccatctttaaaaaccaatagaagtgtgaatagtagaatattaattaaaatggaggctatcagcctgtgattttcagctt

SEQ ID NO: 6842 - DNA, 988 bp, Homo sapiens; identical to SEQ ID NO: 1607

SEQ ID NO: 6843 - DNA, 1400 bp, Homo sapiens
aaatcagttgccggactaaccatgacctatgatggaaataatccagtgacatctcatagagatgtaccactttcttattgcaactcagactgcaattgtgatgaaagtcaatgggaaccagtctgtggaaacaatggaataacttacatctcaccctgtctagcaggttgcaaatcttcaagtggcaataaaaagcctatagtgttttacaactgcagttgtttggaagtaactggtctccagaacagaaattactcagcccatttgggtgaatgcccaagagatgatgcttgtacaaggaaattttacttttttgttgcaatacaagtcttgaatttatttttctctgcacttggaggcacctcacatgtcatgctgattgttaaaattgttcaacctgaattgaaatcacttgcactgggtttccactcaatggttatacgagcactaggaggaattctagctccaatatattttggggctctgattgatacaacgtgtataaagtggtccaccaacaactgtggcacacgtgggtcatgtaggacatataattccacatcattttcaagggtctacttgggcttgtcttcaatgttaagagtctcatcacttgttttatatattatattaatttatgccatgaagaaaaaatatcaagagaaagatatcaatgcatcagaaaatggaagtgtcatggatgaagcaaacttagaatccttaaataaaaataaacattttgtcccttctgctggggcagatagtgaaacacattgttaaggggagaaaaaaagccacttctgcttctgtgtttccaaacagcattgcattgattcagtaagatgttatttttgaggagttcctggtcctttcactaagaatttccacatcttttatggtggaagtataaataagcctatgaacttataataaaacaaactgtaggtagaaaaaatgagagtactcattgttacattatagctacatatttgtggttaaggttagactatatgatccatacaaattaaagtgagagacatggttactgtgtaataaaagaaaaaatacttgttcaggtaattctaattcttaataaaacaaatgagtatcatacaggtagaggttaaaaaggaggagctagattcatatcctaagtaaagagaaatgcctagtgtctattttattaaacaaacaaacacagagtttgaactataatactaaggcctgaagtctagcttggatatatgctacaataatatctgttactcacataaaattatatatttcacagactttatcaatgtataattaacaattatcttgtttaagtaaatttagaatacatttaagtattgtggaagaaataaagacattccaatatttgcaaaaaaaaaaaaaaa

SEQ ID NO: 6844 - DNA, 1400 bp, Homo sapiens
aaattcaaggaaaagttcttcatttaaatgatatttgtactattgaccatcctgaagacagtgaatatgaagctgaaatgtcacttcaaggagaagtaaatattaaatccaaccatatttcacaagagggtgttatgcataaagaatattgtgtcaaccagaaagatttgaatggccaagcaaaaatgatcgaaagtgtaactgacaatcaaaaatccacagaggaagtagatatgaaaaatatcaacatggataatgatctggaggttttaacatcttctcccactaggaatttaaatggtgcctacctaacggaagggagcaatggagaagtggacatttccaatggtttcaaaaacctaaatttgaatgctgctcttcatcctgatgaaataaatatagagattctgaatgatagtcatactcctggaacaaaggtgtatgaggttgtaaatgaagatccagaaactgctttctgtactcttgcaaacagggaagttttcaatactgatgagtgttcaatccaacattgtttatatcagttcacccgtaatgagaaacttcgagatgcgaataaactgctttgtgaagtatgcacacggagacagtgtaatggaccaaaggcaaatataaaaggtgaaaggaagcatgtttacaccaatgccaaaaagcagatgctaatttctcttgctcctcctgttcttactcttcatttaaagagatttcagcaggctggttttaacctacgcaaagttaacaaacacataaagtttccggaaatcttagatttggctcctttttgcacccttaaatgtaagaatgttgcagaagaaaatacaagggtactctattccttatatggagttgttgaacacagtggtactatgaggtcggggcattacactgcctatgccaaggcaagaaccgcaaatagtcatctctctaatcttgttcttcacggtgatattccacaagattttgaaatggaatcaaaagggcagtggtttcacatcagcgacacacatgtgcaagctgtgcctacaactaaagtactaaactcacaagcgtacctcctattttatgagagaatactgtaataatatcaaaagcactttttctggaaacacatttatggcttttataatggctgaaataacgataaaaaaagactaattaaaatcatgttcacttaacattaaatacatgccagaagaaatcatgtttatttaaatattgaagggaaaaatacctaaaaatgtacaaaggttttatattgtcatagtggtttttattcctgctttgtttctggaaaggaaatcctgaattacttaagtactttgtgtttaatatatctgggtgatggatcacaacacatcaataaactgacttaccctaaaatc

SEQ ID NO: 6845 - DNA, 600 bp, Homo sapiens
gcaggcagaggagcaggccaggcaagaggagcaggtggtcaggcagcaagagctggacaacctgctgcatgagaagcggtacctgcgggcgctgggcctggccatctccctggatcggccccacaccgtgctgactgtcatccaggccatccggagggaccctgaggcctgcgagaagctggaagccaccatgctccgactgcggcgcgaccagaaagaggccctgctgcgcttctgcgtcacgtggaacaccaactcgcggcactgccacgaggcccaggccgtgctgggtgtgctcttgaggcgagaggcccccgaggagctgctggcctacgaaggcgtgcgggcagcgcttgaggccctgctgccctacactgagcggcactttcagcggctcagcaggaccctccaggccgccgctttcttggacttcctgtggcacaacatgaagctccctgtgccggccgccgcccccaccccctgggaaacccataaaggcgcactgccctagccggtccggcctctctccagtccatcctgaacccctggaaaacccataaaggccgctctcctggcaaaaaaaaaaaaaaaaaaaaaaaa

SEQ ID NO: 6846 - DNA, 1400 bp, Homo sapiens
gcccgcagcgccgccagctacatgctcttcgaccccaaggacagcgtcatgcagcagaacctggtgtattaccggttccaccgggctcgctggggcctggaagaggaggacttccagccccgggaggaggccatgctctaccacaaccagaccgccgagctgcgggagctgctggagttcacccacatgtacctgcagtcagatgatgagatggagctggaggagacagaaccgcccctggagcctgaggatgccctatctgacgccgagtttgagggggagggtgactacgaggagggcatgtatgctgactggtggcaggagccggatgccaagggtgacgaggccgaggctgagccagagcctgaactcgcatgagaaggggacaccccacaccgctcaagcttgggaagcctggtgccgatggccccaccctcaccagcctgggcagcagcaagaactatttattaaaaacttaagatgggccaggtgcggtggctcacacctgtaatcccagcattttgggaggccaaggtgggtggatcacttgaggccaggagttcaagaccagcctggccaacatgatgagacctccgtctctactaaaatacataaattagccgggtgtggtggcaggcgcctgaaatcccagctactcaagaggctgaggcaggagaatcgcttgaacctgggaggcaaaggttgcggtgaactgagattgcgccaccgcactccagcctgggcgacagagcgagactccatctttaaaaaaaaacaagacgggccggcacggtggctcacgcctgtaatcccagcactgagaggccgatcacttgaggtcaggagttcaagacctgcctggccaacatggtgaaaccccatctctactaaaaaatacaaaaattagccaggcatggtggcacacacctgtaatcgtagctgaggcaggagaatcgcctgaacccaggaggcggagcttgcagtgagccgagatcgtgccactgcactccagcctgggcgacagagtgagactccatctcaaaaaaaaaaaaaaaaaacttaagatggacacagctgactggacccccatcctgcctcacccatgggtgctgcaccccagacccatcctgccacttctatgtctctggaccacaggatggtggtggcattgcaggttggcaagtgggctgatggggtccgccctcctcactgctgagctcctcacctggacagtctcctggacaaggagtttccagctgctggctggagtctcaggccaaattgcagagggtcctccagggtcctgaagagcactggactaagagtctagtggttccagggccctgaccagtaggtgctcaataaatgtttgttgttgaatgaaaaaaaaaaaaaaaaaa

SEQ ID NO: 6847 - DNA, 600 bp, Homo sapiens
agcgaaagcagatgctgaatattatgctgcacacaaatatgccacctcaaacaagcacaagttgaccccggaatatctggagctcaaaaagtaccaggccattgcttctaacagtaagatctattttggcagcaacatccctaacatgttcgtggactcctcatgtgctttgaaatattcagatattaggactggaagagaaagctcactcccctctaaggaggctcttgaaccctctggagagaacgtcatccaaaacaaagagagcacaggttgatgcaagaggtggaaatgttctccatatcaagatgtggcccaaggggttaagtgggaacaatcattatacggactcttcagatttacagagaacttacacttcatctgttccacctctcctgcgatagtcctgggtgctccactgattggaggatagagccagctgtctgacacacaaatggtcttttcagccacagtcttatcaagtatcctatatgtattcctttctaaactgctactcatgaatgaggaaagtctgatgctaagatactgcctgcactggaatgttaaacactaaatatataacaagctgtgttttcgtaa

SEQ ID NO: 6848 - DNA, 1400 bp, Homo sapiens
tggttccagagcagccttcccggaaagaccattccaagcccatctccaacccttctgataacaaggagctccccaaggctgacacaaaccagcttgctgacaaagggaagctttctcctcatgctttcaaaaccgaatctggggaggaaactgacctcatttctcccccgcaggaggaagttaagtcttcagagcctactgaggatgtggggcccaaagaggctgaagatgatgatacaggacccgaggagggctcaccgcccaaagaagagaaagaaaagatgtccggttctgcctccagtgagaaccgtgaagggacactttcggattccacgggtagcgagaaggatgacctttatccgaacggttctggaaatggcagcgcggagagcagccacttctttgcatatctggtgactgcagccattcttgtggctgtcctctatatcgctcatcacaacaagcggaagatcattgcttttgtcctggaaggaaaaagatctaaagtcacccggcggccaaaggccagtgactaccaacgtttggaccagaagtcctaacagaatggtatattcctctggaaaaagatgaacgtcaccaatggattgtgctgctctcgtttcagctttgatttttttgtccttgagaaccttgtcctccctgctgatttgtttctaaatcaaaagaaatgaagaaaaaagtactgtgacctgagagacaccctcctctagaatttagtggcgggtctgggctggcagaggtagggggctgctttgggctttgcacctgcactttggtgacattgttcttctgtgttccctttatttatgctggtggcttccatccgttctcctctggggtgagtggaggggtatatggaaacacggctatgaccaaagggagatcccagcctgggcagcctgcgctgctgaccaccctccctggggcccgggctctgtaggaaagttggtccttgactgtggcattgcactctgcactgtttctctctgcagacctaggggaaaactgcaggtggaagtgcttttctactaaggcctcttactttgggggggatgtgccctacagaagacatagaagatggggaaatgccaatgggcaaagagctactttgaatacataattctcttcaaagacttcagcagcaaacctaaacagcaggttaaaaaaaaagatgcttttttgggtgcaagtctaacctgtctagcatgagatcttcttgattttctgattattttatgtagcttgagacaaagtgaatcaacttccacttagttgtaccgagcataaaacagaacttgggcttcctggcagtgaggccactgtcccatcacagatttttaaaataaatatgatttgaagtagtgtgatctttcacacaa

SEQ ID NO: 6849 - DNA, 600 bp, Homo sapiens
atcaacctccataaggcattagcatccctagccacagccactctggagtccgtcgtacaggagagatttgggtctcgctgtgctagaatattccgtctagttttgcagaagaaacacatagagcagaagcaagtggaagactttgcaatgattcctgcaaaggaggcaaaggatatgctatataagatgctctcagaaaatttcatgtcactccaggaaattcccaaaacaccagaccatgccccatccaggaccttctatttatatactgtgaacatcctgtcagctgcccgaatgttgttgcacaggtgctacaagagcatagccaacttgatagaaaggaggcaatttgaaaccaaagagaataagcgtctactagaaaaatctcagagggtagaagccatcattgcatctatgcaggctactggtgcagaggaagcacagttacaagaaatagaggagatgatcacagctcctgaacgtcagcagctagagaccctgaaacgtaatgtcaacaagttggatgccagtgagatccaggtggaggaaaccatcttcctgctggagtcttacattgagtgcaccatgaagagacagtga

SEQ ID NO: 6850 - DNA, 600 bp, Homo sapiens
aggccccatcaatttcaccatgttcctcaccatgtttggtgagaagttaaatggcacagatcctgaagatgtcatcagaaatgcctttgcttgctttgatgaagaagcaactggcaccatacaggaagattacttgagagagctgctgacaaccatgggggatcggtttacagatgaggaagtggatgagctgtacagagaagcacctattgataaaaaggggaatttcaattacatcgagttcacacgcatcctgaaacatggagccaaagacaaagatgactgaaataacttcaaattccagccaacgtccttgttgcactttgggtattctgagattttctcttgccattcccttaggctttagcagctttgcatttcctgttgtatttattctcagccattttgggcatatgtatctttataatcagactggaaacgggactttctattaatatcattttcagaataaaaaataggataatttaacctaccagcccttctcccccaataactgtgggtctatacagagtcaatatattttttcagagaaagttagttcggctcgattttttctgaatcataattaaactttattgc

SEQ ID NO: 6851 - DNA, 600 bp, Homo sapiens
tgttctcctactgcaaatattttcatatgggaggatggttttctcttcatgtaagtccttggaattgattctaaggtgatgttcttagcactttaattcctgtcaaattttttgttctccccttctgccatcttaaatgtaagctgaaactggtctactgtgtctctagggttaagccaaaagacaaaaaaaattttactacttttgagattgccccaatgtacagaattatataattctaacgcttaaatcatgtgaaagggttgctgctgtcagccttgcccactgtgacttcaaacccaaggaggaactcttgatcaagatgcccaaccctgtgatcagaacctccaaatactgccatgagaaactagagggcaggtgttcataaaagccctttgaacccccttcctgccctgtgttaggagatagggatattggcccctcactgcagctgccagcacttggtcagtcactctcagccatagcactttgttcactgtcctgtgtcagagcactgagctccacccttttctgagagttattacagccagaaagtgtgggctgaagatggttggtttcatgtgggggtattatgtaccc

SEQ ID NO: 6852 - DNA, 600 bp, Homo sapiens
gccaacttcagaaagcacagtccacgcgcaagaacaaagtccaagcgccacagcctcaaacgtggccaccagtcactccacggagaaagtggatggagacacacagacaacagttgagaaagatggtttgtcaacagtgaccctggttggaatcatagttggggtcttactagccatcggcttcattggtggaatcatcgttgtggttatgcgaaaaatgtcgggaaggtactcgccctaaagagctgaagggttacgccctgctgccaacgtgcttaaaaaaagaccgtttctgactctgtgccctgtccctgagctcgtgggagaagatgacccgtggaacacttgcctggcccactcagaatccacggtgacctctccgcttgccaaaataaccgaaggaaagaccgttcaccagacttggctcctctaaacatttgctgttcaaacatgtttttgaatatacattctataaaagattatttgaaagacaaaattcatagaaaatggagcaaaactgtataaactgatttgtaactaacactggaccattggatcgatattatatgctgtaaccatgaaaaaaaaaaaaaaaaaaaa

SEQ ID NO: 6853 - DNA, 1400 bp, Homo sapiens
acttctggtgaatgaattgaaatcaaaagaatctgacatcatgacaacaaatggtgtaattcatgttgtagataaactcctctatccagcagacacacctgttggaaatgatcaactgctggaaatacttaataaattaatcaaatacatccaaattaagtttgttcgtggtagcaccttcaaagaaatccccgtgactgtctatacaactaaaattataaccaaagttgtggaaccaaaaattaaagtgattgaaggcagtcttcagcctattatcaaaactgaaggacccacactaacaaaagtcaaaattgaaggtgaacctgaattcagactgattaaagaaggtgaaacaataactgaagtgatccatggagagccaattattaaaaaatacaccaaaatcattgatggagtgcctgtggaaataactgaaaaagagacacgagaagaacgaatcattacaggtcctgaaataaaatacactaggatttctactggaggtggagaaacagaagaaactctgaagaaattgttacaagaagaggtcaccaaggtcaccaaattcattgaaggtggtgatggtcatttatttgaagatgaagaaattaaaagactgcttcagggagacacacccgtgaggaagttgcaagccaacaaaaaagttcaaggttctagaagacgattaagggaaggtcgttctcagtgaaaatccaaaaaccagaaaaaaatgtttatacaaccctaagtcaataacctgaccttagaaaattgtgagagccaagttgacttcaggaactgaaacatcagcacaaagaagcaatcatcaaataattctgaacacaaatttaatatttttttttctgaatgagaaacatgagggaaattgtggagttagcctcctgtggtaaaggaattgaagaaaatataacaccttacaccctttttcatcttgacattaaaagttctggctaactttggaatccattagagaaaaatccttgtcaccagattcattacaattcaaatcgaagagttgtgaactgttatcccattgaaaagaccgagccttgtatgtatgttatggatacataaaatgcacgcaagccattatctctccatgggaagctaagttataaaaataggtgcttggtgtacaaaactttttatatcaaaaggctttgcacatttctatatgagtgggtttactggtaaattatgttattttttacaactaattttgtactctcagaatgtttgtcatatgcttcttgcaatgcatattttttaatctcaaacgtttcaataaaaccatttttcagatataaagagaattacttcaaattgagtaattcagaaaaactcaagatttaagttaaaaagtggtttggacttgggaa

SEQ ID NO: 6854 - DNA, 600 bp, Homo sapiens
ttcacttcaacctacagacccttttgtataatgtacagcaaatgtcattaaatattgaatgctctattgggggaagacaaatgaagagaatgcattttgagcatttcaaatcagtagtttgggcagtgccttttggggtccaatctttttggattggattctatttcatcttttgatgtgacttttcacctagtttacaaaaaaaaggttggtggtcaacaaaaaaagcaagtcatagcagttcagtgcctttgttggtagtttttaactttttttgtgattctttttggaaaatcatagcttacagatggtataactgtattatataatggaattttctttaggtgtgggaaaaacttgatctgaaagaaaattatcagcttcaattggcgattgattcagtgcccacaatgtaaacagggttggtagttgttactcattttgaatataccttttccttattgtattctgtaatataggatcctggaaatgagacctggtggaatattattttcaactgtagtctttctatactgtggactaatgaaatggtgttgttgataaatctaaaataaccaataatccaaaaaagttcatttt

SEQ ID NO: 6855 - DNA, 600 bp, Homo sapiens
tccatatgctcaatgctaccatgtgcgccactacccgtaccatctgcgccatcctggagaactaccagacagagaagggcatcactgtgcctgagaaattgaaggagttcatgccgccaggactgcaagaactgatcccctttgtgaagcctgcgcccattgagcaggagccatcaaagaagcagaagaagcaacatgagggcagcaaaaagaaagcagcagcaagagacgtcaccctagaaaacaggctgcagaacatggaggtcaccgatgcttgaacattcctgcctccctatttgccaggctttcatttctgtctgctgagatctcagagcctgcccaacagcagggaagccaagcacccattcatccccctgcccccatctgactgcgtagctgagaggggaacagtgccatgtaccacacagatgttcctgtctcctcgcatgggcatagggacccatcattgatgactgatgaaaccatgtaataaagcatctctggggagggcttaggactcttcctcagtcttcttccccgggcttgaaccccgaaaaaaaaaaaaaaaaaaaaaaaaaaaaaaaaaaaaaaaaaaaaaaa

SEQ ID NO: 6856 - DNA, 600 bp, Homo sapiens
agaggggaagggccagtctgggctgccgggttctagtctcctttgcactgagggccacactattaccatgagaagagggcctgtgggagcctgcaaactcactgctcaagaagacatggagactcctgccctgttgtgtatagatgcaagatatttatatatatttttggttgtcaatattaaatacagacactaagttatagtatatctggacaagccaacttgtaaatacaccacctcactcctgttacttacctaaacagatataaatggctggtttttagaaacatggttttgaaatgcttgtggattgagggtaggaggtttggatgggagtgagacagaagtaagtggggttgcaaccactgcaacggcttagacttcgactcaggatccagtcccttacacgtacctctcatcagtgtcctcttgctcaaaaatctgtttgatccctgttacccagagaatatatacattctttatcttgacattcaaggcatttctatcacatatttgatagttggtgttcaaaaaaacactagttttgtgccagccgtgatgctcaggcttgaaatcgcattattttgaatgtgaagggaa

SEQ ID NO: 6857 - DNA, 713 bp, Homo sapiens; identical to SEQ ID NO: 1622

SEQ ID NO: 6858 - DNA, 600 bp, Homo sapiens
agatcacagccccacccttgtccctcagcaacatcccatctaagcattccacactgcagggaggagtggtacttaagctcccctgccttaacctgggaccaacctgacctaacctaggagggctctgagccaaccttgctcttggggaaggggacagattatgaaatttcatggatgaattttccatacctatatctggagtgagaggccccccaccccttgggcagagtcctgccttcttccttgaggggcagtttgggaaggtgatgggtattagtgggggactgagttcaggttaccagaaccagtacctcagtattctttttcaacatgtagggcaagaggatgaaggaaggggctatcctggacctccccagcccaggaaaaactggaagccttcccccagcaaggcagaagcttggaggagggttgtaaaagcatattgtaccccctcatttgtttatctgatttttttattgctccgcatactgagaatctaggccaccccaacctctgttccccacccagttcttcatttggaggaatcaccccatttcagagttatcaagagacactcccccctccattcccacccctcat

SEQ ID NO: 6859 - DNA, 600 bp, Homo sapiens
acagatgtgacgcggacaatgcattttgggacccctacagcctacgagaaggaatgcttcacatatgtcctcaagggccacatagctgtgagtgcagccgttttcccgactggaaccaaaggtcaccttcttgactcctttgcccgttcagctttatgggattcaggcctagattacttgcacgggactggacatggtgttgggtcttttttgaatgtccatgagggtccttgcggcatcagttacaaaacattctctgatgagcccttggaggcaggcatgattgtcactgatgagcccgggtactatgaagatggggcttttggaattcgcattgagaatgttgtccttgtggttcctgtgaagaccaagtataattttaataaccggggaagcctgacctttgaacctctaacattggttccaattcagaccaaaatgatagatgtggattctcttacagacaaagagtgcgactggctcaacaattaccacctgacctgcagggatgtgattgggaaggaattgcagaaacagggccgccaggaagctctcgagtggctcatcagagagacgcaacccatctccaaacagcattaa

SEQ ID NO: 6860 - DNA, 1142 bp, Homo sapiens; identical to SEQ ID NO: 1625

SEQ ID NO: 6861 - DNA, 538 bp, Homo sapiens; identical to SEQ ID NO: 1626

SEQ ID NO: 6862 - DNA, 1400 bp, Homo sapiens
acacttgggaacttcagggcggtttcaacggtgtttcccgctcagcaattctgcaggagaattctactctgtctgcaagtaaacaagtgttgcataaatggagcatctactgttgtcacggctatattcggaggcattctccaaaatgaggttaactgcctcatatgtgggacagaatctagaaagtttgatccattcctagacctttcattagatattccaagtcagttcagaagtaagcgctctaagaatcaagaaaatggaccagtttgttcgttacgagattgtcttcgcagttttaccgacttagaagaacttgatgagacagagttatatatgtgccataaatgcaaaaagaaacaaaagtccacaaaaaagttttggattcaaaaactacccaaggtgctatgcttacatttgaaaagatttcattggacagcatatttaagaaataaagttgatacatacgtagaatttccactgagaggcctagacatgaaatggtacttactagagcctgagaacagtggcccggagagctgcctgtatgacctcgccgctgtggtggtgcaccatggttccggggttggttctggacattacacagcatacgcaactcacgaaggccgctggttccacttcaatgacagtactgtaacactgactgacgaggagactgtggtgaaggcgaaggcctacatccttttctacgtggaacaccaggccaaagctggatcggataaactttaatacctcctccaaatcatcattcaccaaccataccagagaaacatttccagttttccacaaatacttgatacaagatttaatttcattatgcacttttcaatttcctattttggatttagttttgtcaatggtagtgacttactgaacatggggcaccaactaattttgttgttgttctaccagaaaacctcagcagatgttttgatttgctgctttagttgtaataattcaatttttataggtagttgtaagaacttagtcttatttgacttttttattttatgttaatgttttcagttctcactttgaggcacatttacatcaatgcttttgttcctctcacatgctgaaagcaagatgtgttccttattgtgaagagcgacacaactgcctgctgcctttccacagctataatggacatcaggttgactctaaatcaaggatcatgtgtgcacaatacttgtggcccacaaaatttcacaatgactgctgaggaatcattctttttgcctgtaaaatataacaaagggcatcattaagtagaccaggtaattactgcttgtctctcaaggctgctgtctttatcagcactaactaaataaatttgttggttcagttgtacttgtcctgcaaataaaaaaaaaaaaaaa

SEQ ID NO: 6863 - DNA, 1400 bp, Homo sapiens
atatcttctcagatgaagaggttcgacagggactcaaagcctattccagttggcctacctatcctcagctctatgtttctggagagctcataggaggacttgatataattaaggagctagaagcatctgaagaactagatacaatttgtcccaaagctcccaaattagaggaaaggctcaaagtgctgacaaataaagcttctgtgatgctctttatgaaaggaaacaaacaggaagcaaaatgtggattcagcaaacaaattctggaaatactaaatagtactggtgttgaatatgaaacattcgatatattggaggatgaagaagttcggcaaggattaaaagcttactcaaattggccaacataccctcagctgtatgtgaaaggggagctggtgggaggattggatattgtgaaggaactgaaagaaaatggtgaattgctgcctatactgagaggagaaaattaataaatcttaaacttggtgcccaactattacggggtctggctctgtcacccaggctggagtgcagtggcacgattatggctcattgcagcctcgacttctcggggccaagcgatcctcctgcctcagccttctgagtagctgggaccacaggcgtgcaccaccatgcccacctaattttttatttcttgtagagatgaggtctcctgcctcagcctcccaaagtgctggaatttacaggagtgtcggctgtgccccttgtgatggatgaggaaaggtatccacctttctgaatcagacacaagctgcagtagcttcctgatgcctcattcaccaggatgggtaactttaaagacaagttttataactggcatcccatctggtttcagagtcttgggggcttttttcatacagctttgtctgatatttagagacattcagattcagaagccatgagttcagttagctcatgggccgggcacgtgcactgactcactggctgcagcagaacacattgagggagtcttggtgcacttaggtcactgtaaggttctagggctgggagctgggatttgaaccaggatctgtcagcgcagccccagtgctgtgcttgaagcctcgtgccacactggctttgaggtagcacgctgcaagttagtgagtggagttgcccaagtctggggcttctgaaatgacctggtatttttatgttcctgttagaaatggtgtggctttcacaaattaagtgccaggctgggcacaatggctcgtgcttgtaatcccagcactttgggaggcggaggcaggcgggttgcttgagctccggagcttgagaccagcctgagcaacatggcgaaacctcatatctacaaaaaataaaaaattaactggtcaaaaaaaaaaaaaaaaaaaaaaaaaaaaaaaaaaaaaaaa

SEQ ID NO: 6864 - DNA, 1400 bp, Homo sapiens
cagagggagaggaagaggaggcccagccagctgccacagatgcccccaacggagacctcacgcccgagatgatcctcagcatgatggaccggtgatggcggagccttgtgcgtcgccaggacttctctgggctgtgtttaaacggcccgcatcttaatttttctcccttctttctttttttggctttgggaaaagcatcattttaccaaacataccgagaacgaaaacttcaaggatgatgttagaaaaaaatgtgatttaactagaacttgctgtctgatgttagcaaatcatggaatgttctgagtccctgagggtttactgtgaagtgctgaggacagtgttgacaactaactcgttttcctagatggaaacggagacattgacccctccctccatgtggtaaaccactccagaatggccaccaggcttcccagagttctatggtcttcttcccaagagagtttttaattgtaaatgcatacttgggaaggacttagagttttaaactgttttttgcttttgcttttccctgactccctttgcttggagtcagctgcacaccagtagtatggcatgctacgatcaggttctgtcctgaaagctttgcctctttcttggcaaagtttctggtatggtcaagcttgtaaataactttttttacattttaatcttttccattaattaagaggttgaaaagaagtgcagtgtaagaaaacccagcattttaattacttgcaaattaagttaccacagactctgtagtgtgtaaatgttgacaaggaattggatcacaatcatgtagcagaatggcacccagaccactgcccaccagtgacggacatgcacgtggcagatcatgatttccagcccacggagccagcatttgaaccttgtataattaactttcagttatgatttcccatcgacattttctttgccctgtttgtagctgattgttgtgttttataaatcttctgttaaggcagaagggtgattatgagtggttcacagcagcccttataagctgggccagaaaatttcactaggtcagtaatttaaaccttggatcttcaaaaaataaaataatgtgaagcaaaaccaactaaaaagtgattcttgcacatgaactgtcacatgtttaaaaatgtgttttttagagagcctcagtcttactgatttcaaacacttttttcttctgtgtattgcttttaagagagccatcagttagctatcagactctaggttgatgcattttgtacttagctgtactgtgtgatatttttcattattttaggacgccaacatgagacctgtaataaaatatgtaatggggttgaaagctggggaggaggatctactgctgtacagctaataaatcataacggattaacaagtga

SEQ ID NO: 6865 - DNA, 1400 bp, Homo sapiens
ctacagtaacaggttatggaatggtctcttttatcctatcacaaaaaaagacatagatatttaggctgattaattatctctaccagtttttgtttctcaagctcagtgcatagtggtaaatttcagtgttaacattggagacttgcttttctttttctttttttataccccacaattcttttttattacacttcgaattttagggtacacgagcacaacgtgcaggttagttacatatgtatacatgtgccatgttggtgtgctgaacccagtaactcgtcatttgatttattaaaagccaagataatttacatgtttaaagtatttactattacccccttctaatgtttgcataattctgagaactgataaaagacagcaataaaagaccagtgtcatccatttaggtagcaagacatattgaatgcaaagttctttagatatcaatattaacacttgacattattggaccccccattctggatgtatatcaagatcataattttatagaagagtctctatagaactgtcctcatagctgggtttgttcaggatatatgagttggctgattgagactgcaacaactacatctatatttatgggcaatattttgttttacttatgtggcaaagaactggatattaaactttgcaaaagagaatttagatgagagatgcaattttttaaaaagaaaattaatttgcatccctcgtttaattaaatttatttttcagttttcttgcgttcatccataccaacaaagtcataaagagcatattttagagcacagtaagactttgcatggagtaaaacattttgtaattttcctcaaaagatgtttaatatctggtttcttctcattggtaattaaaattttagaaatgatttttagctctaggccactttacgcaactcaatttctgaagcaattagtggtaaaaagtatttttccccactaaaaaactttaaaacacaaatcttcatatatacttaatttaattagtcaggcatccattttgccttttaaacaactaggattccctactaacctccaccagcaacctggactgcctcagcattccaaatagatactacctgcaattttatacatgtatttttgtatcttttctgtgtgtaaacatagttgaaattcaaaaagttgtagcaatttctatactattcatctcctgtccttcagtttgtataaacctaaggagagtgtgaaatccagcaactgaattgtggtcacgattgtatgaaagttcaagaacatatgtcagttttgttacagttgtagctacatactcaatgtatcaacttttagcctgctcaacttaggctcagtgaaatatatatattatacttattttaaataattcttaatacaaataaaatggta

SEQ ID NO: 6866 - DNA, 1400 bp, Homo sapiens
cccaaggacaacatggtgtcctattaccatttccaaagaatgaataaagctcttcctgctccaggaacatgggaagagtattttgagacttttctggctgggaaagtgtgctggggctcctggcatgaacatgtgaaaggatggtgggaagccaaagacaaacaccgtattctctatctcttctatgaggacatgaagaagaacccaaagcatgaaattcagaagctggcagaatttattgggaagaaattagatgacaaagttctagataaaattgtccattacacttcgtttgatgtcatgaaacagaatccaatggcaaactattcatcgattcctgctgaaatcatggaccactccatttctccattcatgagaaaaggggcagtgggagactggaagaaacacttcaccgtggctcagaatgagagatttgatgaagattacaagaagaaaatgactgataccagactaactttccacttccagttctagtaaggaagaaaaactgaaaatgttttagtttattacccagtatatttgggtaataatgaaagtttaattctcataacaaatgatatcagattccagttatcagaatagtttactgtgtttgctcttattcactctactaaaaaattattttaaaaggctggaggcaaggtggtgacaggcagcagggtggcgacatggagagagggaagctcaataaatcactaggtacaatcctggtatcattgccaattatcatcatatttacattttctacaatcatgtgcttattaacatattggaaatgcttcagtcctcacatgataatacactaacattttcagattaagttttggttcaagttaatttttttttttttttttttgagacggagtctcgctctgtcgcccaggctggagtgcagtggcacgatctcggctcactgcaagctctgcttcctgggttcacgccattcccctgcctcagcctcccgagtagctgggactatgggcgcccaccaccactcccggctaatttttttttttgtattcttagtagagacgaggtttcaccgtgttagccaggatgttctcgatctcctgaccccatgatccacccgcctcagcctagacctgctgatccagggtgtgtgtgagttgagggtgggtggaggggtttgcagtgtgggaatgtggccctgcagttgacctgagctgcttcacatggttgtccattctggggcttaaagaactgggaccagaccaagtagaggccttggtgctggttggggtggggcctgcagagtcttagttactgatttcattttcaataaatgtaggtttgttacatgagtttcccaattaaaaaaaaaatgacttcttgtccagtgcaaaaaaaaaaaaaaaaaa

SEQ ID NO: 6867 - DNA, 1400 bp, Homo sapiens
acgtgctaagcgtaccctctcttccagcacccaggccagtattgagatcgattctctctatgaaggaatcgacttctatacctccattacccgtgcccgatttgaagaactgaatgctgacctgttccgtggcaccctggacccagtagagaaagcccttcgagatgccaaactagacaagtcacagattcatgatattgtcctggttggtggttctactcgtatccccaagattcagaagcttctccaagacttcttcaatggaaaagaactgaataagagcatcaaccctgatgaagctgttgcttatggtgcagctgtccaggcagccatcttgtctggagacaagtctgagaatgttcaagatttgctgctcttggatgtcactcctctttcccttggtattgaaactgctggtggagtcatgactgtcctcatcaagcgtaataccaccattcctaccaagcagacacagaccttcactacctattctgacaaccagcctggtgtgcttattcaggtttatgaaggcgagcgtgccatgacaaaggataacaacctgcttggcaagtttgaactcacaggcatacctcctgcaccccgaggtgttcctcagattgaagtcacttttgacattgatgccaatggtatactcaatgtctctgctgtggacaagagtacgggaaaagagaacaagattactatcactaatgacaagggccgtttgagcaaggaagacattgaacgtatggtccaggaagctgagaagtacaaagctgaagatgagaagcagagggacaaggtgtcatccaagaattcacttgagtcctatgccttcaacatgaaagcaactgttgaagatgagaaacttcaaggcaagattaacgatgaggacaaacagaagattctggacaagtgtaatgaaattatcaactggcttgataagaatcagactgctgagaaggaagaatttgaacatcaacagaaagagctggagaaagtttgcaaccccatcatcaccaagctgtaccagagtgcaggaggcatgccaggaggaatgcctgggggatttcctggtggtggagctcctccctctggtggtgcttcctcagggcccaccattgaagaggttgattaagccaaccaagtgtagatgtagcattgttccacacatttaaaacatttgaaggacctaaattcgtagcaaattctgtggcagttttaaaaagttaagctgctatagtaagttactgggcattctcaatacttgaatatggaacatatgcacaggggaaggaaataacattgcactttataaacactgtattgtaagtggaaaatgcaatgtcttaaataaaactatttaaaattggcaccataaaaaaaaaaaaaaaaaaaaa

SEQ ID NO: 6868 - DNA, 600 bp, Homo sapiens
cagcgatcattgatggggagctctacaatgaagtgaaggtggaggagagctcgtggctcattgaggacggcaaggtggtgactgtgcatctggagaagatcaataagatggagtggtggagccgcttggtgtccagtgaccctgagatcaacaccaagaagattaaccctgagaattccaagctgtcagacctggacagtgagactcgcagcatggtggaaaagatgatgtatgaccagcgacagaagtccatggggctgccaacttcagacgaacagaagaaacaggagattctgaagaagttcatggatcaacatccggagatggatttttccaaggctaaattcaactagcccctgttttttcctccctgaactcttggggctgagctgcaaccacccaactttctttcccactcttctctgggacttgtgggcctcagggcttggggcaggcatgggactggcccaggcacacaggtcccggggcatcaggagaaaggctgggtcttgggaccttgtcctccccagttggcctactgttacacattaaaacgatttgcccagctaaaaaaaaaaaaaaaaaaaaaaaaaaaaaaaa

SEQ ID NO: 6869 - DNA, 600 bp, Homo sapiens
gctaacatgctttgtgctggcttagaaagtgggggcaaggacagctgcagaggtgacagcggaggggcactggtgtttctagatagtgaaacagagaggtggtttgtgggaggaatagtgtcctggggttccatgaattgtggggaagcaggtcagtatggagtctacacaaaagttattaactatattccctggatcgagaacataattagtgatttttaacttgcgtgtctgcagtcaaggattcttcatttttagaaatgcctgtgaagaccttggcagcgacgtggctcgagaagcattcatcattactgtggacatggcagttgttgctccacccaaaaaaacagactccaggtgaggctgctgtcatttctccacttgccagtttaattccagccttacccattgactcaaggggacataaaccacgagagtgacagtcatctttgcccacccagtgtaatgtcactgctcaaattacatttcattaccttaaaaagccagtctcttttcatactggctgttggcatttctgtaaactgcctgtccatgctctttgtttttaaacttgttcttattgaaaaaaaaaaaaaaaaa

SEQ ID NO: 6870 - DNA, 600 bp, Homo sapiens
atgctgtgctgcaaaagaaaaaggacatcaaattcaagaagctaagcctgatctcctgtaaaaacatcatttccctgatggacaccagcggcaatgggaagctggagtttgatgaattcaaagtgttctgggacaagctgaagcagtggattaaccttttccttcggtttgatgctgacaagtccggcaccatgtctacctatgaactacggactgcactgaaagctgcaggctttcagctgagcagccacctcctgcagctgattgtgctcaggtatgcggatgaggagctccagctggacttcgatgacttcctcaactgcctggtccggctggagaatgcgagccgggtgttccaggctctcagtacaaagaacaaggagttcattcatctcaatataaatgagttcatccatttgacaatgaacatctgaggctgccttgtagagatgcagcctgcccagctgaatcttggcttctggaccttgaccttcagaacttctcttggtgtggaaccattacgcccagggttcactcccctctcatcgtccggccttctcccttcatcttgatctgggaagaatgaaatgaactcagcta

SEQ ID NO: 6871 - DNA, 1400 bp, Homo sapiens
catatgcatgggtcttggatgaaactggcgaagaaagggaaaggggagtaaccatggatgttggtatgacaaagtttgaaaccacaaccaaagttattacattaatggatgctccaggccataaggacttcattccaaatatgattacaggagcagcccaggcggatgtagctgttttagttgtagatgccagcaggggagagtttgaagctggatttgagactggaggacaaacacgagagcatggactcttggtccgttctctgggagtgacgcagcttgcagttgcagttaataaaatggatcaggttaattggcaacaagaaaggtttcaagagattactggaaaacttgggcactttcttaagcaagcaggttttaaggagagtgatgtaggttttattcctacaagtggtctcagtggtgaaaatctaatcacaagatctcagtcaagtgaactcacaaaatggtataaaggactatgtttattagaacaaattgattcctttaagcctccccagcgatctattgacaaaccttttagattatgtgtgtccgatgttttcaaagatcaaggatctggattttgcataactggtaaaatagaagctggttatatccaaactggtgaccgactactggcaatgcctcctaatgaaacttgtaccgtgaaaggaatcactctgcatgatgaacctgtcgactgggcggcagcaggcgatcatgttagtcttactttggttgggatggatatcatcaaaatcaatgttggctgcatattttgtggccccaaagtacccattaaagcttgcactcgtttcagagcccgaatcctcatctttaatattgaaattcctatcactaaaggatttcctgtgctgttacactaccaaactgtcagtgaacccgccgttattaaacgattgattagtgtcttaaacaaaagcacgggtgaagtcacaaagaaaaagcctaagtttttgactaaaggccagaatgcattggtagagctacagacacaaagaccaatagctcttgagctatataaagactttaaagagctggggaggttcatgctacgttacggtggttctacaatagctgctggtgttgtcactgagataaaagaatgatgggtcagaatttctaccacgtttctggatacagtgaaatagctaacctctgtttcaagaatgcagttattaagtcaaaggaacaatgtgcaattgatatgtttttagatgagagagaaaaattaaagctaaaattagctgcaaagaagtattaataatcacctctgcaaaaattctaagttgccaactggcaaagaaagtctaatgttaaaaacaactttgcctttgaaacgttaataaatggatttactttgctaagaaaaaaaa

SEQ ID NO: 6872 - DNA, 600 bp, Homo sapiens
cttcctggacacctgcctgaaggactgcatgctcaccaaccccgagctgctgaaggtcttctccaagctcatgtctgtgtgcgtcatgttcaccaactgcatgcagaaatttacacagagcatgaaattagatggcgagctgggcgggcagacgctggagcacagcaccgtcctggggctgcccgcaggggccgaggagcgggcccggaaggagctcgccaggaagcacctggctgagcacgcagacactgtgcagctggtgtccggcttcgaggccaccatcaacaagtttgacaagaacttctcagcccacctgctggacctcctggcccggctgagcatctatagcaccagtgactgtgagcacggcatggccagcgtcatctccaggcttgacttcaatggtttctacacggagcgcctggagcgcctgtctgcagagaggagccagaaggccaccccccaagtgcctgtcctgcgggggcccccggctcctgcacccagggtcgcagtcaccgcacagtgagccctggctgtgacaggaaggaagggtgtggggtcagcagggactggtgcaaatgggtccagaattttcaaatc

SEQ ID NO: 6873 - DNA, 1400 bp, Homo sapiens
ccaactgggtcaggtaaaactctgctggcacaaaccctagctaaatgccttgatgtcccttttgctatctgtgactgtacaactttgactcaggctggatatgtaggcgaagatattgaatctgtgattgcaaaactactccaagatgccaattataatgtggaaaaagcacaacaaggaattgtctttctggatgaagtagataagattggcagtgtgccaggcattcatcaattacgggatgtaggtggagaaggcgttcagcaaggcttattaaaactactagaaggcacaatagtcaatgttccagaaaagaattcccgaaagctccgtggagaaacagttcaagttgatacaacaaacatcctgtttgtggcatctggtgctttcaatggtttagacagaatcatcagcaggaggaaaaatgaaaagtatcttggatttggaacaccatctaatctgggaaaaggcagaagggctgcagctgctgcagaccttgctaatcgaagtggggaatcgaatactcaccaagacattgaagaaaaagatcggttattgcgtcatgtggaagccagagatctgattgagtttggcatgattcctgagtttgtgggacggttgcctgtggtggttccattgcatagcctagatgagaaaacacttgtacaaatattaactgagccacgaaatgctgttattcctcagtaccaggccttattcagcatggataagtgtgaactgaatgttactgaggatgctttgaaagctatagccagattggcactagaacgaaaaacaggtgcacgaggccttcggtccataatggaaaagctgttactagaaccaatgtttgaagtccctaattctgatatcgtatgtgtggaggttgacaaagaagtagtagaaggaaaaaaggaaccaggatacatccgggctccaacaaaagaatcctctgaagaggagtatgactctggagttgaagaagaaggatggccccgccaagcagatgctgcaaacagctaaactgtcatattgctgtcttgtatatacagcttttccttcttttgtttaggatcataattgtctctacagtctgatattaaaggcattggatctatcttggatatcatacatggtcagagaagcctttaggagaagaatcagatcatgtatataattgtaacatcacattgattttacggaagatgttatatggactttaatgacacaatgtttagagataaaatgtacattattttggttcagttttttaaaaaaaatatgctttaacaaaattcttaggaattcttttaagcaatgcaggtattgcgataactgtagattttacaataatgttactctacaaatgggaaaataaattctttaaaattgaatattga

SEQ ID NO: 6874 - DNA, 600 bp, Homo sapiens
ccctggagtgctgttcatcgacgaggtccacatgctggacatcgagagcttctccttcctcaaccgggccctggagagtgacatggcgcctgtcctgatcatggccaccaaccgtggcatcacgcgaatccggggcaccagctaccagagccctcacggcatccccatagacctgctggaccggctgcttatcgtctccaccaccccctacagcgagaaagacacgaagcagatcctccgcatccggtgcgaggaagaagatgtggagatgagtgaggacgcctacacggtgctgacccgcatcgggctggagacgtcactgcgctacgccatccagctcatcacagctgccagcttggtgtgccggaaacgcaagggtacagaagtgcaggtggatgacatcaagcgggtctactcactcttcctggacgagtcccgctccacgcagtacatgaaggagtaccaggacgccttcctcttcaacgaactcaaaggcgagaccatggacacctcctgagttggatgtcatcccccgaccccaccctgttttccaccagagttctgacactgtgactctgtataaaatggttgggaagctgc

SEQ ID NO: 6875 - DNA, 1400 bp, Homo sapiens
agtacgatgacctttctgacctcactgctgcccagcaggagactctgagtgactgggagtctcagttcactttcaagtatcatcacgtgggcaaactgctgaaggagggggaggagcccactgtgtactcagatgaggaagaaccaaaagatgagagtgcccggaaaaatgattaaagcattcagtggaagtatatctatttttgtattttgcaaaatcatttgtaacagtccactctgtctttaaaacatagtgattacaatatttagaaagttttgagcacttgctataagttttttaattaacatcactagtgacactaataaaattaacttcttagaatgcatgatgtgtttgtgtgtcacaaatccagaaagtgaactgcagtgctgtaatacacatgttaatactgtttttcttctatctgtagttagtacaggatgaatttaaatgtgtttttcctgagagacaaggaagacttgggtatttcccaaaacaggtaaaaatcttaaatgtgcaccaagagcaaaggatcaacttttagtcatgatgttctgtaaagacaacaaatccctttttttttctcaattgacttaactgcatgatttctgttttatctacctctaaagcaaatctgcagtgttccaaagactttggtatggattaagcgctgtccagtaacaaaatgaaatctcaaaacagagctcagctgcaaaaaagcatattttctgtgtttctggactgcactgttgtccttgccctcacatagacactcagacaccctcacaaacacagtagtctatagttaggattaaaataggatctgaacattcaaaagaaagctttggaaaaaaagagctggctggcctaaaaacctaaatatatgatgaagattgtaggactgtcttcccaagccccatgttcatggtggggcaatggttatttggttattttactcaattggttactctcatttgaaatgagggagggacatacagaataggaacaggtgtttgctctcctaagagccttcatgcacacccctgaaccacgaggaaacagtacagtcgctagtcaagtggtttttaaagtaaagtatattcataaggtaacagttattctgttgttataaaactatacccactgcaaaagtagtagtcaagtgtctaggtctttgatattgctcttttggttaacactaagcttaagtagactatacagttgtatgaatttgtaaaagtatatgaacacctagtgagatttcaaacttgtaattgtggttaaatagtcattgtattttcttgtgaactgtgttttatgattttacctcaaatcagaaaacaaaatgatgtgctttggtcagttaataaaaatggttttacccactaaaaaaaaaaaaa

SEQ ID NO: 6876 - DNA, 1400 bp, Homo sapiens
agccgagacgcgggccgtgtgatctgctgggctagtctccccatgtgccccaccccgcggaaggcgtgtttgtgcccagaagagaggccgggctgctgcagaaccccgccgtgtaaagaggcagaaaagttggtttggtttgcagtaacgctgcaactagaaaatatatgcacttcaggcttgttgaaacgaccaagactctgtgacgttaatttgggtctttgtcctggcagtgcctctgccagtcactgtcatcgttgtgtcccccacaactgtcctcttgctagctcggcccagctttgtccctggagcccgatgctacccctgtcagacagaggctgcggcctgggccagagtcagggagtagctgctgcttcacggcgtctccactgtgcgattggcccggagccccgaagactcggagggagctgctcagggccggtgagcgcagccagaagccctggccagtgaggagctcacaggtcctccctggtggtcccgccgcacctctgcatctcctgggcgtcaccaggaaggctctgaagtcccgggctgctctcagcacttctcctgcagactgaagactctggactcattgctgattggaacaccaggaggaggttggatttctgccagtgggggatgtttctggaggcagctggtcccccacaccgcgtcctgctgagcctgccccctggattggctgtaatttgcctcgaagttcagcagttcatcttcatgggaaatttgctgagcccccaccagggaaccggatgatgaaacagggatacctcacagcttggccatttgaggcaaaggcagcttcccgagctgatgctaaagaagacagactttcccttcctcccagcagcagcagtgcagagcccgcctggagggatgtgggggctgtgcagggtgcagcgctcaggtggatcctgggaagcagcctctggatgctgagtggagggagccactgagcacagcaaggcaccaaagcccctggagaaaccgccagggcgaggtgcgaccatcatcaggatcaaagcagacggggcgtgggtggggaaggggctctgggaccagaccccccacactactgcgtctttgtttctatcagtctttgtagaagcaggtggtggtggaaattccagcaggtgggtcccgcagaggccctgaggcctcacttttcggatcttctgtcccagatcctgctccctccctgctgagcctggggttcccctggcattggccccagccttctgaaagccggcgctgcagccagaggccgcacgctgcactgtcgcgacgcagagaggcttctgtgcaggctgggatcgggccccatgtctgtgctgtctagtttgtgttcaaaatgtcagaataaacacagaataaatgtt

SEQ ID NO: 6877 - DNA, 1315 bp, Homo sapiens; identical to SEQ ID NO: 1642

SEQ ID NO: 6878 - DNA, 600 bp, Homo sapiens
gctcaccagggccagcagggccctaggctggggtcgtacagctgaagttgtgggtgcattggcctaggctgagcgtggggcagggaattatgggggctgtgcccagggtgggtgtctggcacccagctgccagccttctgtcctgggcaaactactccctacttaagggaataggccaggctccatccggaggcagggaccatgccaggaggagcccctgtggtcacggcatcctgtggtgtccatgaggtaccacagctccactcctggctggaacccggcaccctctgtgggaagccagcactagctctcatcccccatccgggagataccaccagtcctggtccccttttgccaacacctgctggtcagatgtccccctacccccaccccactgtcctccaaggctacaggacccctgcttctgacacagtgagcaacaagcctgggtttccctgctggcagacggcagatccctcaggaaacctgctccacttgtcagggtctcttcggagacccaggatttagggtcacatgctgcaggcagggctgtggcccagctgggtctgacaaggacccgtgtcacatcgtgaatattta

SEQ ID NO: 6879 - DNA, 1040 bp, Homo sapiens; identical to SEQ ID NO: 1644

SEQ ID NO: 6880 - DNA, 1400 bp, Homo sapiens
ataaaatctgcaaattctgaacttgggggaatttggtcagtaggacaaagaatctggcagagagatttccctgggatctatacaaccatcaacgctcaccagtggtctgagacggtccagccaattatggaagcacttagagatgcaacaaggagacgcgcctttgccctggtctctcaagcgtatacttcaatcatcgccgatgattttgcagcctttgttggacttcctgtagaagaggctgtgaaaggcatattagaacaaggatggcaagctgattccaccacaagaatggttctgcccagaaagccagttgcaggggccctggatgtttcctttaacaagtttattcccttatcagagcctgctccagttcccccaatacccaatgaacagcagttagccagactgacggattatgtggctttccttgaaaactgatttatcactctgagttcaagattcatcttcagaatcctgtatactgacaaacgtagaaatgtaaagtttgtattttcaatttattggatggcttaagcacctcagcattccttactatgtgataaaatacatatagaatataagatatactatatacattttgtccataaacgttatgctgaatagttgttgaaacagttctcattttgtagtatttaataatctggatggagcctgtcagtattacagttagttttctagtgactcataaaataagatttcctgtttcatgtagaatagtgtttgtcaactgtcttttctctgtcccagcacatgccgtactcttatatgtaccattggttgataattataatgattcatttggacttgaagaaagattgtccccaggcacagtatctgaatcactggggattatgattcaccctctttggagaacatgctctcttttcaccccccacctcctgagagccactaatgtaagatacagaaacatagctgaggaacaaatagaccatttccatactaaaccagtttgttaactttagattttttccaatagtgtgagtatatccattgctggcagtggagggcttgccatgaaaatgcaacttatttaagacatttatgagacatattaacttgtgctgtcgccttttagaaggagaaacttaagtgtggaatgcattatatgggcaaagaagctatgaagatacatgatacactttgtacaactatcctgcagcccattggttgcttatatttatcgcttggctcaagttctgccctttggagaaatactgagcaagtctttcattctctgtgtgacagccctctgaatatttgaagttgtttgttgtaacttaaggttataacagcccttagttcatttactctgcatttgttcaataaatatttaactgaaaaaaaaaaaaaaaaaa

SEQ ID NO: 6881 - DNA, 1400 bp, Homo sapiens
ggagctgaacgccctctacgatgtgtttctggaggtctcccagcactggcagagcaaggacgtgatcctgcttggggacttcaatgctgactgcgcttcactgaccaaaaagcgcctggacaagctggagctgcggactgagccaggcttccactgggtgattgccgatggggaggacaccacagtgcgggccagcacccactgcacctatgaccgcgtcgtgctgcacggggagcgctgccggagtctgctgcacactgcggctgcctttgacttccccacgagcttccagctcaccgaggaggaggccctcaacatcagtgaccactaccccgtggaggtggagctgaagctgagccaggcgcacagcgtccagcctctcagcctcactgttctgttgctgctatcactcctgtcccctcagctgtgccctgctgcctgagcgtccccctacccccccagggcctgctgccttttgggacttaaaccccagcctcccccgtccatccagccctggggctggggggcttcaactatagttgccctgtgactgtagtccacccctgcctgccttgtttgatttggctcttgttctttggttgggcttgtgcctagattaggagaggaagccaggggccctgcactcatgccacctgccaggtagtgtagtatcaggagtggagacaaagtgggctctgggttggggtaggggaagggagggttcagaaagaggaatgaagatgttgtatgacaagaaggaaagttactgagaacaaaaacccagattggtgagataggacacttgtgcagcagatatgccaatgggccatgtttattgtggatgggtaagaatcaccaggaaaccattaagccccaatagctacaaggagggtggttaatctgctatatcaaactccttccctgaaaccagcaaacaccgggaaacattttggctcattataatccggtgaacaatgcagtcaggcctgttataaccgctgagcagccacactcgcacctcctgggtgctgtagtctgtgttggtacaggcttctgcatgcctggtaaagtccagccaaggctggtcaaggcaacatctccacacagaaaatctgcaccagttatgtaagctaaaaagctgtgtgaacccaggtgtcccggaaaggggctgcaggacacagcaaaatgccagcagcgtgccggacccctcccttccatcctcctctccaaagaacagaggtcaggaaaaacactggctgggacgctagaagggtcatgtgttaactataatcacatttatggtttggaaccatcaccccaaggtaaaaaaaaaaataaaaggtatgtttggcaaaataaaataaaggtaattaaaaacctaaaaaaaaaaaaaaaaaaaa

SEQ ID NO: 6882 - DNA, 600 bp, Homo sapiens
cctatttaaagacaaattatgggacgtttgtagaacctgagtatttttctttttaccagttttttagtttgagctcttaggtttattggagctagcaataattggttctggcaagtttggccagactgacttcaaaaaattaatgtgtatccagggacattttaaaacctgtacacagtgtttattgtggttaggaagcaatttcccaatgtacctataagaaatgtgcatcaagccagcctgaccaacatggtgaaaccccatctgtactaaacataaaaaaattagcctggcatggtggtgtacgcctgtaatcccagtgacttgggaggctgaggcaggagaatcgcttgaacccgggaggcggaggttgcagtgagctaagatcgcgccactgtactccagcctggacaacagcgagagctccatctcaaaaaaaaaaggaaatgtgtatcaagaacatgattatccagcggtattttctaattcagatcatcaaactgattatatagaagagttggctttaaaatgtttgcaaatgtcgatgttgagaatggtatttcttcagttttattttaggatttctatagtttgatgatc

SEQ ID NO: 6883 - DNA, 600 bp, Homo sapiens
cgtcttttgaataactgggacgtgtgcgcagacatggtgggcaccttcacagacaccgaggaccctgccaagttcaagatgaagtactggggcgtagcctcctttctgcagaaaggaaatgatgaccactggatcgtcgacacagactacgacacgtatgccgtacagtactcctgccgcctcctgaacctcgatggcacctgtgctgacagctactccttcgtgttttcccgggaccccaacggcctgcccccagaagcgcagaagattgtaaggcagcggcaggaggagctgtgcctggccaggcagtacaggctgatcgtccacaacggttactgcgatggcagatcagaaagaaaccttttgtagcaatatcaagaatctagtttcatctgagaacttctgattagctctcagtcttcagctctatttatcttaggagtttaatttgcccttctctccccatcttccctcagttcccataaaaccttcattacacataaagatacacgtgggggtcagtgaatctgcttgcctttcctgaaagtttctggggcttaagattccagactctgattcattaaactatagtcacccgtg

SEQ ID NO: 6884 - DNA, 1400 bp, Homo sapiens
atgggcaagcctgagagggagaggaaacaaaagctgtgtcctggcagaaggtctgggtttgcagatgggtgccctgaatggaactactttaactaatccatagggacttctggtatgctttcctctctttttaaaggaacttcgtgacactaaacattagcccaaaggacttcttagccttcaattgggagatacctttggtctgctcctgcaccaaagccatatgggtggaagtcagttggcctccctggttctgcagagggccagaagaatgagagagaggaagactgctggcagggaaatcgaggaggcgagactagaactgcaccagcttccctgatgtctgcagccatggctttgcagcgcaaacagaacttctctgggatgctgggattcttgcctgtatgaatgcatcaagtattcatttattgcccgaataggcattgcattaagtcctctgttaggtgtcaggcaagccaaaaaaaaaaaaaagatgctaagtcctaacccccaacagaagtgttcacagtgtagacgggaaaaaatgtataaacaaatgtgtaaaaagagaaatcagctcatggcttaggatggaattagagacaggtgagggacactcaggagctcattttccagctgctcttcagagtggaagggctggctggatcgggtaggtaagaatagctggattttttagaaaagaaatggatacagtctaaagaattaactcacccggtactttattctaagaagggtctggcatccatatgaggaaaaatgctcagctccaggaaagatggggagtccaagtggattaatgatgtcatgcataattttaagagacaagggagaaaacacaatgtatagccagagaaggagaagctcccatccaaatcctactaggaagagagtgggctgcagatgaatctgtgactcatgtttccctgtttcaaagggatcctggggaaggaggggaacatgcttgcagtatctctccctgtctgtctgctcacataagcattccgtccatctaagctcatcgtgctactggtatgtgtatgtgcagttacacagtttcctgtatcataaatcctagtgtgtttatacaaggagacatctgtggtttccccaaccgttccaaaaggctatttcaaaggaaccagcccacgtatgagaaatgaatgtaacactgtggacattgacttcccgcataaggcagggtgaccccctgaactccagatgtttgcacagtatcttatgtgttgttttccgttgtgacgaatgtgattggaacatttggggagcacccagagggatttttcagtgggaagcattacactttgctaaatcatgtatttattcctgattaaaacaaacctaataaatatttaacccttggc

SEQ ID NO: 6885 - DNA, 1400 bp, Homo sapiens
acaaggagaccagcctacacagtccatcaaatacatctgcccctcatagccaaggaggtattccacctcctaccggaatataattaaagggagaaatacactgtatgaagtatatgttgatactatgacatgttgccaacaccttgagaagcattatttgtttctaataaaagtaatggctttgtcaatatattggtgggtttaaaactttgctgcttttttacataaagcctgtgcctttcctagaaagttaagatgtaaatgtattctcacatgtaaatttgaaagttcaggggtctattatgaaatggattacacattttaaatgaacccataatttttttcactaaagctgtttgccctccaaagtgtttacacctaagcctaacatgtatcgctcattcagaaaactgttatattgtcataccatagtaggaagaaaaacctttatttggaatatacactactgtaagtttgtacagatcatatacctaccacctgtctttgcttaaagagccttgattacataaatatgtaggaaaaaacatattgagttcaaaatttatatctaacattgtttatgttatgattttttttaattgcaaagactaggtgtatatttttttctgtttttctaaatgacccgtggtacttaataggtgtactaaaattgtgttgggagcagggatttggaaatttctgagagatgtgtagttaattagtaattctgtttcatgagatatgatctgttatgctagtggtttaataggcttgctatgtaagtagaacgtggctcaactagatatcttatatgtatgggcattacctcttagtgatatttgtttcctgtcctttgttgctcatgctgtttaagtgcaggctgagacccagcctctttgtaagtacagtaaaataatccaccgttttttacagaccctagtcaaagggttaaaaaaattaagattgctttccatgtttgaaatttaccattgagagtcaatgaagttgctattttgagtttagcattgatattgtgaaaataagtgcaatttggatttcatgtttcttaatattcattcttgtttcacaaatgaatgattaaggaattatgcatcataaaggaacctaagtgaggtatatgatgagtgtattgtctttgcacacacatataggtatattctgaatacaagcttattcattttgcttcctaatctttttgttgtacagggattcaggtttcttattcttacaacatgattgtttatatgtgaagcacatcttgctgttgccttatttttgatgcttttattcatgacaagaattgtcaatataagaatgtatatctttgccgcaaccaatttaataaaggagttgaaagaaaaaaaaaaaaaaaaaaaaaa

SEQ ID NO: 6886 - DNA, 1400 bp, Homo sapiens
ccttctgtagtttcagatcagtagggagaccatataataattttatggtacctgtttcaaaacatattttttctgtttttataagtaagttgatattaattaaactcttggcaatatttcttctttcttaaaggaaaatataccttaactttttttcttttacactgtgaaacatacacagtagaaattctgttactctctgttattaatacataaatgaaaatacatttttttccatattggcatgtagctacaaatattaaaggaggagaaaaggtaatataattttaggtttaccaaatatggtgtgtattcaaataatacttgaccagcttatctaaaatgtacataattttgaggtagcttatgaatttgattttaattattatgttcacaagcttggaatattagatattattttgcatctgtaactaaccgtgatcatcatttcttgtaatttcttgtacatgtatattacttgttcttaatagatttttggaaacaagactttattgagatcagtttggttttcctgttaatttacctgtttgactttataatgtgttttagttttgcagaagaacactgttgtagtttagaaggcttttcataaatcccctcataggcaaagatgaaaacttcccactatttttttcccctcttaggaagacatactggaaagaaaatgtttagcatcttagtgtagtatagctattgtaaacagttcatgactagattttgattcggaaatctatactgaccaaggattaatcttaaggattgtataattcattaaagctgtggtctttccatgtggagactgatagaaaataattttgtcccaagtcttatttgctgactttttctgtcatgagtgagattgttgaacaaactgaatatatgggctatagcaagtagctttacagtacagatcttacaattaagttttgcttttgttaaagtgtgtaccattttttctgtttggagtaagacaaaaattgttttgacataggttccctagggtacacttgctctagcatactttaaaggccactgttgcaaagtctacattttatgctgaatctgcattctgtcaggcacccgtagaaagacctcagtacatgctttgcactctcctttgctccctttttccaatttcttattgcatatcattttgttgtaatacagaaagcagcatttttaaatgtccgtgttaagaattggcccactggtaccaactcacctctattttgtcagttcatagttgaagatttgttttatttcaaaaacaaagtacatttttgaaataatgtttcagaataaaataatctcacttttaagtgatccattttaaaatttgtaattcaataaagttttttttgttgttaaacataaaaaaa

SEQ ID NO: 6887 - DNA, 1000 bp, Homo sapiens; identical to SEQ ID NO: 1652

SEQ ID NO: 6888 - DNA, 600 bp, Homo sapiens
aggtattaatgtgccaaggagccgttttctgcctgtcaaaaccacatcagatctcttgctggtgatgtcaaacctctatagtcttaatgcaggatctctgacaatgagtgaaaagcgggaatttcctacagtgcccttggttaaattaggcagttcttttacgaaggttcaagattatctaagaagatttgaaagtataccagatatgcttgaattggatcacctcacagtttcaggagatgtgacatttggaaaaaatgtttcattaaagggaacggttatcatcattgcaaatcatggtgacagaattgatatcccacctggagcagtattagagaacaagatagtgtctggaaaccttcgcatcttggaccactgaaatgaaaaatactgtggacacttaaataatgggctagtttcttacaatgaaatgttctctaggatttaggcactaaaaggtactttactatgttactgtaccctgcagtgttgatttttaaaatagagttttctgcagtatgcttttagtctaagaaaagcacagatggtgcaatactttccttctttgaagagatcccaaagttagttactcttaagtgc

SEQ ID NO: 6889 - DNA, 1400 bp, Homo sapiens
tgagactgagctaaagttaatctgttgtgacattctggatgtactggacaaacacctcattccagcagctaacactggcgagtccaaggttttctattataaaatgaaaggggactaccacaggtatctggcagaatttgccacaggaaacgacaggaaggaggctgcggagaacagcctagtggcttataaagctgctagtgatattgcaatgacagaacttccaccaacgcatcctattcgcttaggtcttgctctcaatttttccgtattctactacgaaattcttaattcccctgaccgtgcctgcaggttggcaaaagcagcttttgatgatgcaattgcagaactggatacgctgagtgaagaaagctataaggactctacacttatcatgcagttgttacgtgataatctgacactatggacttcagacatgcagggtgacggtgaagagcagaataaagaagcgctgcaggacgtggaagacgaaaatcagtgagacataagccaacaagagaaaccatctctgaccaccccctcctccccatcccaccctttggaaactccccattgtcactgagaaccaccaaatctgacttttacatttggtctcagaatttaggttcctgccctgttggttttttttttttttttttttaaacagttttcaaaagttcttaaaggcaagagtgaatttctgtggattttactggtcccagcttttaggttctttaagacactaacaggactacatagaggctttttcagcattactgtgtcgtctccgtgccagatgtggcaagatcaccattagcaaatggaaattacatttgaaagccattagacttataggtgatgcaagcatctaagagagaggttaatcacactatagaggcataagtggtatcagttttcatttttctaattgtttaaactgtgttttataccagtgtttgcaagtaattgggtgttagcttgagatggttaaaggtggtttggggagggacttcgttgtaatggttttgctgtaaaaaatgtttccaactccgctgaaatgttgctgaaaagcatggtgctggtaacagttcaacaatccgtggctgctcattcttgcctactttactctcccactgaagcaggttagcgttgaaggtggtatggaaaagcctgcatgcctgttcaattcttttgtttcttctccttccccctccccctacctccttcccctcactcctcccctccttcgctcgctcaacctcttttgttcagtatgtgtaacttgaagctaatttgtactactggatatctgactggagccacagatacagaatctgtattgttcttactgaaacacagcatggaattaacattaaacttaaataaaacaaacctaaatt

SEQ ID NO: 6890 - DNA, 1400 bp, Homo sapiens
  misc_feature (677)..(677): n is a, c, g, or t
gcgtggaggagacactgccctgccgcgatgggggcccggggcgctccttcacgccgtaggcaagcggggcggcggctgcggtacctgcccaccgggagctttcccttccttctcctgctgctgctgctctgcatccagctcgggggaggacagaagaaaaaggagaatcttttagctgaaaaagtagagcagctgatggaatggagttccagacgctcaatcttccgaatgaatggtgataaattccgaaaatttataaaggcaccacctcgaaactattccatgattgttatgttcactgctcttcagcctcagcggcagtgttctgtgtgcaggcaagctaatgaagaatatcaaatactggcgaactcctggcgctattcatctgctttttgtaacaagctcttcttcagtatggtggactatgatgaggggacagacgtttttcagcagctcaacatgaactctgctcctacattcaygcatttwcctccaaaaggcagacctaagagagctgatacttttgacctccaaagaattggatttgcagctgagcaactagcaaagtggattgctgacagaacggatgttcatattcgggttttcagaccacccaactactctggtaccattgctttggccctgttagtgtcgcttgttggaggtttgctttattngagaaggaacaacttggagttcatctataacaagactggttgggccatggtgtctctgtgtatagtctttgctatgacttctggccagatgtggaaccatatccgtggacctccatatgctcataagaacccacacaatggacaagtgagctacattcatgggagcagccaggctcagtttgtggcagaatcacacattattctggtactgaatgccgctatcaccatggggatggttcttctaaatgaagcagcaacttcgaaaggcgatgttggaaaaagacggataatttgcctagtgggattgggcctggtggtcttcttcttcagttttctactttcaatatttcgttccaagtaccacggctatccttatagtgatctggactttgagtgagaagatgtgatttggaccatggcacttaaaaactctataacctcagctttttaattaaatgaagccaagtgggatttgcataaagtgaatgtttaccatgaagataaactgttcctgactttatactattttgaattcattcatttcattgtgatcagctagcttattcttgtgtactttttttaaactgtgggttttcctagtaaatttaatttacagaaatcaatggtagcatttagtaatctacaaaggaaatatcaaagtgtttttcaagcctgttatatycagtgtgtkccacaggattgcaataaatgacaatgtaatta

SEQ ID NO: 6891 - DNA, 1400 bp, Homo sapiens
ttatggtcttcttttcatcttgtatgtctgtgaaataccactatgagttgctgaactacattgatttgcccgtcttggccattcatggaaagcaaaagcaaaataagcgtacaaccacattcttccagttctgcaatgcagattcgggaacactattgtgtacggatgtggcagcgagaggactagacattcctgaagtcgactggattgttcagtatgaccctccggatgaccctaaggaatatattcatcgtgtgggtagaacagccagaggcctaaatgggagagggcatgccttgctcattttgcgcccagaagaattgggttttcttcgttacttgaaacaatccaaggttccattaagtgaatttgacttttcctggtctaaaatttctgacattcagtctcagcttgagaaattgattgaaaagaattactttcttcataagtcagcccaggaagcatataagtcatacatacgagcctatgattcccattctctgaaacagatctttaatgttaataacctaaatttgcctcaggttgctctgtcatttggtttcaaggtgcctcccttcgttgatctgaacgtcaacagtaatgaaggcaagcagaaaaagcgaggaggtggtggtggatttggctaccagaaaaccaagaaagttgagaaatccaaaatctttaaacacattagcaagaaatcatctgacagcaggcagttctctcactgaacacatgccttcctttcatcttgaataactttgtcctaaaatgaattttttttccccttgatttaacaggatttttgtagactttagaatttggacttacctaacaagagtataaattgacttgggttgcaagcactgagcactgttacttctatcacgtctctcttttatttctgggatataaaacaggctttaagtttcttggttgcccaagggcagagcaaggaatatctggtgtttcttgtgatgataatattttaattttaaatatccctccctcatacaagtgtatgttaccattttaatataattctttttgtacctttccttcttgttttgtgaggatttttgtggcatggattgctgtgctcactgctgtaaaaggtgacctagtgtactgggcagctggtggcggtgcagaaaagagtctcaggttattttttgtttttagttatttcttggaccttgacagtatctaatgactcctcctgaaaatgctgcagtataaaagagcaaagagctttgggaaatacctaagaagcaccttaagattagggtggcattgcttttatagattcttgattttaaagcaacaggcctttctcaggtgttgcattttttggagcaaaaactatgggttgtaatttgaataaagtgtcactaagcagt

SEQ ID NO: 6892 - DNA, 600 bp, Homo sapiens
atatgagttcttctggggcctgcgctcttactatgagaccagcaagatgaaagtcctcaagtttgcctgcaaggtacaaaagaaggatcccaaggaatgggcagctcagtaccgagaggcgatggaagcggatttgaaggctgcagctgaggctgcagctgaagccaaggctagggccgagattagagctcgaatgggcattgggctcggctcggagaatgctgccgggccctgcaactgggacgaagctgatatcggaccctgggccaaagcccggatccaggcgggagcagaagctaaagccaaagcccaagagagtggcagtgccagcactggtgccagtaccagtaccaataacagtgccagtgccagtgccagcaccagtggtggcttcagtgctggtgccagcctgaccgccactctcacatttgggctcttcgctggccttggtggagctggtgccagcaccagtggcagctctggtgcctgtggtttctcctacaagtgagattttagatattgttaatcctgccagtctttctcttcaagccagggtgcatcctcagaaacctatccaacacagcactctaggcagccact

SEQ ID NO: 6893 - DNA, 1164 bp, Homo sapiens; identical to SEQ ID NO: 1658

SEQ ID NO: 6894 - DNA, 1400 bp, Homo sapiens
ccaatcaggagcagtatgcagaggggaagatgagaggggctgccccaggaaagaagacatctggtctgcaacagaaaaatgttgaagtgaaaacgaaaaagaacaaacagaaaacacctggaaatggagatggtggcagtaccagtgagacccctcagcctcctcggaagaaaagggcccgggtagatcctactgttgaaaatgaggaaacattcatgaacagagttgaagttaaagtaaagattcctgaagagctaaaaccgtggcttgttgatgactgggacttaattaccaggcaaaaacagctcttttatcttcctgccaagaagaatgtggattccattcttgaggattatgcaaattacaagaaatctcgtggaaacacagataataaggagtatgcggttaatgaagttgtggcagggataaaagaatacttcaacgtaatgttgggtacccagctactctataaatttgagagaccacagtatgctgaaattcttgcagatcatcccgatgcacccatgtcccaggtgtatggagcgccacatctcctgagattatttgtacgaattggagcaatgttggcttatacacctctggatgagaagagccttgctttattactcaattatcttcacgatttcctaaagtacctggcaaagaattctgcaactttgttcagtgccagcgattatgaagtggctcctcctgagtaccatcggaaagctgtgtgagaggcactctcactcacttatgtttggatctccgtaaacacatttttgttcttagtctatctcttgtacaaacgatgtgctttgaagatgttagtgtataacaattgatgtttgttttctgtttgattttaaacagagaaaaaataaaagggggtaatagctccttttttcttctttctttttttttttcatttcaaaattgctgccagtgttttcaatgatggacaacagagggatatgctgtagagtgttttattgcctagttgacaaagctgcttttgaatgctggtggttctattcctttgacactacgcacttttataatacatgttaatgctatatgacaaaatgctctgattcctagtgccaaaggttcaattcagtgtatataactgaacacactcatccatttgtgcttttgtttttttttatggtgcttaaagtaaagagcccatcctttgcaagtcatccatgttgttacttaggcattttatcttggctcaaattgttgaagaatggtggcttgtttcatggtttttgtatttgtgtctaatgcacgttttaacatgatagacgcaatgcattgtgtagctagttttctggaaaagtcaatcttttaggaattgtttttcagatcttcaataaattttttctttaaatttc

SEQ ID NO: 6895 - DNA, 600 bp, Homo sapiens
gcggaaaaatctacctatgaagaatttgtggaaggcactggcagcttggatgaggacacctcacttccagaaggccttaaggactggaacaaggagcgggaaaaggagaaagaggagcccccgggtgagaaagttgccaactagaggcccagagggaggccatctcagtctctccactgtggtttcagctggtgcattatttcagctgtggctttcagaagaatgggaatgctgcgctgattttagccagccactggcccagctgaaatgatggggaaaggagtccttagtcctttcagcctcagaggtcacagtgggtggcaggtgactttccggaggccttgagggaaatgcacactgtcccatagcctcattgggctcccagacgtgctggaaaggttgagcccagagtggccgaggctggaccctgtggcaccaagtggggtcggctgaccgtgtggcagggatcgttgcactggactcttggcgtgtgggaagggatgctttctctttgtcgcccactcttcattcctgtttctcctcagttcccctgtgcagatgggctgtgaaattaaattggagtcttgataagaacatttt

SEQ ID NO: 6896 - DNA, 1077 bp, Homo sapiens; identical to SEQ ID NO: 1661

SEQ ID NO: 6897 - DNA, 600 bp, Homo sapiens
cccctctggagatcctctggaccttctccatctacctggagtcagtggccatcttgccgcagctgttcatggtgagcaagaccggcgaggcggagaccatcaccagccactacttgtttgcgctaggcgtttaccgcacgctctatctcttcaactggatctggcgctaccatttcgagggcttcttcgacctcatcgccattgtggcaggcctggtccagacagtcctctactgcgatttcttctacctctatatcaccaaagtcctaaaggggaagaagttgagtttgccggcatagccccggtcctctccatctctctcctcggcagcagcgggaggcagaggaaggcggcagaagatgaagagctttcccatccaggggtgacttttttaagaacccacctcttgtgctccccatcccgcctcctgccgggtttcagggggacagtggaggatccaggtcttggggagctcaggacttgggctgtttgtagttttttgccttttagacaagaaaaaaaaatctttccactctttagtttttgattctgatgactcgttttttcttctactctgtggccccaaattttataaagtga

SEQ ID NO: 6898 - DNA, 1400 bp, Homo sapiens
tactgctcactttgctaatgtgacacagattgaagatgctgtctccttgtgggccaaactgaaattgcagaaggcttcagaacgatggcagcctgacactgaggaagaatatgaagactcaagtgggaatgttgtgaataagaagacatacgaggatctgaaaagacaaggactgctctagtgttgagggatgtagctcagcttttgggctagcccaggcttccctaagatctgctttttctatttctcccaaccaaatcctcttaaagaccctttgctatgtagtctcatggtctagcatgcatcttgtagaaacaaggcatgctggcagattgcagggttgagatgtgttttatctgttttatattttaaaagattctgccagaaaataaaaccagaccttgttctaaagcccagggttatggaccaactcagtgcttcaggtcttaatgcctccatacctcttcctcaccaactttactagtagctgagatttaatgggcacctattatgctacatatcatgttaggtaaatctgacctgacctctttccccaccctcctttgttgctgcttccctgaatgagtattaccccaggatgaggtctgccatcagcttagttagccattgatgcaaatactagggaaagactaggaggatgagccagggttgctactaaggactaagtgtcgcaccaaggtttgccttttgtatttgcataaagaaaggagttggagctgggtgcagtggcttgtgcctgtagtcccagctacttgggaggctgaggcaggagggttgcttgagactagcctaggtaacatagtgagaccctgtctcattaaaaaaaaaaaaaaaaggcatggtggcacgcactgtagtcccagctactcaggagactgaggctagaagatcctttgaacctaggagtttgagaccagcctgggcgatatagtgaggccccatctcaaaaaaaaaaaaaagcggggggggggagttgggctgtgttggaatgggcctgcagcccaacaaacaagggaactaggaccgacagtgacttcaccagcttgctaggtcagaatgagagactggtgggtctgtctacctgtttcttctacaagatccctatttgactgtaaaagtagctaatactcacatgttctccaatcccaggtagccatggtagagttgggtagagttgagcagccgccccaggatccaaatgtggtgtctgaaatggaaagaactaaggcaaccaggaaggcactgatctgccttataagcacagtcatctgaaagtcaggcctgctgcaggacaggatcccccagagaccccatttgcctctcaacactcagaccttcaactgttttttaataaatctactttttaaaaaaaaaaaata

SEQ ID NO: 6899 - DNA, 1400 bp, Homo sapiens
gacgagtgagtcgggcctgcgcggccactttgaggcctttgggactctgacggactgcgtggtggtggtgaatccccagaccaagcgctcccgttgctttggcttcgtgacctactccaatgtggaggaggcggacgccgccatggccgcctcgccccatgccgtggacggcaacactgtggagctgaagcgggcggtgtcccgggaggattcggcgcggcccggtgcccacgccaaggttaagaagctctttgtcggaggccttaaaggagacgtggctgagggcgacctgatcgagcacttctcgcagtttggcaccgtggaaaaggccgagattattgccgacaagcagtccggcaagaagcgtggattcggcttcgtgtatttccagaatcacgacgcggcagacaaggccgcggtggtcaagttccatccgattcagggccatcgcgtggaggtgaagaaagcagtccccaaggaggatatctactccggtgggggtggaggcggctcccgatcctcccggggcggccgaggcggccgggggcgcggcggtggtcgagaccagaacggcctttccaagggcggcggcggcggttacaacagctacggtggttacggcggcggcggaggcggcggctacaatgcctacggaggcggcggcggcggttcgtcctacggtgggagcgactacggtaacggcttcggcggcttcggcagctacagccagcatcagtcctcctatgggcccatgaagagcggcggcggcggcggcggtggaggcagtagctggggcggtcgcagtaatagtggaccttacagaggcggctatggcggtgggggtggctatggaggcagctccttctaaaagaaaatttaaaatgcctgggagtggctataggggtagctctttccaacagcccaagtggggtcaactcctaagccccaccccctcacacacaccgccttccctgttttgcccttgggggagccacttctaaggctgcttacccttgggggtgttcctctatttgcctgccacctctcttgtctctccctctgaagatggactcggccccacatacacatttttgtgttacagtcattgatggactctatttttttattattacttggaccttggtcgtttttatactagcaaaatgtcttgttttaatttgtgttttttggggggagggagggagtgaacttgctgattctgtagcaaaacctgggtgggggttggggtggggggtagtttactttgttgtaaggacttgataacctggctacagcgttttctatgaaatctacttggatcccatgcctgaaatttggaagcatatgtacacaaatcatttttacgttttatttttaataaatcattgtgtttgaccgta

SEQ ID NO: 6900 - DNA, 1400 bp, Homo sapiens
atgacaaaaaagatgacaagaactaacgctcctgagtaccagcccctgtcacatctgactgtgggtttcaagtgggaagggaaggagttctacttgtcttgacaccatagaggtggcttgagaagatgtcctttgaagagccagtatagtttctgttccctgcagcagcccaagtgctttaaagccgtttcaagctgtatagtttgcacacccatcccagtggaggggaaaggggataagtgtttcaaggcaaccttttctgcactttgctgcgaaaagcaaagggccttctatgaaggacaacccttgcagaattgggtgtgtgggagagcaaaaaaatactgtagatcttcaaagagcatctccacaacccacagccttcttcccaatagtgttaactctgcatttttacagcgtagcatgtgtgtagtttttggctattactggtgtattatttgggggagggagggatggggaggggagaaagggagatgggtagcatcattttgattaacatttggggcctgataggggaaatggtgaagcaatggaaaagaacagacaactaatgatttgcttctatgtccagaatattttacctttaaaaaaatgtcattggcaccataaataaggactgtgagagactgtttaaaagctgtgaaagtctgaaacctataagccaaggtgttccctgcctaaacttattgctgttcccacaaaggactaagcctgttcataagttaccaaagttgccattttggagatggaaattgacgaggagggaaggtcttttattggagagtatacaggacaagcagatcattctgccttagaggtgctaattcccgaaattagaagaccctttcttttccagtaatgaagttataaatatcagcttgttcatccaagccactggctgaggtgttaggaagaggaagagggtggtagaggaggtaagacagtagggaaagacaagggcccatgctcttagtggggaaaactcttggacccgtttactttgagctttgaacactgaaaccattgttggcagggttcagtcactgacagcacaagtttcactgaattgatccaagagtttagtgatttcaaaagccttggtctcaggagaagattaaactttcatattgggcagtggttcactttaaaacacacacatacacacacaaaacaattttttaagaaatcctaataagtaacatacccaaaatgctctgtcttgagtcatgagaaccatcagttcttgatattgtctagacttgcatctagagctacgttgtaaaattcttttaggcatgtgttagatttctgtgtaaactttgtttaaatgtaaacttcatactacattgtcagtttttgtcttaataaaactatagatttat

SEQ ID NO: 6901 - DNA, 600 bp, Homo sapiens
tccttattccacctcatgctctgcttggcttccttgtacatcatgatgaccctgaccagctggtacagccctgatgcaaagtttcagagcatgaccagcaagtggccagctgtgtgggtcaagatcagctccagctgggtctgcctcctgctttacgtctggacccttgtggctccacttgtcctcaccagtcgggacttcagctgaacctctgagtgccaaggacaccactggaactcacaaaggtctccttcaccgaaaacccatataccttttaagtttgtttcaactaaaatattaagtgaatgctttgcaagtttgactgtatgcaggtttatatcagaaggtgagattgaataatgcttgatgcagaatcgaaacttctcatttatctgtatattatgtttacttctaaggatatagcacaaagggaacattttttgtttaaagtgaactacagctgtgctgtgaagagagttctttataaagcctgtaggttcttttaactttggtttaaaatgtaagataggaaaatgttggatatttgaggccatgcttaatatatttatattgcagtatcctttaaaagcaaaaaaaaaa

SEQ ID NO: 6902 - DNA, 1400 bp, Homo sapiens
gatgaggatgaggatgaggatgaagatgaggatgaacggcagttactgggagaatttgagaaggaactggaagggatcctgcttccgtcagaccgagaccggctccgttcggaggtgaaggctggcatggagcgggaactggagaacatcatccaggagacagagaaagagctggacccagatgggctgaagaaggagtcagagcgggatcgggcaatgctggctctcacatccactctcaacaaactcatcaaaagactggaggaaaaacagagtccagagctggtgaagaagcacaagaaaaagagggttgtccccaaaaagcctcccccatcaccccaacctacagaggaggatcctgagcacagagtccgggtccgggtcaccaagctccgtctcggaggccctaatcaggatctgactgtcctcgagatgaaacgggaaaacccacagctgaaacaaatcgaggggctggtgaaggagctgctggagagggagggactcacagctgcagggaaaattgagatcaaaattgtccgcccatgggctgaagggactgaagagggtgcacgttggctgactgatgaggacacgagaaacctcaaggagatcttcttcaatatcttggtgccgggagctgaagaggcccagaaggaacgccagcggcagaaagagctggagagcaattaccgccgggtgtggggctctccaggtggggagggcacaggggacctggacgaatttgacttctgagaccaacactacacttgacccttcacggaatccagactcttcctggactggcttgcctcctccccacctccccaccctggaacccctgagggccaaacagcagagtggagctgagctgtggacctctcgggcaactctgtgggtgtgggggccctgggtgaatgctgctgcccctgctggcagccaccttgagacctcaccgggcctgtgatatttgctctcctgaactctcactcaatcctcttcctctcctctgtggcttttcctgttattgtcccctaatgataggatattccctgctgcctacctggagattcagtaggatcttttgagtggaggtgggtagagagagcaaggagggcaggacacttagcaggcactgagcaagcaggcccccacctgcccttagtgatgtttggagtcgttttaccctcttctattgaattgccttgggatttccttctccctttccctgcccaccctgtcccctacaatttgtgcttctgagttgaggagccttcacctctgttgctgaggaaatggtagaatgctgcctatcacctccagcacaatcccagcgaaaaaggtgtgaagcacccaccatgttcttgaacaatcaggtttctaaataaacaactggaccatca

SEQ ID NO: 6903 - DNA, 600 bp, Homo sapiens
agctgtcaaatctcaaggtgaagatctaaatgtgaacagtttactaatgcactactgaagtttaaatctgtggcacaatcaatgtaagcatggggtttgtttctctaaattgatttgtaatctgaaattactgaacaactcctattcccatttttgctaaactcaatttctggttttggtatatatccattccagcttaatgcctctaattttaatgccaacaaaattggttgtaatcaaattttaaaataataataatttggcccccccttttaaaatagtcttgactctttgtgtgtgactgtttctcatgtttgaatgtgtgactaggagatgattttgtgtggttggatttttttgacttctactttactggctgagtgtgagccgccatgcctggccataatctacattttcttaccaggagcagcattgaggtttttgagcatagtacttgactactctagaggctgagacgggagcatctcttgagcctgagaagtggagattgcaattgagctaggatcaggccactgcactccagcctgggtaacagacgctgtctcaaaaaaaaggccaagagaaagtaagggagacaga

SEQ ID NO: 6904 - DNA, 600 bp, Homo sapiens
ggcggcttcctggacatcgacgtggagattacaggaccagataacaaaggaatttacaaaggagacagagaatccagtgggaaatacacatttgctgctcacatggatggaacatacaaattttgttttagtaaccggatgtccaccatgactccaaaaatagtgatgttcaccattgatattggggaggctccaaaaggacaagatatggaaacagaagctcaccagaacaagctagaagaaatgatcaatgagctagcagtggcgatgacagctgtaaagcacgaacaggaatacatggaagtccgggagagaatacacagagccatcaacgacaacacaaacagcagagtggtcctttggtccttctttgaagctcttgttctagttgccatgacattgggacagatctactacctgaagagattttttgaagtccggagagttgtttaaaaagcctcttcctgatgatcccaactcagaattcactgtttaccaaacaccttggtcataataatgtcattagtttctccatttttattttctgaactgtacattcccaacttatgtttctttgagattaatagatattgggggaaa

SEQ ID NO: 6905 - DNA, 600 bp, Homo sapiens
tctacctcttccgggatggggactttgagaacccagtcccatacactggggcagttaaggttggagccatccagcgctggctgaaggggcaaggggtctacctaggtatgcctggttgcctgcctgtatacgacgccctggccggggagttcatcagggcctctggtgtggaggcccgccaggccctcttgaagcaggggcaagataacctctcaagtgtgaaggagactcagaagaagtgggccgagcaatacctgaagatcatggggaagatcttagaccaaggggaggacttcccagcatcagagatgacacggatcgccaggctgattgagaagaacaagatgagtgacggcaagaaggaggagctccagaagagcttaaacatcctgactgccttccagaagaagggggccgagaaagaggagctgtaaaaaggctgtctgtgattttccagggtttggtgggggtagggaggggagagttaacctgctggctgtgagtcccttgtggaatataagggggtagtgggaacagtggtactaacccacgattctgagccctgagtatgcctggacattgatgctaacatgacatgct

SEQ ID NO: 6906 - DNA, 1400 bp, Homo sapiens
cttccggtaccttgctgaagttgcgtgtggtgatgatcgaaaacaaacgatagataattcccaaggagcttaccaagaggcatttgatataagcaagaaagagatgcaacccacacacccaatccgcctggggcttgctcttaacttttctgtattttactatgagattcttaataacccagagcttgcctgcacgctggctaaaacggcttttgatgaggccattgctgaacttgatacactgaatgaagactcatacaaagacagcaccctcatcatgcagttgcttagagacaacctaacactttggacatcagacagtgcaggagaagaatgtgatgcggcagaaggggctgaaaactaaatccatacagggtgtcatccttctttccttcaagaaacctttttacacatctccattccttattccacttggatttcctatagcaaagaaacccattcatgtgtatggaatcaactgtttatagtcttttcacactgcagctttgggaaaacttcattccttgatttgtgtttgtcttggccttcctggtgtgcagtactgctgtagaaaagtattaatagcttcatttcatataaacataagtaactcccaaacacttatgtagaggactaaaaatgtatctggtatttaagtaatctgaaccagttctgcaagtgactgtgttttgtattactgtgaaaataagaaaatgtagttaattacaatttaaagagtattccacataacttcttaatttctacattccctcccttactcttcgggggtttcctttcagtaagcaacttttccatgctcttaatgtattcctttttagtaggaatccggaagtattagattgaatggaaaagcacttgccatctctgtctaggggtcacaaattgaaatggctcctgtatcacatacggaggtcttgtgtatctgtggcaacagggagtttccttattcactctttatttgctgctgtttaagttgccaacctcccctcccaataaaaattcacttacacctcctgcctttgtagttctggtattcactttactatgtgatagaagtgcatgttgctgccagaatacaagcattgcttttggcaaattaaagtgcatgtcatttcttaatacactagaaaggggaaataaattaaagtacacaagtccaagtctaaaactttagtacttttccatgcagatttgtgcacatgtgagagggtgtccagtttgtctagtgattgttatttagagagttggaccactattgtgtgttgctaatcattgactgtagtcccaaaaaagccttgtgaaaatgttatgccctatgtaacagcagagtaacataaaataaaagtacattttataaaccaaaaaaaaaaaaaaaaaaa

SEQ ID NO: 6907 - DNA, 600 bp, Homo sapiens
cctcagccagcagaacatcgctgggacgtgcctggcctaaggcatcctaccaacagcaccatcaaggcacgttggagctttcttgccagaactgatctcttttggtgtgggaggacatggggtaccacctacacccaacaagtcaatgagggacttctttttaatttggtaggattttgactggttttgcaacaataggtctattattagagtcacctatgacaaaaaataggggttacctagataatgccaaagtcagcatttgtcctgggttcccttgtgtgatctgtttggactatgttttcttttcttctcccacttgctcagcagcttgggcttccattctagttcttttaccaagatttttgtgtgaccatgttgacttcatttggattgccctctttcaatttccttgtgaaaacacccttaactttctctttacccttagctgaaatgtttacatagcttctggtgatatcttctcatgattttatatctcttaaaatggtgatggatgtgacacctcataaaagtgagctttgaactgtagataactcttaaagaaaatgtcattttagacaattaaaatatttgtgctcc

SEQ ID NO: 6908 - DNA, 419 bp, Homo sapiens; identical to SEQ ID NO: 1673

SEQ ID NO: 6909 - DNA, 1305 bp, Homo sapiens; identical to SEQ ID NO: 1674

SEQ ID NO: 6910 - DNA, 1060 bp, Homo sapiens; identical to SEQ ID NO: 1675

SEQ ID NO: 6911 - DNA, 1400 bp, Homo sapiens
aggaggagaaggtagctacagcaagctgggtagcaggcagatccaaaggatatcatgaagtttccagggcctttggaaaaccagagattgtctttcctgttggaaaaggcaatcactagggaagcacagatgtggaaagtgaatgtgcggaaaatgccttcaaatcagaatgtttctccatcccagagagatgaagtaattcaatggctggccaaactcaagtaccaattcaacctttacccagaaacatttgctctggctagcagtcttttggataggtttttagctaccgtaaaggctcatccaaaatacttgagttgtattgcaatcagctgttttttcctagctgccaagactgttgaggaagatgagagaattccagtactaaaggtattggcaagagacagtttctgtggatgttcctcatctgaaattttgagaatggagagaattattctggataagttgaattgggatcttcacacagccacaccattggattttcttcatattttccatgccattgcagtgtcaactaggcctcagttacttttcagtttgcccaaattgagcccatctcaacatttggcagtccttaccaagcaactacttcactgtatggcctgcaaccaacttctgcaattcagaggatccatgcttgctctggccatggttagtctggaaatggagaaactcattcctgattggctttctcttacaattgaactgcttcagaaagcacagatggatagctcccagttgatccattgtcgggagcttgtggcacatcacctttctactctgcagtcttccctgcctctgaattccgtttatgtctaccgtcccctcaagcacaccctggtgacctgtgacaaaggagtgttcagattacatccctcctctgtcccaggcccagacttctccaaggacaacagcaagccagaagtgccagtcagaggtacagcagccttttaccatcatctcccagctgccagtgggtgcaagcagacctctactaaacgcaaagtagaggaaatggaagtggatgacttctatgatggaatcaaacggctctataatgaagataatgtctcagaaaatgtgggttctgtgtgtggcactgatttatcaagacaagagggacatgcttccccttgtccacctttgcagcctgtttctgtcatgtagtttcaacaagtgctacctttgagtgtaaactaaggtagactactttgggaatgagaacatgcaaaatcaggaaaggctgtagaaggaaatataccttaacaggctgatttggagtgagccagaaaaaaaaaataaaactctcattatttgtgtggctaattataattcagcgttatttaagcacataaagaccaaaaaaaaaaaaaaaaaaa

SEQ ID NO: 6912 - DNA, 1277 bp, Homo sapiens; identical to SEQ ID NO: 1677

SEQ ID NO: 6913 - DNA, 1400 bp, Homo sapiens
acatgaaaaattttgatgttggacatgtgccaataaggcttccaagaacaaaacacttgttaaatgtcatcaatgaaaactttggaacccttgccttctgccgcagatggctggatcgcttgggagaaagtaaatacttgatggctctgaagaatctgtgtgacttgggcattgtagatccatatccaccattatgtgacattaaaggatcatatacagcgcaatttgaacataccatcctgttgcgtccaacatgtaaagaagttgtcagcagaggagatgactattaaacttagtccaaagccacctcaacacctttattttctgagctttgttggaaaacatgataccagaattaatttgccacatgttgtctgttttaacagtggacccatgtaatacttttatccatgtttaaaaaagaaggaatttggacaaaggcaaaccgtctaatgtaattaaccaacgaaaaagctttccggacttttaaatgctaactgtttttccccttcctgtctaggaaaatgctataaagctcaaattagttaggaatgacttatacgttttgttttgaatacctaagagatactttttggatatttatattgccatattcttacttgaatgctttgaatgactacatccagttctgcacctataccctctggtgttgctttttaaccttcctggaatccattttctaaaaaataaagacacattcttctcagcaccacacaacacctattccaaaatcgaccacatatttggaagtaaagctctcctcagcaaatgtaaaagaacagaaattataacaaactgtctctcagaccacagtataaccaaactagaactcaggattaagaaactcactcaaaaccacacaactacatggaaactgaacaacctgctcctgaatgactactggatacataacaaaatgaaggcagaaataaagatgttctttaaaaccaatgagaacaaagacacaacataccagaatctctgggacacattcaaagcagtgtgtagagggaaatttatagcactaaatgcccacaagagaaagcaggaaatatctaaaattgacaccctaacatcacaattaaaagaactagagaagcaagagcaaacacattgaaaagctaagagaaggcaagaaataactaagatcagagcagaactgaaggaaatagagacacaaaaaactcttcaaaaaatcaatgaatccaggagctggttttttgaaacgatcaacaaaattgatagacactagcaagactaataaagaagaaaggagagaagaatcaaatagaagcaataaaaaatgataaaggggatatcaccaccaatcccacagaaataaaccaccatcagagaatactacaaacacctctacgcaa

SEQ ID NO: 6914 - DNA, 1400 bp, Homo sapiens
ctccctcattgctcatgcacatcgtcgtattgatcagctgaacagagagctggcagaacagaaggccaccgaaaagcagcacatcacgttagccttggagaaacaaaagctggaagaaaagcgggcatttgactctgcagtagcaaaagcattagaacatcacagaagtgaaatacaggctgaacaggacagaaagatagaagaagtcagagatgccatggaaaatgaaatgagaacccagcttcgccgacaggcagctgcccacactgatcacttgcgagatgtccttagggtacaagaacaggaattgaagtctgaatttgagcagaacctgtctgagaaactctctgaacaagaattacaatttcgtcgtctcagtcaagagcaagttgacaactttactctggatataaatactgcctatgccagactcagaggaatcgaacaggctgttcagagccatgcagttgctgaagaggaagccagaaaagcccaccaactctggctttcagtggaggcattaaagtacagcatgaagacctcatctgcagaaacacctactatcccgctgggtagtgcagttgaggccatcaaagccaactgttctgataatgaattcacccaagctttaaccgcagctatccctccagagtccctgacccgtggggtgtacagtgaagagacccttagagcccgtttctatgctgttcaaaaactggcccgaagggtagcaatgattgatgaaaccagaaatagcttgtaccagtacttcctctcctacctacagtccctgctcctattcccacctcagcaactgaagccgcccccagagctctgccctgaggatataaacacatttaaattactgtcatatgcttcctattgcattgagcatggtgatctggagctagcagcaaagtttgtcaatcagctgaagggggaatccagacgagtggcacaggactggctgaaggaagcccgaatgaccctagaaacgaaacagatagtggaaatcctgacagcatatgccagcgccgtaggaataggaaccactcaggtgcagccagagtgaggtttaggaagattttcataaagtcatatttcatgtcaaaggaaatcagcagtgatagatgaagggttcgcagcgagagtcccggacttgtctagaaatgagcaggtttacaagtactgttctaaatgttaacacctgttgcatttatattctttccatttgctatcatgtcagtgaacgccaggagtgctttctttgcaacttgtgtaacattttctgttttttcaggttttactgatgaggcttgtgaggccaatcaaaataatgtttgtgatctctactactgttgattttgccctcggagcaaactgaataaagcaacaagatg

SEQ ID NO: 6915 - DNA, 1400 bp, Homo sapiens
cccctggacatcccccaggcttccccgcagcaggttcagcgctgtgtggagatcctgagccgggccaagaggcctctgatggtgctggggagtcaggccctgctcaccccaacgtctgccgacaagcttcgggctgccgtggagaccttgggtgttccctgcttccttggagggatggcacgggggctgttaggccgcaaccaccccctccacatccgggagaaccgcagtgcggccctgaagaaggcggacgtcattgtcctagcaggaactgtgtgtgacttccgcctatcctatggccgtgtcctcagccacagcagcaagatcatcatcgtcaatcgtaatcgggaagagatgttgctcaactcagacatcttctggaagccccaggaggctgtgcagggagatgtgggttccttcgtgctgaagttagtggagggccttcagggccagacctgggccccagactgggtggaggagctgcgggaagccgaccggcagaaggagcagacctttcgggagaaggcagcgatgcctgtggcccagcacctgaacccagtgcaggtgctgcagctggtggaggaaacgctacctgacaactcaattctggtggtggatggcggggacttcgtgggcactgctgcccatctggtacagccccgcggccccctgcgctggctcgatcctggggcctttgggactctgggagttggtgcaggatttgcacttggggccaagctgtgccggccagatgctgaggtctggtgcctgtttggggacggagcttttggctacagcctcatcgaatttgatacattcgtcagacacaagatcccagtgatggccttggtagggaatgatgctggctggacacagatttctcgggagcaggtgccctctctgggcagcaacgtggcctgtggcctggcctacactgattatcacaaggcagccatgggtctgggggcccggggcttgctgctctcacgggagaacgaggatcaggtggtcaaggtgctgcacgatgcccagcagcagtgccgagacggccacccggttgtggtcaacatcctcattgggaggacggacttccgcgatggctccattgctgtatagggccttgtgggtcaggacgcttggctgccttcctgcccctggactgtgtccagctggtttggagtctcatcattgcttgccctgggcctatcccatgaggcccagtgactccacaacctccctgaggaggggatggaggggtcaaatctcagagaggctctcttgtgagctcttggaccctcctcttcacggacccaactgtgccgtttgtcccctctcttatggagactgaataaaccacctctggcccatgtaggcccaagtaaaaaaaaaaaaaaaaaaaa

SEQ ID NO: 6916 - DNA, 1400 bp, Homo sapiens
agtggtggtggaggaggaaacactcaggacgaatgtgctgagtatcaggaacaaatgaaaaatggaagactcagctgtactcgggagagtgatcctgtacgtgatgctgatggcaaatcgtacaacaatcagtgtaccatgtgtaaagcaaaattggaaagagaagcagagagaaaaaatgagtattctcgctccagatcaaatgggactggatcagaatcagggaaggatacatgtgatgagtttagaagccaaatgaaaaatggaaaacttatctgcactcgagaaagtgaccctgtccggggtccagatggcaagacacatggtaataagtgtactatgtgtaaggaaaaactggaaagggaagcagctgaaaaaaaaaagaaagaggatgaagacaggagcaatacaggagaaaggagcaatacaggagaaaggagcaatgacaaagaggatctgtgtcgtgaatttcgaagcatgcagagaaatggaaagcttatctgcaccagagaaaataaccctgttcgaggcccatatggcaagatgcacatcaataaatgtgctatgtgtcagagcatctttgatcgagaagctaatgaaagaaaaaagaaagatgaagagaaatcaagtagcaagccctcaaataatgcaaaggatgagtgcagtgaatttcgaaactatataaggaacaatgaactcatctgccctagagagaatgacccagtgcacggtgctgatggaaagttctatacaaacaagtgctacatgtgcagagctgtctttctaacagaagctttggaaagggcaaagcttcaagaaaagccatcccatgttagagcttctcaagaggaagacagcccagactctttcagttctctggattctgagatgtgcaaagactaccgagtattgcccaggataggctatctttgtccaaaggatttaaagcctgtctgtggtgacgatggccaaacctacaacaatccttgcatgctctgtcatgaaaacctgatacgccaaacaaatacacacatccgcagtacagggaagtgtgaggagagcagcaccccaggaaccaccgcagccagcatgcccccgtctgacgaatgacaggaagattgttgaaagccatgagggaaaaaataaaccccagttctgaatcacctaccttcaccatctgtatatacaaagaattcttcggagcttgtcttatttgctatagaaaacaatacagagcttttgggaatggaatcactgattttcagtcttttccatttctttcctcctagaatctgtgatctgagggtataaagacatttccaccaagtttgagccctcaaaatgtcctgattacaatgctgtctgtccaactgcctgttcaataaaagtaaactcagcag

SEQ ID NO: 6917 - DNA, 1400 bp, Homo sapiens
gaagatcatggatgatgatagctacaattcagtggatggcatggagctaacatcacaaggtgctggtacttattggtatttaccaccagagtgttttgtggttgggaaagaaccaccaaagatctcaaataaagttgatgtgtggtcggtgggtgtgatcttctatcagtgtctttatggaaggaagccttttggccataaccagtctcagcaagacatcctacaagagaatacgattcttaaagctactgaagtgcagttcccgccaaagccagtagtaacacctgaagcaaaggcgtttattcgacgatgcttggcctaccgaaagagggaccgcattgatgtccagcagctggcctgtgatccctacttgttgcctcacatccgaaagtcagtctctacaagtagccctgctggagctgctattgcatcaacctctggggcgtccaataacagttcttctaattgagactgactccaaggccacaaactgttcaacacacacaaagtggacaaatggcgttcagcagcgggtttggaacatagcgaatccgaatggatctgatgaaacctgtaccaggtgcttttattttcttgcttttttcccatccatagagcatgacagcatcgattctcattgaggagaaaccttgggcagctccggccaggccttgtaggaaaaggccccgcccgaggttccagcgtcaacggccactgtgtgtggctgctctgagtgaggaaaaaattaaaaagaaaaactggttccatgtactgtgaacttgaaaacttgcagactcaggggggtccctgatgcagtgcttcagatgaagaatgtggacttgaaaatacagactgggctagtccagtgtctatatttaaacttgttcttttcttttaataaagtttaggtaacatctcctgaaaagcttgtagcacaaaggctcagctggggatggtgtttgacttcggaggaaaaaagttgctattgcccgttaaaggcactagagttagtgttttatccctaaataatttcaatttttaaaaacatgcagcttccctctccccttttttatttttgaaagaatacatttggtcataaagtgaaacccgtattagcaagtacgaggcaatgttcattccaatcagatgcagctttctcctccgtctggtctcctgtttgcaattgcttccctcatctcagtagggaaaaaattgagtgggagtactgagatgtgtgggtttttgccattggacaaagaatgaggttagaagactgcagcttggagtctctctaggttttcaactatttcttcacaatttgaacacttgacggttgtcccttttaatttatttgaagtgctatttttttaaataaaggttcatctgtccatgcaaaaaaa

SEQ ID NO: 6918 - DNA, 1186 bp, Homo sapiens; identical to SEQ ID NO: 1683

SEQ ID NO: 6919 - DNA, 1400 bp, Homo sapiens
cctgttcaccaacttcatctccatctacaacacagtaatgaaggtggtttttctcctctgtgcctatgttacagtgtacatgatatatgggaaattccgtaaaacttttgacagtgagaatgacacattccgcctggagtttcttctggtcccagtcattggcctttccttccttgaaaactacagtttcactctgctggagatcctctggactttctctatctatctggaatcagtggctatcctgccccagctcttcatgatcagcaagactggagaggctgagaccataactactcactacctgttctttctgggtctgtaccgggcactctacctggctaactggatcaggcggtaccagactgagaatttctatgaccaaattgcagtcgtgtctggagtagtacaaaccatcttctactgtgacttcttctacttgtatgtgaccaaagtccttaagggaaagaagttaagtcttccaatgccaatctgaggaccttcagagacagtctacgccttaacaagcacatgaaggaaactattttgaatgttctctttggcaacttatccataatttgggatcaaatgttaaaaccagaaaagtgtttagtgtggatttcagcaaaacctgatcatcccacccagaagaccttctcatcaatagatcgcccttaaagacccattgtaaggtcataaaaaacctcggccacctgcacaaagatggtgcctcactgcaacaagaaaccttaaggtgtcttaccgacgaaataaaaaacataaatgattgttctccaaggcctgagggcaagactcatgatgagcaagtcaaccccaatctggaacaatgtccctcctcttagaatgtcccaactaaagaccagttaaaatattagggtacgttcttgtgaatttccactttccaggtagatgaccaaatttaggtggtcaagatataaaggtgtcagctagttttaagtgtgaaacttatttcactttcacactgccttcaggccagaagcaaaccaaatttaccaggtttggctggaggagttttgtgactcatcttttactggtttgaattttttcaaaccagtggctgatacctgccttgtacttagtaccttaataccaataacctaatggtacttaggcgagtaccatttgcacaatcactgttttacttatgagcagatacagatatatccaaacccttacctactaggtatcctgctagggttttcaattccaattcttgtattaagttttttcctttcagttttaggtgcgaaagtaatcagtcaatccaatatcccccatctttgtcttgaaacaaaaactgttttaagacgtctacgttgaattattcagagaattaagcaataaaagctcacacctta

SEQ ID NO: 6920 - DNA, 600 bp, Homo sapiens
tggtggctgtgctgcaggtctgcacgctcaagcgcttcttccaggacaagcgcccggtgcccacgtagcccctgccatggaaggaagaacgggacaaaggaggggcagcagggtgtgtgcatatgagacttgggggtccctccccaattttagtttcctgccaaaacgggagtgtgcagtcagggcctgcggtctggccccatgagtctccttccgtcctcagcgggcagggaacacctctggcttgtagaagggacggctcagtggctgcaccgacggtcctggaaatctcacatggtgggcactgcagcgttggaacgtgagcctcggatttcctggcccctctactgtaaatgtgccttagcctaagcctcccatcctgtgttagcgttgcctggtgcggggcagggcctaacaaggaaacctgggccctccaagccaggttgaggtctggtaacagaatgccaggaagggggcctggaagaccacctgccccggcccctctcctgcaggggccccacacaggcatgagggatggcccggccaaagtctaggcagaagcctcctataacaaagggtggtgtggcctgggcattggag

SEQ ID NO: 6921 - DNA, 1400 bp, Homo sapiens
ctcccccgcgtccctgcgaccgccgcggcgaagatggcctcaggagtgcaagtagctgatgaagtatgtcgcattttttatgacatgaaagttcgtaaatgctccacaccagaagaaatcaagaaaagaaagaaggctgtcattttttgtctcagtgcagacaaaaagtgcatcattgtagaagaaggcaaagagatcttggttggagatgttggtgtaaccataactgatcctttcaagcattttgtgggaatgcttcctgaaaaagattgtcgctatgctttgtatgatgcaagctttgaaacaaaagaatccagaaaagaagagttgatgttttttttgtgggcaccagaactagcacctctgaaaagtaaaatgatctatgcaagctccaaggatgcaattaaaaagaaatttcaaggcataaaacatgaatgtcaagcaaatggaccagaagatctcaatcgggcttgtattgctgaaaagttaggtggatccttaattgtagcctttgaaggatgccctgtgtagattattcagtgccacaaattgaaagcttccatgtttaatgttatcctcttgctatataaataaagcaaatatatttaggccagggtctcactgagggggagctgtcttgtcatcttttagagtaaactattctataaacatatgcaaacagccctaaataaatctaaagtctaaagttttattgatgtgaaattaaattcttattggccaaatgcctgttttgatgagttgatttataaagatttttgttaagctcaggattttaaattacacagttcacaaacagtaaaggccatgtgaagagaattattacatctttattaacctcagcatttactttgtttcttttgcttaggaaattgctcataatctggttataattttggtccaaattctttattcttccttgagctaagcagaataatggaatataatatgtcttcataatataacaacactaatacactaatagtaagattaagttaggcagtcttctaccaaatgtgtaatggagattgcctcaaaattgtgtccacataatccacgctcatcttgcaaagcgctatttcaggcacatcattggaatacaggaagtagccctgcacctgccagtgagctcgccattcactgattggaagagtgacctggcatcttggaaatcattgtgtgtcttcaggagaatgtgcagtgtcttgtaacaactaattaataatgcaaattagggctacattgtaatctgctttgttaatgaaaatgataaaacagaatattgacaagctaggacacctgtggtatctttaattgtatctccttcagaagtttgcttcttatggtataataaagtatggaagaataaaaaaaaaaaaaaa

SEQ ID NO: 6922 - DNA, 434 bp, Homo sapiens; identical to SEQ ID NO: 1687

SEQ ID NO: 6923 - DNA, 1400 bp, Homo sapiens
ccgaggacgtgagggtggagggctcctttcccgtgaccatgcttccgggagacggtgtggggcctgagctgatgcacgccgtcaaggaggtgttcaaggctgccgctgtcccagtggagttccaggagcaccacctgagtgaggtgcagaatatggcatctgaggagaagctggagcaggtgctgagttccatgaaggagaacaaagtggccatcattggaaagattcataccccgatggagtataagggggagctagcctcctatgatatgcggctgaggcgtaagttggacttatttgccaacgtagtccatgtgaagtcacttcctgggtatatgactcggcacaacaatctagacctggtgatcattcgagagcagacagaaggggagtacagctctctggaacatgagagtgcaaggggtgtgattgagtgtttgaagattgtcacacgagccaagtctcagcggattgcaaagttcgcctttgactatgccaccaagaaggggcggggcaaggtcactgctgtccacaaggccaacatcatgaaacttggggatgggttgttcctgcagtgctgtgaggaagttgctgaactgtaccccaaaatcaaatttgagacaatgatcatagacaactgctgcatgcagctggtgcagaatccttaccagtttgatgtgcttgtgatgcccaatctctatgggaacattattgacaatctggctgctggcctggttgggggagctggtgtggtccctggtgagagctatagtgcagaatacgcagtctttgagacgggtgcccggcacccatttgcccaggcagtgggcaggaatatagccaatcccacggccatgctgctgtcggcttccaacatgctgcggcatcttaatcttgagtatcactccagcatgatcgcagatgcggtgaagaaggtgatcaaagttggcaaggtgcggactcgagacatgggcggctacagcaccacaaccgacttcatcaagtctgtcatcggtcacctgcagactaaagggagctagagccctttatttcttccaaccttgcaaggaccacactccccatacccttcagtgcagtgtaccagggaagagaccttgtgcctctaagcagtggaccatggtcaccccttgctgggtagagcctaggttgtccttgggccggcttccttaggggacagactgttgggtggtgatggggattgttaggatggagcccaggccacatggatgatgatgattctcccccacaggttcgaacctctgacatgggtggctatgctacttgccatgacttcactgaggctgtcattgctgccttgccccacccataggccctgtccatacccatgtaaggtgttcaataaagaacatgaaccaaaa

SEQ ID NO: 6924 - DNA, 600 bp, Homo sapiens
ctcaccactgttcttatctctatagtgatgaaacattaattagggatcttgctgcttttctttttctacacgaagttttcattaaagccacagaataattgatagggcagctgtttgagaacaggtcccattttcacattagggctttaaatgaattagaaactatttgaggctataaaaatgtccttgagtttggagcctgagctctggtgaaatgctgatacatctgatctatcatgggaattgcagttagagagagtaaggaataccatttagtcatctatccgttcttcacttagcaggaatatgaaagaaaggcacatgtttaagaggaatacctaaaggtttttctaaattccaacatttaaaaggcaattgtgggctatttttattttttaatattttgaaataaagtttagtgtctagggctgggagccaggactgatcttccatttctttttctttgttcccagccatgcttttgtaacttgccaggtggacttgaccaactacattaccatgctgtgcctcagtttacccatttgtaaaatgggattaataatacttacctacctcacaggggtgttgtgaggctctatt

SEQ ID NO: 6925 - DNA, 600 bp, Homo sapiens
ctttcttctctgctcccaaaccatgtcaggaccaccttcctctagagctcgggagcccggagggtcttcacccactcctactccagtatcagctggcacgggctccttcctgagagcaaaggtcaaggaccccctctgtgaaggctcagcagaggtgggatcccacgccccctcccggcccctccctgccctccattcagggagaaacctctccttcccgtgtgagaagggccagagggtccaggcatcccaagtccagcgtgaagggccacagcccctcttggctgccaagcacgcagatcccatggacatttggggaaagggctccttgggctgctggtgaacttctgtggccaccacctcctgctcctgacctccctgggagggtgctatcagttctgtcctggccctttcagttttataagttggtttccagcccccagtgtcctgacttctgtctgccacatgaggagggaggccctgcctgtgtgggagggtggttactgtgggtggaatagtggaggccttcaactgattagacaaggcccgcccacatcttggagggcatctgccttactgattaaaatgtcaatgtaatct

SEQ ID NO: 6926 - DNA, 579 bp, Homo sapiens; identical to SEQ ID NO: 1691

SEQ ID NO: 6927 - DNA, 600 bp, Homo sapiens
aagtgagggttttctgaacccagagttattagagacttctaggaaatcaagagaacctacaggtgttgaagaaaataaaacagactcattgtttgttctcccaagtagagatgatgccacacctgttagagatgaaccaatggatgcagaatcaatcacttttaaatcagtgtctgaaaaagacaagagagaaagggataaaccaaaagcaaagggtgataaaaccaaacggaagaatgatggatctgctgtgtccaaaaaagaaaatattgtaaaacctgctaaaggaccccaagaaaaagtagatggagacgtgagagatctcctcgatctgaacctccaattaaaaaagccaaagaggagactccgaagactgacaatactaaatcatcatcttcctctcagaaggatgaaaaaatcactggaacccccagaaaagctcactctaaatcagcaaaagacaccaagaaacaaaaccagtcaaagaggaaaaagtgaagaaggactattccaaagatgtcaaatcagaaaagctaacaactaaggaagaaaaggccaagaagcctaatgagaaaaacaaaccacttgataataagggag

SEQ ID NO: 6928 - DNA, 543 bp, Homo sapiens; identical to SEQ ID NO: 1693

SEQ ID NO: 6929 - DNA, 1400 bp, Homo sapiens
cccccaaatcttacagccatttattaatggctcagctcatcatacagaccaccatatgttctttgactataattatggacaatatttcactttgtgggataggattggcggctcattcaaaaatccttcatcctttgaggggaagggaccgctcagttatgtgaaggagatgacagagggaaagcgcagcagcccttcaggaaatggctgtaagaatgaaaaattattcaatggagagtttacaaagactgaatagattattgcccagttattcttaagtaaggacaaagaaggaaatatcatcgtatttcttttttttaataaggaaaaaataatctccatacagtcaagatacatagtaaatggtatcatttggaaatcagcatcgtgggcactgctgaggaatgatcctagtggtaggtcagaagaagatgctgtgaacaccaggactttaatcttatgcttaaaatgccagatgttgttcgggccccaacttgtatttctagcagcagatctgtagtttgtatagcctcaacaacaattttaaataagatggagaataaattattgaggggactaggctatatgcatttgccttcatccacccatgtttattaagaatcattgtgcttaataataccaagactaagcaccataaccaagaaatactaatgtaaagattgtttcttgtttcaggaatggttaattcttcaacgttggtatgataatgataacttgttttgacttgaataaagtactacatcagtgtggaaaaaaattctgatacattagcagctatgtaaatgacctaattgatagcaggtgtaataagactatcgtcttcctacacataggaggctcattctctggacacactatcacctattacattttactgattaacaaataaattggaatttaaaaatatcgatatcaccatgatttaatccagatctgggattatgtagctaaacattgtgatgattattatttaaaaccattatttaataagagtaaaaatatgtgaatctggatatatttaaaaaaagaaatttgattgcccagataatatattaggcactactgattttttagttaaattgatgcactacacttttgatgtttgaagttacaacctgtaatttttttgtaaaggaaataattgccaaatacctaggcccattgctgacgattagttctaaaatcttattcctcctcttctcccctcacttttccctacttcctctgcaaaaagatttaacaaatacattcataaggaaatgtgtgttgtaacaaatatattgcaaaaacatagtttgtaaaggcattctataagctatttatgtaaaatcaataaaagttgatcataattaaactgtaaaaaaaaaaaaaaaggcggc

SEQ ID NO: 6930 - DNA, 1400 bp, Homo sapiens
aggaaatgttcatcaccagtttcaaaagcttctgactgaattcaacaaatccactgatgcatatgagctgaagatcgccaacaagctcttcggagaaaaaacgtatctatttttacaggaatatttagatgccatcaagaaattttaccagaccagtgtggaatctgttgattttgcaaatgctccagaagaaagtcgaaagaagattaactcctgggtggaaagtcaaacgaatgaaaaaattaaaaacctaattcctgaaggtaatattggcagcaataccacattggttcttgtgaacgcaatctatttcaaagggcagtgggagaagaaatttaataaagaagatactaaagaggaaaaattttggccaaacaagaatacatacaagtccatacagatgatgaggcaatacacatcttttcattttgcctcgctggaggatgtacaggccaaggtcctggaaataccatacaaaggcaaagatctaagcatgattgtgttgctgccaaatgaaatcgatggtctccagaagcttgaagagaaactcactgctgagaaattgatggaatggacaagtttgcagaatatgagagagacacgtgtcgatttacacttacctcggttcaaagtggaagagagctatgacctcaaggacacgttgagaaccatgggaatggtggatatcttcaatggggatgcagacctctcaggcatgaccgggagccgcggtctcgtgctatctggagtcctacacaaggcctttgtggaggttacagaggagggagcagaagctgcagctgccaccgctgtagtaggattcggatcatcacctacttcaactaatgaagagttccattgtaatcaccctttcctattcttcataaggcaaaataagaccaacagcatcctcttctatggcagattctcatccccgtagatgcaattagtctgtcactccatttggaaaatgttcacctgcagatgttctggtaaactgattgctggcaacaacagattctcttggctcatatttcttttctttctcatcttgatgatgatcgtcatcatcaagaatttaatgattaaaatagcatgcctttctctctttctcttaataagcccacatataaatgtactttttcttccagaaaaattctccttgaggaaaaatgtccaaaataagatgaatcacttaataccgtatcttctaaatttgaaatataattctgtttgtgacctgttttaaatgaaccaaaccaaatcatactttttctttgaatttagcaacctagaaacacacatttctttgaatttaggtgatacctaaatccttcttatgtttctaaattttgtgattctataaaacacatcatcaataaaatagtgacataaaatca

SEQ ID NO: 6931 - DNA, 1400 bp, Homo sapiens
gacgatactctgaccgttttagtagtcgcagacctcgaaatgatagacggtatgtgaagggtggatggctgcattgaacaattattgtaggggtagcatttaagattcaggagtcattagcagtgatgattttgggacctgccgtataatctgttcttctattcccacgttagccaattgttcttgatgaatctatatgagtcatagaacacaaatctattgacggaagtcattagaatggcttgtgatatctgatggcttgaacttgcccacagttgaacacaagtgctgtcattgcatttcttccattgtgaatacgaattttcttcctcagaaatgctccacctgtaagaacagaaaatcgtcttatagttgagaatttatcctcaagagtcagctggcaggatctcaaagatttcatgagacaagctggggaagtaacgtttgcggatgcacaccgacctaaattaaatgaaggggtggttgagtttgcctcttatggtgacttaaagaatgctattgaaaaactttctggaaaggaaataaatgggagaaaaataaaattaattgaaggcagcaaaaggcacaggtcaagaagcaggtctcgatcccggaccagaagttcctctaggtctcgtagccgatcccgttcccgtagtcgcaaatcttacagccggtcaagaagcaggagcaggagccggagccggagcaagtcccgttctgttagtaggtctcccgtgcctgagaagagccagaaacgtggttcttcaagtagatctaagtctccagcatctgtggatcgccagaggtcccggtcccgatcaaggtccagatcagttgacagtggcaattaaactgtaaataacttgccctgggggcctttttttttaaaaaacaaaaaccacaaaaattcccaaaccatacttgctaaaaattctggtaagtatgtgcttttctgtgggggtgggatttggaaggggggttgggttgggctggatatctttgtagatgtggaccaccaaggggttgttgaaaactaattgtattaaatgtcttttgataagccttctgctcacatttttgtgaatgtctgaagtatatagtttgtgtatattgacagagctcttttataactaaagcaaatttaatttttttgtactagaaaaaaatttgaacattttagttcttggttataaaaatgttaattcagaattagtttaatgccttaattaaactaattaatagctttggacacttaaaagagctctaaatttgcttgtacataaaggcttaatttgttttccttgttagggtcaagggtgtcctccactctttaacagctgctggacagacacattagagcagctgtttgttattgataataaaatattataaaacta

SEQ ID NO: 6932 - DNA, 600 bp, Homo sapiens
ggattggcacaaccaaaattggcctttttctccctcttaatattgaagaaattcccacatttctcatttggtaatggtgttgtggcctcagatttcttctagtatttgcttctgatgaatgattatggtctatacataaaaaagtaagactaagtattgctgaatttgcagttatgttgtcgtgtataagagctacttccaagtgtggttacaaatgaacccatggaatgatgacttcatgttcttctcgtgggtttgtgccgtgctgctttccaaataggtattgaatttatgcattagtctggtgatttcagttctgtgaaatattttgggatctataccaattaaacattttcatagttctgcctattgtccttccctgaggctccattgctgcttggtggccattctctgcctttttacagtcacctgaacaatgacccatcatctcttgcttgcttgaaatcttgctgaaatgttctcatttcctgtttgctgtatgggctcgggtgggatgtttgttggctctgttgtgtttattcaccaatttgtacattatttgttgtcctttactactgtaaacagtaaatatagtttggt

SEQ ID NO: 6933 - DNA, 600 bp, Homo sapiens
  misc_feature (515)..(515): n is a, c, g, or t
  misc_feature (565)..(565): n is a, c, g, or t
  misc_feature (570)..(570): n is a, c, g, or t
gtggtgcagtttaagattaagaggcatacaccacttagtaaactaatgaaagcctattgtgaacgacagggattgtcaatgaggcagatcagattccgatttgacgggcaaccaatcaatgaaacagacacacctgcacagttggaaatggaggatgaagatacaattgatgtgttccaacagcagacgggaggtgtctactgaaaagggaacctgcttctttactccagaactctgttctttaaagaccaagattacattctcaattagaaaactgcaatttggttccaccacatcctgactactaccgtatagttttctctattctttcatttcccccttccccattcctttattgtacataaagtaactggtatatgtgcacaagcatattgcattttttttttttttaactaaacagccaatggtatgttttgattgacatccaagtggagacggggatggggaaaaatactgattctgtggaaaatacccccctttctcccattagtggncatgctccattcagcccttaaacctttataatcccaggtaaggtaatttngcccncaccggttttacccaaaaaaaaaaaaactt

SEQ ID NO: 6934 - DNA, 636 bp, Homo sapiens; identical to SEQ ID NO: 1699

SEQ ID NO: 6935 - DNA, 600 bp, Homo sapiens
ggacctggtgcacgtggcggcccacgagatcggccacgcgctgggcctgatgcactcacaacacggccgggcgctcatgcacctgaacgccacgctgcgcggctggaaggcgttgtcccaggacgagctgtgggggctgcaccggctctacggatgcctcgacaggctgttcgtgtgcgcgtcctgggcgcggaggggcttctgcgacgctcgccggcggctcatgaagaggctctgccccagcagctgcgacttctgctacgaattccccttccccacggtggccaccaccccaccgccccccaggaccaaaaccaggctggtgcccgagggcaggaacgtgaccttccgctgcggccagaagatcctccacaagaaagggaaagtgtactggtacaaggaccaggagcccctggagttctcctaccccggctacctggccctgggcgaggcgcacctgagcatcatcgccaacgccgtcaatgagggcacctacacctgcgtggtgcgccgccagcagcgcgtgctgaccacctactcctggcgagtccgtgtgcggggctgagcccggctgataaagcactttctctctgaaaaaaa

SEQ ID NO: 6936 - DNA, 1070 bp, Homo sapiens; identical to SEQ ID NO: 1701

SEQ ID NO: 6937 - DNA, 1400 bp, Homo sapiens
gctggcagggtcctccagactggcaaggtcctcctgactggccgctaccacccgactggccactgccacctgattggccacttcccactgactggccactaccacctgactggatccccgctgattggccaattccacctgactggcagaacctgcgcccctcgcctaacctgcgcccttctcccaactcgcgtgcctcacagaacccaggtgctgcacagccccgagatgtggcccttcttcaggaaagagcaaataagttggtcaagtacttgatgcttaaggactacacaaaggtgcccatcaagcgctcagaaatgctgagagatatcatccgtgaatacactgatgtttatccagaaatcattgaacgtgcatgctttgtcctagagaagaaatttgggattcaactgaaagaaattgacaaagaagaacacctgtatattctcatcagtacccccgagtccctggctggcatactgggaacgaccaaagacacacccaagctcggtctcctcttggtgattctgggtgtcatcttcatgaatggcaaccgtgccagtgaggctgtcctctgggaggcactacgcaagatgggactgcgtcctggggtgagacatcccctccttggagatctaaggaaacttctcacctatgagtttgtaaagcagaaatacctggactacagacgagtgcccaacagcaaccccccggagtatgagttcctctggggcctccgttcctaccatgagactagcaagatgaaagtgctgagattcattgcagaggttcagaaaagagaccctcgtgactggactgcacagttcatggaggctgcagatgaggccttggatgctctggatgctgctgcagctgaggccgaagcccgggctgaagcaagaacccgcatgggaattggagatgaggctgtgtctgggccctggagctgggatgacattgagtttgagctgctgacctgggatgaggaaggagattttggagatccctggtccagaattccatttaccttctgggccagataccaccagaatgcccgctccagattccctcagacctttgccggtcccattattggtcctggtggtacagccagtgccaacttcgctgccaactttggtgccattggtttcttctgggttgagtgagatgttggatattgctatcaatcgcagtagtctttcccctgtgtgagctgaagcctcagattccttctaaacacagctatctagagagccacatcctgttgactgaaagtggcatgcaagataaatttatttgctgttccttgtctactgctttttttccccttgtgtgctgtcaagttttggtatcagaaataaacattgaaattgcaaagtgaaaaaaaaaaaaaaaaaaaa

SEQ ID NO: 6938 - DNA, 1400 bp, Homo sapiens
ggaggggtgttatctcatgagagctgtgatcctttaaagaaacctaaacatttcatagacttttgcacaatggcagaatgcagttaagtggtttaagtggtgttagctttgagggcaaggcaaagtgaggaagggctggtgcagggaaagcaagaaggctggagggatccagcgtatcttgccagtaaccagtgaggtgtatcagtaaggtgggattatgggggtagatagaaaaggagttgaatcatcagagtaaactgccagttgcaaatttgataggatagttagtgaggattattaacctctgagcagtgatatagcataataaagccccgggcattattattattatttcttttgttacatctattacaagtttagaaaaaacaaagcaattgtcaaaaaaagttagaactattacaacccctgtttcctggtacttatcaaataacttagtatcatgggggttgggaaatgaaaagtaggagaaaagtgagattttactaagacctgttttactttaccttcactaacaatggggggagaaaggagtacaaataggatctttgaccagcactgtttatggctgctatggtttcagagaatgtttatacattatttctaccgagaattaaaacttcagattgttcaacatgagagaaaggctcagcaacgtgaaataacgcaaatggcttcctctttccttttttggaccatctcagtctttatttgtgtaattcattttgaggaaaaaacaactccatgtatttattcaagtgcattaaagtctacaatggaaaaaaagcagtgaagcattagatgctggtaaaagctagaggagacacaatgagcttagtacctccaacttcctttctttcctaccatgtaaccctgctttgggaatatggatgtaaagaagtaacttgtgtctcatgaaaatcagtacaatcacacaaggaggatgaaacgccggaacaaaaatgaggtgtgtagaacagggtcccacaggtttggggacattgagatcacttgtcttgtggtggggaggctgctgaggggtagcaggtccatctccagcagctggtccaacagtcgtatcctggtgaatgtctgttcagctcttctgtgagaatatgattttttccatatgtatatagtaaaatatgttactataaattacatgtactttataagtattggtttgggtgttccttccaagaaggactatagttagtaataaatgcctataataacatatttatttttatacatttatttctaatgaaaaaaacttttaaattatatcgcttttgtggaagtgcatataaaatagagtatttatacaatatatgttactagaaataaaagaacacttttggaaaaaaaaaaaaaaaaaaaaa

SEQ ID NO: 6939 - DNA, 1400 bp, Homo sapiens
agcctcctaggaaagtggggatcttcctggactatgagactggagagatctcgttctataatgccacagatggatctcatatctacacctttccgcacgcctctttctctgagcctctatatcctgttttcagaattttgaccttggagcccactgccctgaccatttgcccaataccaaaagaagtagagagttcccccgatcctgacctagtgcctgatcattccctggagacaccactgaccccgggcttagctaatgaaagtggggagcctcaggctgaagtaacatctctgcttctccctgcccaccctggagctgaggtctccccttctgcaacaaccaatcagaaccataagctacaggcacgcactgaagcactttactgatattcattccattattccatatgacagttgttttgagtttcgtaccaccttattgtccccttatacagataaggaaactggggtgcagaaaggtgaattaactttacaaagtagacatgacaagtgaacagcagagctgggatctaaacagcaataactaacattaacagagaatttaaaatgttcttagtgctgtgttataagctttggtggatgtcactcctttaatcctcacaacaccctgtcgggtagtcatattttgcaagtatggaagctgaggcagggcaacatgaagtaacttacataattcatacagtaatttgtgcagttgggagatgttcagccttagtccctggctaattgcctgttcttttccagcctgattttttttcccacaggaagagcccacatgtagccctgaggtttccttcccaggacagctgcagggtagagatcattttaagtgcttgtggagttgacatccctattgactctttcccagctgatatcagagacttagacccagcactccttggattagctctgcagagtgtcttggttgagagaataacctcatagtaccaacatgacatgtgacttggaaagagactagaggccacacttgataaatcatggggcacagatatgttcccacccaacaaatgtgataagtgattgtgcagccagagccagccttccttcaatcaaggtttccaggcagagcaaataccctagagattctctgtgatataggaaatttggatcaaggaagctaaaagaattacagggatgtttttaatcccactatggactcagtctcctggaaataggtctgtccactcctggtcattggtggatgttaaacccatattcctttcaactgctgcctgctagggaaaactgctcctcattatcatcactattattgctcaccactgtatcccctctacttggcaagtggttgtcaagttctagttgttcaataaatgtgttaataatgaaaaaaaaaaa

SEQ ID NO: 6940 - DNA, 600 bp, Homo sapiens
tgcactgtgtatggtccgtgtagattgatgcagattttctgaaatgaaatgtttgtttagacgagatcataccggtaaagcaggaatgacaaagcttgcttttctggtatgttctaggtgtattgtgacttttactgttatattaattgccaatataagtaaatatagattatatatgtatagtgtttcacaaagcttagacctttaccttccagccaccccacagtgcttgatatttcagagtcagtcattggttatacatgtgtagttccaaagcacataagctagaagaagaaatatttctaggagcactaccatctgttttcaacatgaaatgccacacacatagaactccaacaacatcaatttcattgcacagactgactgtagttaattttgtcacagaatctatggctgaatctaatgctccaaaaatgttgtttgttgcaaataccaacattgttatgccagaaattttattccaaatgagattatccatgtggttaactggactgacctaaacgtggaatgcatgtgactgtaaagcaagtccataagcttgcttaaaaaaaaaaaaaaaagggggaggttcctgggggt

SEQ ID NO: 6941 - DNA, 600 bp, Homo sapiens
cccaggaggccctgcagttcccccgacccgcggatggcagtctggaataaagccccctagttgcctttggccccacctttgcaaagttccagagggctgaccctctctgcaaaactctcccctgtcctctagaccccaccctgggtgtatgtgagtgtgcaagggaaggtgttgcatccccaggggctgccgcagaggccggagacctcctggactagttcggcgaggagactggccactgggggtggctgttcgggactgagagcgccaagggtctttgccagcaaaggaggttctgcctgtaattgagcctctctgatgatggagatgaagtgaaggtctgagggacgggccctggggctaggccatctctgcctgcctccctagcaggcgccagcggtggaggctgagtcgcaggacacatgccggccagttaattcattctcagcaaatgaaggtttgtctaagctgcctgggtatccacgggacaaaaacagcaaactccctccagactttgtccatgttataaacttgaaagttggttgttgtttgttaggtttgccaggtttttttgtttacgcctgctgtcactttcctgtc

SEQ ID NO: 6942 - DNA, 1328 bp, Homo sapiens; identical to SEQ ID NO: 1707

SEQ ID NO: 6943 - DNA, 1400 bp, Homo sapiens
tggattttcagtttctattaaaataaggatcaatgatgaccttaaaagaactgtagatctttgtcaaaaggctgaagcaacaggagtttcatggattacagtccatggaagaactgctgaagaaagacatcagccagtgcactatgattccattaaaataattaaggaaaatatgtgtatacctgtaattgctaatggagacatcagaagcttaaaggaagcagaaaatgtgtggcggattactgggacagatggtgtgatggttgcaagaggactcttagcaaacccggccatgtttgctggatatgaggaaaccccactgaaatgcatctgggactgggttgacattgctcttgaactcgggactccttacatgtgtttccatcaacatttaatgtacatgatggaaaagataacttcaaggcaggaaaaaagggtatttaatgctctgtcaagcacatcagcaatcatagattaccttacagaccattatggcatttgactagacttcccaaataattttaatatatacttttagacccacagtgaaaccacagaaggtcatattttgtaccttaaaccagtagctctcaaattttagtataaaaacaattcctgggagcgttttttaaaaatcagttgtagacaccaccctcagagattctgattaggtagatctggagtagacccagaaatacacagtttaaagaaaacccagtggttcaaacatcctgatcatcctaggcaaacattgacaaatactgctctgaatcctgttctatagatattggggggatgggtagagtgggaattttttcctaatcatgtttttaacattttaaaataaaatttaatactaagaaattatggcttatagtatctataaattaacaagaagtatgcaggtgcaaaaaagtggtggaacaaataccaacatccatccaaaatgaaaaagaacaggaaattctgaatagaattgcactcagaacttatattaaaaattccatttggttaatgacattaaatttggtacatttcaaaacttctggtcctccaaagattgaaagcttaataatagctcctagctaaaaagataaaattaattgcaatctaccatatcttaaggtataggaaatttggtgtcaacctggagatgattatatatttgaaatatttcctagagaatagtaaccaggttttgtttttaactttaaaacctaattacttttgtgcctctcagccgttgattgtaactttaaatgccatggtttggagtgttattaatagattttgttatcggtgggcatgcactgcaagaattaagtatctcagactgaaataaaaccgtgataataagtatattgttgccacagaaactgtataggaacataaaaaaaaaa

SEQ ID NO: 6944 - DNA, 1067 bp, Homo sapiens; identical to SEQ ID NO: 1709

SEQ ID NO: 6945 - DNA, 600 bp, Homo sapiens
ctcagtgctaccatccccacccctacaccacttccacacaggggcctcatggcatggtcagggtcccagctgtgggtgagagcagggcactgtccagctgtccactggggaagtcaagatgtcctaaggcccaggccagggcatctggagtctgaaggaccctagttcctagaggcatctggcagcaagaaggtgaggcatcagggaacgggaatcaggctgggactgatcagaggtgaagggacagagagaggagaggaggaagattgagctggggcaacagccaagctcacctggcaggtctctgccacctccttctctgtgagctgtcagtctaggttattctctttttttgtggctatttttaattgctttggatttgttaaatgttttctgtcttctgttaagtgtgttttctctggagatagaatgtaaaccatattaaaaggaaaaagtttcagacaagcaattacccagtttccttatctataaaatggggacatcagcaatgttcttcacaccctgcaagggctgggaattgcgcatgtgaacttggagctgcatttatgagcactgtagacaaatgtttgtatctgtcac

SEQ ID NO: 6946 - DNA, 600 bp, Homo sapiens
tgagccattgttaacaatgccttttttcttcacataaagtagttgattacgagggagtcaaattttctttttaaaaaggagcttcaatgatttgtaactgaaatatcaggttctagaagaaactggcgcttaaaccaaatcgcatggatttctttttcagtgacgttaagtgtttctcacggatggaattctagtcagctgcaggcgggaagccaggcgggtggagcccatgggagcaagggcgagtggccggtccccgctgtgccaggtgggcaggcaggagcaaggcctgcgagggaggaacgggccgctccccgccagccgccttccccagcagccgcaggtggtgccagccactccacagagcccgagggatgatctagcctgattcctgcgtgtccgaaagaacttaacgttttaaaggtgattgtcaagtaactgtgtggggttctaatgccagtttcctaattccatctcactggagatgtttaaagttggcctctatcctaatgactcaaaacttggttcttaactaccatgattgcttttgagggcccggaattataaatatatattatattttaaaaaaaaaaaaaaaaa

SEQ ID NO: 6947 - DNA, 600 bp, Homo sapiens
  misc_feature (481)..(481): n is a, c, g, or t
  misc_feature (551)..(551): n is a, c, g, or t
  misc_feature (564)..(564): n is a, c, g, or t
  misc_feature (575)..(575): n is a, c, g, or t
gtcaaatacaccttctttgttcctaatgacgtggactttagcatgcagagcagcaaagagagagcaaccaccaacatcatccagccgctgctccacgcacagtgggtgctgggggactggtctgagtgctctagcacctgcggggccggctggcagaggcgaactgtagagtgcagggacccctccggccaggcctctgccacctgcaacaaggctctgaaacccgaggatgccaagccctgcgaaagccagctgtgccccctgtgattcaggggggcaggggccagtcttgtgctcctggacatgcggtactgaggtgcagacaaggtctccactgtggtgactgggtcccttggccatatcaaggcagcacggcccacccaggcctcccattgccgcaacccctccagtactgcacaaattcctaagggggaagagaaaaggtatggggcggcaaaacctatcatcaactgtccawtgnaatggaacttgctcgggttcaattaaaggcataagttaaagtaaattcattatgatcaacagacctcacntcatctgttgcangatacaactantaaaaaaaaaaaaaaaaaaaaaaaa

SEQ ID NO: 6948 - DNA, 600 bp, Homo sapiens
tgcaaagagaattaggagagaggttaatgttacttttttccattttggaaataattttaatcaagtaactcaaatgtgacaaaatttatttttattttttgtggttatattcccaacaacattaaaaaatactcgaggcataaatgtagttgtctcctactctgcttctcttactatactcatacatttttaatatggtttatcaatgattcatgtttccctcaaatagtgatggtttacacctgtcatggaaacaatcctagagagctcagagcaattaaaccactattccatgcttttaagtagttttctccacctttttcttatgagtctcactagattgactgaggaatgtatgtctaaattcctggagaagatgatatggattggaaactgaaattcagagaaatggagtgttcaatagataccacgaattgtgaacaaagggaaaattctatacaactcaatctaagtcagtccactttgacttcgtactgtctttcacctttccattgttgcatcttgaattttttaaaatgtctagaattcaggatgctaggggctacttctccaaaaaaaaaaaaaaaaaaaaaaaaaaaa

SEQ ID NO: 6949 - DNA, 600 bp, Homo sapiens
  misc_feature (501)..(501): n is a, c, g, or t
  misc_feature (522)..(522): n is a, c, g, or t
  misc_feature (556)..(556): n is a, c, g, or t
  misc_feature (588)..(588): n is a, c, g, or t
tagggccaggcatttttttctggattcaaacaggcaacaatgaccttttattttctgtttgtccccacctccccaggcttccacctcctgttcttcctaccttcttcctttttgactaaataatccccacctcccttgatcatacagtgaggctacagtgactgaggggagaatcccctcctgttcactctcccaaccctgctccagcccctcagcttcccagaccctcatgcagttggttgtaaattctcccaggagctgttttactgtctacttttcagggttaaaaaaaaaatcaaaacttaaaaaaaaaaaagtttaaaaagcaaaatggggagggggaggaagcagtgacttttttttggtaattatgcgcttttttttaatttttagaatttgtctttttactgtggggtggggctgttgatatttcatcaagataaggcatttctttcccggagttcaggtgactgagggaagggcccccaaaacaaaacacanccaaaacccaaacccccaggnttcctctttttaaccccaacttttttttaccggntggcccccagtttcccccttaacttttggcancacaagggtttt

SEQ ID NO: 6950 - DNA, 600 bp, Homo sapiens
gccaggctgtgtatttctttcccaggaaattagctttccagcccctttatatattggagaagttgttttagcttctgcagaagtgaaaaagctgaagcggttcattgctattattgcagtgtcatgttctgtaatagaaagtaaaaagactgttatggaaggctgggttaaagttatggttccagaagcttccaaatcctgaaatagatgttttaaagatgcaacctcaaacaccaatgctgttgttaaagagcctatggggaattgctgctctttaccaaagaatggttgataggcccagaagcccatgttagttaggggaagggagcaggaagagggttgttcaaatgcccactttccagtttggccttatgctttatgcagacttgagtgtatgcaggatttcattatctgcctgggtttttttgtttgttttttgttttttaattcaagaagtaggctgggcccggtggctcatgcctgtaatcctggcactttgggaggctgcggcaggcggatcacttgaggtcaggagtccaagaccagcctggccaacatggtgaaaccccatctctaccaaaaaaaaaaaaaaaaaaaaaa

SEQ ID NO: 6951 - DNA, 600 bp, Homo sapiens
gggatatgctgcaacagagcgggaaataagcctaagagagagcctccaggaggaactcaagaggaaaaaatccagtacttgactcgtggagaggagtcttcgtccgataccaataagtcagcctgatgctctaatggaaaaatggccctcttcaagcctggtgaggaaatgcttcagatgaggctccaccttgttaaataaattggatgtatggaaaaatagactgcagaaaaggggaactcatttagctcacgagtggtcgagtgaagattgaaaattaacctctgagggccagcacagcagctcatgcctgtaatcctagcactttggaaggctgaggagggcggatcacaaggtcaggagatcaagaccatcctggctaacacggtgaaaccccgtctctactaaaaatacaaaaaataaaaaattagccgggcatggtgacgggcacctgtagtcccagctactcgggaggctgaggcaggagaatggcatgaacccggaaggcagagcttgcagtgagccgagatcacgccactgcactccagcctgggagacagagcgagactctgtctcaagaaaaaaaaaaaaaaaaaaaaa

SEQ ID NO: 6952 - DNA, 1400 bp, Homo sapiens
cccctccacagcaaccaatcacaaccataaagctacaagcacgcactgaagcactttactgatactcattcaattattcatatgacagttgtttgagtttggtaccatcttattttccccttatacagataaggaaactggggtgcagaaaagtgaattgactacaaagtagacatgactagttaacaacacagctgggatctaaacagcaataactaacattaatggagaacttaaaatgctctgagtgctgtgttatgagctttggtggatgtcactcctttaatcctcgcaacaccctgtcgggtagtctcatttagcaagtatggaagttgaggcagggcaacattaagcaacttacataactcatgcagtaatttctgcagttgggagatgttcagcttcagtccccggccctatggccgttcttttccaccctgtttcttcccccataggaagaacccacctgtagccctgaggttcttttcccaggatggctccaggataaggatcactgtaggtggttgtggagttgacacccctgttgactccttcccagctgattgtcagagccttagacccagcacgccttggattagctttgcagagtgtcttggttgagagaataacctcaccgtacccacatgacacgtgatttggaaagagactagaggccacacttgataaatcatggggaacagatgtgttccacccaacaaatgtgataagtgatcatgcagccagagccagccttccttcaatcaaggtttccaggcagagcaaataccctagagattttctgtgatataggaaatttggatgaagggagctagaagaaatacagggatttttttttttttttaagatggagtcttactctgttgctaggctggagtgcagtggtgcgatctcagctccctgcaacctccacctcctgggttcaaacaattctcctgcctcagcctcccgagtactgggaatataggtgcacgccaccacacccaacaaatttttgtacttttagtacagatgagggttcactatgttggccaggatggtctcgatctcttgacctcatgatccacccacctcggtctcccaaagtgctgggattacaggcttgagccaccgggtgaccggcttacagggatatttttaatcccgttatggactctgtctccaggagaggggtctatccacccctgctcattggtggatgttaaaccaatattcctttcaactgctgcctgctagggaaaaactactcctcattatcatcattattattgctctccactgtatcccctctacctggcatgtgcttgtcaagttctagttgttcaataaatttgttaataatgctgaaaaaaaaaaaaaaaaaaaaaaaaaaaaaaaaaaaa

SEQ ID NO: 6953 - DNA, 600 bp, Homo sapiens
ggcaaggagataggggtgtatgagctccagaggctgctcaacaggatggccatcaaattcaaaagcttcaagaccaagggctttggcctggatgcttgccgctgcatgatcaacctcatggataaagatggctctggcaagctggggcttctagagttcaagatcctgtggaaaaaactcaagaaatggatggacatcttcagagagtgtgaccaggaccattcaggcaccttgaactcctatgagatgcgcctggttattgagaaagcaggcatcaagctgaacaacaaggtaatgcaggtcctggtggccaggtatgcagatgatgacctgatcatagactttgacagcttcatcagctgtttcctgaggctaaagaccatgttcacattctttctaaccatggaccccaagaatactggccatatttgcttgagcctggaacagtggctgcagatgaccatgtggggatagaggcgctgtaggagcctggtcatctctaccagcagcagcagcagcgaggttctagcccaggagggtggggtgcttcttgtagccctcagctctccagtctctgctgatgaaatgggatccaggtgg

SEQ ID NO: 6954 - DNA, 600 bp, Homo sapiens
ccaggcaggcagcaggaccccagtgcccagcacagtgcaagcaaacacctttgaatttgcggatgctgaggaggatgatgaggtcaaggtgtgaggggctggggcacggtcccagggccccacctaggtgcagagccggcccctcacctaacagctggttcctaccagaccggagaggggagaagtcatgttgcccctaaacccctccccacctctgcaggacagacatgggagggaggacagggaaggccaggcttgctctgggacttttatgctcccagaggccctgccaaactgaccacctcccccgactgccactctggacctaatagctgttccttaggccccactccatgccacccccaccagctggaggacccagcctcacagtgtgtcctttgtgccagaccaagcggcccgtggggggtggggggcagggagtgtaccacacagggccattgtctcacctcccaaagggaccgcctgcccccagctcatcccagagcgtccctgctgcaaccctgacagccggtactcccaggccggcttaccccaactaccccgccccagccaccctccttaccccagcaaaggtcaggt

SEQ ID NO: 6955 - DNA, 1400 bp, Homo sapiens
aaggtggccgagtgccagaggaaactgaaggagctggaggtggccgagggcggcaaggcagagctggagcgcctgcaggccgaggcacagcagctgcgcaaggaggagcggagctgggagcagaagctggaggagatgcgcaagaaggagaagagcatgccctggaacgtggacacgctcagcaaagacggcttcagcaagagcatggtaaataccaagcccgagaagacggaggaggactcagaggaggtgagggagcagaaacacaagaccttcgtggaaaaatacgagaaacagatcaagcactttggcatgcttcgccgctgggatgacagccaaaagtacctgtcagacaacgtccacctggtgtgcgaggagacagccaattacctggtcatttggtgcattgacctagaggtggaggagaaatgtgcactcatggagcaggtggcccaccagacaatcgtcatgcaatttatcctggagctggccaagagcctaaaggtggacccccgggcctgcttccggcagttcttcactaagattaagacagccgatcgccagtacatggagggcttcaacgacgagctggaagccttcaaggagcgtgtgcggggccgtgccaagctgcgcatcgagaaggccatgaaggagtacgaggaggaggagcgcaagaagcggctcggccccggcggcctggaccccgtcgaggtctacgagtccctccctgaggaactccagaagtgcttcgatgtgaaggacgtgcagatgctgcaggacgccatcagcaagatggaccccaccgacgcaaagtaccacatgcagcgctgcattgactctggcctctgggtccccaactctaaggccagcgaggccaaggagggagaggaggcaggtcctggggacccattactggaagctgttcccaagacgggcgatgagaaggatgtcagtgtgtgacctgccccagctaccaccgccacctgcttccaggcccctatgtgccccttttcagaaaacagatagatgccatctcgcccgctcctgacttcctctacttgcgctgctcggcccagcctggggggcccgcccagccctccctggcctctccactgtctccactctccagcgcccattcaagtctctgctttgagtcaaggggcttcactgcctgcagccccccatcagcattatgccaaaggcccgggggtccggggaagggcagaggtcaccaggctggtctaccaggtagttggggagggtccccagccaaggggccggctctcgtcactgggctctgttttcactgttcgtctgctgtctgtgtcttctatttggcaaacagcaatgatcttccaataaaagatttcagatgctcaaaaaaaaaaaaaaaaaaaaaa

SEQ ID NO: 6956 - DNA, 1073 bp, Homo sapiens; identical to SEQ ID NO: 1721

SEQ ID NO: 6957 - DNA, 1070 bp, Homo sapiens; identical to SEQ ID NO: 1722

SEQ ID NO: 6958 - DNA, 1400 bp, Homo sapiens
agcgggggaggggccttcctggtgctgcccctgggcaagactggacgtgtggacaagaatgcgcccacggtctgtggccacacagcccctgtgctagacatcgcctggtgcccgcacaatgacaacgtcattgccagtggctccgaggactgcacagtcatggtgtgggagatcccggatgggggcctgatgctgcccctgcgggagcccgtcgtcaccctggagggccacaccaagcgtgtgggcattgtggcctggcacaccacagcccagaacgtgctgctcagtgcaggttgtgacaacgtgatcatggtgtgggacgtgggcactggggcggccatgctgacactgggcccagaggtgcacccagacacgatctacagtgtggactggagccgagatggaggcctcatttgtacctcctgccgtgacaagcgcgtgcgcatcatcgagccccgcaaaggcactgtcgtagctgagaaggaccgtccccacgaggggacccggcccgtgcgtgcagtgttcgtgtcggaggggaagatcctgaccacgggcttcagccgcatgagtgagcggcaggtggcgctgtgggacacaaagcacctggaggagccgctgtccctgcaggagctggacaccagcagcggtgtcctgctgcccttctttgaccctgacaccaacatcgtctacctctgtggcaagggtgacagctcaatccggtactttgagatcacttccgaggcccctttcctgcactatctctccatgttcagttccaaggagtcccagcggggcatgggctacatgcccaaacgtggcctggaggtgaacaagtgtgagatcgccaggttctacaagctgcacgagcggaggtgtgagcccattgccatgacagtgcctcgaaagtcggacctgttccaggaggacctgtacccacccaccgcagggcccgaccctgccctcacggctgaggagtggctggggggtcgggatgctgggcccctcctcatctccctcaaggatggctacgtacccccaaagagccgggagctgagggtcaaccggggcctggacaccgggcgcaggagggcagcaccagaggccagtggcactcccagctcggatgccgtgtctcggctggaggaggagatgcggaagctccaggccacggtgcaggagctccagaagcgcttggacaggctggaggagacagtccaggccaagtagagccccgcagggcctccagcagggtcagccattcacacccatccactcacctcccattcccagccacatggcagagaaaaaaatcataataaaatggctttattttctggtaaaaaaaaaaaaaaaaaaaaaaaaaaaaaaaaaaaaaaaaaaaaaaaaaaagggggggggga

SEQ ID NO: 6959 - DNA, 1400 bp, Homo sapiens
accaagaccaaagctgcttttgctgcgccatggagacaggtgtgcgcatctacaacgtggagcccttgatggagaaggggcatctggaccacgagcaggtgggcagcatgggcttggtggagatgctgcaccgctccaaccttctggccttggtgggcggtggtagtagtcccaagttctcagagatctcagtgctgatctgggacgatgcccgggagggcaaggactccaaggagaagctggtgctggagttcaccttcaccaagccagtgctttctgtgcgcatgcgccatgacaagatcgtgatcgtgctgaagaaccgcatctatgtgtactccttccccgacaatccccgaaagctgtttgagtttgatacccgggacaaccccaaggggctctgtgacctctgccccagcctggagaagcaactgctagtgttcccgggacacaagtgtgggagtctgcaacttgtggacctggcgagcacaaagcctggcacctcgtctgctccattcacgatcaatgcacatcagagtgacatagcctgtgtgtctctaaaccagccaggcactgtagtggcctcagcctcccagaagggtacccttattcgcctctttgacacacaatccaaggagaaactggtggagctgcgccgaggcactgaccctgccaccctctactgcattaacttcagccacgactcctccttcctctgcgcttccagtgataagggtactgtccatatctttgctctcaaggatacccgcctcaaccgccgctccgcgctggctcgcgtgggcaaggtggggcctatgattgggcagtacgtggactctcagtggagcctggcgagcttcactgtgcctgctgagtcagcttgcatctgcgccttcggtcgcaatacttccaagaacgtcaactctgtcattgccatctgcgtagatgggaccttccacaaatatgtcttcactcctgatggaaactgcaacagagaggctttcgacgtgtaccttgacatctgtgatgatgatgacttttaaggaccctgggggctgtgctagggacctgcagtggcagaactgcagagctgagccttggcagtggggcgtgcttggaagccaccagccagcaagcattaatggggctggtgcccactttccactcagcagagctatgtctaaataaagagctcacttccccccagcacttcttgatgactgtgtgccccaagggccaggccagagacccaggaaggcagcgaccccttgggatccctaacctggaggaaattgccagggacccagagggagtgccctaatccaacctggggattttttaaaagcttcctaggaagagatgatctccgatgtgatgaatacgaataaaaggcccttaatggc

SEQ ID NO: 6960 - DNA, 600 bp, Homo sapiens
ctaatttttgtatttttagtagagacggggtttcaccatgttgcccaggatggtctcgatctcctcacctcgtgatccgcccgcctcggcctcccaaagtgctgggattacaggcatgagccaccgcgcccggccccaatcatctgtttttaaacaatcgtttttgagcagatagctattcattccagattttcgtgtacccattctgtttcaggagctcttctaggtaaagctgagatcacaggaacagcaggtgacaggcctagctatagttaggaatacacaagccgtaaaatcgagtccttacagccataccacaaggtacgtccatttggactacaagaagagcttcctttaaagttcctatttcagcataaagaggctgtcctttttttttgaggaatagtttggaccttgtgcctcctgtgggaggctgaggactgcaagaggagagctagcagatatgcctgttcacccctctctggtacttgtggcttgctagtatgtttttatgataatctcgggcattgtttgcattgtgtttattaatagggttttgtttttattgtttccttttttacagtaaaggctgaattacat

SEQ ID NO: 6961 - DNA, 600 bp, Homo sapiens
gatatacagaggaaagtcacctataggaacctgagcacctggtatacagagcttcgggagttcaggccagagatcccatgcatcgtggtggccaataaaattgatgacataaacgtgacccaaaaaagcttcaattttgccaagaagttctccctgcccctgtatttcgtctcggctgctgatggtaccaatgttgtgaagctcttcaatgatgcaattcgattagctgtgtcttacaaacagaactcccaggacttcatggatgagatttttcaggagctcgagaacttcagcttggagcaggaagaggaggacgtgccagaccaggaacagagcagcagcatcgagaccccatcagaggaggtggcctctccccacagctgaggggctggggctaggggaatagtttggaccttgtgcctcctgtgggaggctgaggactgcaagaggagagctagcagatatgcctgttcacccctctctggtacttgtggcttgctagtatgtttttatgataatctcgggcattgtttgcattgtgtttattaatagggttttgtttttattgtttccttttttacagtaaaggctgaatgacat

SEQ ID NO: 6962 - DNA, 1186 bp, Homo sapiens; identical to SEQ ID NO: 1727

SEQ ID NO: 6963 - DNA, 1400 bp, Homo sapiens
tagaacaagaaatgtcagatggccaaaaacaagatgaccagatttgatctcagcctgatgaccctacaggtcgtgctatgatatggagtcctcatgggtaaagcaggaagagagtgggaaagagaaccaccccactctgtcttcatatttgcatttcatgtttaacctccggctggaaatagaaagcattcccttagagatgaggataaaagaaagtttcagattcaacagggggaagaaaatggagatttaatcctaaaactgtgacttggggaggtcagtcatttacagttagtcctgtgtctttcgacttctgtgattattaaccccactcactaccctgtttcagatgcatttggaataccaaagattaaatccttgacataagatctcatttgcagaaagcagattaaagaccatcagaaggaaattatttaggttgtaatgcacaggcaactgtgagaaactgttgtgccaaaaatagaattccttctagtttttcttgttctcatttgaaaggagaaaattccactttgtttagcatttcaagcttttatgtatccatcccatctaaaaactcttcaaactccacttgttcagtctgaaatgcagctccctgtccaagtgccttggagaactcacagcagcacgccttaatcaaaggttttaccagcccttggacactatgggaggagggcaagagtacaccaatttgttaaaagcaagaaaccacagtgtctcttcactagtcatttagaacatggttatcatccaagactactctaccctgcaacattgaactcccaagagcaaatccacattcctcttgagttctgcagcttctgtgtaaatagggcagctgtcgtctatgccgtagaatcacatgatctgaggaccattcatggaagctgctaaatagcctagtctggggagtcttccataaagttttgcatggagcaaacaaacaggattaaactaggtttggttccttcagccctctaaaagcatagggcttagcctgcaggcttccttgggctttctctgtgtgtgtagttttgtaaacactatagcatctgttaagatccagtgtccatggaaacattcccacatgccgtgactctggactatatcagtttttggaaagcagggttcctctgcctgctaacaagcccacgtggaccagtctgaatgtctttcctttacacctatgtttttaagtagtcaaacttcaagaaacaatctaaacaagtttctgttgcatatgtgtttgtgaacttgtatttgtatttagtaggcttctatattgcatttaacttgtttttgtaactcctgattcttccttttcggatactattgatgaataaagaaattaaagtgaaaaaaaaaaaaaaaaaaaaaaa

SEQ ID NO: 6964 - DNA, 1400 bp, Homo sapiens
gctcgctgaaggatgaagaccggattttcaccaacctgtacggccgccatgactggaggctgaaaggttccctgagtcgaggtgactggtacaagacaaaggagatcctgctgaaggggcccgactggatcctgggcgagatcaagacatcgggtttgaggggccgtggaggcgctggcttccccactggcctcaagtggagcttcatgaataagccctcagatggcaggcccaagtatctggtggtgaacgcagacgagggggagccgggcacctgcaaggaccgggagatcttacgccatgatcctcacaagctgctggaaggctgcctggtggggggccgggccatgggcgcccgcgctgcctatatctacatccgaggggaattctacaatgaggcctccaatctgcaggtggccatccgagaggcctatgaggcaggtctgattggcaagaatgcttgtggctctggctatgattttgacgtgtttgtggtgcgcggggctggggcctacatctgtggagaggagacagcgctcatcgagtccattgagggcaagcagggcaagccccgcctgaagccccccttccccgcagacgtgggagtgtttggctgccccacaactgtggccaacgtggagacagtggcagtgtcccccacaatctgccgccgtggaggtacctggtttgctggctttggcagagaacgcaactcaggcaccaaactattcaacatctctggccatgtcaaccacccttgcactgtggaggaggagatgtctgtgcccttgaaagaactgattgagaagcatgctgggggtgtcacgggcggctgggacaacctccttgctgtgatccctggcggctcgtctaccccactgatccccaagtctgtgtgtgagacggtgctgatggacttcgatgcgctggtgcaggcacagacaggcctgggcacagctgcggtgatcgtcatggaccgctcgacggacatcgtgaaagccatcgcccgcctcattgagttctataagcacgagagctgtggccagtgtaccccatgccgtgagggtgtggactggatgaacaaggtgatggcacgtttcgtgaggggggatgcccggccggccgagatcgactccctgtgggagatcagcaagcagatagaaggccatacgatttgtgctctgggtgacggggccgcctggcctgtgcagggtctgatccgccactttcggccggagctcgaggagcggatgcagcggtttgcccagcagcatcaggcccggcaggctgcctcttagcccaccaccctggcctgctgtcctgcgtctatccatgtggaatgctggacaataaagcgagtgctgcccaccctccaaaaaaaaaaaaaaaaaaaaaaaaaa

SEQ ID NO: 6965 - DNA, 1400 bp, Homo sapiens; identical to SEQ ID NO: 6964

SEQ ID NO: 6966 - DNA, 700 bp, Homo sapiens; identical to SEQ ID NO: 1731

SEQ ID NO: 6967 - DNA, 600 bp, Homo sapiens
tgaaaaaaaagaataaaaagtagcagtaaaattatatactgaaaacaccaaaaatttagatgccttaatagtatatacgtgaaatactcagctgtccctttaaaaataattccttggactgcctggtggttaaaatacgattcctcatatccaaggctacttttgaagatccctctgccaaaaatatagctcacttatctaaaggtgagagctgcatagatccagtaatgtacataaagcctgaatgatgagcctatgtccctgcctaacgctggtgtctcactcatctcttttacctaaattgtcctgaactttgttaagtgttctggacaaggccaagcttttctttattaaaacctcagcatgtctccctgatctgaactatttgctttctcttcaagataagttgtattttaccatggaaaaatacagtatctaacattaccattcacgttaaatgaagtttcctcataacatttatctttagttttatgaagtcatcgtgaccaatgttacagtaatttctgttagctgattgtggtaaacaatgtttaatgtgaaaagaaattaaaactttcttcatctgttgtaaaaaaaaaa

SEQ ID NO: 6968 - DNA, 1400 bp, Homo sapiens
agccattgctaatgaatgccaggccaacttcatctccatcaagggtcctgagctgctcaccatgtggtttggggagtctgaggccaatgtcagagaaatctttgacaaggcccgccaagctgccccctgtgtgctattctttgatgagctggattcgattgccaaggctcgtggaggtaacattggagatggtggtggggctgctgaccgagtcatcaaccagatcctgacagaaatggatggcatgtccacaaaaaaaaatgtgttcatcattggcgctaccaaccggcctgacatcattgatcctgccatcctcagacctggccgtcttgatcagctcatctacatcccacttcctgatgagaagtcccgtgttgccatcctcaaggctaacctgcgcaagtccccagttgccaaggatgtggacttggagttcctggctaaaatgactaatggcttctctggagctgacctgacagagatttgccagcgtgcttgcaagctggccatccgtgaatccatcgagagtgagattaggcgagaacgagagaggcagacaaacccatcagccatggaggtagaagaggatgatccagtgcctgagatccgtcgagatcactttgaagaagccatgcgctttgcgcgccgttctgtcagtgacaatgacattcggaagtatgagatgtttgcccagacccttcagcagagtcggggctttggcagcttcagattcccttcagggaaccagggtggagctggccccagtcagggcagtggaggcggcacaggtggcagtgtatacacagaagacaatgatgatgacctgtatggctaagtggtggtggccagcgtgcagtgagctggcctgcctggaccttgttccctgggggtggggcgcttgcccaggagagggaccaggggtgcgcccacagcctgctccattctccagtctgaacagttcagctacagtctgactctggacagggggtttctgttgcaaaaatacaaaacaaaagcgataaaataaaagcgattttcatttggtaggcggagagtgaattaccaacagggaattgggccttgggcctatgccatttctgttgtagtttggggcagtgcaggggacctgtgtggggtgtgaaccaaggcactactgccacctgccacagtaaagcatctgcacttgactcaatgctgcccgagccctcccttccccctatccaacctgggtaggtgggtaggggccacagttgctggatgtttatatagagagtaggttgatttattttacatgcttttgagttaatgttggaaaactaatcacaagcagtttctaaaccaaaaaatgacatgttgtaaaaggacaataaacgttgggtcaaaatggaaaaaaaaaaaaa

SEQ ID NO: 6969 - DNA, 600 bp, Homo sapiens
ggccccttcagacccaaagctttaggcatgattccaactggctgcatataggagtcagttagaattgtttctttctctccccgtttctctccccatcttggctgctgtcctgcctctgaccagtggccgccccccgcgttgttgaatgtccagaaattgctaagaacagtgccttttacaaatgcagtttatccctggttctgaggagcaagtgcagggtggaggtggcacctgcatcacctcctcctcttgcagtggaaactttgtgcaaagaatagatagttctgcctcttttttttttttttcctgtgtgtgtggcctttgcatcatttatcttgtggaaaagaagattcaggccctgagaggtctcagctcttggaggagggctaaggctttagcattgtgaagcgctgcacccccaccaaccttaccctcaccggggaaccctcactagcaggactggtggtggagtctcacctggggcctagagtggaagtgggggtgggttaacctcacacaagcacagatcccagactttgccagaggcaaacagggaattccgccgatactgacgggctccaggagtcgtcgccacactcg

SEQ ID NO: 6970 - DNA, 1315 bp, Homo sapiens; identical to SEQ ID NO: 1735

SEQ ID NO: 6971 - DNA, 1400 bp, Homo sapiens
tgatcggttggtcaatcgcttgaagaatatcactctggatgatgccagtgctcctcgcctaatggttcttcgtcagccaaggggaccagataactcaatggggtttggtgcagaaagaaagatccgtcaagctggtgtcattgactaaccacatccacaaagcacaccattaatccactatgatcaagttggggggaatctggtgaagggttctgaatatctccctcttcatccctcccgaaatctggaatacttattctattgagctattacaccagttttaacaccttcctcgtgttatgtttaaaaaaataaataaatttaagaaaaccattttaaataatgcacagttgcagcctggaaaaacttaaggtggcgccttatagtatcaattttaggagctttatttggtgcatttaacgcaactggtaattgcagaatccactttgcctgtgtaagtgaaaaatatagactgttatcttgttggccctatgaaattctgcacttttcattatatactctaccttcattaattacttctggcaagatgttctgccttagcactcagttgcattcttttcctttttcttcctgttcattatgctttaattctgaggaccatatgagggtagaatatattatcttttaaaaattacaaaaatttgtataggcaaaccatttcttaaagttgatggccaaattttaaaatgttatttttcatatcatttataatcttgtcacaatccacttaaagaagtttggttatatttcagtgaaaattttcttccagagtaggttttttttcgtgggttggggggtaactttactacaattagtaagtatggtgcagaatttcatgcaaatgaggagtgccagcagtgtgataatttaaacatatttaaacaaaaacaaaaaaaatgaatgcacaaacttgctgctgcttagatcactgcagcttctaggacccggtttcttttactgatttaaaaacaaaacaaaaaaaaataaaaaagttgtgcctgaaatgaatcttgtttttttttataagtagccgcctggttactgtgtcctgtaaaatacagacacttgacccttggtgtagcttctgttcaactttatatcacgggaatggatgggtctgatttcttggccctcttcttgaattggccatatacagggtccctggccagtggactgaaggctttgtctaagatgacaagggtcagctcaggggatgtgggggagggcggttttatcttcccccttgtcgtttgaggttttgatctctgggtaaagaggccgtttatctttgtaaacacgaaacatttttgctttctccagttttctgttaatggcgaaagaatggaagcgaataaagttttactgatttttgagacact

SEQ ID NO: 6972 - DNA, 600 bp, Homo sapiens
acgatgtctcctaagtttccctgtctaaaacacatcagtgtaaattcaggcttcagcacgccgtccagatccccaggataagagaccacttagccttccctttggtctgttctgtgactctctccccaaacacaaagaagcgtgtatgtagtcaccattccagaacctctcttttctaagatgcacaacacttatcaaagatatgtttagtttagactttatacccttagctttcccataagagctccctttgtggggaacttgccctcttctgcgaaataagcctcatccttaaagagaagtcaccggccgggcacggtcgtcacgcctgtaatcccagcactttgggaggccgaggcgggtggatcacgaggtcaggagatcgagaccatcctggcgaacatggtgagaccccatctctactaaaaatacaaaaaattagccaggcatggtggcgggcacctgtagtcccagctacttgggaggctgaggcaggagaatggcgtgaacccgggaggtggagcttgcagtgagccaagatcacgccactgcactccagcctgggcaacggagtgagactctgtctcaaaaaaaaaaccg

SEQ ID NO: 6973 - DNA, 600 bp, Homo sapiens
acgggctgggctgagcagggcctctagtggaacacattgggggtctcattgaaaagctctctgatgagcacctccttttgtgcaaagttaattttttctcgacaataaagatattccgtgtcttcacccctgaactaagacacagggagtatttcagaggccagcgtaggagtcatcgacaacgaaaagccgagaacccagggccagcagtggaagcctcaagcaagaccagggcctggtccttgctaattgctgcagggtggagtttgatctggcagacccgatcctccttcatgaacacccagcaacctgagcaagtcccggccctgccctcagcgagcccggcaggcgtcccgggacagctcagtgttggagggccacctgaaccacgagccagggctggggcttgcatgtcattgtctatgacagcgtcaagactgcccttggcaccgtgctgtgtggaaaccctcccctctgagactccactgagacgtggctgagtgaaatcttcctcgtcagtggtcaaggtgtgtcatccatacagctccatgcctttgtcttttttaaatgtaattaaaaaaggaaccaactggcgtttgt

SEQ ID NO: 6974 - DNA, 600 bp, Homo sapiens
ccagcgggtctggggtctatgtgaggatgtggaagagacagcagcagaagtgggagcgaaaaattattggcattttttcagggcaccagtgggtggacatgaatggttccccacaggatttcaacgtggctgtcagaatcactcctctcaaatatgcccagatttgctattggattaaaggaaactacctggattgtagggaggggtgacacagtgttccctcctggcagcaattaagggtcttcatgttcttattttaggagaggccaaattgttttttgtcattggcgtgcacacgtgtgtgtgtgtgtgtgtgtgtgtgtaaggtgtcttataatcttttacctatttcttacaattgcaagatgactggctttactatttgaaaactggtttgtgtatcatatcatatatcatttaagcagtttgaaggcatacttttgcatagaaataaaaaaaatactgatttggggcaatgaggaatatttgacaattaagttaatcttcacgtttttgcaaactttgatttttatttcatctgaacttgtttcaaagatttatattaaatatttggcatacaagagaaaaaaaaaaaaaaaa

SEQ ID NO: 6975 - DNA, 1007 bp, Homo sapiens; identical to SEQ ID NO: 1740

SEQ ID NO: 6976 - DNA, 1400 bp, Homo sapiens
ttctgaagaaaatgtcccattcattaagcagttggtctctgatgaagataaagcccaattagcaagtaaactgtgtcctctgaaagatgaaccatggcctatacatccttgggaaccaggttcctttagagttggtcttattgccttgaagctgggcatgatgcctttatggaccaaggatggtcaaaagcatgtggtcacattacttcaggtacaagactgtcatgtcttaaaatatacgtcaaaggaaaactgtaatggaaaaatggcaaccctgtctgtaggaggaaaaactgtatcacgttttcgtaaagctacatccatattggaattttaccgggaacttggattgccgccgaaacagacagttaaaatctttaatataacagataatgctgcaattaaaccaggcactcctctttatgctgctcactttcgtccaggacagtatgtggatgtcacagccaaaactattggtaaaggttttcaaggtgtcatgaaaagatggggatttaaaggccagcctgctacgcatggtcaaacgaaaacccacaggagacctggagctgttgcaactggtgatattggcagagtctggcctggaactaaaatgcctggaaaaatgggaaacatatacaggacagaatatggactgaaagtgtggagaataaacacaaagcacaacataatctatgtaaatggctctgtacctggacataaaaattgcttagtaaaggtcaaagattctaaactgcctgcatataaggatctcggtaaaaatctaccattccctacatattttcctgatggagatgaagaggaactgccagaagatttgtatgatgaaaacgtgtgtcagcccggtgcgccttctattacatttgcctaacatctttggacgtggcagaaccttacatattctgtgagcttcgatgagccagagtgatatcataaccaccagaaatcatactctcctttcttagtcacaacaaaatcacacatgtcatctttgtcaagggcataaatatatcattcatacccccattaaattttgttagaaaaattaccacattaaatatatgagttaagtagattggatttgctgaaattggtgttgggcatattagcaaaatattcttaatttgtggactcgattcttttttactacatatttcccaagttatcttaagatgtctgtaaatttaacttttattaaagttttgtcaatctttgtgaaatagtggttgtggaacagtagaaaaccatatggggactatagtgcaacctatttgggtaaagaaaccatttgctaaaatggagaaagtaaatagatttttatttaaattacagaaacatgttaaaggccggacaaaggaaagacaataaaatcataaattatc

SEQ ID NO: 6977 - DNA, 455 bp, Homo sapiens; identical to SEQ ID NO: 1742

SEQ ID NO: 6978 - DNA, 600 bp, Homo sapiens
taatgttaaagttgtatagattattaatgcatgcccactgaatataaccctggttttgtgataaaactgcttagattttgttgatgacattagattagtagttgcattaaataactaaattcccattgtgattaattgaaattttgtctttaagcagagagttatttgtgactataagctttgtgcttagagaatgtatgtgtttttatctgtcagtatgggaggatataaactgcatcattagtgaaattattggttgtgtaatcctttgtgaaatataattctaggtatttgatagggtattgagtgtattttgtgtgtgtgtggatgtgtgttttggggtacggggagaggcgatgctattggccatcactaccaaccagggtttcaaaaagtatatacctaagtaatttcttttatcactacctcaactgaggaagaaaaggctcaccacaagtggtgtgaaggctttgggtacttagttctaaatttttttatggtaacatatacatagccacatttacagttttaaccattttaaggcatgtaattcagtggggttaggtacattcacaatgttgtgtaatgatcaccgccgtg

SEQ ID NO: 6979 - DNA, 1400 bp, Homo sapiens
tggcaagaattacaacaaagcatacagcgaaaagagagagctctattggaaaccaaatcaaaaataacacatcctgtgtatagcctttactttcctgaggaaaaacaagaatggtggtggctttacattgcagataggaaggagcagacattaatatccatgccatatcatgtgtgtacgctgaaagatacagaggaggtagagctgaagtttcctgcaccaggcaagcctggaaattatcagtatactgtgtttctgagatcagactcctatatgggtttggatcagattaaaccattgaagttggaagttcatgaggctaagcctgtgccagaaaatcacccacagtgggatacagcaatagagggggatgaagaccaggaggacagtgagggctttgaagatagctttgaggaagaagaggaggaagaagaagatgatgactaagcagtactctgaatggaccacagtgtttgcacatatttgcaattttttgctgttttgaaagtgtatcataaaccagaacagtacagaactgatgttgaggaaggtgtagtttttttactctagaaatgggtgcataatataactaggcagtggcggtgccttggtacaacctgaaaaatgttaaggcttattgaaacctttcaagtaggggatggtacatttatttcatctgcaaatgataataaatcctttgttattataactgtccagaagtgtgggctatgtattatctgatcagtctatggtcccagtaaaagtaaagatgcaggaaacacagtctgtaaatgagcgacttttctttgttcagctttagttttagcaaacaccacaaatatgttttaagtaacatcgctcaagtttaagtaacatcgctcaagttgataatctcttgataagctctgttgttgacattttgcagtgatacaacagctccactcatagatttaaacttttatttttacttatcttggtcataagttggcattctctcacattccacatgatatagagggctacgttttggaattttccttttcttaattgcccagagttatcagacagattataaaaatggcttttaatggcttaaaccatttctaaacctctatcttagcagatcaatgcaggatctaattcttttgataagttctagctctaaaagtgatagtgggactgtatgttttctgatactggtggcttatgttattaaaccttttttaaaaaaggttcactctaaaagctgaactacatccttagttttcagtctacttgactctatcaggagctttttaaggaaagtaagtataacatgcaaaggaagctttttttgtattcattttggactcctgtcaataaaaatagaagtttgttgactcgtaaaaaaaaaaaaaaaa

SEQ ID NO: 6980 - DNA, 600 bp, Homo sapiens
tcaacaggcagtattattgaatttatatttggagttgtaatgtttggaaatggggcttacactatgatgtttgagtcgggaagtaaaattcgggcttttatgatgtgcctacatgcatattttaacatctacttacaagccaaaaatggctggaagacatttatgaatcgtaggactgctgtgaagaaaattaattcacttcctgaaataaaagggagccgcttacaagaaataaatgatgtatgtgcaatctgctatcatgagtttacaacatctgctcgtattacaccgtgtaatcattatttccatgcactttgccttcggaaatggctgtacattcaagatacttgtccaatgtgccatcagaaagtatacatcgaagatgatatcaaggataattcaaatgtatctaacaacaatggatttattccacccaatgaaactccagaggaagctgtaagagaagctgctgctgaatctgacagggaattgaacgaagatgacagtacagattgtgatgatgatgttcaaagagaaagaaatggagtgattcagcacacaggcgcagcagctgaagaatttaatgatgatactgactga

SEQ ID NO: 6981 - DNA, 600 bp, Homo sapiens
acaccgtggacagcaaatgcttcccagcagagctgcacttagtgcattggaacgcagtcagatttgaaaactttgaggatgcagcactggaagaaaatggtttggctgtgataggagtatttttaaagctaggcaaacatcataaggagctacagaaattagtggatactttgccgtcaattaagcataaggacgcccttgtggaatttgggtcatttgacccttcctgcctgatgcctacctgcccagattactggacctactcagggtctctgactaccccacccctctccgagtctgtcacctggatcattaagaagcaaccagtagaggttgatcatgatcagcttgagcaatttcggaccctgcttttcacttccgaaggggagaaagagaaaagaatggtggacaacttccgcccccttcagccactgatgaatcgcactgttcgttcatccttccggcatgattatgtgctgaatgtacaagcaaaacccaagccggccaccagccaagcaaccccctaaaacattcatatctaggcagtattttgcttttgctttaatatatactagcttactataaattgttaactagact

SEQ ID NO: 6982 - DNA, 1400 bp, Homo sapiens
gagggatctgagcgcaggaagacgcagaacaacagaaatagccgcccctccccgcccactgtgcctgttggcctatcatagatctctatgttcttgactttgtctctcctttccgagtcaatggtgggttacactgatcttgttccactgattactctctctgacgagtccatcacctgcaacttaaatgaacaagcttacatcccattttgagtgaagattttgaggtttttaatttaaaggctgtgtacagttatacttttttatacacctgttcatttctacttaaattatggcacagattgatgcgcaccagtcttgaggaaacgatctccctattcccttaccctgttactcagccacgccgtgtgtaggcttagcctcaggtggcagatgtttgaggaaaggaattatgccaggaaggtgggaccgggttatggtcgggtttctattgggaatgctctttgtgcttttgggcatctgaatggaagctttacatagaaccttaggtagaactcccccaaatcgccatatttaaaaattattttcactctattcttgcttaaaactgtactcttttgcaaattaacaattttatcactgattcagagttaaaaagaagactaacttttcaagcaaatgcatctgtaaagatgctttagattagactgtcatgtctcagtgtctatctgtatatattatttgatattcagagaatctaaagcactcgtctactgttttaatgagatttaacagcttttaacagtgagtttcgtttgtaaactgcttgaagtctgtggcattcaggcacacgtctggctggccggctgggtctcctcccgggctcagtgggcctggggcctctctgacgtggtgcctgctggagggaggctcgtcgtcaccagctgactgctggtccggcttctgaccggcctttgtcctggctccgtagcagaacactgtaaaagtgcccgcgtctttgcagtagttgcagatttcagtcgtcgtgttacttgtgcacaaacagaagctgggtcttacccgcagcacgagtgtctcgggctgcccggagtcgcccgggagcaggtgctgcagccagagttacgcgggggccacgcgggccggcgggggtggggggaacgtgggggaacctgtgtttcacgtgactcagcagtgcccgccgccgtcaccagctatgcattcactccgtttccagtgagcagatgtcttgcttggaaagtggacctgtgtctgtgtctgtcctgagaacttaccagcagaaatcctcatttctgtgctacggatttaccaaaaattgtcaagtctttttcagtttaacagttcctttacatgtgtagtatttgaggaaaaaaatcaataaacagttgatctcgtgcata

SEQ ID NO: 6983 - DNA, 600 bp, Homo sapiens
tgtagaaagtgcaggcgatcattatttcgaagttctagtattctggatcaccgtgaaggaagtggacctatagcctttgcccacaagagaatgacaccatcttccatgcttaccacagggaggcaagctcaatgtacatcttatttcattgaacctgtacagtggatggaatctgctttgttgggagtgatggatggacagcttctttgcccaaaatgcagtgccaagttgggttccttcaactggtatggtgaacagtgctcttgtggtaggtggataacacctgcttttcaaatacataagaatagagtggatgaaatgaaaatattgcctgttttgggatcacaaacaggaaaaatatgaacatgatattttatagcttgggaagaaacttgcagatgatatgtgctgcctttgcttcttatcattcatggcagattgttagtgctttcaacatttcatttgaaatgggagaagataaaatcacttgatgtaacctggaaactatgctttacatggcaatcaaagccttttgatcatgtacattttatttgatattaaaatcttttataaccagaaaaaaaaaaaaaaaaaaaaaaa

SEQ ID NO: 6984 - DNA, 1400 bp, Homo sapiens
gagcaggtgttggtgtgttaaacaatttattgtatgctgtaggaggtcatgatggccctttagtacgaaaaagtgttgaagtatatgaccccaccactaacgcatggagacaggttgcagatatgaacatgtgcagaagaaatgcaggagtttgtgcagttaatggtctgttatatgttgttggaggggatgatggttcctgtaacttggcgtcagtagaatattataacccaacaaccgataaatggacagttgtgtcatcgtgtatgagcacagggagaagttatgcaggggtcacagttattgataaaccattatgagcctgaaggacattttcagcatatttatacatgagaaacagccttcaacaagtatttgtgaagtgactgagaatctagcacttctccacttgtagctgcactttaagtctcagcagaagatacgatcgtctgcctttataggcctcagatactgaagattatttttggtagaagcaccgtgtaggctttttctgcaatgagcagcagctgactgaattttcataagaaacttggactgcaggacttaatctgtagtctttagacaacagttgctttcataaagactagttcttatcaaccttgaatgactacagattattttgtgaaggaggatgaagtaatgtgtgttcttgtaaaattaaattttatctttatttcttctaaaaatctgtataccaggaactgaaaatctttgaacagatattaaaatctacgtaagtatacaaactagttgagggatacactgtttgcttttataaaataactttgattacatgaatataataaattatgtgcatataaatgtgtgtctatatgctttcctttaaatatgtttgaaaagatgtttgaaacttgattatactatttataattggcacagtactttgaattatgccagtactacattgtaaaacagagttgtattttttgatatttaacaatgcttaacactttaaatgccacttctgaggaatggacctggtgtaacacacttgaatatgtgtgatgccaaactttttaaaatacaatataaattatgcttatttattattttctttagtttaatcttggtcatgttttggtgtgtatttttaattttttcttaaattaacactttggcatgaacattactgcaggtttttgatgaatataatgaatgtatggaattcaattgaatttgcatggtcttcggaattttttctgtgtgtataaatttagctgctattaacagaagagagaactttctgtgagtagccatgtgtgttgatcagatacagtttttctgagatcttcaattaatctcactttaaaaatgaccaaaacatgtctttcttgaattaactttgaataaaagtttgt

SEQ ID NO: 6985 - DNA, 600 bp, Homo sapiens
gaggcgggcccccctggcagcagtattggaggggctacaggcagctggagaaaggggcccagccgctgacccactcactcaggacctcactcactagccccgctttgggccccctcctgtgacctcagggtttggcccatggggcccccccaggcccctgccccaactgattctgcccagataatcgtgtctcctgcctccactcagctgcttctcagtcatgaatgtggccatggccccggggtccccttgctgctgtgggctccctgtccctgggcaggagtgctggtgaggaggtggagccttttgaggggggccttccctcagctgtttccccacactggggggctgggccctgcctccccgttaccctccttccctgcaggcctggagcctgtagggctggactgaggttcaggtctccccccagctgtctcacccccactttgtccccactctagagcagggaggcagtgggggaggagttgtgtctcgtcttctgtctccatgtggtttttgggtgtttttcttgttgtgtcctggattccgataaaattaaagaaattgcttcctcaaaaaaaaaaaaaaaaaaaaaaaaaa

SEQ ID NO: 6986 - DNA, 842 bp, Homo sapiens; identical to SEQ ID NO: 1751

SEQ ID NO: 6987 - DNA, 1130 bp, Homo sapiens; identical to SEQ ID NO: 1752

SEQ ID NO: 6988 - DNA, 1400 bp, Homo sapiens
attgcatgaataagttcaagcttaatatagaaaagctctgcaaaactgaacaggacctggcacttggaactgatgcagaaggacagaaggtgaaagattccatgcgagtactccttccagttctactcaacaaaaatcatgataattgtgataaaataagagcaattctactttatatcttcagtattaatggaactacggaagaaaatttggacaggttgatccagaatgtaaagataggaaatgagagtgacatgattcgtaactggagttaccttggtgttcccattgttccccaatctcaacaaggcaaaccgttaagaaaggatcggtctgcagaagaaacttttcagctctctcggtggacaccttttatcaaagatattatggaggatgctattgataatagattagattcaaaagaatggccatattgttcccagtgtccagcagtatggaatggttcaggagctgtaagtgctcgccagaaacccagagctaattatttagaagaccgaaaaaatgggtcaaagctgattgtttttgtaattggagggatcacatactctgaagtgcgtggtgcttatgaagtttctcaggcacataaatcctgtgaagttattattggttctacacatgttttaacacccaaaaagctgttggatgatataaagatgctgaataaacccaaggataaagtctccttaattaaagatgaatagcatttctttttggagggtttagagattcttactaatatgttgaactaaaatagaaagaaaatgttgctgtcatgtaatttaaacaatgtaaatattttatggaataatggcttttcaaatacatttcttaaggaactgtttatgattattactggatttgtcatttttgataatttaaatattgctgctgctttgtagatgatgagaagaaatgttaaagtgctttctaaaaggaaattttttcacctttggaggagaatatattagagttgtgggtaatttttcacagccacctatgtacatactaattacccattggatacttatatctaaaagtctcatgctgaagtatagtttttgggaaagaatgattttaaataaagagattgtaaaagtaaaaaactgtaaatgtatatgtatgatagaattgtttcctctaagtgtagtttttctttcaactaaaattcagtttatgtgtaaaataattcagtcattaatagaaatggagtgatttcacagtgtgtactgttttgccacatacttctaaagaacacaattttatataattttgaaatcatgtatgtttaaattagaaaaccaaaaatcatgaacattctaagaggaaataaatatagaatttaaaaaattaaaaaaaaaaaaaaaaaaaaaaaaggaatt

SEQ ID NO: 6989 - DNA, 894 bp, Homo sapiens; identical to SEQ ID NO: 1754

SEQ ID NO: 6990 - DNA, 1342 bp, Homo sapiens; identical to SEQ ID NO: 1755

SEQ ID NO: 6991 - DNA, 924 bp, Homo sapiens; identical to SEQ ID NO: 1756

SEQ ID NO: 6992 - DNA, 907 bp, Homo sapiens; identical to SEQ ID NO: 1757

SEQ ID NO: 6993 - DNA, 1400 bp, Homo sapiens
agtgtgtagacccttggctaactaaaaccaaaaaaacctgtccagtgtgcaagcaaaaagttgttccttctcaaggcgattcagactctgacacagacagtagtcaagaagaaaatgaagtgacagaacatacccctttactgagacctttagcttctgtcagtgcccagtcatttggggctttatcggaatcccgctcacatcagaacatgacagaatcttcagactatgaggaagacgacaatgaagatactgacagtagtgatgcagaaaatgaaattaatgaacatgatgtcgtggtccagttgcagcctaatggtgaacgggattacaacatagcaaatactgtttgactttcagaagatgattggtttatttccctttaaaatgattaggtatatactgtaatttgattttttgctcccttcaaagatttctgtagaaataacttattttttagtattctacagtttaatcaaattactgaaacaggacttttgatctggtatttatctgccaagaatatacttcattcactaataatagactggtgctgtaactcaagcatcaattcagctcttcttttggaatgaaagtatagccaaaacataaaaaaaaaaaaaatcctcagtatagcttgcaattaagacctagatcacagtatttaagtgttttgcgttttatacatgaggtcagtgctacagccacctagcatgaactaacccagcttccacctccataaagttacctagagttgttgagttggaatatgttctggcatttacctgacctgccaatcattagggagaggcaacaaggtaattcagcctttcctcctatcagcacaaagaaactcaaagctgttttttccctttctgttccaaagcagtcttatcctgacaggagcggtctatactagtgcagatttcaacacttttttttaacgttttaattactatagtgttatgtagagatttgattgagcagctaatgtttctgaactttacttactaattttcagtgtccttaagggttctgtagtgttatcaaagcaaaaagaaaatgctgcataaaaataccaaacttcagcaactgttaatactcagatcatatacctcttaataaatagcatcttatgctaattagccctgctaaactatgtacagaggaaactgttcaagtattggatttgaaagtaagtgacttatgtttaacagaactaatgatgtattgaaacactgtattatgaaaagctaaattatacatcattgtaactatgtagaaagtgtagactaatgtataatcaaaatgctaaggatttttatatggccttgtatgaggggagtttgaatgttaataaacatgttttccaaaaaaaaaaaaaaaaaaaaaaaaaaaaa

SEQ ID NO: 6994 - DNA, 600 bp, Homo sapiens
tggtactcatttcgcctctggttcttgccaatcctgaatctgcaacaactttcaaggtccttgctgcgaaagtgctcaaccttgtgctgccaaacttgtccctcgggcccatcgactccagcgtgctctctcggaataagacagaggtcgacatttataactcagaccccctgatctgccgggcagggctgaaggtgtgcttcggcatccaactgctgaatgccgtctcacgggtggagcgcgccctccccaagctgactgtgcccttcctgctgctccagggctctgccgatcgcctatgtgacagcaaaggggcctacctgctcatggagttagccaagagccaggacaagactctcaagatttatgaaggtgcctaccatgttctccacaaggagcttcctgaagtcaccaactccgtcttccatgaaataaacatgtgggtctctcaaaggacagccacggcaggaactgcgtccccaccctgaatgcattggccggtgcccggctcatggtctgggggatgcaggcaggggaagggcagagatggcttctcagatatggcttgcaaaaaaaaaaaaaaaaaaaaaaaaaaaaaaa

SEQ ID NO: 6995 - DNA, 1031 bp, Homo sapiens; identical to SEQ ID NO: 1760

SEQ ID NO: 6996 - DNA, 1400 bp, Homo sapiens
cccgggtccctgtcatgctactttctccatcccagttcagactgtccaggacatcttatctgcagccataagagaattataaggcagtgatttcccttaggcccaggacttgggcctccagctcatctgttccttctgggcccattcatggcaggttctgggctcaaagctgaactggggagagaagagatacagagctaccatgtgactttacctgattgccctcagtttggggttgcttattgggaaagagagagacaaagagttacttgttacgggaaatatgaaaagcatggccaggatgcatagaggagattctagcaggggacaggattggctcagatgacccctgagggctcttccagtcttgaaatgcattccatgatattaggaagtcgggggtgggtggtggtggtgggctagttgggcttgaatttaggggccgatgagcttgggtacgtgagcagggtgttaagttagggtctgcctgtatttctggtccccttggaaatgtccccttcttcagtgtcagacctcagtcccagtgtccatatcgtgcccagaaaagtagacattatcctgccccatcccttccccagtgcactctgacctagctagtgcctggtgcccagtgacctgggggagcctggctgcaggccctcactggttccctaaaccttggtggctgtgattcaggtccccaggggggactcagggaggaatatggctgagttctgtagtttccagagttggctggtagagccttctagaggttcagaatattagcttcaggatcagctgggggtatggaattggctgaggatcaaacgtatgtaggtgaaaggataccaggatgttgctaaaggtgagggacagtttgggtttgggacttaccggggtgatgttagatctggaacccccaagtgaggctggagggagttaaggtcagtatggaagatagggttgggacagggtgctttggaatgaaagagtgaccttagagggctccttgggcctcaggaatgctcctgctgctgtgaagatgagaaggtgctcttactcagttaatgatgagtgactatatttaccaaagcccctacctgctgctgggtcccttgtagcacaggagactggggctaagggcccctcccagggaagggacaccatcaggcctctggctgaggcagtagcatagaggatccatttctacctgcatttcccagaggactagcaggaggcagccttgagaaaccggcagttcccaagccagcgcctggctgttctctcattgtcactgccctctccccaacctctcctctaacccactagagattgcctgtgtcctgcctcttgcctcttgtagaatgcagctctggccctcaataaatgcttcctgcatt

SEQ ID NO: 6997 - DNA, 850 bp, Homo sapiens; identical to SEQ ID NO: 1762

SEQ ID NO: 6998 - DNA, 600 bp, Homo sapiens
tgcagtgtaaaagtaagtggacagaaattctaaccaagaggatgactaatggtcggcgtatatactatggcatgaatgccctgcgggccaaggtcagccttattgaaaggttgtatgaaataaatgtggaagatactaatgaaatagactgggaagatcttgctagtgccataggtgatgttcctccatcttacgttcaaactaaattttctaggctgaaagctgtctatgttccattttggcagaaaaagacttttccagagatcatcgactacctttatgagacgactctacctttgctgaaggaaaagttagaaaaaatgatggagaaaaaaggcactaaaatccagactcctgcagcacccaagcaagttttcccatttcgagacatcttttattatgaagacgatagtgaaggaggaggacatagaaaaagaaagcgaaggggaattccgtaaagcctagaatcaaaagaaaacaaaacccatagtcaagccacagacaagcccagaataatatggccaggggatcaatccgattagccgactggcccagatccagcaggcaaaaaaggagaaggagccagagtacacgctcctc

SEQ ID NO: 6999 - DNA, 896 bp, Homo sapiens; identical to SEQ ID NO: 1764

SEQ ID NO: 7000 - DNA, 1400 bp, Homo sapiens
atcatggacagctgtgatgagttgataccagagtatctcaattttatccgtggtgtggttgactctgaggatctgcccctgaacatctcccgagaaatgctccagcagagcaaaatcttgaaagtcattcgcaaaaacattgttaagaagtgccttgagctcttctctgagctggcagaagacaaggagaattacaagaaattctatgaggcattctctaaaaatctcaagcttggaatccacgaagactccactaaccgccgccgcctgtctgagctgctgcgctatcatacctcccagtctggagatgagatgacatctctgtcagagtatgtttctcgcatgaaggagacacagaagtccatctattacatcactggtgagagcaaagagcaggtggccaactcagcttttgtggagcgagtgcggaaacggggcttcgaggtggtatatatgaccgagcccattgacgagtactgtgtgcagcagctcaaggaatttgatgggaagagcctggtctcagttaccaaggagggtctggagctgcctgaggatgaggaggagaagaagaagatggaagagagcaaggcaaagtttgagaacctctgcaagctcatgaaagaaatcttagataagaaggttgagaaggtgacaatctccaatagacttgtgtcttcaccttgctgcattgtgaccagcacctacggctggacagccaatatggagcggatcatgaaagcccaggcacttcgggacaactccaccatgggctatatgatggccaaaaagcacctggagatcaaccctgaccaccccattgtggagacgctgcggcagaaggctgaggccgacaagaatgataaggcagttaaggacctggtggtgctgctgtttgaaaccgccctgctatcttctggcttttcccttgaggatccccagacccactccaaccgcatctatcgcatgatcaagctaggtctaggtattgatgaagatgaagtggcagcagaggaacccaatgctgcagttcctgatgagatcccccctctcgagggcgatgaggatgcgtctcgcatggaagaagtcgattaggttaggagttcatagttggaaaacttgtgcccttgtatagtgtccccatgggctcccactgcagcctcgagtgcccctgtcccacctggctccccctgctggtgtctagtgtttttttccctctcctgtccttgtgttgaaggcagtaaactaagggtgtcaagccccattccctctctactcttgacagcaggattggatgttgtgtattgtggtttattttattttcttcattttgttctgaaattaaagtatgcaaaataaagaatatgccgttttaaaaaaaaaaaaaaaaaaaaaaaaaaaaa

SEQ ID NO: 7001 - DNA, 600 bp, Homo sapiens
tctcccaaaatgctgggattacaggggtgagccaccgtgcccaacctcacttgcttcttatccttacactcccccagccccagagaaactgccacatacaccacaaaaaccaaacatgccccaatgaccttagccccattgctccattcactcccaggtgagaattcaggcaaacgtccacaaaggtcacaggcagcgtacatacggttctgttataccccatatattaccccttcatgtcctaaagaagacattttctcttagagattttcattttagtgtatctttaaaaaaaaaatcttgtgttaacttgcctccatctttttcttggggtgagggacaccagggaatgacccttttgtgtctatgatgttgctgttcacagcttttcttgataggcctagtacaatcttgggaacagggttactgtatactgaaggtctgacagtagctcttagactcgcctatcttaggtagtcatgctgtgcattttttttttcattggtgtactgtgtttgatttgtctcatatatttggagtttttctgaaaaatggagcagtaatgcagcatcaacctattaaaatacttttaagcctttt

SEQ ID NO: 7002 - DNA, 600 bp, Homo sapiens
ataaagggtcttctagggcacaaaactcactctaggtttatattgtatgtagcttatattttttactaaggtgtcaccttataagcatctataaattgacttctttttcttagttgtatggccaggcagtccccattttaggagttggcttctgcaaattcaatccattgagctaactgttggggagcaatttggtagttgtagacatttgcagggaagggagatgtctgattctaaatgggagttgatgctcaggtccccagccaggtttgcatccagccctgagacatgtaggaaacacctttcagacccaggctctgaagattcccagaagccacaaggattgaagggaaaaggtgatcctggtaactgttccaggattgctccaggtttgagatggtattgctaaatttaaaattaaacaagaaacccaacaacagcttttaaagtgtcttctatctcattgtattttttttaacttgccccaatgatagaaaagtcttttgctgaaatgattttgatgatttttgtttatcgtttataaaaaggaaaagaaatatacaaactttgacttttgtgaaaaaaaaaaaaaaaaaaaaa

SEQ ID NO: 7003 - DNA, 600 bp, Homo sapiens
gaaaagaggcacattgcatagaagccattggggagttcagtggaagttctgtaagatgtgcatgtactatttgatgcgttttctttgcttcactgcttttaatacttagcagtattgttggtctaagtcaatttgattattgaggagtctcagagcaaggtgcgttctagatgtcatcctaaaaaacacttcatatataattaatcactattttgtataattacatattgctgcttgtgtgtttttttttttttccatttagttgggcgttgtgttttacacaaaaccatttttgaattaaggctatgatattaagatagaaatttggactgttgttctgcttttcctggcactcaaattcatgactagttttgaggtcaaacctatgttcgtaatgagagattttataaggatcaactaagaaatggaaggcaggtgaagatataaaaccctagaatgcttaaatgtgctgtaaaactattgtagatgtcactggattttaccaagtaatatcctttcttttttttttccccccatctgctgtggcttttcagttaaaattttgtttataaaaggaatttgtttattacagctctacct

SEQ ID NO: 7004 - DNA, 1400 bp, Homo sapiens
tgtggttggttggtatagaatggtgggaattcaaatttttctaaactcatggtaagtatattgtaaaatacatatgtactaagaattttcaaaattggtttgttcagtgtggagtatattcagcagtatttttgacatttttctttagaaaaaggaagagctaaaggaattttataagttttgttacatgaaaggttgaaatattgagtggttgaaagtgaactgctgtttgcctgattggtaaaccaacacactacaattgatatcaaaaggtttctcctgtaatattttatccctggacttgtcaagtgaattctttgcatgttcaaaacggaaaccattgattagaactacattctttaccccttgttttaatttgaaccccaccatatggatttttttccttaagaaaatctccttttaggagatcatggtgtcacagtgtttggttcttttgttttgttttttaacacttgtctcccctcatacacaaaagtacaatatgaagccttcatttaatctctgcagttcatctcatttcaaatgtttatggaagaagcacttcattgaaagtagtgctgtaaatattctgccataggaatactgtctacatgctttctcattcaagaattcgtcatcacgcatcacaggccgcgtctttgacggtgggtgtcccatttttatccgctactctttatttcatggagtcgtatcaacgctatgaacgcaaggctgtgatatggaaccagaaggctgtctgaacttttgaaaccttgtgtgggattgatggtggtgccgaggcatgaaaggctagtatgagcgagaaaaggagagagcgcgtgcagagacttggtggtgcataatggatattttttaacttggcgagatgtgtctctcaatcctgtggctttggtgagagagtgtgcagagagcaatgatagcaaataatgtacgaatgttttttgcattcaaaggacatccacatctgttggaagacttttaagtgagtttttgttcttagataacccacattagatgaatgtgttaagtgaaatgatacttgtactccccctacccctttgtcaactgctgtgaatgctgtatggtgtgtgttctcttctgttactgatatgtaagtgtggcaatgtgaactgaagctgatgggctgagaacatggactgagcttgtggtgtgctttgcaggaggacttgaagcagagttcaccagtgagctcaggtgtctcaaagaagggtggaagttctaatgtctgttagctacccataagaatgctgtttgctgcagttctgtgtcctgtgcttggatgctttttataagagttgtcattgttggaaattcttaaataaaactgatttaaataataaaaaaaaaaaaaaaaaaaa

SEQ ID NO: 7005 - DNA, 1247 bp, Homo sapiens; identical to SEQ ID NO: 1770
  misc_feature (1184)..(1184): n is a, c, g, or t

SEQ ID NO: 7006 - DNA, 600 bp, Homo sapiens
cagagcatctgtgagaagtgtgagaacctgaccacaggcaagcactgcgagacctgcatatctggcttctacggtgatcccaccaatggagggaaatgtcagccatgcaagtgcaatgggcacgcgtctctgtgcaacaccaacacgggcaagtgcttctgcaccaccaagggcgtcaagggggacgagtgccagctatgtgaggtagaaaatcgataccaaggaaaccctctcagaggaacatgttattatactcttcttattgactatcagttcacctttagtctatcccaggaagatgatcgctattacacagctatcaattttgtggctactcctgacgaacaaaacagggatttggacatgttcatcaatgcctccaagaatttcaacctcaacatcacctgggctgccagtttctcagctggaacccaggctggagaagagatgcctgttgtttcaaaaaccaacattaaggagtacaaagatagtttctctaatgagaagtttgattttcgcaaccacccaaatatcactttctttgtttatgtcagtaatttcacctggcccatcaaaattcaggtgcaaactgaacaatga

SEQ ID NO: 7007 - DNA, 1400 bp, Homo sapiens
tggtttgccctcctatgagtgagagggagggcctcagtcttccgcccccagcccactctcatggtccacactgctgggggaaagggaaaggaaatcagcaactcttcaatcccaacctgcgctgtgattttagcctcctgagattggagtttccatcccatgttggtttgtcccagtctaacgtgttgataaaatgtgacttgacggttgagacaaaaaatacagtagagacagaaacgaagcccagaacaaagatgaaacttgaattaccatctcagaagtcaagctgatggagtatgtgataaagtgaatgtacatgtatatacacacacacctccatatatacacgtgtgtatcagtttggtaatatgcaggtaggcattacatgcatatgtatgtagacatatgcatgcatgtatatgtaaaatatatacttttccaagacaaaatggaacatcacttctcctagtttttctgaacactggctgggaaatgtaaactgtgtatgcatataagtatatgctttatgtatgcatatgtatgtagatatgtttatatctatcgtctgcatcactctcctcagtgttgatgtcaacatgcaatgacaactgataaagcgagatggtagttctgcctggtttgcagtctgagtgggaaagtcctgtttttgatgagcactccttgttagctaacatttaaattctttttgtgacctcagaatgtctctggatctttcctcattgactgactctgtgccacgtcatccatagtttattgttagtatgaacacaactgtaacatttacctggtatctacatccttacctgcattggaaaatgtttgctacctcacaacaaccatttgcctcctttaagaacactgatgggctgcactttttggatagaaatagaatttgatttcagaatgtatgcttggtgagtctcagtgcccaggaacacttttggaataatttatcagacattgaacttctgtgattaatcgcttttatagatttactcagtctttaaaattcgtctctgatttgccagagaaaaacggtggtagccatggaaatcgggagtgaaggagcactgcttcattgtggctcagcccttcctaggggcctctgccctttgatgtccttgagctactcttcagctctggaagttgtggacaaaccgtaggaatgtatgtgtgcgtgtggtggagtgattgtctgtgaatgacaggccctggctattgattgatgttgcatcaatttagcaaattcatttcctcattcttgatggcctgaatatatgtctgcacttttaatgctcctcttaaccagttgtaacatcttaccatttccctaccaaattgaattagtttaataaaatcttttgacacatgttaaaaac

SEQ ID NO: 7008 - DNA, 1400 bp, Homo sapiens
attttgggatatcttttctcacattcagacttacacttaatggtgttagaaatcaacaaaactcctttttaaaaagaaaagatattaagcctgcctacttctacaatgcattctgttacctatttgaacagtatgtttgtaactatggcaatgaagtcagtagataggaaaccagttattccttctacctttaaaaattttgagaacttgccaaccagggattaaagctattatcttgaacagagtccctaaagctagtctagtttttgccacatctgcaatgattattgtttaatttcaaaagaatcctcaggctctacaatctaggggtggtaaatgtgtttccactatacttgggaaaaggtcagtaggatgtgcatcctagggaagataaaatcgtatatggtaaaggcatttgagttaattttgcattatatctaggaaccatattatttaaaatttgaatcctattaatgctgagagatcctaagagctagtatgttgtaaaacctgccacctgaataaaatgaaaaaaaaaagtgtttttttgagacagagtcttgctctgttgcccaggctggagtgcagtggtgtgatcttgggtcactgcaaactccgcctcccaggttcacgccattctcctgcctcagcctcccgagtagctgggaccacaggggcccaccaccgcgcccggctaattttttgtatttttagtagagacggggtttcaccgtgttagccaggatgttctcgatctcctgacctcatgatccgcccgcctcggcctcccaaagtgctgggattacaggcgtgagccaccgtgcccggccctaaaatgaaattattaatgttggttctgaaacagcctcttagcattcagattgtattttaaatacttaaacacaccaattgtagaaagcaaccctttatttttagcaagtttggtttactcttctcccatgagattttgtctttctacattaactagtaagacataaagatttgaaactggaactatattatactttttaaccaatctctgtggcttcactcatgaaatttacttcagttaatatgagactgggggttaagttgtaactaatatgcaaaattgctttgtatatttggtgattttgtaatgtaagtgaattgattcttatttcactgatactattaatcatgcagtgtacaattcaaaatcatgcaatgtttcactttagaattggatttgaagaactcgactttatgtgatcatggtattggtatacatgtggggtggagaacttattttttcattttgtcacaataggtatatactgacaaggcttcaggaaaaaagttgttagaagattttttaatgtataataaagtccatgatttttgtacagtgttttttaatg

SEQ ID NO: 7009 - DNA, 600 bp, Homo sapiens
gtttagatatatttataataaactgatttaaactttttctataagaagaaaaattaagaccacttatttgaaaacaaagatgaagtctcaccttccagtttgctttctcattagttttttccaaagtaagttattgaagctgtgattgacatttttctcataatgaatcctctcaggacattgtgtagcctatggtaagtacaaagggagaggaagacattttgaattttaagagctttattatcagtttaaccctccctagttgaatgttattttcttcttgttccattaagtcagaatacaaatcagcacagatattcgaatgtttccaatattttaaaatgtaatgttacttatgaaaagtattttgcttaaggttgtgtgtgtattgtgtatatacctcaagttcaagttaatggcattgatttatgttccagacaaaaataacacaaataataatatccttcgttataaccacaatgagataagtattggcattagtgttcagtgccattttatactttctctctgtgttctctgtattgtactaaccaacctcccaaatcgctgagctgcttgtttaaaaaaaaaaaaaaaaaa

SEQ ID NO: 7010 - DNA, 600 bp, Homo sapiens
aaccgcctcatgcaggtgtggtgcgaccagagacacgaccccgggggctggaccgtcatccagagacgcctggatggctctgttaacttcttcaggaactgggagacgtacaagcaagggtttgggaacattgatggcgaatactggctgggcctggagaacatttactggctgacgaaccaaggcaactacaaactcctggtgaccatggaggactggtccggccgcaaagtctttgcagaatacgccagtttccgcctggaacctgagagcgagtattataagctgcggctggggcgctaccatggcaatgcgggtgactcctttacatggcacaacggcaagcagttcaccaccctggacagagatcatgatgtctacacaggaaactgtgcccactaccagaagggaggctggtggtataacgcctgtgcccactccaacctcaacggggtctggtaccgcgggggccattaccggagccgctaccaggacggagtctactgggctgagttccgaggaggctcttactcactcaagaaagtggtgatgatgatccgaccgaaccccaacaccttccactaagccagctccccctcc

SEQ ID NO: 7011 - DNA, 600 bp, Homo sapiens
acagagctggtgctgcggcggatctcagcctcgtgccagcacccgacagccttcgaggaagccatacccaagtccttcatgatcagcgcagacatggcccatgctgtgcatcccaactacctggacaagcatgaggagaaccaccggcctttattccacaagggccccgtgatcaaggtgaacagcaagcaacgctatgcttcaaacgcggtgtcagaggccctgatccgagaggtggccaacaaagtcaaggtccccctgcaggatctcatggtccggaatgacaccccctgtggaaccaccattggacctatcttggcttctcggctggggctgcgggtgctggatttaggcagcccccaactggccatgcactctatccgggagatggcctgcaccacaggagtcctccagaccctcaccctcttcaagggcttctttgagctgttcccttctctaagccataatctcttagtggattgagccctcttggaaagacttctctgccatccctttgcacctgagaggggaagttctcagctgagctgaagctggattattaaagtggattgtcactcagaaaaaaaaaaaaaaaaaaaa

SEQ ID NO: 7012 - DNA, 600 bp, Homo sapiens
cacatgaagcgacaaagacaccccagattgcgcccccagtcagcccagtcttctttccctccctcccctggtccttctcctgatgtgcaactggcaactctggctcagagagtcaaggaagttttgccccatgtgccattgggtgtcatccagagagacctggccaagactggctgtgtagacttgactatcactaatctgcttgagggggccgtagctttcatgcctgaagacatcaccaagggaactcagtccctacccacagcctctgcctccaagtttcccagctctggcccggtgacccctcagccaacagccctaacatttgccaagtcttcctgggcccggcaggagagcctgcaggagcgcaagcaagcactatatgaatacgcaagaaggagattcacagagagacgagcccaggaggctgactgagctcaaaggaacaggatggcacccagagccgcaggacggagactgggggcagccctcacccaactcacaacaggctggatgggtgggtggtaaaaagggaaggatgaggctcccccaatgtcacattaaattcatggttttcattcaaaaaaaaaaaaaaaaaaa

SEQ ID NO: 7013 - DNA, 600 bp, Homo sapiens
ttgaaatccaaactactttcttaatatcactttggtctccatttttcccaggacaggaaatatgtccccccctaactttcttgcttcaaaaattaaaatccagcatcccaagatcattctacaagtaattttgcacagacatctcctcaccccagtgcctgtctggagctcacccaaggtcaccaaacaacttggttgtgaaccaactgccttaaccttctgggggagggggattagctagactaggagaccagaagtgaatgggaaagggtgaggacttcacaatgttggcctgtcagagcttgattagaagccaagacagtggcagcaaaggaagacttggcccaggaaaaacctgtgggttgtgctaatttctgtccagaaaatagggtggacagaagcttgtggggtgcatggaggaattgggacctggttatgttgttattctcggactgtgaattttggtgatgtaaaacagaatattctgtaaacctaatgtctgtataaataatgagcgttaacacagtaaaatattcaataagaagtcaaaaaaaaaaaaaaaaaaaaaaaaaaaaaaaaaaaaaaaaaaaaaaaaaaaaa

SEQ ID NO: 7014 - DNA, 600 bp, Homo sapiens
tgcgctggtgatcggtgccacggtgatggagggcttctacgtcatcttcgacagagcccagaagagggtgggcttcgcagcgagcccctgtgcagaaattgcaggtgctgcagtgtctgaaatttccgggcctttctcaacagaggatgtagccagcaactgtgtccccgctcagtctttgagcgagcccattttgtggattgtgtcctatgcgctcatgagcgtctgtggagccatcctccttgtcttaatcgtcctgctgctgctgccgttccggtgtcagcgtcgcccccgtgaccctgaggtcgtcaatgatgagtcctctctggtcagacatcgctggaaatgaatagccaggcctgacctcaagcaaccatgaactcagctattaagaaaatcacatttccagggcagcagccgggatcgatggtggcgctttctcctgtgcccacccgtcttcaatctctgttctgctcccagatgccttctagattcactgtcttttgattcttgattttcaagctttcaaatcctccctacttccaagaaaaacaattaaaaaaaaaaacttcattctaaaccaaaaaaaaaaaaaaaaaa

SEQ ID NO: 7015 - DNA, 600 bp, Homo sapiens
cggcagctgagattcgaaagcaccatgaaaagagaccccactgccgagcaattccaggaagagctggaaaaattccagcaggccatcgattcccgggaagatcccgtcagttgtgccttcgtggtactcatggctcacgggagggaaggcttcctcaagggagaagatggggagatggtcaagctggagaatctcttcgaggccctgaacaacaagaactgccaggccctgcgagctaagcccaaggtgtacatcatacaggcctgtcgaggagaacaaagggaccccggtgaaacagtaggtggagatgagattgtgatggtcatcaaagacagcccacaaaccatcccaacatacacagatgccttgcacgtttattccacggtagagggatacatcgcctaccgacatgatcagaaaggctcatgctttatccagaccctggtggatgtgttcacgaagaggaaaggacatatcttggaacttctgacagaggtgacccggcggatggcagaagcagagctggttcaagaaggaaaagcaaggaaaacgaaccctgaaatccaaagcaccctccggaaacggctgtatctgcagtag

SEQ ID NO: 7016 - DNA, 1400 bp, Homo sapiens
cagagcaaacaccagttgtggttcatgtctgcgggctggagatgccacctgatgcagtagaagctggtggaggcatggaaaagaccttgccagagcctgtgggcacccaagtcagcatggaagagattcagaatgagtcggcctgtggcctagatgtgggagaatgtgaaaacagagcgagagagatgccaggggtatggggcgccgggggctccctgaaggtcaccattctgcagagcagtgacagccgggcctttagcactgtacccctgacacttgtcccccgccccagtgactccgtctcctccacccctgcggctaccagcactccctctaagcaggccctccagttcttctgctacatctgcaaggccagctgctccagccagcaggagttccaggaccacatgtcggagcctcagcaccagcagcggctaggggagatccagcacatgagccaagcctgcctcctgcccctgctgcccgtgccccgggacgtcctggagacagaggatgaggagcctccaccaaggcgctggtgcaacacctgccagctctactacatgggggacctgatccaacaccgcaggacacaggaccacaagattgccaaacaatccttgcgacccttctgcaccgtttgcaaccgctacttcaaaacccctcgcaagtttgtggagcacgtgaagtcccaggggcataaggacaaagccaaggagctgaagtcgcttgagaaagaaattgctggccaagatgaggaccacttcattacagtgggcgctgtgggttgcttcgagggtgatgaagaagaggaagaggatgatgaggatgaagaagagatcgaggttgaggaggaactctgcaagcaggtgaggtccagagatatatccagagaggagtggaagggctcggagacctacagccccaatactgcatatggtgtggacttcctggtgcccgtgatgggctatatctgccgcatctgccacaagttctatcacagcaactcaggggcacagctctcccactgcaagtccctgggccactttgagaacctgcagaaatacaaggcggccaagaaccccagccccaccacccgacctgtgagccgccggtgcgcaatcaacgcccggaacgctttgacagccctgttcacctccagcggccgcccaccctcccagcccaacacccaggacaaaacacccagcaaggtgacggctcgaccctcccagcccccactacctcggcgctcaacccgcctcaaaacctgatagagggacctccctgtaccctggcctgcctgggtccagatctgctaatgctttttaggagtctgcctggaaactttgacatggttcatgtttttactcaaaatccaataaaacaaggtagtttggctg

SEQ ID NO: 7017 - DNA, 1400 bp, Homo sapiens
ttgacggtctctgtaccagggatggaaaaagccttacaccagtacacgttggagccttcagaaaaaccgtttgacatgaaatcaattcctcttgctatggctcctgtctttgaacagaaagcagaaatcacacttgtggctactaagccagagaagttggctccttccaggcaagacattttccaagaacaattggctgccattcctgagtttctgaatataggacccttgttcaagtcttctgagcctgttcaacttacagaagcagagacagaatattttgttcgatgtatcaagcacatgtttaccaatcacatcgtgttccagtttgactgcaccaacactctcaatgaccagctgctggaaaaagtgacagtgcagatggagccatcagattcctatgaagtgctgtcttgtatcccagcccccagccttccttataaccaaccaggaatatgttacactcttgttcgtttgcctgatgatgaccctacagcagttgcaggctcctttagctgcaccatgaagtttacagtccgggactgtgaccctaacactggagttccagatgaggatgggtatgatgatgagtatgtgctggaagatctcgaagtgactgtgtctgaccatattcagaaagtactgaagcctaactttgctgctgcttgggaagaggtgggagatacctttgagaaagaggaaacctttgccctcagttctaccaaaacccttgaagaggctgtcaacaatatcatcacatttctgggcatgcagccatgtgagaggtccgataaagtacctgagaacaagaattcccattcgctctatctggcaggtatattcagaggtggctatgatttattggtgaggtccaggctggccttagccgatggagtgaccatgcaggtgactgtcagaagtaaagagagaacacctgtagatgttatcttagcttctgttggataaatgcttactggacaagaggaaactgatgcacactacatggtcagtgggcttttaggctagtggcatcagtttcccagaatcagacttttgaagatgaatgactttggagaagcaaattaaacatttggccctgagccagcagatcaagcaaatgtctatctttgcgcatgggttgttttttttttttttctttttattctacttggtcagctttgggacgatagtgcagctttgggtgatcttgaaaatcaaatactatcctatactccagctgcttaacttcattttattctttaatgtgtacctgaaagctcctggcaatgctggaaaatttttatcccagaggggtgggggggaggggggaggggaagccagagtccacttttgtcacaattcatttttattaatagaaaataaacacttattccagtttc

SEQ ID NO: 7018 - DNA, 600 bp, Homo sapiens
accatctccccctcaggacagggagtctgatccatcccattcacccagtgacttctttttgcccaggcctggactttttgcatcagtcacgttaaccagatgactttgcctgttaccaaacctcatgcatccacgtttgcgtctggggaggaataaaaagacatcgttcccgcttctgcgttttgttattcctactgccgccataggaattatttcgttggctgaacgttaccagcaccccgagaacacattttgatagaatcagagtagaggacatggctgtcttctaaaaagccacgacatgaaaatgacaatccctttcgtctccttcctccgctgcttccacctaacgcagcctcctgcctccgcctttgtttcatagtgaggattttattttgcacggcgccctccctctaaatacctaccctagatgatttcatcctgcccctcacttcttaacatattcctgtgtctttgtaatggccaaatttctccttccactcgtccgcacggtacgtcttcatgggagtcattttattccttacagcttccttgtaaccacagccctaaatccatgataaagctactcttgtactcttc

SEQ ID NO: 7019 - DNA, 600 bp, Homo sapiens
tgcaccctaggccatttcctagctcccgccttcctccaggaattatcgggggtgaatatgaccaaagaccaacacttccctatgttggagacccaatcagttcactcattcctggtcctggggagacgcccagccagtttcctccactgagaccacgctttgatccagttggcccacttccaggacctaaccccatcttgccagggcgaggcggccccaatgacagatttccctttagacccagcaggggtcggccaactgatggccggctgtcattcatgtgattgatttgtaatttcatttctggagctccatttgtttttgtttctaaactacagatgtcaactccttggggtgctgatctcgagtgttattttctgattgtggtgttgagagttgcactcccagaaaccttttaagagatacatttatagccctaggggtggtatgacccaaaggttcctctgtgacaaggttggccttgggaatagttggctgccaatctccctgctcttggttctcctctagattgaagtttgttttctgatgctgttcttaccagattaaaaaaaagtgtaaattaaaaaaaaaaaaaaaaaa

SEQ ID NO: 7020 - DNA, 1400 bp, Homo sapiens
cagaagagtggctggacattctggggaacgggctgttgaggaagaagacgctggtcccagggccgccaggttcgagccgcccggtcaagggccaggtggtcaccgtacatctgcagacgtcgctggagaatggcacacgggtgcaggaggagccggagctggtgttcactctgggtgactgtgacgtcatccaggccctggatctcagtgtcccactcatggacgtgggggagacggccatggtcactgctgactccaagtactgctacggcccccaaggcagcaggagcccatacatccccccgcacgcggccctgtgcctggaggtgaccctgaagacggctgtggacgggcctgacctggagatgctcacggggcaggagcgcgtggccctggccaaccggaagcgggagtgcggcaacgcccactaccagcgggcggacttcgtcctggccgccaactcctacgacctcgccatcaaggctatcacctccagcgccaaagtggacatgacgttcgaggaggaggcacagctcctgcagttgaaggtgaagtgtctgaacaacctggcggcctcgcagctgaagctcgaccactaccgcgcagccctgcgctcctgcagccttgtgctggagcaccagccagacaacatcaaggctctcttccgcaagggcaaggtgctggcccagcagggggagtacagtgaggccatccccatcctgagggcagccctgaagctggaaccttccaacaagacgatccacgcagagctctcaaagctggtgaagaagcatgcggcgcagcggagcacggagaccgccttgtaccggaaaatgctgggcaaccccagccggctgcctgctaagtgccctggcaagggtgcctggtccatcccatggaagtggctgtttggggcgactgctgttgccttggggggtgtggcactctctgtggtcatcgctgccaggaactgaccacctaggtggctgccaccccctctgcacaccatggaccctgccctgcgctccccaactcccccaggctccctgtccactgccctccctggtctggccccctcctccgggttaggggagcaaggattgggggtcgtgcagcccagccagcaggagggactgaggccctctaggaggaaagcccagagggagggggccctcattccttcagacccagttttcccccaccctccttaccccgctgggctaggtctccgccagggctggcctcagtttctcctcaacaggcctgggggcagcccttcccctgcctagtccccgcctgagtgccagccccccaccccgcctgccgccccctgtccaggttccctccccgccacagtgaaataaagcatcccaccctgcaaaaaaaaaaaaaaaaaaaaa

SEQ ID NO: 7021 - DNA, 600 bp, Homo sapiens
tggaggataagcgggtgaggttacagcccgagtgcaaaaagcgcctcaatgaccggattgagatgtggagttacgcagcaaaggtggccccagcagatggcttctctgatcttgccatgcaagtaatgacgtctccatctaagaactacattctctctgtgatcagtgggagcatctgtatattgttcctgattggcctgatgtgtggacggatcaccaagcgagtgacacgagagctcaaggacaggtagagccaccttgaccaccaaaggaactacctatccagtgcccagtttgtacagccctcttgtatagcatccccactcacctcgctcttctcagaagtgacaccaaccccgtgttagagcattagcagatgtccactgcgttgtcccatccagcctccactcgtgtccatggtgtcctcctcctcctcaccgtgcagcagcagcagctggtcgctggggttactgcctttgtttggcaaacttgggtttacctgcctgtagacaagtctctctcataccaacagaacttccggtacttccagaaccaactcacctgacctgcaactcaaaggcttttttaagaaaaccacca

SEQ ID NO: 7022 - DNA, 600 bp, Homo sapiens
tttgtgtctacccctgagctggctgcccaatctgatttcatcgtcgtggcctgctccttaacacctgcaaccgagggactctgcaacaaggacttcttccagaagatgaaggaaacagctgtgttcatcaacatcagcaggggcgacgtcgtaaaccaggacgacctgtaccaggccttggccagtggtaagattgcagctgctggactggatgtgacgagcccagaaccactgcctacaaaccaccctctcctgaccctgaagaactgtgtgattctgccccacattggcagtgccacccacagaacccgcaacaccatgtccttgttggcagctaacaacttgctggctggcctgagaggggagccgatgcctagtgaactcaagctgtagccaaacagtagagatggagggccgggaagcaaaccgtgccctggtattgtcagacacacccaggcttgatttggatccacaggcagagccaagggaaggtgtgattctctgaggaaagagtgattctgatatatgtacttgtcacattggtgttggacacatttgcgccaaaagtatggtaattctattattaaataattctctgag

SEQ ID NO: 7023 - DNA, 600 bp, Homo sapiens
ctcagctgccaaccctcccgggtcacttttgttcccaggtacctcatgggaagcatgtggatgacacaatccctggggctgtgcattcccacgtcttcttgctgcagcctgcccctagacatggacgcaccggcctggctgcagctgggcagcaggggtaggggtagggagcctcccctccctgtatcaccccctccctacacacacacacacacacacacacacacactgcctcccatccttccctcatgcccgccagtgcacagggaagggcttggccagcgctgttgaggggtcccctctggaatgcactgaataaagcacgtgcaaggactcccggagcctgtgcagccttggtggcaaatatctcatctgccggcccccaggacaagtggtatgaccagtgataatgccccaaggacaaggggcgtgcctggcgcccagtggagtaatttatgccttagtcttgttttgaggtagaaatgcaagggggacacatgaaaggcatcagtccccctgtgcatagtacgacctttactgtcgtatttttgaaaaattaaaaatacagtgtttaaaaacaaaaaaaaaaaaaaaaaaaaa

SEQ ID NO: 7024 - DNA, 600 bp, Homo sapiens
gcccccaggagcaagtggccctggcaggtgagcctgagagtccgcggcccatactggatgcacttctgcgggggctccctcatccacccccagtgggtgctaaccgcggcgcactgcgtggaaccggacatcaaggatctggccgccctcagggtgcaactgcgggagcagcacctctactaccaggaccagctgctgccggtcagcaggatcatcgtgcacccacagttctacatcatccagaccggggcggacatcgccctgctggagctggaggagcccgtgaacatctccagccacatccacacggtcacgctgccccctgcctcggagaccttccccccggggatgccgtgctgggtcactggctggggcgacgtggacaataatgtgcacctgccgccgccatacccgctgaaggaggtggaagtccccgtagtggaaaaccacctttgcaacgcggaatatcacaccggcctccatacgggccacagctttcaaatcgtccgcgatgacatgctgtgtgcggggagcgaaaatcacgactcctgccagggtgactctggagggcccctggtctgcaaggtgaatggcacctaa

SEQ ID NO: 7025 - DNA, 1400 bp, Homo sapiens
agattttattatcatagatacttgttttggttttgtgtatctgtactctctgcagatggtccaaaattgtaatggagtctgtattagaagaaaataagggtaaaatcaggctgaactgcatgtatatggctccactgtggcttgtgacacttttaaaatcatccgtatgtcagtgtatctggatacacgaggaaaaggaaagagtctcagagtggaacaaagagtgggaagaggtgatctgtaatgttacaaattgtgctattactccaaggtccaacttttccagtgcattacatggtattgtatatcagtggagaaatgtattatttccatgatcaaatgtagtctctgttaaggtcaagttttcttttataagcctttaattcatcctcagtgactctggcaaggctgcttctctatcactggctttgcacagaagtatgctctacttgcgttgctttagggcaggattctattttgagggaaaagacagtatccttattaccttttgtttgtttaatagcacaaatgcttatttgttatccaaaaacaacctccttcttatctgtgataaatctatagaaagaatttagctgcaagtggacaaaggaacaagcccccagaaaagaaagggaagaactgccttcttatactacagaacatgcattagtgtgggctatatagctgtggctcatgctacccaattccagatttctttgtcctctaagagttgattgctgtatattaaaattgaacatcagaggatgggaagagggctctgtaagccagaaccttactaaagtagagggcacaatcagtgtgaataaattcacttcagaatctcaagtcaaggccaggcacggcggctcacgcctgtaatcccagcactttgggaggccgagacaggcggatcacctgaggtcgggagttcgagaccagccttaccaacatggagaaaccccatctctactaaaaatacaaaattacctgggcgtggtggtgcatgcctgtaatcccatcatctactcaggaggctgaggcaggagaattgcttgaacccaggaggcggaggttgcagtgagccaggattgtgccattgcactccagcctgggcaacaagaacaaaactccatctcaaaaaataaaaatcccaatcccaagtcgaaatcacctcttgttttaaacaagaatgaatcattactgtgtatgttagggtattaaaactgtttcaccagtacagtgaaagttgtttcaacattttaaacaaacagtggttatagactctttctttaaccattgtatattttcttccattcttgtcattggtcaataggggagggtagattagctgctccagaattcaataaagtgtaatatttctaaaaaaaaaaaaaaaaaaa

SEQ ID NO: 7026 - DNA, 1400 bp, Homo sapiens
cggcctcctactgtacctcgtgcctgctgcggctgcgctggcctggctggccgtggggactaccgcggcctggtggggactgagccgcgagccccgaggttcgcgccccttgtcctccttcgttcagaaggcgcgacatcggcgaacactgttcgcttcgcctccggccaagtcgacagccaacggaaacctcctagagccgcggaccctgctcgaaggacctgaccctgccgaactgctcctcatgggcagttacctgggcaagcccgggccgccgcagcccgcccccgctccggagggccaggacctgcggaataggcctggccgccgcccgcccgcccggcgccgcgctccacaccgccctccccgccgacccatcgcgttcaccacttttacccctctctccccactcctcttctccgaccctccgggaggccttccccacgggatcgtgggactttaccagatcggtttgtaataacacctcgaagacgctatccgatccatcaggcccagtattcctgtccgggggtacttcccacagtgtgctggaatggttatcacaagaaggctgtgctgtcccctcgcaactccaggatggtgtgtagcccagtgactgtgaggatcgcccctcctgacagaagattttcgcgttctgcgataccagagcagataatcagctcaacactgtcctcaccatcaagtaatgccccagacccatgtgcaaaggagactgtactgagtgccctcaaagagaagaagaagaaaaggacagtggaggaagaagaccaaatattccttgatggccaggaaaataaaagaagctgtcttgtcgacggtctcactgatgcctcttctgcattcaaagttcctcgacccgggccagatacactccagttcacagtggatgtcttccactttgctaatgactccagaaacatgatatacatcacctgccacctgaaggtcaccctagctgagcaggacccagatgaactcaacaaggcctgttccttcagcaagccttccaacagctggttcccagtggaaggcccggctgacatctgtcaatgctgtaacaaaggtgactgtggcactccaagccattccaggaggcagcctcgtgtcgtgagccagtggtccacgtctgcttcccgtaaccgcaggcatgtgacagaagaagcagatgtcaccgtgggggccactgatcttcctggacaggagtggtgaccatgaagtagagcagtgggctttgccttctgacacctcagtggtgctgctgggcgtaggcctggctgtggtggtgtccctgactctgactgctgttatcctggttctcaccaggaggtgtcgcactgcctcccaccctgtgtctgcttccgaataaaagaagaaagcaa

SEQ ID NO: 7027 - DNA, 1036 bp, Homo sapiens; identical to SEQ ID NO: 1792

SEQ ID NO: 7028 - DNA, 1400 bp, Homo sapiens
atgagcgaaggctacgagctgccctagaagaggtatacccagacctcactccagaagagaccagaagaaacagccttggaggtgatgtcttatttgtggggaaacatcacccactccatgacttcattttagagctgtaccagacaggttccacagagccagtggaggtaccccctgaactatgtcatgggattcaaggaaagttttctttggatgaagaagccattcttccagatcaaatagtatgttctcctgttcctatgttaagggatctgacacagaacactgtagtcagtattaattttaaagacccacagtttgctgaagattacatttttaaagctgtaatgcttccaggagcaagaaagccagcagcagtactgaaacctagtgactgggaaaaatccagcaatggacggcagtggaagcctcagcttggctttaaccgtgaccggaggcctgtgcacctggatcaggcagccttcaggactttgggccatgtgatgccaagaggctcaggaactggcatttacagcaatgctgcaccaccacctgtgacttaccagggaaacttatacaggccgcttttgagaggacaagcccagattccaaaacttatgtcaaatatgaggccccaggattcctggcgaggtcctcctccccttttccagcagcaaaggtttgacagaggcgttggggctgaacctctgctcccatggaaccggatgctgcaaacccagaatgcagccttccagccaaaccagtaccagatgctagctgggcctggtgggtatccacccagacgagatgatcgtggagggagacagggatatcccagagaaggaaggaaataccctttgccaccaccctcaggaagatacaattggaattaagcttttgtaaagctttcccaaatcctttcatcattctacagttttatgctatttgtggaaagatttctttctcaagtagtagtttttaataaaactacagtactttgtgtatttcttttaactgtgtatatttctactgatctgatctcactgtttatgttgctttccaaagatgtatgttgcataatacagtggatctgaatttattattgcttataaaacacatttgatggaataggagtactggtttttcataatggttaaaaatgaaaccagctgtggatttcaaaacacagtgtattctagatcatctaagatccatgctgatttttattgcacaagaattaggtttgaactcttgagctggaacctcagcaaactagagtatatattgttcagtatttctttggaaacatttcattaatgtacttgtcttacagaaatttctgaactttagtaaaaaaaaataaagttaaacttttaaaactcaaaaaaaaaaaaaaaaaa

SEQ ID NO: 7029 - DNA, 1400 bp, Homo sapiens
tatggtcgtccaggtgcttgctatgttgacataccagcagattttgtgaaccttcaggtgaatgtgaattctataaagtacatggaacgctgcatgtcacctcctattagcatggcagaaacctctgctgtgtgcacggcggcttctgttattaggaatgccaaacaaccccttcttatcatcgggaaaggtgctgcttacgctcatgcagaagagagtatcaagaaattggtggagcaatataaactgccatttttgcccacccctatgggaaagggtgttgtccctgacaaccatccatactgtgtaggtgcagccagatccagggctttgcaatttgctgatgtaattgtgttatttggtgccagactaaattggattttacattttggactgcctccaagatatcagccagatgtgaagtttatccaggttgatatctgtgcagaagaattggggaataatgtaaagcccgctgttactttgctaggaaacatacatgctgtcactaagcagcttttagaggaacttgataaaacaccatggcagtatcctccagagagcaagtggtggaaaactctgagagaaaaaatgaagagcaatgaagctgcatccaaggaactagcttctaaaaaatccctgcctatgaattattacacagtattctaccatgttcaagaacaactacctagagactgtttcgtggtaagtgaaggagcaaatactatggacattggacggactgtgcttcagaactaccttcctcgtcacaggcttgatgctggtactttcggaacaatgggagttggtttgggatttgctattgcagctgccgtggtggctaaagatagaagccctgggcattggatcatctgtgtggaaggagacagtgcatttgggttttctggcatggaggtagaaaccatctgcaggtacaacttgccaatcatactgttggtagtgaataacaatggaatttaccaaggttttgatacagatacttggaaagaaatgttaaaatttcaagatgctactgcagtggtccctccaatgtgtttgctgccaaattcacattatgagcaagtcatgactgcatttggaggcaaagggtattttgtacaaacaccagaagaactccaaaaatccctggagcagagcctagcagacacaactaaaccttctcttatcaacatcatgattgagccacaagccacacggaaggcccaggattttcattggctgacccgctctaatatgtaaataaagacgccagttggtggtcttgagttttctctttcttgcaagatgaaattttattttccacagcaaaattactctactgttaaaattgtgcaaaataaaataaacatttaaaatgacattttacagtaaaaaaaaaa

SEQ ID NO: 7030 - DNA, 1400 bp, Homo sapiens
tccctctaacacattcttcccttcttcacaaacggcccatgtcagacgaaggctcaagggggagccgcctgcccctggcgctgcccccggcctcccagggttgctcttcagggggcggcggcggcggctcctcggctgggggctcgggcaattcccggcccccacgcaacctccaaggcttgctgcagatggccatcaccgcgggctctgaagagccagaccctcctccagaaccgatgagtgaggagaggcgtcagtggctgcaggaggccatgtcggctgccttccgaggccagcgggaggaggtggagcagatgaagagctgcctccgagtgctgtcacagcccatgccccccactgctggggaggccgagcaggcggccgaccagcaagagcgagagggggccctggagctgctggccgacctgtgtgagaacatggacaatgccgcagacttctgccagctgtctggcatgcacctgctggtgggccggtacctggaggcgggggctgcgggactgcggtggcgggcggcacagctcatcggcacgtgcagtcagaacgtggcagccatccaggagcaggtgctgggcctgggtgccctgcgtaagctgctgcggctgctggaccgcgacgcctgcgacacggtgcgcgtcaaggccctcttcgccatctcctgtctggtccgagagcaggaggctgggctgctgcagttcctccgcctggacggcttctctgtgttgatgagggccatgcagcagcaggtgcagaagctcaaggtcaaatcagcattcctgctgcagaacctgctggtgggccaccctgaacacaaagggaccctgtgctccatggggatggtccagcagctggtggccctggtgcggacagagcacagccccttccacgagcacgtgcttggagccctgtgcagcctggtgacagactttccgcagggtgtgcgcgagtgtcgggagccggaactgggcctggaggagctcctccgccaccgctgtcagctgctgcagcagcatgaggagtaccaggaggagctggagttctgtgaaaagctgctacagacctgtttctccagcccagcggacgacagcatggatcggtgaaaccaggtggcttcttgcccccttctccgtgggaaccccaggcttcttgcctccctccccacctacaaggccctctcccaagggatcgcagggcctaggtgcctggacccagggtgtgccagcccgtctctgtgcagtccctggaaggggcgctgagaaaggcaccagctccttggaccccacctcccatgctctcactctcatccccgttctcttgtccacacagctcttccaataaaggtgtttctcttcctccttctcaagaaaaaaaaaaaaaaaaaa

SEQ ID NO: 7031 - DNA, 600 bp, Homo sapiens
gcggatgaggcccaggctcgaatcccatatgcccgtgtcaaccacaacaagtacatggtgactgaacgcgccacctacatcggaacctccaactggtctggcaactacttcacggagacggcgggcacctcgctgctggtgacgcagaatgggaggggcggcctgcggagccagctggaggccattttcctgagggactgggactccccttacattcatgaccttgacacctcagctgacagcgtgggcaacgcctgccgcctgctctgaggcccgatccagtgggcaggccaaggcctgctgggcccccgcggacccaggtgctctgggtcacggtccctgtccccgcacccccgcttctgtctgccccattgtggctcctcaggctctctcccctgctctcccacctctacctccacccccaccggcctgacgctgtggccccgggacccagcagagctgggggagggatcagcccccaaagaaatgggggtgcatgctggcctgccccctggcccacccccactttccagggcaaaaagggcccagggttataataagtaaataacttgtctgtaaaaaaaaaaaaaaaaaaaaaaa

SEQ ID NO: 7032 - DNA, 1400 bp, Homo sapiens
agaagacagctggtccacagcagaaaaatcttgaaccagctctcccaggaagatggggtggtcgctctgcagagaaccccccttcaggatccgtgaggaagaccagaaagaacaagcagaagactcctggaaacggagatggtggcagtaccagcgaagcacctcagccccctcggaagaaaagggcccgggcagaccccactgttgaaagtgaggaggcgtttaagaatagaatggaggttaaagtgaagattcctgaagaattaaaaccatggcttgttgaggactgggacttagttaccaggcagaagcagctgtttcaactccctgccaagaaaaatgtagatgcaattctggaggagtatgcaaattgcaagaaatcgcagggaaatgttgataataaggaatatgcggttaatgaagttgtggcaggaataaaagaatatttcaatgtgatgttgggcactcagctgctctacaaatttgagaggccccagtatgctgaaatcctcttggctcaccctgatgctccaatgtcccaggtttatggagcaccacacctactgagattatttgtaagaattggagcaatgttggcctatacgccccttgatgagaaaagccttgcattattgttgggctatttgcatgatttcctaaaatatctggcaaagaattctgcatctctctttactgccagtgattacaaagtggcttctgctgagtaccaccgcaaagccctgtgagcgtctacagacagctcaccatttttgtcctgtatctgtaaacactttttgttcttagtctttttcttgtaaaattgatgttctttaaaatcgttaatgtataacagggcttatgtttcagtttgttttccgttctgttttaaacagaaaataaaaggagtgtaagctccttttctcatttcaaagttgctaccagtgtatgcagtaattagaacaaagaagaaacattcagtagaacattttattgcctagttgacaacattgcttgaatgctggtggttcctatccctttgacactacacaattttctaatatgtgttaatgctatgtgacaaaacgccctgattcctagtgccaaaggttcaacttaatgtatatacctgaaaacccatgcatttgtgctctttttttttttatggtgcttgaagtaaaacagcccatcctctgcaagtccatctatgttgttcttaggcattctatctttgctcaaattgttgaaggatggtgatttgtttcatggtttttgtatttgagtctaatgcacgttctaacatgatagaggcaatgcattattgtgtagccacggttttctggaaaagttgatattttaggaattgtatttcagatcttaaataaaatttgtttctaaatttc

SEQ ID NO: 7033 - DNA, 1400 bp, Homo sapiens
gtacatttttagtgacattttaaaagcagtcagattctataaatggcaagtaagcctgaagtgaggatactgcaattttcggagaaaagaacagcagctctttaagtgtttgcattttctatttggggggcagggaactgtcattcattttgcacaattcttgaactgatgtcagcacccgagtggctcctgaatttaagtctgggacgacatcttttatttttacatgaatctttaaacaattctgtgagcaaagtttgtagctgctggattattgtctgtctttatagcaagttccagtaaaccacaagtatggcaaagcttatccaattttatgcttggagcagtcagtacataccagtttctgatgtttcaggcaggagtggggtaaataagtgtgaccacttaaagctgctcgttagcatggaagacttctccattctatctttgtaaaacagacaagatatgcacttgacatagtagcaaattggttctgaattatgcaactgtttgctatttagtaaactagcaaatgatgcatgtattttgtttttcatgtactgggcaatatgagtaaaatctgtccctttttccccctttgaatgaggtcttccatgtttgagggaaagtcttgcactattgcatatattttggggacacagattttcatagtttccatttttggggggcttaaggattttttttttttctgtttgaaacagttttatactttctgatatagtacttgaaattcttaccagaaaattactttggagttttgaagcctttattaatactacttttaaagaagcagttgttttattgtcaatgttttttttcccccaagcatattttcttgtatttctgtttccatatatatatatatatataatttccaattcaggatattgccctgccatccatgaaaactgttctggcaccaaaagtaatgacaaatgttaagtgtaataatagaaaagtagagcaaagagccattcagcttcagtctttacataccatgaataaaacattaaaacatcatatggagaagtttacatggtgattgttcacctgcagtactgtggagttttaacattttgtcctcttttcagtgaaacagagtaaaaatattcatctaccattactgttatttgctgattttgttttattttttgatggtaatattctatccttatgacactattgcaaccaaattggctttaccatcttggctttagtaggtatagaagacaatggattaccatctttattgctgtaatgtgttaagcattatatgctagtagaatctagtttaattgtttcaggtggaaagtattctttgagtttccatattgaatgtgtttggactaaacaaacaataaactactgatgtctgcagc

SEQ ID NO: 7034 - DNA, 600 bp, Homo sapiens
acgcggcgcgggcgggcgggaaggaggcgccccgtgcggcggcgggctccgagctctgccggcgcgaaggcctgggggctgcgccggcgagtgctgacccggcagacggcggcagcggcgcgctggcggccgagggcagggcgggtgcgcgcgcggcaccccgatcggtgccgcgaccgccggcgggcgccgccgcgcgcagggcggccggcgcgccggggycctggaaggtgcggggttctgacaagctgccgagcgtcctcaaacccggcgcctcggccgccagcagatgagccgcgcggccacggccaacccgcccgccccggcgcaggcagttcttcttaggttccgtctcacggcgttttaatttattttcactgtcacacgcatagatccacgaggcaccaaggcctgggagcatggacgtggagtcccacgtgtccggtgtgcttgggcggcatcgcatcaacgcgcagacctaaactgatcctaaagcccccggttcccttgtgggggctttggcagctatggaagaaccaaaataacgtgaagaacatcacagagagacagtgcagtgtagctttagtttaagaaaaaaaa

SEQ ID NO: 7035 - DNA, 600 bp, Homo sapiens
ggaaaaccagagcctatatggagttccctcttctaacccaactgtacttgtatctgtccgtggaaaatttcagtccagaagaattgaccttgaccattaataaagacactggcagagagatcttcccataataaagcaatctgattcagcatcactaaaccgataatgcatgaagcaacgataaaattacaaaagagcagcatttttaattttcacaaaatgtctcagttttcagctatacctgctcgttcataaccaacaatataaaccgtggtctcatgtaacacataaacaattcatgcctttcatagtttattattattaaagtctaaacaaaattgcaatttcttaggtaaccttatatttacaataaatgaagattaccctcaaatgctagaagctgtctaggtccgtccggtgtgtcagatttcctcagattagatgtgccaataaccaagtttattcagtaaacaacttgtacttgtttcatctggtttattactctcacccataaacagtaatgactctctgaccctctggaaatatgtaatgcttccaatcttgctttgtgtatctcatttaatttgttccggttaagga

SEQ ID NO: 7036 - DNA, 600 bp, Homo sapiens
cacacatcttcagacatgcggccaaggagctgttcaacgaggatgtggaggaggtcacttaccgagccctgagaaacaaagacttccaagaggtcacccttgagaagaacggagaggtggtgttacgctttgctgcagcctatggctttcgaaacatccagaacatgatcctgaagcttaagaagggcaagttcccattccactttgtggaggtcctcgcctgtgctggaggatgcttaaatggcagaggccaagcccagactccagacggacatgcggataaggccctgctgcggcagatggaaggcatttacgctgacatccctgtgcggcgtccggagtccagtgcacacgtgcaggagctgtaccaggagtggctggaggggatcaactcccccaaggcccgagaggtgctgcataccacgtaccagagccaggagcgtggcacacacagcctggacatcaagtggtgaagtcaggccagggccttccagctgctcttggggccagagccaagagcctctcagtagagggaggggctgccctgagtggagtattaaagacacttaagaaaaccgctcaaaaaaaaaaaaaaaaaaa

SEQ ID NO: 7037 - DNA, 719 bp, Homo sapiens; identical to SEQ ID NO: 1802

SEQ ID NO: 7038 - DNA, 1400 bp, Homo sapiens
aatatttaatgttgaaagacttcaattagggctattagagttatatctccctgtcgtaggcagcttcttcggagaagtgaaatataacattactcagtggacggagaagtctgttttgttacagagacatgcctctcagaaggtcaggaggttttgagtacctatccttgccacccatacaggaaatccaaagtttggtgtctctctctctctctgtctctttctttctctttctccccccaaacccctctcactccctccctccctctctccttcccctatttgcaatcatattctccctctgcttcttttctcttctgccctccttgtgggcagtcatgaaaatcaattcagactgtgttcattagcagatttattattctattgagaaagcactggaatgttttgtgagattatttttatatgaaggaatagcctgaactcaaacagatggtaagaatagtacaaacaccttagcacatcactgcacacacagtattctgaaaggagatttgacacttaattcccattttcttaaaataacagttttgttgacttaaaaatatgagatacataggatgtgaaaaaaaatgtttgcagtactcagcaaaaaatagggtacataaagcagggtggctgtccatccactgattctggggtgagaagcgatttctacctcgcaagagtgactagaaagtttctaggagcacctccaggcttgcaaagaaagtgaggcctcttggtatcctttcctcagtgtgtatatgacagccagtataatcaataccctaggttatgcgtctatatgatactcatctgtgaatattattggttttgtaatctttgttatataagaggatgtttaggctgtatatactggggtagattattgcctgccccttatacataggaatatgctgcataattgcgcataacttccatctcccttactggcttgtaggcagaggaaactgtatatgttactgccttgtacttttctcatacaccaaaaacacaccaaaaaaatcaataaaataagcaatcttctattctcattccttttcccacagcagcatattttagaggcacatacaaaacctacattctctagttgggagtggatttttaaagttttccttttatcttttatttttttttttgtatgatgcactgagatgtgtactttctaacaggggattggtacctaagaaacgtggtagcattattcagaaaactattatactttcaaatgacacatagtaaggagaatggaataatacatgttgcatatttgttaccagttgtaatttgtctgtattatgaaagatgtaatggtttgtcagctgtcactgttgttttcttgtaacatgatatggaataaagtatagcagaatctccgt

SEQ ID NO: 7039 - DNA, 600 bp, Homo sapiens
tgcatggaaaagacctattttatttctaggttcaccagttgagggacatttggattgttcccacttcttgggctgttaggaataatgttgctctgaacatgtaaataaagatctttgtgttcacatatgtttttcattttctgttggggagattccctaggctagaaattgctgggccatatgaaaaatcaatagttagctttgtaagaaacagtcaaactgttttcccaacgtgacattttatattcccaccaggaatgtttaaaactagtgtcttcaaatcctcaccaacatccaggattgtgtctttatgattatagccatttttgtaggtacaaagtggcatctcatggtggttttaatttgcatttccataatatctaattaggttgagctttttttatgtgcttattggccatttgtttgactttgtttggtgaaatgtatacaaatcatttgctcatttttaatttgggttgtctgtcttgtcttctcattttattgagttaaatgagttcttaataatctctggcttacaagtccttaatttatcaaatatatgatacgtggacatttcctcataaaaaaaaaaaaaaaaaa

SEQ ID NO: 7040 - DNA, 1142 bp, Homo sapiens; identical to SEQ ID NO: 1805

SEQ ID NO: 7041 - DNA, 1400 bp, Homo sapiens
tcctgcacccacatctttctctgtcccctccttgccctgtctggaggctgctagactcctatcttctgaattctatagtgcctgggtctcagcgcagtgccgatggtggcccgtccttgtggttcctctctacttggggaaatcaggtgcagcggccatggctacagcaagacccccctggatgtgggtgctctgtgctctgatcacagccttgcttctgggggtcacagagcatgttctcgccaacaatgatgtttcctgtgaccacccctctaacaccgtgccctctgggagcaaccaggacctgggagctggggccggggaagacgcccggtcggatgacagcagcagccgcatcatcaatggatccgactgcgatatgcacacccagccgtggcaggccgcgctgttgctaaggcccaaccagctctactgcggggcggtgttggtgcatccacagtggctgctcacggccgcccactgcaggaagaaagttttcagagtccgtctcggccactactccctgtcaccagtttatgaatctgggcagcagatgttccagggggtcaaatccatcccccaccctggctactcccaccctggccactctaacgacctcatgctcatcaaactgaacagaagaattcgtcccactaaagatgtcagacccatcaacgtctcctctcattgtccctctgctgggacaaagtgcttggtgtctggctgggggacaaccaagagcccccaagtgcacttccctaaggtcctccagtgcttgaatatcagcgtgctaagtcagaaaaggtgcgaggatgcttacccgagacagatagatgacaccatgttctgcgccggtgacaaagcaggtagagactcctgccagggtgattctggggggcctgtggtctgcaatggctccctgcagggactcgtgtcctggggagattacccttgtgcccggcccaacagaccgggtgtctacacgaacctctgcaagttcaccaagtggatccaggaaaccatccaggccaactcctgagtcatcccaggactcagcacaccggcatccccacctgctgcagggacagccctgacactcctttcagaccctcattccttcccagagatgttgagaatgttcatctctccagcccctgaccccatgtctcctggactcagggtctgcttcccccacattgggctgaccgtgtctctctagttgaaccctgggaacaatttccaaaactgtccagggcgggggttgcgtctcaatctccctggggcactttcatcctcaagctcagggcccatcccttctctgcagctctgacccaaatttagtcccagaaataaactgagaagtggaaaaaaaaaaaaaaaaaaaaaaaaaaaaaaaaaaa

SEQ ID NO: 7042 - DNA, 1400 bp, Homo sapiens
atacctctggccgcttcttcatcatcaacaaggaaaattacactgagttgaacattgtgaacctgcagatcacggaagaccctggcgagtatgaatgtaatgccaccaacgccattggctccgcctctgttgtcactgtcctcagggtgcggagccacctggccccactctggcctttcttgggaattctggctgaaattatcatccttgtggtgatcattgttgtgtatgagaagaggaagaggccagatgaggttcctgacgatgatgaaccagctggaccaatgaaaaccaactctaccaacaatcacaaagataaaaacttgcgccagagaaacacaaattaagtactgcttacaatatctttaggttcctgaaactggtggcaacatgacctgctaaaattttctgcttggacctctttggttctctcccctttcaagtgagcaacaccacaatgactgtctaaagcatgccttatttagcctctcctgtaagggtgatctagccaggtacattttaaacaatgcttcagtgtagaaggtgtaaactattttgggcttgatgtgctgtgaatgttgcttttttttttcctttgttaaaatatttaaatagaagtgaaaaggtcctctgaggatcagatcatgcatgcgccattttttacttaatgcagctgttaaattggcaaagctctaaaatgcactgctgccatctagtgatacacttttgtaaagtacagcaaaacctacaggtatatacagcatataaatatatatatatatatatttatatttttgggggtgggagaaatccaaaataaagtaaatgcttgtttcatttttaagctgctgatattcattccttattgtatgttgtcagatgaggaaattgtgcagttctggtacataaagatgagtaatataaactgaaatctataattttaagggcttaacctgtgactttaataagctggaacagtccactgaatgggtataatgaattgcagtatatacgtatgattgctttttaagtgattatcttttcttctgttaagtcatgtaaattcataaatccttttgcactgatgtgttgaaccttattcttgtacattcattcaatcaaggcaaacttttataatttttcttttgtttccaatgaccttgaaatgttatagcatggtaatattctatgcaactatagttatactttttggtttgacactgtattttttcacattgatttactggttgatgatagattttataacctaacggttctcatgcggtgcgtaattgtagatgcatgtacttgtgtgttttgtgtaactattgaagtgcaatgatgtataaaaaagtggattcacctgtttttaaaaataaaacattgataaaaaaaaaaaa

SEQ ID NO: 7043 - DNA, 600 bp, Homo sapiens
aacttggagaaacagggattaaaaataaggataaacactaataagagctctagaaaaaagggaacagaaagtctgcctgtttagtaagtggcaattccatacatattttagagttttttctatctaaaattagttaaatacttagaatgtttgtaatgagtgttcgatatttgctataggttttagggttttgtaaatcttcatagtaattataaacatttgtaaaatttgtaaaatactataagtcattttgagtgttggtgttaagcatgaaacaaacagcagctgttgtccttaaaaatgaattgacctggccgggcgcggtggctcacgcctgtaatcccagcactttgggaggccgaggcgggtggatcatgaggtcaggagatggagaccatcctggctaacaaggtgaaaccccgtctctactaaaaatacaaaaaattagccgggcgcggtggcgggcgcctgtagtcccagctacttgggaggctgaggcaggagaatggcgtgaacccgggaagcggagcttgcagtgagccgagattgcgccactgcagtccgcagtccggcctgggcgacagagcgagactccgtctc

SEQ ID NO: 7044 - DNA, 1400 bp, Homo sapiens
atcaccttcacgggcaagtggagccagacggccttccccaagcagtaccccctgttccgcccccctgcgcagtggtcttcgctgctgggggccgcgcatagctccgactacagcatgtggaggaagaaccagtacgtcagtaacgggctgcgcgactttgcggagcgcggcgaggcctgggcgctgatgaaggagatcgaggcggcgggggaggcgctgcagagcgtgcacgcggtgttttcggcgcccgccgtccccagcggcaccgggcagacgtcggcggagctggaggtgcagcgcaggcactcgctggtctcgtttgtggtgcgcatcgtgcccagccccgactggttcgtgggcgtggacagcctggacctgtgcgacggggaccgttggcgggaacaggcggcgctggacctgtacccctacgacgccgggacggacagcggcttcaccttctcctcccccaacttcgccaccatcccgcaggacacggtgaccgagataacgtcctcctctcccagccacccggccaactccttctactacccgcggctgaaggccctgcctcccatcgccagggtgacactggtgcggctgcgacagagccccagggccttcatccctcccgccccagtcctgcccagcagggacaatgagattgtagacagcgcctcagttccagaaacgccgctggactgcgaggtctccctgtggtcgtcctggggactgtgcggaggccactgtgggaggctcgggaccaagagcaggactcgctacgtccgggtccagcccgccaacaacgggagcccctgccccgagctcgaagaagaggctgagtgcgtccctgataactgcgtctaagaccagagccccgcagcccctggggcccccggagccatggggtgtcgggggctcctgtgcaggctcatgctgcaggcggccgaggcacagggggtttcgcgctgctcctgaccgcggtgaggccgcgccgaccatctctgcactgaagggccctctggtggccggcacgggcattgggaaacagcctcctcctttcccaaccttgcttcttaggggcccccgtgtcccgtctgctctcagcctcctcctcctgcaggataaagtcatccccaaggctccagctactctaaattatggtctccttataagttattgctgctccaggagattgtccttcatcgtccaggggcctggctcccacgtggttgcagatacctcagacctggtgctctaggctgtgctgagcccactctcccgagggcgcatccaagcgggggccacttgagaagtgaataaatggggcggtttcggaagcgtcagtgtttccatgttatggatctctctgcgtttgaataaagactatctctgttgctcac

SEQ ID NO: 7045 - DNA, 600 bp, Homo sapiens
ctccaaatactacacaccagttccctgcgagtctgctactgctaaagctgttgatggatacgtgaagccacagatcaagcaagtggtccctgagtttgtgaacgcatctgcagatgccgggggcggcagcgccacgtacatggaccaggccccctccccagctgtgtgtccccaggctcactataacatgtacccacagaaccctgactcagtccttgacaccgatggggacttcgatctggaggacacaatggacgtagcgcggcgtgtggaggagctcctgggccggccaatggacagtcagtggatcccgcacgcacaatcgtgaccccgcgacctctccatcttcagcttcttcatcttcaccagaggaatcactcttgtggatgttttaattccatgaatcgcttctcttttgaaacaatactcataatgtgaagtgttaatactagttgtgaccttagtgtttctgtgcatggtggcaccagcgaagggagtgcgagtatgtgtttgtgtgtgtgtgtgtgtgtgtgtgtgtgtgcgttggtgcacgttatggtgtttctccctctcactgtctgagagtttagttgtagcaga

SEQ ID NO: 7046 - DNA, 1195 bp, Homo sapiens; identical to SEQ ID NO: 1811

SEQ ID NO: 7047 - DNA, 600 bp, Homo sapiens
catattcagcagaatgaagccctggcagccaaagcaggactccttggccaaccacgatagagaagtcctgatggatgaacttttgatgaaagattgccaacagctgctttattggaaatgaggactcatctgatagaatcccctgaaagcagtagccaccatgttcaaccatctgtcatgactgtttggcaaatggaaaccgctggagaaacaaaattgctatttaccaggaataatcacaatagaaggtcttattgttcagtgaaataataagatgcaacatttgttgaggccttatgattcagcagcttggtcacttgattagaaaaataaaccattgtttcttcaattgtgactgttaattttaaagcaacttatgtgttcgatcatgtatgagatagaaaaatttttattactcaaagtaaaataaatggaaatatcactgagcagttgtttatactgtatggtaccatagtattctcactggactgtggatacgttgaaatgtttttcaatcaggatcatcctccaagcagtcctgttcattcatgtctgcctcaaattgctggtgaatacataaaatagttayttgctaatcat

SEQ ID NO: 7048 - DNA, 600 bp, Homo sapiens
aggattggatcaacagcctcctctcttggggactctcaagagcctgtgttcatctagaagtagtagtttgattctggtttccctcatacagtgtgtcctccgtctctgtgcagctccgtcattaccataggggacttggttttagactctgatgaggaagaaaatggccagggggaaggaaaggtgagtgggaaggagcagaaagctgggaaaggggatgggtagaacaagactgagaaatccacatgcttcagaattcagagggttcagggaatggtttcggatagtaggctctccctgctcccttctatacaggaatctctggaaaactatcagaagacaaagtttgacaccttgatacccactttttgtgaatacctacccccttctggccacggtgccatacctgtttcttcctgtgactgtagaaacagttctagacctttgtgatagaactaaaatgctctctgtactctagtctcctgcctcctcagttctgcaagtagtttagtaggaatgaagtggaagtccaggcttggattgcctaactacactgctaaaaatatttgtaatccttaataattaaactttggatttgtt

SEQ ID NO: 7049 - DNA, 1400 bp, Homo sapiens
cttaacggcaccataaccacccctggctggcccaaggagtaccctcctaataagaactgtgtgtggcaagtggttgcaccaacccagtacagaatttctgtgaagtttgagttttttgaattggaaggcaatgaagtttgcaaatatgattatgtggagatctggagtggtctttcctctgagtctaaactgcatggcaaattctgtggcgctgaagtgcctgaagtgatcacatcccagttcaacaatatgagaattgaattcaaatctgacaatactgtatccaagaagggcttcaaagcacattttttctcagacaaagatgaatgctctaaggataatggtggatgtcagcacgaatgtgtcaacacgatggggagctacatgtgtcaatgccgtaatggatttgtgctacatgacaataaacatgattgcaaggaagctgagtgtgaacagaagatccacagtccaagtggcctcatcaccagtcccaactggccagacaagtacccaagcaggaaagaatgcacttgggaaatcagcgccactcccggccaccgaatcaaattagcctttagtgaatttgagattgagcagcatcaagaatgtgcttatgaccacttagaagtatttgatggagaaacagaaaagtcaccgattcttggacgactatgtggcaacaagataccagatccccttgtggctactggaaataaaatgtttgttcggtttgtttctgatgcatctgttcaaagaaaaggctttcaagccacacattctacagagtgtggcggacgattgaaagcagaatcaaaaccaagagatctgtactcacatgctcagtttggtgataacaactacccaggacaggttgactgtgaatggctattagtatcagaacggggctctcgacttgaattatccttccagacatttgaagtggaggaagaagcagactgtggctatgactatgtggagctctttgatggtcttgattcaacagctgtggggcttggtcgattctgtggatccgggccaccagaagagatttattcaattggagattcagttttaattcatttccacactgatgacacaatcaacaagaagggatttcatataagatacaaaagcataagatatccagataccacacataccaaaaaataacaccaaaacctctgtcagaacacaaaggaatgtgcataatggagagaagacatattttttttaaaactgaagatattggcacaaatgttttatacaaagagtttgaacaaaaaatccctgtaagaccagaattatctttgtactaaaagagaagtttccagcaaaaccctcatcagcattacaaggatatttgaactccatgcttgatggtattaataaagctggtgaaa

SEQ ID NO: 7050 - DNA, 600 bp, Homo sapiens
ccttgtggaacaagtcaatcagtgactagcttcctgtagccaatcaggttaaagagggcgttggtaattttgttctgatttaactagtattcaatcaccaacttgcaaacagaattcataacacttggcacttgttctagagaagtgtagaggatgatgttaacataattttagcacttcaaggtataatttaaacagtgaggtagttttgaatggcatttcattaaggcatctatgggcattatgagctaaaagctgtggtatgttagctttaaaagagtatttatgttggaataatttttaaataatgtttacataactgtaagtcctgtttggttgttgttggacgcagggcggcacatgagtgtttttggttagagccaagatagctcccatgcaccggaattcctttgggatgaatcagcatcattttaaacaaagtatatgtaaaaggtgaaaggttatattttttacagatcagaatgtggcaccagaggactgtgtctcattaaagtgattgctgggagcaaaaactagaatgatacaaagaaaggtcagagaaatgcatgggaatattttttctttaaaaaaaaaaaaaaa

SEQ ID NO: 7051 - DNA, 600 bp, Homo sapiens
cccccgtacagcctgcgggaggtgaaagtctccgtggtggacacagagacctgccgccgggactatcccggccccgggggcagcatccttcagcccgacatgctgtgtgcccggggccccggggatgcctgccaggacgactccggggggcctctggtctgccaggtgaacggtgcctgggtgcaggctggcattgtgagctggggtgagggctgcggccgccccaacaggccgggagtctacactcgtgtccctgcctacgtgaactggatccgccgccacatcacagcatcagggggctcagagtctgggtaccccaggctccccctcctggctggcttattcctccccggcctcttccttctgctagtctcctgtgtcctgctggccaagtgcctgctgcacccatctgcggatggtactcccttccccgcccctgactgatggcaggaatccaagtgcatttcttaaataagttactatttattccgctccgccccctccctctcccttgagaagctgagtcttctgcatcagattattgcaacatttaacctgaatttaaaagcacacgaaacaaaaaaaaaaaaaaaaaaaaaa

SEQ ID NO: 7052 - DNA, 600 bp, Homo sapiens
cgaggttttttgtgacctgtccctgcccatccccaagaaaggatttgctgggggcaaggtgtctctgcgggattgtttcaaccttttcactaaggaagaagagctagagtcggagaatgccccagtgtgtgaccgatgtcggcagaaaactcgaagtaccaaaaagttgacagtacaaagattccctcgaatcctcgtgctccatctgaatcgattttctgcctcccgaggctccatcaaaaaaagttcagtaggtgtagactttccactgcagcgactgagcctaggggactttgccagtgacaaagccggaagtcctgtataccagctgtatgccctttgcaaccactcaggcagcgtccactatggccactacacagccctgtgccggtgccagactggttggcatgtctacaatgactctcgtgtctcccctgtcagtgaaaaccaggtggcatccagcgagggctacgtgctgttctaccaactgatgcaggagccaccccggtgcctgtgacacctctaagctctggcacctgtgaagccctttaaacacccttaagccccaggctccccgtttacctcagagacgtctatttt

SEQ ID NO: 7053 - DNA, 1400 bp, Homo sapiens
aggaatctctgttgacagcttttcgctgtggcctgcagtttttaggcaacattgcctcacggaatgaagattcccagtctattgtttgggtgcatgctttcccagaactgtttttgtcttgcttaaatcatccggacaaaaaaattgttgcctactcttcaatgattttgtttacatcccttaatcatgaaagaatgaaagaactggaggagaacctcaatattgcaattgatgtcatagatgcttaccaaaaacatcctgaatcagaatggccgttcttgattattacagacctctttctgaaaagcccggaattggtacaagccatgtttcccaaactgaacaatcaagaaagagttacactgttagaccttatgatagccaagataacgagtgatgagccactcaccaaggatgacatccctgtgtttttgcggcatgctgagttgattgcaagcacctttgtggatcagtgcaagactgtgctcaagctggcctctgaggagcctcctgatgatgaggaggcactggctacaattaggcttctcgacgtcctgtgcgaaatgactgtgaatactgagctgctcggctatctgcaggttttccctggcttgctggaaagagtgattgatcttttgcgggtgattcatgtagctggaaaagaaaccacaaacatcttcagtaattgtggttgcgtgagagcagaaggtgacatctccaatgtggccaatgggtttaagtctcatctcattcgtctgattggaaatctgtgttacaagaataaagataaccaagacaaggtaaatgagctggatggtatcccgttgatcctggacaactgcaacatcagtgacagtaacccctttctgacccagtgggtgatatatgccatccgaaaccttaccgaagacaacagccaaaaccaagatttgattgcaaagatggaggaacaggggctggcagatgcatccctacttaaaaaagtgggttttgaagttgaaaagaaaggcgaaaagctgatcctgaaatctactagagacacccctaagccatgaatgaactacatccaaatacctgaatttttggaatctgtttcatggatttttcatcttctaccgtatgtgaaattgcaagtgtttgaagatttataagtacaaatttgggaacatacaaatcttttaggtagtagagtttaacgtgtataagctaaaagtgaaagtaactgagtgttctcttgtttctttgcattaatgtaactgtgtggtttgcctttgtccccctggatagaacgtgcatttaaagaatatattgtacttactgtgacagcagataataaaccagtctcttggagggcaaaaaaaaaaaaaaaaaaaaaaaaaaaaaaaaaaaaaaaaaaaaaa

SEQ ID NO: 7054 - DNA, 1400 bp, Homo sapiens
ttgtctgttggggtcactgaaccccgagcatgcctgacgtctgggaccccgggtccccgggcacaactgactgcggtgaccccagataccaggacccgggaggcctcagagaactctggaacccgttcgcgcgcgtggctggcggtggcgctgggcgctgggggggcagtgctgttgttgttgtggggcgggggtcggggtcctccggccgtcctcgccgccgtccctagcccgccgcccgcttctccccggagtcagtacaacttcatcgcagatgtggtggagaagacagcacctgccgtggtctatatcgagatcctggaccggcaccctttcttgggccgcgaggtccctatctcgaacggctcaggattcgtggtggctgccgatgggctcattgtcaccaacgcccatgtggtggctgatcggcgcagagtccgtgtgagactgctaagcggcgacacgtatgaggccgtggtcacagctgtggatcccgtggcagacatcgcaacgctgaggattcagactaaggagcctctccccacgctgcctctgggacgctcagctgatgtccggcaaggggagtttgttgttgccatgggaagtccctttgcactgcagaacacgatcacatccggcattgttagctctgctcagcgtccagccagagacctgggactcccccaaaccaatgtggaatacattcaaactgatgcagctattgattttggaaactctggaggtcccctggttaacctggatggggaggtgattggagtgaacaccatgaaggtcacagctggaatctcctttgccatcccttctgatcgtcttcgagagtttctgcatcgtggggaaaagaagaattcctcctccggaatcagtgggtcccagcggcgctacattggggtgatgatgctgaccctgagtcccagcatccttgctgaactacagcttcgagaaccaagctttcccgatgttcagcatggtgtactcatccataaagtcatcctgggctcccctgcacaccgggctggtctgcggcctggtgatgtgattttggccattggggagcagatggtacaaaatgctgaagatgtttatgaagctgttcgaacccaatcccagttggcagtgcagatccggcggggacgagaaacactgaccttatatgtgacccctgaggtcacagaatgaatagatcaccaagagtatgaggctcctgctctgatttcctcctttcctttctggctgaggttctgagggcaccgagacagagggttaaatgaaccagtgggggcaggtccctccaaccaccagcactgactcctaggcttctgaacaatcacagaaacactttttatataaaataaaattatacctagcaaaaaaaaaaaaaa

SEQ ID NO: 7055 - DNA, 600 bp, Homo sapiens
caaaaggaaggagaatgggatttttcttttgaggcatgcacatctggaattaaggtcaaactaattctcacatccctctaaaagtaaactactgttaggaacagcagtgttctcacagtgtggggcagccgtccttctaatgaagacaatgatattgacactgtccctctttggcagttgcattagtaactttgaaaggtatatgactgagcgtagcatacaggttaacctgcagaaacagtacttaggtaattgtagggcgaggattataaatgaaatttgcaaaatcacttagcagcaactgaagacaattatcaaccacgtggagaaaatcaaaccgagcagggctgtgtgaaacatggttgtaatatgcgactgcgaacactgaactctacgccactccacaaatgatgttttcaggtgtcatggactgttgccaccatgtattcatccagagttcttaaagtttaaagttgcacatgattgtataagcatgctttctttgagttttaaattatgtataaacataagttgcatttagaaatcaagcataaatcacttcaactgctaaaaaaaaaaaaaaaaaaaaaaaaaaaaaaa

SEQ ID NO: 7056 - DNA, 1400 bp, Homo sapiens
gcgggcgctggaccgcttccaccggcgcttgcgggctcccggggccctgctggccgctgccgggctcgcagacgctgccacggagatcgtggaacgagtggcccgcgagcgcctgggccaccacctgcagggtctccgggcggccttcctgggctgcctgacagacgtccgccaggcgctggcagcacctcgcgtggctgggaaggagggccctggcctggccgagttgctggccaatgtggccagctccatcctgagccacattaaggcctctctggcagcagtgcaccttttcaccgccaaagaggtgtccttctccaacaagccctacttccggggtgagttctgcagtcagggtgtccgtgagggcctcatcgtgggcttcgtccactctatgtgccagacggctcagagcttctgcgacagccctggggagaaggggggtgccacaccacctgccctgctcctgctgctctcccgcctctgcctggactacgagacggccaccatctcctacatcctcactctcactgatgaacagtttctggtgcaggatcagttcccagtgacgcccgtgagcacgctgtgtgcagaggccagggaaacggcgcggcggctgctgacccactacgtgaaggtgcagggcctggtcatatcacagatgctgcgcaagagcgtggagactcgcgactggctcagcactctggagccccggaatgtgcgggccgtcatgaagcgggtggtggaggataccaccgccatcgacgtgcaggtggggctcctgtacgaagagggtgttcgcaaggcccagagcagcgactccagcaagaggactttctccgtgtacagcagctctcggcagcagggccgctacgcccccagctatacccccagtgccccgatggacaccaacctcttgagcaatatccagaagctattctctgaacgtattgatgtgttcagccctgtggagttcaacaaggtgtcggtgctgaccggcatcatcaagatcagcctgaagacgctgctggagtgtgtgcggctgcgcacctttgggcgcttcgggctgcagcaggtgcaagtggactgccactttctgcagctctacctgtggcgttttgtggccgacgaagaactcgtgcacttgctgctggacgaagtggtggcctctgctgccctgcgctgcccagaccctgtgcccatggagcccagtgtggttgaggtcatctgcgagcgcggctaggcgcagccgctgccatgcaccggtctgtccctgcaccccatggcacccaggatctggtctcggtggtccttccccgcaggcaggtgtcaggaccggcctaataaacatgtgtggcctcctcaaaaaaaaaaaaaaaaaaaaaaaaaaaaaaaaaaaa

SEQ ID NO: 7057 - DNA, 600 bp, Homo sapiens
ccagcggttctggtcctgggtgggccaggccaacgacatcggcctcctcaagctcaagcaggaactcaagtacagcaattacgtgcggcccatctgcctgcctggcacggactatgtgttgaaggaccattcccgctgcactgtgacgggctggggactttccaaggctgacggcatgtggcctcagttccggaccattcaggagaaggaagtcatcatcctgaacaacaaagagtgtgacaatttctaccacaacttcaccaaaatccccactctggttcagatcatcaagtcccagatgatgtgtgcggaggacacccacagggagaagttctgctatgagctaactggagagcccttggtctgctccatggagggcacgtggtacctggtgggattggtgagctggggtgcaggctgccagaagagcgaggccccacccatctacctacaggtctcctcctaccaacactggatctgggactgcctcaacgggcaggccctggccctgccagccccatccaggaccctgctcctggcactcccactgcccctcagcctccttgctgccctctgactctgtgtgccctccctcacttg

SEQ ID NO: 7058 - DNA, 990 bp, Homo sapiens; identical to SEQ ID NO: 1823

SEQ ID NO: 7059 - DNA, 1400 bp, Homo sapiens
ccacctcttctgccaaccagctgcttgggatgactgcgatcccgtgtgcttgtctgggtatcttcctgggaggtcttttggtgaagaagctcagcctgtctgccctgggggccattcggatggccatgctcgtcaacctggtgtccactgcttgctacgtctccttcctcttcctgggctgcgacactggccctgtggctggggttactgttccctatggaaacagcacagcacctggctcagccctggacccctactcgccctgcaataataactgtgaatgccaaaccgattccttcactccagtgtgtggggcagatggcatcacctacctgtctgcctgctttgctggctgcaacagcacgaatctcacgggctgtgcgtgcctcaccaccgtccctgctgagaacgcaaccgtggttcctggaaaatgccccagtcctgggtgccaagaggccttcctcactttcctctgtgtgatgtgtatctgcagcctgatcggtgccatggcacagacaccctcagtcatcatcctcatcaggacagtcagccctgaactcaagtcttacgctttgggagttctttttctcctccttcgtttgttgggcttcatccctccacccctcatcttcggggctggcatcgactccacctgcctgttctggagcacgttctgtggggagcaaggcgcctgcgtcctctacgacaatgtggtctaccgatacctgtatgtcagcatcgccatcgcgctcaaatccttcgccttcatcctgtacaccaccacgtggcagtgcctgaggaaaaactataaacgctacatcaaaaaccacgagggcgggctgagcaccagtgagttctttgcctctactctgaccctagacaacctggggagggaccctgtgcccgcaaaccagacacataggacaaagtttatctataacctggaagaccatgagtggtgtgaaaacatggagtccgttttatagtgactaaaggagggctgaactctgtattagtaatccaagggtcatttttttcttaaaaaaagaaaaaaaggttccaaaaaaaaccaaaactcagtacacacacacaggcacagatgcacacacacgcagacagacacaccgactttgtcctttttctcagcatcagagccagacaggattcagaataaggagagaatgacatcgtgcggcagggtcctggaggccactcgcgcggctgggccacagagtctactttgaaggcacctcatggttttcaggatgctgacagctgcaagcaacaggcactgccaaattcagggaacagtggtggccagcttggaggatggacatttctggatacacatacacatacaaaacagaaaacattttttaaaagaagtttcctaaaataaa

SEQ ID NO: 7060 - DNA, 600 bp, Homo sapiens
cctgctgagcgggactggtgacccatggctgggggtgctgaggagagccgagttggactggctacccctcctggccacccagtactccctccagcctcagctggctgaacctcgccgctccaaccaccagcttcctcagcgagcagggcccagggctctgggcctgaagcaagagccagcccggctcccagtgtctgcccggctcccagtgtctgcccagccctctcccagacaggagcaggctgccaccccttctacctcaccactgcccctcgaagaattttgcaaatggccccttgccccattttaagcaggagcaggtggctggtttgaagccccaggtatcccccttccctgctatgggaaaggccaagctgctgggtggggacagaagctgcaggggagagggaagcagccgtgctgtcaacatcatccggcaccctctggggtaggagaacagccattccacatgtgttccctctatccgtcctgcttcctgggcagctggtggtgctgggaatggggtgccccagccttggtgaggacagtgttgggaggcccaggggcccagtaaagtgcatttgacattgaaaaaaaaaa

SEQ ID NO: 7061 - DNA, 600 bp, Homo sapiens
gagcaacaggaaaggcgagacgccgctgaaagtggccaactcccccacgatggtgaacctcctgttaggcaaaggcacttacacttccagcgaggagagctcgacggagagctcagaagaggaagacgcaccatccttcgcaccttccagttcagtcgacggcaacaacacggactccgagttcgaaaaaggctcaagcacaaggccaagaacccagagccacagaaggccacggcccccgtcaaggacgagtatgagtttgatgaggacgacgagcaggacagggttcctccggtggacgacaagcacctattgaaaaaggactacagaaaagaaacgaaatccaatagttttatctctatacccaaaatggaggttaaaagttacactaaaaataacacgattgcaccaaagaaagcgtcccatcgtatcctgtcagacacgtcggacgaggaggacgcgagtgtcaccgtggggacaggagagaagctgagactctcggcacatacgatattgcctggtagtaagacacgagagccttctaatgccaagcagcagaaggaaaaaaaaaaaaaaaaaaaatgagcgcctcgtgccgaa

SEQ ID NO: 7062 - DNA, 1400 bp, Homo sapiens
agtgcagtgactgttatgtttgataaagtgcagttcagcaacaagtcagcaaacatggatcactggcagcagaggttccccacacatgtcaaagatgtggccactgtgtgccggcagctagcagagaagagaatgctggatccatcaattaagggaacctttcactggtctggcaatgaacagatgactaagtatgaaatggcatgtgcaattgcagatgccttcaacctccccagcagtcacttaagacctattactgacagccctgtcctaggagcacaacgtccgagaaatgctcagcttgactgctccaaattggagaccttgggcattggccaacgaacaccatttcgaattggaatcaaagaatcactttggcctttcctcattgacaagagatggagacaaacggtctttcattagtttatttgtgttgggttctttttttttttaaatgaaaagtatagtatgtggccctttttaaagaacaaaggaaatagttttgtatgagtactttaattgtgactcttaggatctttcaggtaaatgatgctcttgcactagtgaaattgtctaaagaaactaaagggcagtcatgccctgtttgcagtaatttttctttttatcattatgtttgtcctggctaaacttggagtttgagtatagtaaattatgatccttaaatatttgagggtcaggatgaagcagatctgctgtagacttttcagatgaaattgttcattctcgtaacctccatattttcaggatttttgaagctgttgaccatttcatgttgattattttaaattgtgtggaatagtataaaaatcattggtgttcattatttgctttgcctgagctcagatcaaaatgtttgaagaaaggaactttatttttgcaagttacgtacagtttttatgcttgagatatttcaacatgttatgtatattggaacttctacagcttgatgcctcctgcttttatagcagtttatggggagcacttgaaagagcgtgtgtacatgtattttttttctaggcaaacattgaatgcaaacgtgtatttttttaatataaatatataactgtccttttcatcccatgttgccgctaagtgatatttcatatgtgtggttatactcataataatgggccttgtaagtcttttcaccattcatgaataataataaatatgtactgctggcatgtaatgcttagttttcttgtatttacttcttttttttaaatgtaaggaccaaacttctaaactaattgttcttttgttgctttaatttttaaaaattacattcttctgatgtaacatgtgatacatacaaaagaatatagtttaatatgtattgaaataaaacacaataaaattaaaaaaaaaaaaaaaaaaaa

SEQ ID NO: 7063 - DNA, 600 bp, Homo sapiens
aaaatgatgctaaaaacatcatctgttcctgtggtatcccccaacacggatgagtttttagatcttcttgccagctcacagagtcgccgtctggatgaccagagggctagtttcagtaatttgccagggcttcgtctaacacaaaacagccagtcggtacttagccacctgatgactaatgacaacaaagaggctgatgaagatttctttgacatccttgtaaaatgtcaaggatccagattagatgatcaaagatgtgctccaccacctgctaccacaaagggtccgacagtaccagatgaagactttttcagccttattttacggtcccagggaaagagaatggatgaacagagagttcttttacaaagagatcaaaacagagacactgactttgggctaaaggactttttgcaaaataatgctttgttggagtttaaaaattcagggaaaaaatcggcagaccattagttactatggatttattttttttcctttcaaacacggtaaggaaacaatctattacttttttccttaaaaggagaatttatagcactgtaatacagcttaaaatatttttagaatgatgtaaatagttaa

SEQ ID NO: 7064 - DNA, 1400 bp, Homo sapiens
gccgagcgggctccctgcgcgcccagctggaggcgcagcggcggcaggtgcaggaactgcagggccagctgcaggaggaggccatgaaggccgagaaatggctatttgaatgccgcaacctggaggaaaagtatgagtcggtgacaaaggagaaggagcggctgttggcggagcgggactccttgcgggaggccaatgaggagctgcgctgcgcccagctgcagccgcgggggttgacccaggccgatccctcactggatcccacctccacacccgtggataacttagccgcagagatcctgcctgcggagctcagggagacgctcctgcggcttcagctggagaacaagcggctgtgcaggcaggaggcggccgaccgggagcggcaggaggagctgcagcgccacctggaggatgccaaccgcgcgcgccacgggttggagacgcagcaccggctgaaccagcagcagctatccgagctgcgggcccaggtggaggacctgcagaaagccctgcaggagcaggggggcaagactgaagatgccatttccattttgctgaaaaggaagctggaggaacatttgcagaagcttcatgaggcagatctggagttgcagaggaagcgggagtacattgaggagctggagccacccactgacagcagcacagcccggcggatcgaggagctgcagcataacttgcagaagaaggacgcggacttgcgggccatggaggagcgataccgccgctacgtggacaaggcccgcatggtcatgcagaccatggaacccaagcagcggccagctgcgggggcacctccagaactccattccctgaggacacagctccgagaacgggatgtccgcatccgacacctggagatggactttgagaaaagccgaagtcagcgggagcaggaagaaaagctgctcatcagtgcctggtataatatgggcatggccttgcagcagcgagctggggaggagcgggcgcctgcccatgcccagtcattcctggcacagcagcggctggcaaccaattctcgccgtggacccttgggacgcctggcatctctgaaccttcgccccactgacaagcactgacagacctcacaatcaagccagcctgggctccacccaccctggcttcctccagctcacatggcgcccagcactgggcttcagccaggtgctcgagagctttgaggccatgatctctgctcttccctctcccagattggtggggagggagggcgggaggtagatataggcctgttctttttagcaatgtgattcttgttgttgattctctctctggagttcatgtgctgcctcaggagactctgattttatatttgagaaaaataaaggcgttcaatctgcaaaaaaaaaaaaaaaaaa

SEQ ID NO: 7065 - DNA, 600 bp, Homo sapiens
cgtataaacaagctgcacattacacctctagccgtcgtctgccctttcaaatatgctggtctacatggaaagacaaagaggaaaggccaaaacataaacaaaaggaaacaaaaacaaaacacaaccctctcaggaaccaaacaaaacccccaaatccttttttactacacaaggcatgaggtcaaaagcttgagtacagtgtcccctatagatcacgggagaaaggcgtccacacagagccttagcaggaatttccactctgaggcttcagaacatgctgaagatggggctctgagggtgccactaccatcctggaggccaccaagtggggtggaaacagtgaagagcaggtctcacatgcccgaagaccaccagccaactacacattggtggccctggtggagcatggctgggcgacagcgtccatccccaacactgagccacttcctgtcctggatgacttcctgcttaggtccgtcacatttcagaagagagctggctttctggaagcctacgtttcccattcatcacagaacacgacagagtgcacacatcctggtacccttggtcttcaaaggccatttccagcagaccctctaa

SEQ ID NO: 7066 - DNA, 1372 bp, Homo sapiens; identical to SEQ ID NO: 1831

SEQ ID NO: 7067 - DNA, 1400 bp, Homo sapiens
aaaccattgtttcctgtggcaggggtccctatgatccaacaccatattgaagcctgtgcccaggtccctggaatgcaggagattctgctcattggcttctaccaacctgatgagcccctcacccagttcctagaagccgcccagcaggagtttaaccttccagtcaggtacctgcaggaatttgcccccctaggcacagggggtggtctttaccattttcgagaccagatcctggctgggagccccgaggcattcttcgtgctcaatgctgatgtctgctccgacttccccttgagtgctatgttggaagcccaccgacgccagcgtcaccctttcttactccttggcactacggctaacaggacgcaatccctcaactacggctgcatcgttgagaatccacagacacacgaggtattgcactatgtggagaaacccagcacatttatcagtgacatcatcaactgcggcatctacctcttttctcctgaagccttgaagcctcttcgggatgtcttccagcgtaatcagcaggatgggcaattggaggactcaccaggcttgtggccaggggcaggtaccatccgcctagagcaggatgtgttttcagccctggcagggcagggccagatatacgtgcatctcactgatggtatctggagtcagatcaagtccgcaggttcagccctctacgcctcccgcctctacctgagccgataccaggacactcacccagaacggctggccaagcacaccccagggggcccatggatccgagggaatgtgtacatccacccgaccgccaaggtggccccctcggctgtgctgggccccaacgtctccatcgggaagggggtgaccgtgggtgagggtgtgcggctccgggagagcatcgtcctccatggagccactttgcaggagcacacgtgtgttctgcattgcatcgtgggctgggggagcaccgtgggacgctgggcccgcgtggaggtacccccagtgaccctaaccccaacgatccccgagcccgcatggacagtgagagcctcttcaaggacgggaagctgctgcctgctatcaccatcctgggctgccgagtccggatccctgccgaggtgctcatcctgaactcgattgttctgccacacaaggagctgagccgaagcttcaccaaccagatcatcctctgagtagggctgccagaaggcccccagctcctacccactccccttgaggactgctgcctgcttggccagcctctgtccagaaaggaccagagaaagccaggctggatcgtcacatgccggggagcaatgtggatggcctggggactcctgggttttctccctcccgactccctaataaaccccgtgaaccttggaaaaaaaaaaaaaaaaaaaaaa

SEQ ID NO: 7068 - DNA, 1400 bp, Homo sapiens
tattggctcttctagctgactcttctggttgggcttagagtctgcctgtttctgctagctccgtgtttagtccacttgggtcatcagctctgccaagctgagcctggccaagctaggtggacagacccttgcagtgatgtccgtttgtccagattctgccagtcatcactggacacgtctcctcgcagctgccctagcaaggggagacattgtggtagctatcagacatggacagaaactgacttagtgctcacaagcccctacaccttctgggctgaagatcacccagctgtgttcagaattttcttactgtgcttaggactgcacgcaagtgagcagacaccaccgacttcctttctgcgtcaccagtgtcgtcagcagagagaggacagcacaggctcaaggttggtagtgaagtcaggttcggggtgcatgggctgtggtggtgttgatcagttgctccagtgtttgaaataagaagactcatgtttatgtctggaataagttctgtttgtgctgacaggtggcctaggtcctggagatgagcaccctctctctggcctttagggagtcccctcttaggacaggcactgcccagcagcaagggcagcagagttgggtgctaagatcctgaggagctcgaggtttcgagctggctttagacattggtgggaccaaggatgttttgcaggatgccctgatcctaagaagggggcctgggggtgcgtgcagcctgtcggggagaccccactctgacagtgggcacacggcagcctgcaaagcacagggccaccgccacagcccggcagaggggcacactctggagaccttgctggcagtgctagccaggaaacagagtgaccaagggacaagaagggacttgcctaaagccacccagcaactcagcagcagaaccaagatgggccccaggctcctccatatggcccagggcttaccaccctatcacacgtggccttgtctagacccagtcctgagcaggggagaggctcttgagacctgatgccctcctacccacatggttctcccactgccctgtctgctctgctgctacagaggggcagggcctcccccagcccacgcttaggaatgcttgcctctggcaggcaggcagctgtacccaagctggtgggcagggggctggaaggcaccaggcctcaggaggagccccatagtcccgcctgcagcctgtaaccatcggctgggccctgcaaggcccacactcacgccctgtgggtgatggtcacggtgggtgggtgggggctgaccccagcttccaggggactgtcactgtggacgccaaaatggcataactgagataaggtgaataagtgacaaataaagccagttttttacaaggtaaaaaaaaaaaaaaaaaaaaa

SEQ ID NO: 7069 - DNA, 1400 bp, Homo sapiens
agcaaaattcctgcctttctaaatgtggtggatattgctggccttgtgaaaggagctcacaatgggcagggcctggggaatgcttttttatctcatattagtgcctgtgatggcatctttcatctaacacgtgcttttgaagatgatgatatcacgcacgttgaaggaagtgtagatcctattcgagatatagaaataatacatgaagagcttcagcttaaagatgaggaaatgattgggcccattatagataaactagaaaaggtggctgtgagaggaggagataaaaaactaaaacctgaatatgatataatgtgcaaagtaaaatcctgggttatagatcaaaagaaacctgttcgcttctatcatgattggaatgacaaagagattgaagtgttgaataaacacttatttttgacttcaaaaccaatggtctacttggttaatctttctgaaaaagactacattagaaagaaaaacaaatggttgataaaaattaaagagtgggtggacaagtatgacccaggtgctttggtcattccttttagtggggccttggaactcaagttgcaagaattgagtgctgaggagagacagaagtatctggaagcgaacatgacacaaagtgctttgccaaagatcattaaggctgggtttgcagcactccaactagaatactttttcactgcaggcccagatgaagtgcgtgcatggaccatcaggaaagggactaaggctcctcaggctgcaggaaagattcacacagattttgaaaagggattcattatggctgaagtaatgaaatacgaagattttaaagaggaaggttctgaaaatgcagtcaaggctgctggaaagtacagacaacaaggcagaaattatattgttgaagatggagatattatcttcttcaaatttaacacacctcaacaaccgaagaagaaataaaatttagttattgctcagataaacatacaacttccaaaaggcatctgatttttaaaaaattaaaatttctgaaaaccaatgcgacaaataaagttggggagatgggaatctttgacaaacaaattatttttatttgttttaaaattaaaatactgtgtacccccccccccccatgaaatgcaggttcactaaatgtgaacagctttgcttttcacgtgattaagaccctactccaaattgtagaagcttttcaggaaccatattactctcatgatacttcattaatctccatcatgtatgccaagcctgacacatttgacagtgaggacaatgtggcttgctcctttttgaatctacagataatgcatgttttacagtactccagatgtctacactcaataaaacatttgacaaaaccaaaaaaaaaaaaaaaaaaaaaaaaaaaaaaaaaa

SEQ ID NO: 7070 - DNA, 953 bp, Homo sapiens; identical to SEQ ID NO: 1835

SEQ ID NO: 7071 - DNA, 1400 bp, Homo sapiens
aatttgtggatgctgtccctgatatttttgcacagattgaagtcaatgagaaaaagattagacagaaagctcagattttggcacagaaagaactacccatagatgaagatgaagaaatgaaagaccttttagattttgcagatgtaacatacgagaaacataaaaatgggggcttgattaaaggccggtttggacaggcacggatggtgacaactacacacagcagggccccatcactgtctgcttcctataccaggttgttcctgattctgaacattgctattttctttgtcatgttggcaatgcaactgacttatttccagagggcccagagcctacatggccaaagatgtctttatgcagttcttctcatagatagctgtattttattatggttgtactcttcttgttcccaatcacagtgttagcactgaagctataaattacctggtcattttgtgatcacaagagtctatgcaaaaaaaaaaatttctttaccccagattatcagatttttttccctcagattcattttaacaaattaagggaagatattttgacacaagaaagcaggaacgtggagaaattggagcaggaaaagaaattatcaaagcaatagaaatagcttggtggtcctatggtgtttttggaagtatttggcattgctaattgagcagtccatatagtactacttttagaagaaacaaaaagtctattttttaaagtaatgttttttcttatgagaaaaaggtttagatagaattgggttttattaatattaatttaatgctattagcaatttccatatactatattgtggaaaagactgaagaatacaattctgagaaatataaaaaaattttaatggtatactcatgttgaaagataaatgttgctaagtcctggtatgatggtgtgagcttccttggggaagtacttcttgagttatgtaactaacaggatgttttactacagatctggatggctattcagataacatggcaaaaaatgatagcagaagatcattaaaaacttaaaatatattttattagaaaacatttatctatgaatgaatatttccttgatgctggtctctgcacacatatgcttggttacttgcatgcattcattggttgttcaataagtgagatgattacagataatactgtattttccttatatggaaaaccgttatagacccaataacaactaaacctttcaaaagaaaatattttctattatgaatgttgattttcataccaaagaagatggagagtctaaaatttggatatgattcttatgtttttttaatagaaaaccttcttcaagtttattttcctaaataaacatcataattgtgaaaaaaaaaaaaaaaaaaaaaaaaaaaaaaaaaaaaaaaa

SEQ ID NO: 7072 - DNA, 600 bp, Homo sapiens
tgttcaagaccaagaatcagaagctcctggatgccttaaaaaataagcaatgttaacagtgaactgtgtccatttaagctgtattctgccattgcctttgaaagatctatgttctctcagtagaaaaaaaaatacttataaaattacatattctgaaagagcattccgaaagatgggactggttgactcttcacatgatggaggtatgaggcctccgagatagctgagggaagttctttgcctgctgtcagaggagcagctatctgattggaaacctgccgacttagtgcggtgataggaagctaaaagtgtcaagcgttgacagcttggaagcgtttatttatacatctctgtaaaaggatattttagaattgagttgtgtgaagatgtcaaaaaaagattttagaagtgcaatatttatagtgttatttgtttcaccttcaagcctttgccctgaggtgttacaatcttgtcttgcgttttctaaatcaatgcttaataaaatatttttaaaggattacaaaaaaaaaaaaaaaaaaaaaaaaaaaaaaaaaaaaaaaaaaaaaaaaaaaaaaaaaaaaaaaaaaaaaaaaaaaaaaa

SEQ ID NO: 7073 - DNA, 1400 bp, Homo sapiens
ctaaggcagaattttgagggtgggagagaagaaaagggaaagaagctgaaaatgtaaaaccacaccagggaggaaaaatgacattcagaaccagcaaacactgaatttctcttgttgttttaactctgccacaagaatgcaatttcgttaatggagatgacttaagttggcagcagtaatcttcttttaggagcttgtaccacagtcttgcacataagtgcagatttggctcaagtaaagagaatttcctcaacactaacttcactgggataatcagcagcgtaactaccctaaaagcatatcactagccaaagagggaaatatctgttcttcttactgtgcctatattaagactagtacaaatgtggtgtgtcttccaactttcattgaaaatgccatatctataccatattttattcgagtcactgatgatgtaatgatatattttttcattattatagtagaatatttttatggcaagatatttgtggtcttgatcatacctattaaaataatgccaaacaccaaatatgaattttatgatgtacactttgtgcttggcattaaaagaaaaaaacacacatcctggaagtctgtaagttgttttttgttactgtaggtcttcaaagttaagagtgtaagtgaaaaatctggaggagaggataatttccactgtgtggaatgtgaatagttaaatgaaaagttatggttatttaatgtaattattacttcaaatcctttggtcactgtgatttcaagcatgttttctttttctcctttatatgactttctctgagttgggcaaagaagaagctgacacaccgtatgttgttagagtcttttatctggtcaggggaaacaaaatcttgacccagctgaacatgtcttcctgagtcagtgcctgaatctttattttttaaattgaatgttccttaaaggttaacatttctaaagcaatattaagaaagactttaaatgttattttggaagacttacgatgcatgtatacaaacgaatagcagataatgatgactagttcacacataaagtccttttaaggagaaaatctaaaatgaaaagtggataaacagaacatttataagtgatcagttaatgcctaagagtgaaagtagttctattgacattcctcaagatatttaatatcaactgcattatgtattatgtctgcttaaatcatttaaaaacggcaaagaattatatagactatgaggtaccttgctgtgtaggaggatgaaaggggagttgatagtctcataaaactaatttggcttcaagtttcatgaatctgtaactagaatttaattttcaccccaataatgttctatatagcctttgctaaagagcaactaataaattaaacctattctttcaaaaaaaaa

SEQ ID NO: 7074 - DNA, 1400 bp, Homo sapiens
agagagggtctggagaatgacttgaaatctgtgaattttgacatgacaagcaagtttttgacagccctggctcaagatggtgtgataaatgaagaagctctttctgttactgaactagatcgagtctatggaggtcttacaactaaagtccaagaatctctaaagaaacaggaggggcttcttaaaaatattcaggtctcacatcaggaattttcgaaaatgaaacaatctaataatgaagctaacttaagagaagaagttttgaagaatttagctactgcatatgacaactttgttgaacttgtagctaatttgaaggaaggcacaaagttttacaatgagttgactgaaatcctggtcaggttccagaacaaatgcagtgatatagtttttgcacggaagacagaaagagatgaactcttaaaggacttgcaacaaagcattgccagagaacctagtgctccttcaattcctacacctgcgtatcagtccttaccagcaggaggacatgcaccaactcctccaactccagcgccaagaaccatgccgcctactaagccccagcccccagccaggcctccaccacctgtgcttccagcaaatcgagctccttctgctactgctccatctccagtgggggctgggactgctgcgccagctccatcacaaacgcctggctcagctcctcctccacaggcgcagggaccaccctatcccacctatccaggatatcctgggtattgccaaatgcccatgcccatgggctataatccttatgcgtatggccagtataatatgccatatccaccagtgtatcaccagagtcctggacaggctccatacccgggaccccagcagccttcataccccttccctcagcccccacagcagtcttactatccacagcagtaatatgtctgctcagcagctcagctgattcagatcagagggaaagaaataccaaccctgcaataagtgtactaaactctacgctctggttaatgtaatgtactctcctggactgaatgcagtgtataatttctgtctacagctagaagctgtgccccagttccacatttgattacacatgtgagatttgctgctgttgcagtataaacactaggtataataggatttgaaattgcattacagttcataaaaattgaaaatgagaaattaaacctgcaagtgaaacatttgaaacgattatactttctacataagacatggttgggacatcagatacttacaaagatggtttaagtatggatactagagaaaattaagttttctttctctttggtttattgatttggtttaatttccattatgctattttgcataatcaaggcactgtaaatcttataattttaaaataaattacttaagaacaaaaaaaa

SEQ ID NO: 7075 - DNA, 1400 bp, Homo sapiens
tgggtggccccttccatttcctggccctgctctgcttcctgtctacctcatactagaatgatcgtgactacccgggcagacattttactgtgtttctcagaccaagtgtctactgatggcccaaacatggagttttgtgggcttccactgtccccactccgaactcctgtatgtgcctggctgagtcacctaattcatactgtcatactagcataattatgactattgcatatgcttgttttgtttgactcttggctgcctacgtctgtagggtcccctgaaaatcccacttcctgcccccagaaagggcctttatttccaactaggaggataatgcctagtccaggcaatctttctctgtttagcagtcacaggtgagggtggtattagcatcttttttatgtagaaaaaattgagttaatggggtggactgggttgggaagaaatacatttcctaatgtatttatagaaaataaaaatatttttatgtgcctttttatttttgttggtggggaggtcattggacaagttccaactttcatcttgtgttcccttcaccttcatatcctgatcttagagcccccctccccctgccacccaccttactgtttaacctggatttttttttctatttaatttttgtctaatatcttagcccagtttatcaatcagttatcttaagtcagcattttctaagccattgtttgaggaaacagtgacaataggtaataacacatcttagtattaagagttttacaggccactagtataagataggcatcgtggtagatgcatataaagggtggaatgggagccatggcaggtcatagagtcctctcaatgggaacctgattgatgatcacagtcttcagtggtgagtcagtcctcaccaagttttccagatcattcctacaaagtaaactgggagaataataagtctgaaagagtgtggagtgctcccacaattacaaagaatgcttcctgggtggagtgttgagttggaaccattgtaaaggtgggcaaagcctagtagagaaccagtgcacctcaggtgcacttacatatggtggggctgaggcaaagcagccctgtaggcttcaaagaatcagtgtaagccactaaaaggaactgaaaacctaggtgtcacaataaacagtctacacagtctcacgtagaccaaaattctgatcattttccaggctgttgcatgaagtgatagagtatgattataatttctgtttgcttgtgctgtttgtttttgtttttcatctgtcaatgtgatgatctgtgttttatagggtagagtggatttgtctactttggctgtaaaataccctaatcacattatgatcttgacaggtgcactttactggggagaataaaaaggaccatacggtaaa

SEQ ID NO: 7076 - DNA, 600 bp, Homo sapiens
ctgtctactggacgatgggcttgagggcctgtttgaggatattgacacctctatgtatgacaatgaactttgggcaccagcctctgagggcctcaaaccaggccctgaggatgggccgggcaaggaggaagctccggagctggacgaggccgaattggactacctcatggatgtgctggtgggcacacaggcactggagcgaccgccggggccagggcgctgagccctcgtgctggaatggttgtctggtatctgaactgagcctgctggctggaccaactgtcctcgaaaagacacagctggcttccctagtacagagaacagggcttgggccactttggagagacagaatctagtcctgggcaacttcacatccgtcctcctgtctcagggctggcagggggagcctggaattaccccctagtgatggaatgacagggtctggtggggactgaattccctggccctggggtcatagcttgggctgttccttctctgatacgggaagagaccccaatcagatttttcaaattaaagccagtcctgggaaaaaaaaaaaaaaaaaaaaaaaaaaaaaaaaaaaaaaaaaaaaaaaaaaaa

SEQ ID NO: 7077 - DNA, 600 bp, Homo sapiens
gatcggctgctgagtgaggcccagaggatcacggggctgcgagcactggcagggctggtctacaacgcctcgggctccgagcactgctacgacatctaccggctctaccacagctgtgctgaccccactggctgcggcaccggccccgacgccagggcctgggactaccaggcctgcaccgagatcaacctgaccttcgccagcaacaatgtgaccgatatgttcccggacctgcccttcactgacgagctccgccagcggtactgcctggacacctggggcgtgtggccccggcccgactggctgctgaccagcttctgggggggtgatctcagagccgccagcaacatcatcttctccaacgggaacctggacccctgggcagggggcgggattcggaggaacctgagtgcctcagtcatcgccgtcaccatccaggggggagcgcaccacctcgacctcagagcctcccacccagaagatcctgcttccgtggttgaggcgcggaagctggaggccaccatcatcggcgagtgggtaaaggcagccaggcgtgagcagcagccagctctgcgtggggggcccagactcagcctctga

SEQ ID NO: 7078 - DNA, 1400 bp, Homo sapiens
catcattctcatcagcttttcctggtttgccaattacatccgagctgggactctaatcatggctctgcatgactcttccgattacctgctggagtcagccaagatgtttaactacgcgggatggaagaacacctgcaacaacatcttcatcgtcttcgccattgtttttatcatcacccgactggtcatcctgcccttctggatcctgcattgcaccctggtgtacccactggagctctatcctgccttctttggctattacttcttcaattccatgatgggagttctacagctgctgcatatcttctgggcctacctcattttgcgcatggcccacaagttcataactggaaagctggtagaagatgaacgcagtgaccgggaagtaacagagagctcagagggggagaaggctgcagctgggggaggagcaaagagccggcccctagccaatggccaccccatcctcaataacaaccatcgtaagaatgactgactgaaccattattccagctggctcccagattaatgcataaagccaaggaactaccccgctccctgcgctatagggtcactttagctctggggaaaaaggagaaaggagaggagagttctctgcatcctccctccttgcttgtcacccagttgcctttaaaccaaattctaaccagcctatccccaggtaggggacgttggttatattctgttagagggggaccggtcgtattttcctccctacccgccaagtcatcctttctactgcttttgagggcctccctcaagctctctgtgggtaggggttacaattcacattcctttattctgagaatttggccccagcagtttgcctttgactccctgaactccaaagcaagggttggtgccttaaggtcccatctgtggggcctcattctggcaaagctggaccaaggctaacctttctaacctccctaaattgggccagaaaccaaagctgagcttttaactttctccctctatgacacaaatgaattgagggtaggaggagggtgcacataacccttaccctacctctgccaaaaagtgggggctgtactggggactgctcggatgatctttcttagtgctacttctttcagctgtccctgtagcgacaggtctaagatctgactgcctcctttctctggcctcttcccccttccctcttctcttcagctaggctagctggtttggagtagaatggcaactaattctaatttttatttattaaatatttggggttttggttttaaagccagaattacggctagcacctagcatttcagcagagggaccattttagaccaaaatgtactgttaatgggtttttttttaaaattaaaagattaaataaaaaatattaaataaaaaaaaaaaaaaaa

SEQ ID NO: 7079 - DNA, 1400 bp, Homo sapiens
tacgtccgtgtctggaaggtgcccagcctggagaaggttctggagttcaaagcccacgaaggggagattgaagacctggctttagggcctgatggcaagttggtaaccgtgggccgggaccttaaggcctctgtgtggcagaaggatcagctggtgacacagctgcactggcaagaaaatggacccaccttttccagcacaccttaccgctaccaggcctgcaggtttgggcaggttccagaccagcctgctggcctgcgactcttcacagtgcaaattccccacaagcggctgcggcagccccctccctgctacctcacagcctgggatggctccaacttcttgccccttcggaccaagtcctgtggccatgaagtcgtctcctgcctcgatgtcagtgaatccggcaccttcctaggcctgggcacagtcactggctctgttgccatctacatagctttctctctccagtgcctctactacgtgagggaggcccatggcattgtggtgacggatgtggcctttctacctgagaagggtcgtggtccagagctccttgggtcccatgaaactgccctgttctctgtggctgtggacagtcgttgccagctgcatctgttgccctcacggcggagtgttcctgtgtggctcctgctcctgctgtgtgtcgggcttattattgtgaccatcctgctgctccagagtgcctttccaggtttcctttagcttccctgcttcctgggaatcaggagcctggacactgccatctctagagcagagtggaggcctggactccctttgctcactccattcgggtccacagctgaggttgcctctgacaagatgaatgggcactgcctgcccttctagtgaaaaggcttggctatggccctgtgtgactccaggtcccaggaaccttgccttcgtcatctgtggatccatccagaacagcggtatctgaagcccaggccatactccctgcctcctttcttctgcctaccagaggctccagagttgagcttgtccttatctagaaacatgtgaagatgcccaagagcctggaggcactgctgtccttcctgcagaaacagtttctcctcctcccctcagccttgtggccagttcctcttcacatgaagcccctggcatttgctggggaagggactggcctggtacttgctgttagggcaggaaggggcaaaaggaagacttgggtagtaatctgggggttcagatgggtagcactaagccagctggcctaaagatgcaataagttcctaggtagtctacccttaccttgaggaatgggaaaatgaacctcagcccattaggcaggaaaagttgatatttaataaacaaggaaagagtgaactgagaccccaaaaaaaaaaaaaaaaaaa

SEQ ID NO: 7080 - DNA, 1400 bp, Homo sapiens
attggctctgtggctcctgacactatcaacaatcatgtgaagacttgtcgagaagagcagaagaatctacacttctttgcaccagagtatggagaagtcactaatgtgacaacagcagtggacatctactcctttggcatgtgtgcactggagatggcagtgctggagattcagggcaatggagagtcctcatatgtgccacaggaagccatcagcagtgccatccagcttctagaagacccattacagagggagttcattcaaaagtgcctgcagtctgagcctgctcgcagaccaacagccagagaacttctgttccacccagcattgtttgaagtgccctcgctcaaactccttgcggcccactgcattgtgggacaccaacacatgatcccagagaacgctctagaggagatcaccaaaaacatggatactagtgccgtactggctgaaatccctgcaggaccaggaagagaaccagttcagactttgtactctcagtcaccagctctggaattagataaattccttgaagatgtcaggaatgggatctatcctctgacagcctttgggctgcctcggccccagcagccacagcaggaggaggtgacatcacctgtcgtgcccccctctgtcaagactccgacacctgaaccagctgaggtggagactcgcaaggtggtgctgatgcagtgcaacattgagtcggtggaggagggagtcaaacaccacctgacacttctgctgaagttggaggacaaactgaaccggcacctgagctgtgacctgatgccaaatgagaatatccccgagttggcggctgagctggtgcagctgggcttcattagtgaggctgaccagagccggttgacttctctgctagaagagaccttgaacaagttcaattttgccaggaacagtaccctcaactcagccgctgtcaccgtctcctcttagagctcactcgggccaggccctgatctgcgctgtggctgtccctggacgtgctgcagccctcctgtcccttccccccagtcagtattaccctgtgaagccccttccctcctttattattcaggagggctgggggggctccctggttctgagcatcatcctttcccctcccctctcttcctcccctctgcactttgtttacttgttttgcacagacgtgggcctgggccttctcagcagccgccttctagttgggggctagtcgctgatctgccggctcccgcccagcctgtgtggaaaggaggcccacgggcactaggggagccgaattctacaatcccgctggggcggccggggcgggagagaaaggtggtgctgcagtggtggccctggggggccattcgattcgcctcagttgctgctgtaataaaagtctactttttgct

SEQ ID NO: 7081 - DNA, 600 bp, Homo sapiens
ttttggcccgaatgagggagcctcccgaaggattaaacgacgccccgatcctcaccggacctcaactaaccctaaaaaatgcacacctcaggagtctacctgagcattcaggcagcactgacaatagttatgcctgtactaaggagcatgattttaagaggctttggcccaactgcctcttgcaggctgagtccctccatgcaaaagtggggctaaatgaagtgtgttaaggggtcggctaagtgggacattagtaactgcacactatttccctctactgagtaaaccctatctgtgattcccccaaacatctggcatggctcccttttgtccttcctgtgccctgcaaatattagcaaagaagcttcatgccaggttaggaaggcagcattccatgaccagaaacagggacaaagaaatccccccttcagaacagaggctttggggtcctagcccagtgcttctccaacactgaagtgcttgcagatcatctggggacctggtttgaatggagattatgattcagtgggttgggggcagagtttctgcagttccatcaggtcccccccaggtgcaggtgctgacaatactgctgcctta

SEQ ID NO: 7082 - DNA, 600 bp, Homo sapiens
tgtgaaacaaaattgatgttgtttaactagaagttatgagtatcttaactgcctttattccttttcaaaaagaaaaagctgtagaacattttgtagatgaaactactgtttaagattaatgaattaatattgtgaatgaaaatcaaaatccatactttaaaggtaatcatgttactaaccacctatttttgaattcataaaaatttctttataaatgatgttttgtgaacatagtaaaatagaccattatactatgtgtatgtttgatacagcgtcgccaaaactagtgttctttattagtgcctctcacaaaagatcctggatggaggagtaagatgaaatattatgctattatatgatgctgtttgtaaaggtattaatgtactagtaaggtgttaatgacaaggaattagtactattcctgttgtaaagttagattttgcatattgtatctatcaaaatatgtttgggtttagattttaagttgtctactgagcagatttctgcattggttttccagtcctgttaaaagtttagaaacttcatatgtgtcatcacagcttttgtaaagaaagtatccttaatattttatgacattct

SEQ ID NO: 7083 - DNA, 600 bp, Homo sapiens
aaagcggccccaaggccttagcttccttggcctgtcaggctgcgccgtccagggtcccctgggcctgggcctgtgggacaagatagccgcgcagctccgggaactgcagctgtgcagcagacgcctctgcgctgaggacagggacgccctgcgccagctgcagcccagtcggccgggccccggcgagtgcacgctggaccacggctccaagctcttctttcggcgcctctgaccctggcgctgcctttccccaccctcaccgaagcccctaataaatgaagctgctggccgggcgcggtggctcacgcctgtaatcccaacactttgggaggcccaggcgggcggatcacgaggtcaggagatcgagaccatcctggctaacatggtgaaaccccgtctctactaaaaataccaaaaattagccgggcgtggtggtggaagcctgtagtcccagctactccggaggctgaggcaggagaatggcgtgaacccgggaggcggagcttgcagtgagccgagatcgcaccactgcactccagcctgggcgacagaccgagactccgtctcaaaaaaaaaaaaaaaaaaaaaaaaaaaaaaaaa

SEQ ID NO: 7084 - DNA, 600 bp, Homo sapiens
ttatgtagaataaaagcattaaaaagaagcaaatcatttgcactctataatttgtggtacagtattgcttattgtgactttggcatgcatttttgcaaacaatgctgtaagatttatactactgataattttgttttatttgtatacaatatagagtatgcacatttgggactgcatttctggaaacatactgcaataggctctctgagcaaaacacctgtaactaaaaaagtgaagataagaaaatactcttaaagctgagtatttcctaattgtatagaatcttacagcatctttgacaaacatctcccagcaaaagtgccggttagtcaggtttgttgaaaatacagtagaaaagctgattctggttatctctttaaggacaattaattgtacagacacataatgtaacattgtctcaacattcattcacagattgactgtaaattaccttaatctttgtgcagactgaaggaacactgtagtataccccaaagtgcatttgcctaggacttctcagcttctcccataggtagtttaacaggcattaaaatttgtaattgaaatgttgctttcactcaaaaaaaaaaaaaaaaaaaa

SEQ ID NO: 7085 - DNA, 1303 bp, Homo sapiens; identical to SEQ ID NO: 1850

SEQ ID NO: 7086 - DNA, 600 bp, Homo sapiens
atgtgggcaacaagaccacctaccgcgtcgtggcccattccagtgtgttccgcgtgctgaggaggccccaggagtttgtcaaccggacccctgaaaccgtgttcatcttctgggggcccccgagcaagatgcagaagccccagggcagcctcgtgcgtgtgatccagcgagcgggcctggtgttccccaacatggaagcatatgccgtctctcccggccgcatgcggcaatttgacgacctcttccggggtgagacgggcaaggacagggagaagtctcattcgtggttgagcacaggctggtttaccatggtgatcgcggtggagttgtgtgaccacgtgcatgtctatggcatggtcccccccaactactgcagccagcggccccgcctccagcgcatgccctaccactactacgagcccaaggggccggacgaatgtgtcacctacatccagaatgagcacagtcgcaagggcaaccaccaccgcttcatcaccgagaaaagggtcttctcatcgtgggcccagctgtatggcatcaccttctcccacccctcctggacctaggccacccagcctgtgggacctcaggagggtcaga

SEQ ID NO: 7087 - DNA, 600 bp, Homo sapiens
tttctgtgttccttttacagcaaaagggactttttatataaccaaatgtggtgttttagtgactttttgataatgtacagttttttgtgaatttaaatttatttctttctatatttttaggaccaatttcatttttaataaggttaaaaagaaaaaaaaagtctagcgaaaaaactcctgtttttgccatgtgatgttccacaagtgcagctgtagaaaagtgcttgtcagttgttgaataaaaaaaccacatttgatagagattcaaaagactctgtgtattcatcttcccttctacacacctgagggggagacggcgttgggataggtatgactggcttaagagaccacaggcaagggaacaacaggggctcctgttccataccctctgtgtgggatggaaagggtcattagtgctcccgcctaaatgtctggctgagttgctggaagcaaaggggggattcagtgcatccaggtcctgccttgtgagatgtggccccagcttcctaagctgccacctctgtgttcctgtcatagcaaatatgggaccatcaccagcttaccacttcccactcacggataagacaccaagacgtagac

SEQ ID NO: 7088 - DNA, 1400 bp, Homo sapiens
aaccttgcctcatagcttaaagtataaaaaaagattcaagagcagtgaggtttgttctttccagtgaatggtggactgagtggtgcgaggtggagggctaacaagaggaaagaactacattcttcagaatacagtgatgaaaattcattttgaaactcaaatattttcattttggatattctcctgtttttattaaaccagtgattacacctggccatccctctaaatgttctaggaaggcatgtctattgtgattttgatgaagacagaattatttttctctgtagaaacacagataccactttatcagggaagttagtcaaatgaaatggaaattggtaaatggacaaaagctagctagtaaaaaggacgacccagcaacatgctttaaccccattgtatgtttgtggaaagagcatagtttaacatcttgagaaatttgggacataaagttttcatggtagacagttcatgcagtatatgaattgacataatggaaataatctgattttatttttacaactaacatccattccccttcatttaaacaccttttgtgttttacttcagtgaggagattggagtctgaatggatctgttttccaagagattctgagaaatttttgtattcagcagttggaaagctctctattctagttgataaaacttcccttttttgatgtagatgcagatattctatacagttctgttgtcttttactaggactgtaaacttttgtgataaaattcaaataagattttatttctttgtaattttggctttcacaatttatctttaaatccttgagcaatctgtatacaattaagagatttctgacatttattcttacactaaatggatcaactctaggatttaggcatgttaacttctgttgtgttttgaatctctccagagttgcatgtagatagcatttatttctgtgcccttaaacccatttagaaaataactacaaagtaaaaatgtagaggaaatagaaatgtattttttcatgaacattttgatacaaatttcatcatttaatgattcaccaatttcttgcattaatttgaatttaagcatttaattcaaagagaggggagcatccattattggtacatgtgggcttttaaaaactccatcctttataaatagtcaaggtttgggccacacaaagtatatttttatcatggaaaaatttcaactcctcaagccgtaatgttgaacagaattggagtattttctttataatttcttgaacaggcaaatgaaagcttattatagaatgcatgtattttcttttatctttggaacatcagcaccagtatattgctggcagctattgtattaaaaaataaagtatattttcactatcaaaaaaaaaaaaaaaaaaaaaaaaaaaa

SEQ ID NO: 7089 - DNA, 600 bp, Homo sapiens
tggctgacagcatccccgaagtcctgaccgagttgggcagtctgaagccttcggtcgacccgaacgattcgagccttacactctatctcgtggtggcagtggctgccatctcctgtgtcttcctcgcctttgtcgctgtgcttctggggctcaggctgaggcgctggcacaagtcacgcctgctccaggattccggtggcagattggtaggcgtgcctgcctcacattttgtgggtgttgaggaggtacaggctttcctgcagacctattcccaggaagtctccctcaccgccgactcgcggaagagtcacctgatctttccccagcccaactacgcagacatgctcatcagtcaggagggctgtgagaaaaatgattctttgttaacatccgtagattttcatgaatataagaatgaagctgatcatggtcaggtgagtttagttctttgcttgcttttaatttccagatgaattttatttggcataaattatgttttgaaaaacattgtgaagatagttgaaaataatttttaaggtgtatcacagagttttgggtttattttggtggtgttactataaaattgaactctaatagtca

SEQ ID NO: 7090 - DNA, 1400 bp, Homo sapiens
gagaaaactggggtcgcgaagaaatcacagccaaggaagatttgatgcattcagattctcgtgtaacacttgttgcttggcaacagtactggttgggttgaccagtaagtagaaaaaggctaaaggctatgcgatatgaatttcagaaatggactgaaaatggagagctatgtaacagatacactacagtagaagaacttacttctgaaatgaagggaaaaaaaccaccccatcgttccctactcctccccaccacttacccgttccccctttacctaatctagtagattagccatctttcaaattcacttttatttcagtccttatatttcatatacttccgtctcgatgctgttaacaacttctgataacatggaaaattcaaggattgtttaaaggtctgatgatcacacacaaaatgtaattccggttatttaagtcatttctgtgattctatcatgtacagtttccagaattgtcactgtgcattcaaaagtaatgaatctaacagacatttgatttaatgtacactcccttttgcttatagtgtgcattttttttggaggtcattcaaattttccctcttctgtgatagctgtagtttctttcatagaaagtagctaatccagtgtaatcttttacctttttaaaaaccaagatagagtatctattagagttttacattgttgatgatagattaacaataaagtgatgttctggtggaggtagactgaaatttttttaattcatgtttttcatttgatacttttaatttacacttagtaaattaaaagttgtttaatttacttggcattttaggacatgtacatgaaacagtgaaaatgagatccaccaacatcttttattaagttcagttattagtctgtgaagtgctttactttttgcacaattttaatagcttgctattcagtaatacattatagtgaattcatgatcaaggtttccttaaatttagcattgcatttcagtactgactgtgtaagctaaattgctgatccaaaataaaaacccagactagaatagggttcttaaaatcaagtatcaatacaaaatagaacacaattaaaatcttaattgttggctgggcacagtggctcacgcctgtaatcccagcactttgggaggccgaggcgggcggatcatgaggttaggagagcgagaccatcctggctaacacggtgaaaccccgtctttactaaaatacaaaaaaaattagccgggcgtggtggcgggcgcctgtagtcccagctactcgggaggctgaggcaggagaatggcgtgaacccaggaggcggagcttgcagtgagccgagattgtgccactgcactccagcctgggcaacagagctagactctgtgtcaaaaataaatgactagat

SEQ ID NO: 7091 - DNA, 1400 bp, Homo sapiens
agctcctttcattatttaaaacagcaaaattatttttgtagctcagtttcattattgtcattgtagaagcggtcactattagcaggcatacttttccacacatctttggacttttcttaaaagttcagtaataagctaactgtgtttataaaatgtaagtctcttacagacatcaagtagtttgatgagacagtctgtgacttcatgataggaaagaggaggatgaggtctggggttctttaaagtctctggtgggctgcctcatgactttaatcagcttgaactgccagtgcaccagcagtttaggtgtgatgagagaattcagatatactttatctttttaaaaaagtgtaaataaaatcaaagaatgtaaagtctatctcttacgctagaggtccaaagctgcctctgttttaaagattatcccaatgtggaagatgcccatgactggtcagctacttcctcctatacattttggtttctttgagggtcactcattgagacacgcaggcctctgagagggtcttgttctagatttcatattgcacttggagggtaacagctgctttttcacgcatggtactcttgatgtttttcactctgtcaaggattttgttggctatcaatgaatgtgtctaaaacttagtgcttccaggtagttatagtactccaaatcaaggaccaacttaaacgttaatttttgtgcaaaaacaaacctgaaaaatatgcttcggaaactgtgcatagttctaattgtaagtcagattgtatattcaaattgtaattaagagatttaaatattagaacggtatgtaaggtagtataattaccactattttaaataattcagttaaacactgctgcaatatttcagtgttgtgcttgaaaatatgtacagtttttttccaatattaataccttatgttgtccttaaatatttctaaaagcgcctttatttcagcattacctttttttcatcactatcttttataaaacattaatataagtcgttacttttagaaactaaaggaaataatagctggaaaaccctctgtagtttaaaatcagtcattaaactcacaatagggtaagtaaatatagccacctgttaacatgtaaataagcataatttgttccaaagatggaatattgaaacttagttcatgtctgctgtaaaatattatttaaatgctgctgggcatttcacttaaagaacttaatgtcaacagctacaacaaagaccaaatctgaactgctaatgtggctgctttgtagggaatggactaatatcagtgtgttagatcttaaggtatcagtatttcagaatcctgcgacgattttatttctaaattcatgtactgtatgtccataagtgaaaataaaatgtcatattcttttct

SEQ ID NO: 7092 - DNA, 1400 bp, Homo sapiens
gccagcgcctaccggctgcagagtgagtgccggaagacagtgcccccagagcccggcgccccagtggacttccagctgctgactcagcaggtgatccagtgcgcctatgacatcgccaaggctgccaagcagctggtcaccatcaccacccgagagaagaagcagtgacctctctccccacaccctcacctgcaccctaggacctcactggccataggagctgggccactccagacattaatccccaccccaacagagccactggcacaagtgcccttagtgctgccacactccctgggcagccaggtgccctggtgcccacccctgtcgagcccctaaggatggggaggttgggggggcaggagcttctgtcccccacattccatgcacctcccctctgtatatagcatctcccccctcctagtgagcaggggcctgcaaggattcactcccagcccctcgccttctagggcaccctcagcaaaggggcaggtggggacactccaagtggggcagctctccgtacatgcgccccacccccatgagccagttcagccctactgggggctgagcgggggcatcccctcctttgtacatagtctccatggatgtccctgccctgtagccaccagccccttgctgctctccctttaatgccatatggcccctgcctagggcacaggccccaacctgtgtgctggggtccccagcaggcaaacactggaaagtctgttttttttttttctttcttcttccccaccccttaattttaactttgtggtaactgagtgcccccgcgtgcctgcgtgttgagtgtgtgggcggcagtgctttccggaggcctggtccatctggagttttgaggggtgaggggaccagagcagtgggaccagcatggggatcagcttcccttccccacctgggagccagggactgtccgggtagccagttttggtcctgccagctgcctccctgatccctccccactctcgccccttctctatgaacttaaaatcaaaaaaccacttccctcccatctcctccctgctcctgcgtggagggggaatgtgtgctggccagggtggaggactgagcacctgagcctggggctggctccccggggtccccgactcagctggtggctgtggagctgagtcccctccccgtaacctctgcaaggccagcacccaccatcactacctgcacctgctgtggtcccaccctctggaggcctgggaacctggctgcagcctgggaaggctggagaggcagacggtgggacccaccagctctctccccatcccgcttcttccctggggccaggccctacctgtgtggtggtgggtgggctgtcaagacgtgtcatgtacatttgtatcaaaaataaagaagtgaccatg

SEQ ID NO: 7093 - DNA, 1400 bp, Homo sapiens
tgtattgaccccaaccccaactttgagaagtttttgatcaagagcattgcagagaaccgacacctgcagtttgagcgctttgtggtagctgccggggagaacatgcaccaggtggctgatggctctgtggatgtggtggtctgcaccctggtgctgtgctctgtgaagaaccaggagcggattctccgcgaggtgtgcagagtgctgagaccgggaggggctttctatttcatggagcatgtggcagctgagtgttcgacttggaattacttctggcaacaagtcctggatcctgcctggcaccttctgtttgatgggtgcaacctgaccagagagagctggaaggccctggagcgggccagcttctctaagctgaagctgcagcacatccaggccccactgtcctgggagttggtgcgccctcatatctatggatatgctgtgaaatagtgtgagctggcagttaagagctgaatggctcaaagaatttaaagcttcagttttacatttaaaatgctaagtgggagaagagaaaccttttttttggggggcggtttttttggtttgttgttggttttttttttttttttggcaagactccgtctcaaaaaaaaaaaaaaaaaaaaaaagaagtagagacagggagacagggtctcactgtgttgcctaggccggtcttgaactcctgggctcaagtgattctcccaccttgacctcctaaattgttgggattacaggtgtgagacagtgcacctggccgaaatagctcaagtttctgaaaaacaaatctgaatctatttgttattcttagcgtcactggtctggctttcagaattaacatacaaggttgccacacctagttctgcccagctttatgtcttttattccagtattccaccaaagtttgttttcctgcattccagttctcaagtcttaagataaagattgtacttgacagtttagtatatccataaaactatttgaggtggttaaggttcttgggttcattttccttaatactttgctgaatattgtagattgtaggcaatgaaaaagtctactaaattaggaaaaccttgaataattaggtatcctaggtaagagcccctaaacatcaagcaatctgtgagtctgtaaagaaataaatattttttggattattcttatctaattccacccctgttggaagatgatttctttgttctttgcaactatggaagctgtgaaaatcatcacaagtgcctctgaaagcgagtgttaggttggttagagggtttaatattttctgcaatggtttgtaggaattttaataaatgtagtatattttctgagatgattttgtaaaagtactattttaaatatcaaatcaaccaataaattcacatttgtgttaggaacag

SEQ ID NO: 7094 - DNA, 600 bp, Homo sapiens
aagtgaacacaagcctcctgtaaatggaagttactttgcccatgtgaaccctgcagatggagggtgcctactggagaaatacagtgagaaatgtcatgattttcagtgtgcattactggctaatctttttgccagtgaaggccaacctggcaaggtaattgaggtgaaagccaaaagaagaactggaccacttaactttgtgacttgtatgagagagaccctggaaaaacattatggaaataagcctataggaatgggaggtactttcataattcagaagggaaaagtgaagtctcacattatgcctgcagaattttcttcctgccccctgaactctgatgaggaagtgaataaatggttgcatttttatgaaatgaaagctcctttggtttgtctaccagtttttgtctccagagacccagggtttgatttgcgactggagcacactcatttttttagtcgtcatggagaaggtggacactaccattatgacactactccagatatagtggaatatcttggatacttcttacctgcagagtttctctatcgcattggtcaaccaaaagagacgcattccattgggcgagattaatcagc

SEQ ID NO: 7095 - DNA, 798 bp, Homo sapiens; identical to SEQ ID NO: 1860

SEQ ID NO: 7096 - DNA, 1400 bp, Homo sapiens
ggcggcgtctgtattaaacaccgtgctgaggcggcttcctatgctatctctcttccgaggttctcacagagttcaggttcccctccagactctttgcaccaaagctccctctgaggaagattctttgtcctcagttcccatttctccttataaggatgagccctggaaatatctggaatcagaagaataccaggagcgatatggttctcgccccgtctgggctgactaccgccgcaaccacaagggtggtgtacccccacagcggactcggaagacatgtattcgtcggaataaagttgttgggaatccctgccccatctgtcgagatcacaagttgcatgttgactttaggaacgtgaagctcttggagcaatttgtctgcgcccacacgggtatcatcttctatgctccatacacaggagtctgtgtgaagcagcacaagcggttgacccaggccatccagaaagccagggatcatggtctcctcatttaccacatcccccaggttgaaccacgggaccttgacttcagtacctctcatggggctgtgagtgctactccgccagcccccaccctggtctcaggtgacccctggtacccatggtacaactggaaacagccaccggagagagaactgtctcgccttcgccggctttaccagggtcatctccaagaagagagtggccccccacctgagtcaatgcccaagatgccccctagaacaccagcggaagcctcctccactgggcagacaggccctcagagtgctctgtaggagctgtagactgggaagagaggccaggcgtggtggctcactcctgtaatcccagcactttgggaagccaaggtgggctgatcacttgatcccaggagtttgagaccagcctgggcaccatggtgaaacctcgtctttaccaaaaaatacaaaaattagctgggtgtggtggtgcacacctgtagtctcaactattggggaggctaaggtaggatcacttgatcccaggaggcggaggttgcagtgagttgcagtcacacccctgcactccagcctgggtgacagctagaccctgtctcaaaaaaaaaaaaaaagactgggaagagagctagagggactaggagataatgtgtatgtaggtttatgtgatgggatatcaccctgaagagttgtgtcttttgtggccagtgacaaatccaggaaatgaatgttgctgatagggataaatcttgaggctgagggcgggtggtacagatgtgtatgggaaaccccaacccctatatattgtaaatagatgggctgggctaaacattgttgccgtttcatacttctaccaactcagcttttacacaataaagctctactgtctctgggtaaaaaaaaaaaaaaaaaaaaaaaaaaaaaa

SEQ ID NO: 7097 - DNA, 600 bp, Homo sapiens
cagattaagaaagtgtcccagcagatccttgagaagcgagcctatatctgtgcccaccctctggacaggacatgctgaggctaggggacagtgtcccctgctaccgcccgcccctacccatggcccgttgctggatgactgttactcttttttcagaaggttgttgggattatcacaggttaagccttttgttccccgtctgcacctgaagggttgtcgcctggcctgggagagcctcttccaggttttgacctgcaggcagtgctctctaacaggaccatcacagcttctgaactgagccggagagagagaatggaattgctgacccctggaactggcgggtattctggtcattgaggagacaccatagtggaaactggggcttatgctgctgcctccagggtgtgaggtgggtggggacctgtgtcaggtgtggatagccatttctgctcaaccacacattctctaagaaacagcttgaaagctctgtctgggtcattcatttaaactagaagcagaggcacttaaaacatgtacaggaaccatttatacaaagaatataaaatgtcacaatctgtgtactgttaaaaaaaaaaaaaa

SEQ ID NO: 7098 - DNA, 1400 bp, Homo sapiens
tatgttaccaatttgcaacttgtgcttcaatagtggaatctactttcattgttaacactgagctaaagaaaaaaagccgtgtgttttatgaatgaccttatctgtttcctggataatacctttaagaataatgtcctgagtcaggcgtggtggtgcgtgcatctagtcccaactatttgggaggctgaggcaggaggatcgcttgagcccaggagtttaaagctgcagtgccctgtggttgcacctgtgaataactgcactccagcctgggcaacatagcgagacctcatctccaaaaaagaaaacaaaaaacaaaaaaaggaatgatgttctgtagagatggcctttcacttgaggagtactcagttttcaggttcttcctagctcggggcttttaaattttgaaatctaaacattctttcccaccatcctttttgactgttgaccttggttttctcttctaagtttctgtccctctgcttccttactttttttcctttttgaattctatctttatctgtcttttgttcactttttaatgctatatatgggcaggggtgagagacattactgagcaccttggtgagcaagcctggctttaaagattggagaagagcttctggcaccagaaccctgtcttcctccagttctcaacacggtgttgctcttcagtcataccggaatctgaatcaaaaaagtatttttaaatatccatgatttctccctgtattgaggttagccctgatcatgcttttttgtgccttgtaacccaggtcttcccaagtgcactcatccaggtccagtgctcagatgtgtttaaggagaccctatattcagggaagttgcgtgaacactgcagtggggagaattgagaatagtcaggcctatcagtctcacagaatcacccctctacctttgatattccacttagctgtagagtccatctgtttgtccatctgctgaaatgagaaaagaaaaatttatgcactgatttaaaacaaaccaaaaaaaaagaaaaaaacaaaaaaaaaatccctcctttctagctgaacaaaaatgtgcagttaatacttggcgcttgaaaatgcagtagtgaatgtggaaccaagcctgtctgtatatctggtagctccctttcttgctttgttttttcttaccagtattctgcctaacgtttgcttctgtgatggttatattgcctagcaagcacacccgtggttgtgaaaatagtatagcaaaaaagaaaaatccccggttattgatgtactagatttgtgtatgtcttttaaacagttctagtttcaccttacacagaataatcaggaaaagtgtaaaaattcaaaagtgaaataaaaattttatcagataaaaaaaaaaaaaaaaaaaaaaaaaaaaaaaaa

SEQ ID NO: 7099 - DNA, 600 bp, Homo sapiens
ccagttaattcaactttcgtctgcctgttttgtggactggctggctctgttagaactctgtccaaaaagtgcatggaatataacttgtaaagcttcccacaattgacaatatatatgcatgtgtttaaaccaaatccagaaagcttaaacaatagagctgcataatagtatttattaaagaatcaccaactgtaaacatgagaataacttaaggttctagtttagttttttgtaattgcaaattatatttttgctgctgatatattagaataattttaaaatgtcatcttgaaatagaaatatgtattttaagcactcacgcaaaggtaaatgaacacgttttaaatgtgtgtgttgctaattttttccataagaattgtaaacattgaactgaacaaattacctataatggatttggttaatgacttatgagcaagctggtttggccagacagtatacccaaacttttatataatatacagaaggctatcacacttgtgaaattctcttgtctaatctgaatttgcattccatggtgttaacatggtatatgtattgttattaaagtaagtgacccatgaaaaaaaaaaaaaaaaaaaa

SEQ ID NO: 7100 - DNA, 1400 bp, Homo sapiens
aatatcatgtttttatataaatgcccaaatttgagatgcattattcctattactaatgatgtaagtacgaggataaatccaagaaactttcaactctttgcctttcctggcctttactggatcccaaaagcatttaaggtacatgttccaaaaactttgaaaagctaaatgtttcccatgatcgctcattcttcttttattattcatacgttattccttataaagtaagaactttgttttcctcctatcaaggcagctattttattaaatttttcacttagtctgagaaatagcagatagtctcatatttaggaaaactttccaaataaaataaatgttattctctgataaagagctaatacagaaatgttcaagttattttactttctggtaatgtcttcagtaaaatattttctttatctaaatattaacattctaagtctaccaaaaaaagttttaaactcaagcaggccaaaaccaatatgcttataagaaataatgaaaagttcatccatttctgataaagttctctatggcaaagtctttcaaatacgagataactgcaaaatattttccttttatactacagaaatgagaatctcatcaataaattagttcaagcataagatgaaaacagaatattctgtggtgccagtgcacactaccttcccacccatacacatccatgttcactgtaacaaactgaatattcacaataaagcttctgagtaacactttctgattactcatgataaactgacatggctaactgcaagaattaaatcttctatctgagagtaataatttatgatgactcagtggtgccagagtaaagtttctaaaataacattcctctcacttgtaccccactaaaagtattagtctacacattacattgaagttaaacacaaaattatcagtgttttagaaacatgagtccggactgtgtaagtaaaagtacaaacattatttccaccataaagtatgtattgaaatcaagttgtctctgtgtacagaatacatacttattcccatttttaagcatttgcttctgttttccctacctagaatgtcagatgtttttcagttatctccccatttgtcaaagttgacctcaagataacatttttcattaaagcatctgagatctaagaacacaattattattctaacaatgattattagctcattcacttattttgataactaatgatcacagctattatactactttctcgttattttgtgtgcatgcctcatttccctgacttaaacctcactgagagcgcaaaatgcagctttatactttttactttcaattgcctagcacaatagtgagtacatttgaattgaatatataataaatattgcaaaataaaatccaaaaaaaaaaaaaaaaa

SEQ ID NO: 7101 - DNA, 1400 bp, Homo sapiens
tggtgagggctaggaaaagagtttgttgggaaccctgggttatcggcctcgtcatcttcatatccctgattgtcctggcagtgtgcattggactcactgttcattatgtgagatataatcaaaagaagacctacaattactatagcacattgtcatttacaactgacaaactatatgctgagtttggcagagaggcttctaacaattttacagaaatgagccagagacttgaatcaatggtgaaaaatgcattttataaatctccattaagggaagaatttgtcaagtctcaggttatcaagttcagtcaacagaagcatggagtgttggctcatatgctgttgatttgtagatttcactctactgaggatcctgaaactgtagataaaattgttcaacttgttttacatgaaaagctgcaagatgctgtaggaccccctaaagtagatcctcactcagttaaaattaaaaaaatcaacaagacagaaacagacagctatctaaaccattgctgcggaacacgaagaagtaaaactctaggtcagagtctcaggatcgttggtgggacagaagtagaagagggtgaatggccctggcaggctagcctgcagtgggatgggagtcatcgctgtggagcaaccttaattaatgccacatggcttgtgagtgctgctcactgttttacaacatataagaaccctgccagatggactgcttcctttggagtaacaataaaaccttcgaaaatgaaacggggtctccggagaataattgtccatgaaaaatacaaacacccatcacatgactatgatatttctcttgcagagctttctagccctgttccctacacaaatgcagtacatagagtttgtctccctgatgcatcctatgagtttcaaccaggtgatgtgatgtttgtgacaggatttggagcactgaaaaatgatggttacagtcaaaatcatcttcgacaagcacaggtgactctcatagacgctacaacttgcaatgaacctcaagcttacaatgacgccataactcctagaatgttatgtgctggctccttagaaggaaaaacagatgcatgccagggtgactctggaggaccactggttagttcagatgctagagatatctggtaccttgctggaatagtgagctggggagatgaatgtgcgaaacccaacaagcctggtgtttatactagagttacggccttgcgggactggattacttcaaaaactggtatctaagagagaaaagcctcatggaacagataacatttttttttgttttttgggtgtggaggccatttttagagatacagaattggagaagacttgcaaaacagctagatttgactgatctcaataaactgtttgcttgatgcaaaaaaaaaa

SEQ ID NO: 7102 - DNA, 895 bp, Homo sapiens; identical to SEQ ID NO: 1867

SEQ ID NO: 7103 - DNA, 600 bp, Homo sapiens
gttgacattcagcactcttccaggaataggacccccagtgaggatgaggcctcagggctccctccggcttggcagactcagcctgtcaccccaaatgcagcaatggcctggtgattcccacacatccttcctgcatcccccgaccctcccagacagcttggctcttgcccctgacaggatactgagccaagccctgcctgtggccaagccctgagtggccactgccaagctgcggggaagggtcctgagcaggggcatctgggaggctctggctgccttctgcatttatttgccttttttctttttctcttgcttctaaggggtggtggccaccactgtttagaatgacccttgggaacagtgaacgtagagaattgtttttagcagagtttgtgaccaaagtcagagtggatcatggtggtttggcagcagggaatttgtcttgttggagcctgctctgtgctccccactccatttctctgtccctctgcctgggctatgggaagtggggatgcagatggccaagctcccaccctgggtattcaaaaacggcagacacaacatgttcctccacgcggctcaaaaaaaaaaaaaaaaaaa

SEQ ID NO: 7104 - DNA, 600 bp, Homo sapiens
tttcaggtgaagagtgaggttgtcatggcctcagctatgcttcctggctctccctcaagagtgcagccttggctagagaactcacagctctgggaaaaagaggagcagacagggttccctgggcccagtctcagcccagccactgatgctggatgaccttggcctgaccctggtctggtctcagaatcacttttcccatctgtaaaattgagatgaattttggtgttgaaagttcttcctggagcagatgtcctagaaggttttaggaatagtgacagagtcaggccaccccaagggccatgggagccagctgacctgcttgaccgaaggatttctgacagactatctttggggatgttttcaagaagggatataagttatttactttgggcatttaaaagaaaatttctctcgggaataattttatagaaaaataaagcttctgtgtctaaggcaaaaaaaaaaaaaaaaaaaaaaaaaaaaaaaaaaaaaaaaaaaaaaaaaaaaaaaaaaaaaaaaaaaaaaaaaaaaaaaaaaaaaaaaaaaaaaaaaaaaaaaaaaaaaaaaaaaaaaaaaaaaaaaaaaaaaaaaaaaaaaaaa

SEQ ID NO: 7105 - DNA, 1400 bp, Homo sapiens
gggcgctgccaaccgtgggcgagctctgggtgtgcgggcggcctggcgcggcgctccgctgtgtcagcgtgttatgatgccgtcccgtaccaacctggctactggaatccccagtagtaaagtgaaatattcaaggctctccagcacagacgatggctacattgaccttcagtttaagaaaacccctcctaagatcccttataaggccatcgcacttgccactgtgctgtttttgattggcgcctttctcattattataggctccctcctgctgtcaggctacatcagcaaagggggggcagaccgggccgttccagtgctgatcattggcattctggtgttcctacccggattttaccacctgcgcatcgcttactatgcatccaaaggctaccgtgcttactcctatgatgacattccagactttgatgactagcacccaccccatagctgaggaggagtcacagtggaactgtcccagctttaagatatctagcagaaactatagctgaggactaaggaattctgcagcttgcagatgtttaagaaaataatggccagatttttttgggtccttcccaaagatgttaagtgaacctacagttagctaattaggacaagctctatttttcagccctgggccctgacaagtttttccacaggaatatgtatcatggaagaatagaggttattctgtaatggaaaagtgttgcctgccaccaccctctgtagagctgagcatttcttttaaatagtcttcattgccaatttgttcttgtagcaaatggaacaatgtggtatggctaatttcttattattaagtaatttattttaaaaatatctgagtatattatcctgtacacttatccctaccttcatgttccagtggaagaccttagtaaaatcaaagatcagtgagttcatctgtaatattttttttacttgctttcttactgacagcaaccaggaatttttttatcctgcagagcaagttttcaaaatgtaaatacttcctctgtttaacagtccttggaccattctgatccagttcaccagtaggttggacagcatataatttgcatcattttgtcccttgtaaatcaagatgttctgcagattattcctttaacggccggacttttggctgtttcctaatgaaacatgtagtggttattatttagagtttatagccgtattgctagcaccttgtagtatgtcatcattctgctcatgattccaaggatcagcctggatgcctagaggactagatcaccttagtttgattctattttttagcttgcaaaaagtgacttatattccaaagaaattaaaatgttgaaatccaaatcctagaaataaaatgagttaacttcaaacatttcagaaaacaaaaaaaaaaa

SEQ ID NO: 7106 - DNA, 600 bp, Homo sapiens
tgactcagagggaaattacatgctgacatgttctgccacaggcggcgtcatctacaagctgggtggcgatgagaaggttctggagagctgcttgaagctaggtggccaccgagccctgtggtcaccgtggactggagcactgccatggactgtgggacctgcctcaccgcctccatggatggcaaagatcaagctgaccaccctcctggcccataaagcctgatgacttgccccaagggccacccgaggaagcagtattatctgcggtggggggaggagatataggacaggaaaaccacgtgctccactccagctccctgccagtgcagtgactctgcagggaaagactggcaaggaggctcaggtgcttccatctgtggtgactggaatgggacccacgtggagtaggtgacatatgcttcccagagactggtattgtggctgtgccaggagtacatgtgagactatgggaggaaagctccggaagaaggagaaacattgcagtggctactgtgttggcccagtagaaattgacagtattttgtatatatgtgcccatttatctttttcttttttaaaaaaagagaatactcttgtggc

SEQ ID NO: 7107 - DNA, 600 bp, Homo sapiens
aattgaatgtttccatgtacctcactttatttcagttaacaagatactttgacttgaagtgtttttagtgtatccctatgaaaatcatttttggtacatctaagttttcacttataaactgttatttcaaagcaaacatactagtgatatatatatgatttatggatgttgacgccaatgttcagtttgggtacgttggtgtattgcaaggggagaggcttttataacaatagatttgaacatttttaaaaaattggactgtgtaacttaaatacacaattatttggtttaggatggttattagggcccattagaaacaggagaagtattttacccattcttaaagctctaaaaaaccatctcatggactgaaaggtagatagacagatggaccacaatgggaaataggatgtccatttgtacttctttgtacttttttgttaataaactgttttggaattaatggcttaatttgtgatatcatgttctagaaatacctgcaacatgacagtctaatcagtagtctattaaaacttgtattcataatgtgtataatttcctggtaaggctaactcctgatcgtttctgtagaaagatgac

SEQ ID NO: 7108 - DNA, 600 bp, Homo sapiens
tgcaaccagtgagctagaaggcaaaggatggcaagaggatcttgatcaattagaaaatgtccctgtagaggaagaggaagaattgcagtcacaacagctactcccacaacagctgcctgaatgcaaagttgatagtgaaaccaacatagaagctagtaagctacctacatctgaaccagaagctgacgctgaaatagagcccaaagagagcaacggcacaaaactagaagaacctattaatgaagaaacaccatcccaagatgaagaggagggtgtgtctgatgtggagagtgaaaggagccaagaacagccagataaaacagtggatataagtgatttggccaccaaactcctggacagttggaaagacctaaaggaggtatatcgaattccaaagaaaagtcaaactgaaaaggaaaacacaagaaatcagcctgaataaatggaatgacttgtctgcctcacatattctaaggtgcagagtcagaatatgaactgttgcaactgaacgaggaagggatgctgttggcttcagagatcaaacacctgccccgaagactcctaataggtcaagagagagagacccagacaagcaaactc

SEQ ID NO: 7109 - DNA, 600 bp, Homo sapiens
ccacaaccccagacccagacccagcaactggaaggaacggatgggcctctagtgacagatccagagacacacaagagcaccaaagcagctcatcccactgatgacaccacgacgctctctgagagaccatccccaagcacagacgtccagacagacccccagaccctcaagccatctggttttcatgaggatgaccccttcttctatgatgaacacaccctccggaaacgggggctgttggtcgcagctgtgctgttcatcacaggcatcatcatcctcaccagtggcaagtgcaggcagctgtcccggttatgccggaatcattgcaggtgagtccatcagaaacaggagctgacaacccgctgggcacccgaagaccaagccccctgccagctcaccgtgcccagcctcctgcatcccctcgaagagcctggccagagagggaagacacagatgatgaagctggagccagggctgccggtccgagtctcctacctcccccaaccctgcccgcccctgaaggctacctggcgccttgggggctgtccctcaagttatctcctctgttaagacaaaaagtaaagcactgtggtctttgca

SEQ ID NO: 7110 - DNA, 1323 bp, Homo sapiens; identical to SEQ ID NO: 1875

SEQ ID NO: 7111 - DNA, 600 bp, Homo sapiens
gccggcgccgcgcccatagccggacggggatctgagctggcaggatgaatgtgggggtggcacacagcgaagtaaaccccaacacccgagtgatgaatagccgaggcatctggctggcctacatcatcttggtaggattgctgcatatggttctactcagcatccccttcttcagcattcctgttgtctggaccctgaccaacgtcatccataacctggctacgtatgtcttccttcatacggtgaaagggacaccctttgagactcctgaccaaggaaaggctcggctactgacacactgggagcaaatggactatgggctccagtttacctcttcccgcaagttcctcagcatctctcctattgtgctctatctcctggccagcttctataccaagtatgatgctgcgcacttcctcatcaacacagcctcattgctaagtgtactgctgccgaagttgccccagttccatggggttcgtgtctttggcatcaacaaatactgagggatgggttttgggacagctccatgggcatggggaaggcactgaaacagaggactataaaacaccaaaaaaaaaaaaaaaaaaaaaaaaaaaa

SEQ ID NO: 7112 - DNA, 849 bp, Homo sapiens; identical to SEQ ID NO: 1877

SEQ ID NO: 7113 - DNA, 1059 bp, Homo sapiens; identical to SEQ ID NO: 1878

SEQ ID NO: 7114 - DNA, 418 bp, Homo sapiens; identical to SEQ ID NO: 1879

SEQ ID NO: 7115 - DNA, 600 bp, Homo sapiens
cacctcctcctcctccacttccttatcctcctcctccaaacggactgagtgctccgtggcccgggagtcccaggggagcagcggccccgagttctcgtgcaactcgttcctgcaggagaaggcggcaggcggcgacggggggaacgggcctggggcagggatcggggccgcgactgggacgggcggctcgtcggagccctcagcttgcagcgaccacccgatcccaggctgttcgctgaaggaggaggagaagcagcattcgcagccgcagcagcagcaacttgacccaaacaaccccgaagcgaactggatccacgctcgctccacccggaaaaagcgctgtccctacaccaaataccagacgcttgagctggagaaagaattcctcttcaacatgtacctcacccgggaccggcgctacgaggtggccaggattctcaacctaacagagagacaggtcaaaatctggtttcagaaccgtaggatgaaaatgaaaaagatgagcaaggagaaatgccccaaaggagactgacccggcgcggtgctggcgggagcgctcaagggcagcggatttgttgttgttgctgtttcctttgtggg

SEQ ID NO: 7116 - DNA, 600 bp, Homo sapiens
gagctgaaagtagatgaggtgaaaattagttctgctgtgcttaaagctgcggcccatcactatggagctcaatgtgataagcccaacaaggaatttatgctctgccgctgggaagagaaagatccgaggcggtgtttagaggaaggcaaactggtcaacaagtgtgctttggacttctttaggcagataaaacgtcactgtgcagagccttttacagaatattggacttgcattgattatactggccagcagttatttcgtcactgtcgcaaacagcaggcaaagtttgacgagtgtgtgctggacaaactgggctgggtgcggcctgacctgggagaactgtcaaaggtcaccaaagtgaaaacagatcgacctttaccggagaatccctatcactcaagaccaagaccggatcccagccctgagatcgagggagatctgcagcctgccacacatggcagccgcttttatttctggaccaagtaaagatgggtccgtggcccacactcggtcatgtgctcagacaacgactgatgaaaacgcccatgcggtttgcatcgactgatagtgtgttctttccgggatcacaaacattaacaa

SEQ ID NO: 7117 - DNA, 600 bp, Homo sapiens
aattagcttgtgttcagccacataaaaatgctaataaaagtgacgctcaatctacagtttattcatatattcaagaccatgtatgtgtatctatagccactggttcctccatgagatcagatggaacagacaatgcctatgtggctgatggcaccatgtgtggtccagaaatgtactgtgtaaataaaacctgcagaaaagttcatttaatgggatataactgtaatgccaccacaaaatgcaaagggaaagggatatgtaataattttggtaattgtcaatgcttccctggacatagacctccagattgtaaattccagtttggttccccagggggtagtattgatgatggaaattttcagaaatctggtgacttttatactgaaaaaggctacaatacacactggaacaactggtttattctgagtttctgcatttttctgccgtttttcatagttttcaccactgtgatctttaaaagaaatgaaataagtaaatcatgtaacagagagaatgcagagtataatcgtaattcatccgttgtatcagaaagcgatgacgtgggacattaatattgcacagaacttccatagcaaataa

SEQ ID NO: 7118 - DNA, 600 bp, Homo sapiens
caggaggagcgtcctgagacagcgaggacctgcaggcttggcccctgtccccgaaacatctcagatccctccaagaagagctacgtagttcagtggctgtcccgcccggaccccgactcgcccatccggaagatctcgtcaaagggccactgccaaggcgacaagtcaatattctgtaggatggaagtcttgtcccgctattgctccatcccaggctacaacaagctgtcctgcaagtcctgtaacctgtacaacaacctcaccaacgtggagggcaggatagagccaccgcctgggaagcacaacgacattgacgtgttcatgcctaccctcccagtgcccactgtagccatggaggtgcggccatcaccaagcacccccctggaggtccctctcaatgcctccagcaccaatgccacagaggatcacccagaaaccaatgccgtagatgaaccctacaaaatccatggcctggaagatgaagtccagccacccaacctaatccctcgacgaccgagcccctatgaaaagaccagaaaccaaagaatccaagagctcattgatgagatgcggaagaaagagatgctcggaaagttctaa

SEQ ID NO: 7119 - DNA, 1400 bp, Homo sapiens
taaaccttaagtagggttgccagcctggtttctgaaaaaccaaatatgccggacagggtgtggccacaccaagaagacgggaagacctggcttgtgaccctggcttcccatgtccttctggtctcacccgcgaagtgccctatcctggaagtatgaaatgttagccaattaataccaagacacctcatctgctccttccccagtggatggggttcttctgtaaaactgtttgcacatggccaggggagggaactaggacccttgtgtcctgtctgagccttatggaggcaggacggtgtcattggcggatgtgtcctgctccattgagatggatggcaaaccccatttttaagttatatttctttgatttttgttaatttagaggtgtaggttttgttttttgttttttgtttttttttaagagaaacatttataactggatagcattgcagtgaaagcagcttgggatgttggagctaatgccagctgtttatactgctctttcaagacagcctccctttattgaattggcattagggaataaacaagcctttaaacgtgataaaagatcaaaaacctggttagacatgccagcctttgcaaggcaggttagtcaccaaagactaacctccaagtggctttatggacgctgcatatagagaaggcctaagtgtagcaaccatctgctcacagctgctattaaccctataatgactgaaatgacccctccactctatttttgtgttgttttgcacagactccggaaaagtgaaggctgccaatctgagtagtactcaaatgtgaggaactgctggtcttggattttttttccattaaattcagctgatcatattgatcagtagataaacgtaaatagcttcaaattttaaaagtggaattgcagtgttttttcactgtatcaaacaatgtcagtgctttatttaataattctcttctgtatcatggcatttgtctacttgcttattacattgtcaattatgcatttgtaattttacatgtaatatgcattatttgccagttttattatataggctatggacctcatgtgcatatagaaagacagaaatctagctctaccacaagttgcacaaatgttatctaagcattaagtaattgtagaacataggactgctaatctcagttcgctctgtgatgtcaagtgcagaatgtacaattaactggtgatttcctcatacttttgatactacttgtacctgtatgtcttttagaaagacattggtggagtctgtatcccttttgtatttttaatacaataattgtacatattggttatatttttgttgaagatggtagaaatgtactatgtttatgcttctacatccagtttgtacaagctggaaaataaataaatataacat

SEQ ID NO: 7120 - DNA, 1400 bp, Homo sapiens
gacccctgctgatgttatcaagacgagattacaggtggctgcccgggctggccaaaccacttacagcggagtgatagactgctttagaaagatactgcgtgaagaaggaccaaaagctctgtggaagggagctggtgctcgtgtatttcgatcctcaccccagtttggtgtaactttgctgacttacgaattgctacagcgatggttctacattgattttggaggagtaaaacccatgggatcagagccagttcctaaatccaggatcaacctgcctgccccgaatcctgatcacgttgggggctacaaactggcagttgctacatttgcagggattgaaaacaaatttggactttacctacctctcttcaagccatcagtatctacctcaaaggctattggtggaggcccataggaagatcagccctgggatagtgctgtctttttgtgggtactgcagtaaagaacatccctcctgggaatgaagcaatgcttcatcccttttacgtccatctcttgtttaaattcaagtccaggcttttttatcatgtgaaatcattcattttctgggtgttttcttaaccagatcattgtgaaattattcataattattatttggccctctgcccagaaacctttgtttgcatctgaaaattgatgggatttggtcaacactaacatgatttggggaaaggagcaagtcagaatagaaattagtactcccctccttgaactaggattgtagtcccaaagaggctactgtaaggcaatcatggtgctcagagcagtgtttcgtgtgtgttttaaactggtaggaaactaggtgcatatttataaaaataaaaaacactgggagaaatgaaaaaatatatatcaaatatattcagcctggcttcaaattgtaagcatgcacaaattctgtctctggattatattatgaagcttttatgtgaaacatgtttctttgtaatgaaaaccacattggagatgtttagtaatcatattgttactggtaccaagactactagggaaatgcctttgtactttagggaagtacttttggcattttactgtacagacagaaaaaactgagatgtagcccctctcctggaagtgctaattttgaaaaactgctcatatgatgtacatgtactgattactgcctattttaataaacactcttgaaaaatgcatgttgccctgttgctgcctgccctattctcctcatctccccatcattggtacccacttgcttttaaaatccactttatcttgaataatgtaagacaaatatgttctgacataagtatttaattcatgttgccttgcataatggtcagaggcgcatgaatttgtgaaggtggaaataaactatttgtaaagtgaaaaaaaaaaaaaaa

SEQ ID NO: 7121 - DNA, 1400 bp, Homo sapiens
tctctttccgcccgctccatggcggtggatgcctgactggaagcccgagtgggatgcggctgacgcggaagcggctctgctcgtttcttatcgccctgtactgcctattctccctctacgctgcctaccacgtcttcttcgggcgccgccgccaggcgccggccgggtccccgcggggcctcaggaagggggcggcccccgcgcgggagagacgcggccgagaacagtccactttggaaagtgaagaatggaatccttgggaaggagatgaaaaaaatgagcaacaacacagatttaaaactagccttcaaatattagataaatccacgaaaggaaaaacagatctcagtgtacaaatctggggcaaagctgccattggcttgtatctctgggagcatatttttgaaggcttacttgatcccagcgatgtgactgctcaatggagagaaggaaagtcaatcgtaggaagaacacagtacagcttcatcactggtccagctgtaataccagggtacttctccgttgatgtgaataatgtggtactcattttaaatggaagagaaaaagcaaagatcttttatgccacccagtggttactttatgcacaaaatttagtgcaaattcaaaaactccagcatcttgctgttgttttgctcggaaatgaacattgtgataatgagtggataaacccattcctcaaaagaaatggaggcttcgtggagctgcttttcataatatatgacagcccctggattaatgacgtggatgtttttcagtggcctttaggagtagcaacatacaggaattttcctgtggtggaggcaagttggtcaatgctgcatgatgagaggccatatttatgtaatttcttaggaacgatttatgaaaattcatccagacaggcactaatgaacattttgaaaaaagatgggaacgataagctttgttgggtttcagcaagagaacactggcagcctcaggaaacaaatgaaagtcttaagaattaccaagatgccttgcttcagagtgatctcacattgtgcccggtcggagtaaacacagaatgctatcgaatctatgaggcttgctcctatggctccattcctgtggtggaagacgtgatgacagctggcaactgtgggaatacatctgtgcaccacggtgctcctctgcagttactcaagtccatgggtgctccctttatctttatcaagaactggaaggaactccctgctgttttagaaaaagagaaaactataattttacaagaaaaaattgaaagaagaaaaatgttacttcagtggtatcagcacttcaagacagagcttaaaatgaaatttactaatattttagaaagctcatttttaatgaataataaaagttaattatctttttgagct

SEQ ID NO: 7122 - DNA, 1400 bp, Homo sapiens
cagcttcaaggatcctgacccctggacccctgcagctctcatccctgaggcacttagagaaaagctcagagaggatcaagagaagaggccttgggaccatgagcccgtgaagccaaagcccttgacctactggaaggatgtccttctcctggagggtgtgaccttgacccaggattccaggcagctgaatgggtcggagcgggcggtgttggatgggctgctcaccccagccgagtgtggggtgctgctgcagctggctaaggatgcagctggggctggagccaggtctggctatcgtggtcgccgctcccctcacaccccccatgaacgcttcgaggggctcacggtgcttaaggctgcgcagctggcccgggctgggacagtgggcagtcagggtgctaagctgcttctggaggtgagcgagcgggtgcggaccttgacccaggcctacttctccccggaacggcccctgcatctgtccttcacccacctggtgtgccgcagcgccatagaaggagagcaagagcagcgcatggacctgagtcacccagtgcacgcagacaactgcgtcctggaccctgacacgggagagtgctggcgggagcccccagcctacacctatcgggactacagcggactcctctacctcaacgatgacttccagggtggggacctgttcttcacggagcccaacgccctcactgtcacggctcgggtgcgtcctcgctgtgggcgccttgtggccttcagctccggtgtcgagaatccccatggggtgtgggccgtgactcggggacggcgctgtgccctggcactgtggcacacgtgggcacctgagcacagggagcaggagtggatagaagccaaagaactgctgcaggagtcacaggaggaggaggaagaggaagaggaagaaatgcccagcaaagacccttccccagagccccctagccgcaggcaccagagggtccaagacaagactggaagggcacctcgggttcgggaggagctgtgagtggctgagccagctccttgaggatgtggccacttgacttgtggaaggccatcttgatgccaggacacacaggaagcccctgtgtgacatcaggagcagaacagcaagctctctgtccctgcacccccaccatcttggggacctacaagggcctggactcagaggacagtgcacaggctagcctggagctcaccaggcctggggagctgggacggggccccgctgccggacctgcagccctggacagatggggaacactgtgcctccctgaacagaaatggcaggggaggaggctgatgctttaaatgaagaggatggtggggttgggaggtataaccctgctcctctctcccagtctgtgcaataaaggtcgtgaagatctctc

SEQ ID NO: 7123 - DNA, 1400 bp, Homo sapiens
ttgtcacatttatccagtttgggttattctcattatgacacctattgcaaattagcatcccatggcaaatatattttgaaaaaataaagaactatcaggattgaaaacagctcttttgaggaatgtcaattagttattaagttgaaagtaattaatgattttatgtttggttactctactagatttgataaaaattgtgcctttagccttctatatacatcagtggaaacttaagatgcagtaattatgttccagattgaccatgaataaaatattttttaatctaaatgtagagaagttgggattaaaagcagtctcggaaacacagagccaggaatatagccttttggcatgggtgccatggctcacatctgtaatcccagcacttttggaggctgaggcgggtggattgcttgaggccaggagttcgagaccagcctggcccaacgtggtgaaacgctggtccctactaaaataccaaaaaaatagggctgggcgcggttgctcacgcctgtaatcccagcacttttcagaggccaaggcgggcaaatcacctgaggtcaagagtttgagaccagcctggccaacatggtgaaaccccatctctactaaacatgcaaaaattacctgggcatggtggcaggtgcttataatcccagctactctgggggccaaggcaggagaattgcttgagcctgggagatggaggttgcagtgagctgagatcatgccactgcactccagcctgggcaacagagcaagactctgcctcaaaaaaaaattaaactaatttaaatacaaaacaaaatagccaggtttggggtgcatgcctggaatcccagctacttgagaggctgaggcacgagaattgcttgaacccaggaggtggaggttgcagtgagccaagatcacaggagccactgcactccagcctgggtgacagagtgagactctgtctcaaaaaaaaattaaataaattattataacctttcagaaatgctgtgtgcattttcatgttcttttttttagcattactgtcactctccctaatgaaatgtacttcagagaagcagtattttgttaaataaatacataacctcattctgaataatgtccctcattttgactataactgtgcttggtttcaaaagcaaaattaaacaaaaatctcagtcccctccgaagtgaactttgtgttaccctgcgtcagaaatgccaagttgtgtttacttttcattcagattttgtgaatatgaacatgctgttataggatctacagatgaatatttaactcaatagaaaaattattttagaacacattgtattggtattacaaccagattatattcttgacgttgacttcattaaaattatctacaatttcctaataaaaaaaaaaa

SEQ ID NO: 7124 - DNA, 1400 bp, Homo sapiens
gttcggcatttttcgtcgggatccccgcaaggatgagtgctgccagagagtctcacccgcatggggtgaagcgttcagcctccccagacgacgatctgggatctagcaattgggaggcagcagacttgggtaatgaagagagaaaacaaaagttcttgagacttatgggtgcaggaaagaaagaacatactggtcgtcttgttataggagatcacaaatcaacatctcacttccgaaccggggaagaagacaagaaaattaatgaagaactggagtctcaatatcagcaaagtatggacagtaaattatcaggaagatatcggcgacattgtggacttggcttcagtgaggtagaagaccatgatggagaaggtgatgtggctggagatgatgatgatgacgatgatgattcacctgatcctgaaagtccagatgattctgaaagcgattcagagtcagagaaagaagaatctgctgaagaactccaagctgctgagcaccctgatgaagtggaggatcccaaaaacaaaaaagatgcaaaaagcaattataaaatgatgtttgttaaatccagtggttcataactcccaaacgcttagtctttgtattaaaagtaagccttattgttacaatgcacagtggaggactgcttatagagcacagacctttgtattataatttttaaaaaggcccttttaaataattacaaagagtgtttgctttcaaatgccatgggttacacttttatgggcatgactataaccatttttgtaaagagtaagagttgtataaaataagaaataaatacagtactcaacttcctttcatattagcatcatcaaccctctaattcaccttatgggggaaatgcttctttttgtttgtgatagctattttatcatttccttcatatttttctcttataaaaatgtatttgatactgtgatatgttcacgaaaagtattctttaattattctttgttatagtagagctgttcattatggatatttctgctgccagtcacaatctaaattaattttggcaaaagattgggtacttagttgcctgttactgagttagctctactcttttggaccaaagcaacatgagagcaagtacttttcacacttgttaagatggagttataactgtcatacatttggaatattatgatcccaagtagtctttttataatttggattgtatcgtatgttagatttttgataaaatttggccaatttttacagaagaaattctctgatcatttagttctatctatttagaaatatgtaaaactggatttttttttaagtaatatgtgaccaaagttaattttgtcccaaaggtctaaataaagagcagtttcccacaaaaaaaaaaaaaaaaaaaaaaaaaaaaa

SEQ ID NO: 7125 - DNA, 1400 bp, Homo sapiens
aacagaaaccagttgttcccaatctgccgttaccatcaacgcactgttgcatatgccagccactgcgcttggttcccattttctttgctaaggtgtattagcggacggccctctggccacctacccgagagatcgtagggtcacattcatccaacttcaccacttggctgcttgagattggttctgctcttttcttcattcctttccagaacaactctttcccaccccaacaccactgccaccacccctctttttatcctggtgtgaaacaatggtaatttgatatatggtatttatattggcatttttcaacccagtgtcactagatgtcacacacatttgtggtgctttgatgtttgcaagtctaacctctgaacataaatttggtcaaataattggaacaaagggaaacagatacttgatatgaaagccataatgacggtgacttgtgtcgtgggggaaaacataaggtcattttctccctctactcacaatactaaagggaaaaaatggattcaaagctaggatttcagggcccagcagtgttcctccatcagcatgttagacaactacacagtatgttgttagttttgaaagacattcactcaaggaaaacaccatctcaactttgcccgctcaccatgtcccttgcccccatgtagcccatttcccaggttatgctcttttctttctcagggtcctctttggtgggcagccactccccgagatgttgccatcagttttctgcagtccaaagagggtatggttaggtacgggtcttcctgcctcattcctcttcctctttgtgtaggtttcagccacaaaactgtcattcactctaggggacccctactaaagggtaacttcaggtgtgcagccctgagctccaaggctctgcaccatgccacacacttgctgtaaggctagaagtgaagaccttattaataggagcataattgcgagggagaatcatggttctgcagtctggtgtagacactggaataacagcacagaaaaatctatgactcccaatatcttctagaataaagaattttccctctttaacacaagggccctccttgtcattgaccttagctaaaccatggcaattcataaatagaggaaacattaatgaattaaaagcattccttattttttaactaatatttgtacattttcttagtctctttccaagtctttgcctcttttttttctttatttttattttttcctttgacagatggtatcccttcctggatcattcatttcaccttggtttctaactttaggtttactttcacttgttatttgacttagcaggtgcaacaaaaacaagaaacaaatgtgcccaccccactttccgcttaactgaaaagcttaaaataaatttccgaattatg

SEQ ID NO: 7126 - DNA, 600 bp, Homo sapiens
agtgttgacagtggcccaccccctaagagaaagaagaaaaagaagttctgttatctgtgtatattgttgcttattgttttgtttattttattatgttgtctttatcgactttgtaaaaaaagtaaaccaataaaaaagcagcaagatgttcaaactccatctgcaaaagaagaggaaaaaattcagcgtcgacctcatgagttacctccccagagtcaaccttgggtgatgccttcccagagtcaacctcctgtgacgccttcccagagtcatcctcgggtgatgccttctcagagtcaacctcctgtgatgccttcccagagtcatcctcagttgacgccttcccagagtcaacctcctgtgatgccttcccagagtcatcctcagttgacgccttcccagagtcaacctcctgtgacaccctcccagaggcaacctcagttgatgccttcccagagtcaacctcctgtgacgccctcctagagccagcctcagttgatgccttcccagagtcaacctcctgtgacgccctcccagagccaacctcgggtgacaccctcccagagtcaacctcatgtgacaccttaccggagtaaaagt

SEQ ID NO: 7127 - DNA, 600 bp, Homo sapiens
agttcacagaggtggctggggtcaagctcctttaggactgggtggatggagaagacaccttgtgctcatgggcccccgcctgcccacccagctgctgttccaggagagcaaccctggggtgcactacgagtacaccatccacagggaggcaggtggccacgacgaggtcccgccgcccgtgttctcctggcattatgggccctggaccaagtgcacagtcacctgcggcagaggtgagaagtggggcaggcacagccccacctgcaggggcttagtgtctggacagggacactggcttcagctcccagctcactgctgggccaccacgggtttggaagtttgcttctctgagcctcagttctccatctgtgagatgaggctagcgattgccctgtgtcccaggcccgctgggagggtacatggatgaggcaggtgggtgctggctcgcggcgcatgttcagtgtgctccagctcttggcgttctccctccaggggacacagctccccctcgatagaccagtccagtggcccctcaccacactgacttatttccctaaactatttataaaaagtagggcaatttcattaactctgactctt

SEQ ID NO: 7128 - DNA, 600 bp, Homo sapiens
gaccaactgatgaaccagaatccttggaagctctaggtcctacctcagaaaatctcatcgtcatggttctgcttcaagaacagaatttgggaattaggtataagttcaatgttcccatcactcgaactggcagtggagataatgaagttggctttacatggaatcatcagccttggtcagaatgctcagctacttgtgctggaggtaagatgcccactaggcagcccacccagagggcaagatggagaacaaaacacattctgagctatgctttgtgtttgttaaaaaagctaattggaaacatttcttgcaggtttgcttcaagctgtaatttagcaaaagaaactttgctttaattatattatattccatttgttttcaacctcatgtaatttgtgcagatttgttggtaaaatacatcttggcacaatgagtgtctctgctggtgcttctcccaagactatcttgaaggtgggctgtttgcctttcgtgaacacattcttggtaaagaacatcaaaagttttaaaaaagaaaatgagcaagaatcagacatcacagatgcaacttcttgtaatgggagatgagaatgtacggctgtg

SEQ ID NO: 7129 - DNA, 1400 bp, Homo sapiens
tccgagagtcctttggggaccccaaggagagagtcaggtggaggaccaaacagaacctcgattactgcttcctcatgatgtacgcgcagtccaaaggcatctactacgtgcagctggaggatgacatcgtggccaagcccaactacctgagcaccatgaagaactttgcactgcagcagccttcagaggactggatgatcctggagttctcccagctgggcttcattggtaagatgttcaagtcgctggacctgagcctgattgtagagttcattctcatgttctaccgggacaagcccatcgactggctcctggaccatattctgtgggtgaaagtctgcaaccccgagaaggatgcgaagcactgtgaccggcagaaagccaacctgcggatccgcttcaaaccgtccctcttccagcacgtgggcactcactcctcgctggctggcaagatccagaaactgaaggacaaagactttggaaagcaggcgctgcggaaggagcatgtgaacccgccagcagaggtgagcacgagcctgaagacataccagcacttcaccctggagaaagcctacctgcgcgaggacttcttctgggccttcacccctgccgcgggggacttcatccgcttccgcttcttccaacctctaagactggagcggttcttcttccgcagtgggaacatcgagcacccggaggacaagctcttcaacacgtctgtggaggtgctgcccttcgacaaccctcagtcagacaaggaggccctgcaggagggccgcaccgccaccctccggtaccctcggagccccgacggctacctccagatcggctccttctacaagggagtggcagagggagaggtggacccagccttcggccctctggaagcactgcgcctctcgatccagacggactcccctgtgtgggtgattctgagcgagatcttcctgaaaaaggccgactaagctgcgggcttctgagggtaccctgtggccagccctgaagcccacatttctgggggtgtcgtcactgccgtccccggagggccagatacggccccgcccaaagggttctgcctggcgtcgggcttgggccggcctggggtccgccgctggcccggaggccctaggagctggtgctgcccccgcccgccgggccgcggaggaggcaggcggcccccacactgtgcctgaggcccggaaccgttcgcacccggcctgccccagtcaggccgttttagaagagcttttacttgggcgcccgccgtctctggcgcgaacactggaatgcatatactactttatgtgctgtgttttttattcttggatacatttgattttttcacgtaagtccacatatacttctataagagcgtgacttgtaataaagggttaatgaag

SEQ ID NO: 7130 - DNA, 1400 bp, Homo sapiens
aaatagagaagagagactcggttctaacttcgaaaaatcagattgaaagactgacccgtcctggttcctcttacttcaatttgaacccatttgaggttcttcagatagatcctgaagttacagatgaagaaataaaaaagaggtttcggcagttatccatcttggtgcatcctgacaaaaatcaagatgatgctgacagagcacaaaaggcttttgaagctgtggacaaagcttacaagttgctactggatcaggagcaaaagaagagggccctggatgtaattcaggcaggaaaagaatacgtggaacacactgtgaaagagcgaaaaaaacaattaaagaaggaaggaaaacctacaattgtagaggaggatgatcctgagctgttcaaacaagctgtatataaacagacaatgaaactctttgcagagctggaaattaaaaggaaagagagagaagccaaagagatgcatgaaaggaaacgacaaagggaagaagagattgaagctcaagaaaaagccaaacgggaaagagagtggcagaaaaactttgaggaaagtcgagatggtcgtgtggacagctggcgaaacttccaagccaatacgaaggggaagaaagagaagaaaaatcggaccttcctgagaccaccgaaagtaaaaatggagcaacgtgagtgaccgcccaaggtcacaggcacagaacctttcccctgctatctcccttcctgcttcgaaggactcattctttcctcccacttccaccccaacatagagtagtatttgctttttagtccattttgttttcaatacgatttaatatcgatcagagtaattcttttgtacattgaaatgaggggcttggtttaaaaaaagacctttccctctccctgcccctagaacaaccagtattagaaggtgccaccattggtgctgccttctcttcccacagcctgtaactcagtgttttgtacttcactgaattgtgatggttagaaacttcgtggatagtttgtggaaatcatccaattaaacatactgcttaaaacagtgttgctgtgacttcagagacaagcctggaaggggcaccttaggaagccccttcgcttcagttgctcgcttctgggtgtgctcccttcgaaggcccagataagacagggaacacttgtgagcacacagagcagcatctgatgccctgtggtgtttggcatgtgccccctgtctactgaccaatcagtgtggcatgaggcccacgccacccaaacctttcactttccaaagagctagccgtcctccacccagtaccatgtcctagcctgtctgcatttgttagtggtaatattctttatgtataataaatttttatacccaaaaaaaaaaaaaaaaaaaaaaaaaaaaaaaaaa

SEQ ID NO: 7131 - DNA, 600 bp, Homo sapiens
agcccaagaaggagaaggaagaagaggagctgtttcccgagtcagagcggccagagatgctgagcgagcaggagcacatgagcatctcgggcagtagcgcccgacacatggtgatgcagaagctgctccgcaagcaggagtctacagtgatggttctgcgcaacatggtggaccccaaggacatcgatgatgacctggaaggggaggtgacagaggagtgtggcaagttcggggccgtgaaccgcgtcatcatctaccaagagaaacaaggcgaggaggaggatgcagaaatcattgtcaagatctttgtggagttttccatagcctctgagactcataaggccatccaggccctcaatggccgctggtttgctggccgcaaggtggtggctgaagtgtacgaccaggagcgttttgataacagtgacctctctgcgtgacagtggtccctctccccggacttgcacttgttccttgtttcctctgggttttatagtgatacagtggtgtccccggggccaggcgcgctctgcccagcccagcctacagtgcggataaaggtgcggatgctgctggccctgaaaaaaaaaaaaaaaaaaa

SEQ ID NO: 7132 - DNA, 1400 bp, Homo sapiens
ccatgatgaaggagttccggtttgagccatcctcacagatgatcgaggtgcaggaaggccagaacctgaagatcaccatcacggggtaccgaaccgcttacagttgctatggcacagtgtcttccttaaacggagagcccgaacaaggggttgccatggaagcggtgggccagaacgactgcagcatttacggagaagacaccgtgacagacgaagagggcaagttcagattacgtggattgctgccgggatgtgtgtaccacgttcagctcaaggcagaaggcaacgaccacattgagcgggcgctcccccaccatagggtgattgaggttgggaataatgacatcgatgatgtaaacatcatagttttccggcagattaatcaatttgatttaagtggaaatgtgatcacttcctctgaataccttcctacattatgggtcaagctttacaaaagcgaaaacctcgacaatccaatccagacagtttcccttggccagtccctgttcttccatttccccccactgctcagagacggcgagaactatgttgtgcttctggactccacactccccagatcccagtatgactacatcttgcctcaagtttctttcaccgcagtgggctaccataaacacaccaccttgatttttaatcccacgaggaagctgcctgaacaggacatcgcacaaggatcctacattgccctgccattgacgctgctggttctgctggccggttacaaccatgacaagctcattcctttgctgctgcagttgacaagccggctacagggagtccgcgcgctcggccaggcagcctctgacaatagcggcccagaagatgcaaagagacaagccaagaaacagaagacaaggcggacttgaggaggaaggggacagttgcagtctcacttgggacaggccacagccaggggtccggccactacccgcccgtgggataaaagccaaaagcatgcgtcagctaacttcagcctgtgctgctgggcccgcaccccatgtcccttgtcactgtgacatcctgcacccatcctcacccctccgtagagcccctcgtgcaatgcaatgaatggaccctcctgtcactctgctgaacagaatttattttctgagtcaaatataatttattattattttcgtcaaagaagtatttaagctgtgctgtggtgtgagaatgtcattcttgatcttcagccttcgtttgcaaggagagttccagttgacgtggtgtttggttccatggcggggtaccctggggattcatctgttttcttcacttccctttgcatctgagatcctgttggaaaccacagcaacctgtattcattattaggaaataaaaatcgaaaaaaaggttcattcttttgtgttgtagttttg

SEQ ID NO: 7133 - DNA, 1400 bp, Homo sapiens
attcacaatctttagaaagaatgagattcacaataattaactcttcctctcttctgataaattccccatacctcccaatccaagtagcatctgtagctacataacctatatacctccagcagctggacatggggaggcgacagtcctatctagacatcatacacatttgccaagaaaggatctctggggcttccgggggtgagattcaagcaggacaataacaagaggctggacaccctacagatgtctttgatgttttcagttgtttgatatatctcccctgtagggcatgttgaggaaggaggagggctgatcaaggccaagctggtctagcctgacatcctagctcctgactgaacactatagacttcccagcagcatttcacccagcagccagagccggctttaagtccccaacccttacagacaccactgccaccaccaccaaccacgaccaccaccaccaccaccactcaccaccatcatcacctccggaaagtgtagtcctgccctaacccaagtcacccccgacagtaaattttaccttcatgttgagaaagcttcctggtgcttaatcaagagctggagttcaatgagtcctagacagtgagaggggcctgagcttcagctcaatggaagcctgctgtgtgccacaagacggaaaagtggaagaagctgcagtgggagacaaagcctcggtcccccacccatccacacacacctacactcacacacgcgcacatgggcgcgcacgaactaccattcaggcagtcagtgggcaagaggaaagataagtaagtaccatacacacctaaaagatgagagaattcatccagacatattacagccagtttggggcccctgactgcaatgtgaaacctctcgctgctgctaggtttacaaacaagcccattgtcctgtgcctcctaatatcatttgtactgaagaccccatctggggacttgagactttggtcccagcccagactcctcagacttttctctcagttgggatgcttcactcgctgggggtgtttgtttgccctctcatttttcagtacttctacagaattttctctagagtcagtcattatgaaatgtacttccctccatcttaacctatcaactttctgcccctccttcaaggcccagtataaatgccacctcctccatgaagccttccctaattccaccccaaacccccaccttcaacaatatttcaacgcttctgcaatgatgaaaaagaaacatagttgtagtacttagcctacctagaccagcaagcattcatttttagctcgctcattttttaccatgttttccagtctgtttaacttctgcagtgccttcactacactgccttacataaaccaaatcacaataaagttcatattcagtaca

SEQ ID NO: 7134 - DNA, 600 bp, Homo sapiens
tgctgcggcagcgcgcccggccatacctcttctccaacagtctgccacctgctgtcgttggctgcgcctccaaggccctagatctgctgatggggagtaacaccattgtccagtctatggctgccaagacccagaggttccgtagtaagatggaagctgctggcttcactatctcaggagccagtcaccccatctgccctgtgatgctgggtgatgcccggctggcctctcgcatggcggatgacatgctgaagagaggcatctttgtcatcgggttcagctaccccgtggtccccaagggcaaggcccggatccgggtacagatctcagcagtgcatagcgaggaagacattgaccgctgcgtggaggccttcgtggaagtggggcgactgcacggggcactgccctgagctctgggtaaggacgagaagagccaaggtccgcctgctgccacagggtcaaaggaggttttcgatcagcccagaccagaggctctgagccctgaaccaaagtcccagagctgggctgggacgtgacctgtgctgagggctgtgagaatgtgaaacaacagtgtgaaaattggctgtgaaaaaaaaaaaa

SEQ ID NO: 7135 - DNA, 1400 bp, Homo sapiens
gcccaggatgctttggcctatggggaaaagccctttaaaaggcagggcccaggccctggagccagcacaagactggcctcgagcccctgagccaggaggtcctggaggagagccaggccggtgggcccgcccaaggctggagggtcagccccaacagggagctgggttggccagggggctggactgctaccagcctctctggcctatggggacccaagaggacacatcccccttttgcccactcttctgtgtcattttgttgttttggtttgtggtggtttttcttttttcttttgtttttcttttttctttctttctttttttttttttttttttttttttttgcacttcgcccacacaggacagtggagccccacctggtcagttccacttccgggctcccatgcacttgcccaaggcggcctctttgggacggggatggtttgaggaaacacttttaaagaaaaaaggaagacattgaaaggttttagtttcttccctatctgcatgtcctctcatatagaaagcccagaattaggggctagaactccaggagagggtctccccgactcatctcttgctgacggtcaccaggatgcagaaatagggagatggttagtgggggccaaagatgccccctcccaggccttcgtggttccctcctccgccccctgcaatctttggaggagtcagtgcctcactccagcagtgagtgcctactgtatgcaggtagtcagccaggcaaagagagactaacggtctcatgggggaaccctcttgcgggaggccgggtagctggagcgaagcgttccggctgcccttgctgctgggtggagtggagagggagacttctttttgttggttttaatttaaaaacacaaaggcctaaagaaatacgtatcttataatttttttaatttttgagacgttcatttaatgaattgtgcacgaatgaattctatatatataaaatatacatatatagctctatatttggggaggggcactgtctcttttttctctcatttttaaaatgaagtgttgttgcctttgtatgtggttcaaccatccagctcccagctggctaaactttgcctccagtggtcaaagatgggaaaagagtggggttggcaggagatggaaaacggaggtgccgccccagcatggggggcaggtcccccagtccaccctgcccctccccctgtggagaagacgcttagttgggggtgtgggtttgggctccattctggattcggcggttccgggggaggggtgggtctgtgccgattactctgtcttgtacgtttgttctgctgctcttcaatattgtatcaacgccaggaaaggggggtgaaaagcctcttttaccccccaaataaattgtcacattccgaagctga

SEQ ID NO: 7136 - DNA, 600 bp, Homo sapiens
gtggtttctcaatatgaaaaacagaacacaatccattacacggttcgggtatattcagcatgcagctttactttttcaaagattccttcaccatacaccttatcaaaacggattaatggaaagtggagtggtcagagtgctggaggatgtggaaatttccaagagactcacaaaaataaccccatctaccaattccatatagaaaagactgggccgttactgattgagctacgaggaccaaggcaatatagcgttggatttgaggttgtaacagtttctactctaggagatcctggtccccatggctttctgaggaaatctagtggtgactataggtgtgggttttgctacctggaattagaaaatataccttctgggatcttcaatatcattcctagtacctttttgcctaaacaagaaggaccttttttcttggactttaatagtattatccccatcaagatcacacaacttcagtgatggagaaatctcaagttactggcttttatacttaccaaacatcagttcttcaaataaggacgcaaatcttcaggacagtaagcagaacaatcagaatggaattaaatctctaaaaacgtg

SEQ ID NO: 7137 - DNA, 1105 bp, Homo sapiens; identical to SEQ ID NO: 1902

SEQ ID NO: 7138 - DNA, 600 bp, Homo sapiens
gtcatctgacagtctctacgctgtgaatattgcctggtgatcaagactctcctcaaagaaatgacttgctgtcatcccacatgaactcctgatgttttttctacaaaagtccataaaatgtgaaaactggagaagatcttagaggttgaagcccaccttctcttttcacataggagggaacagaccatggaaatttaaacgacttcctcacggtcacagaactagttttttaatcctcaggcagtgcatccccccaccctacaactgagcacaacctctttccccacagtgcaattcagaatatgctcagggaatgccagccaccttgtaaaactgctgggagaaaagcatgattcccacaaggactaagtatcagtgatttgtaattttcctgttttgtattatctgctttgctgatgtagacaagagttaactgagtagcatgctttattaagcatgagaaagaatcttaagaattgtcaataaaattaacccaaaactttaataatgtgtctgtaaccaagaaaatattgatagcatcatcctaatgaaactaaacatttattttaaacttattaaattgactcttaaactaaaaaa

SEQ ID NO: 7139 - DNA, 1400 bp, Homo sapiens
tggacagggcttatttaattaaactttctggtttgaacaaggagacatatcagagctgtcttaaatcttttgagtgtttactgggcctgaattcaaatattggaataagagacctagctgtacagtttagctgtatagaagcagtgaacatggcttcaaagatactaaaaagctatgagtccagtcttccccagacacagcaagtggatcttgacttatccaggccacttttcacttctgctgcactgctttcagcatgcaagattctaaagctgaaagtggataaaaacaaaatggtagccacatccggtgtaaaaaaagctatatttgatcgactgtgtaaacaactagagaagattggacagcaggtcgacagagaacctggagatgtagctactccaccacggaagagaaagaagatagtggttgaagccccagcaaaggaaatggagaaggtagaggagatgccacataaaccacagaaagatgaagatctgacacaggattatgaagaatggaaaagaaaaattttggaaaatgctgccagtgctcaaaaggctacagcagagtgatttcagcttccaaactggtatacattccaaactgatagtacattgccatctccaggaagacttgacggctttgggattttgtttaaacttttataataaggatcctaagactgttgcctttaaatagcaaagcagcctacctggaggctaagtctgggcagtgggctggcccctggtgtgagcattagaccagccacagtgcctgattggtatagccttatgtgctttcctacaaaatggaattggaggccgggcgcagtggctcacgcctgtaatcccagcactttgggaggccaaggtgggtggatcacctgaggtcaggagctcgagaccagcctggccaacatggtgaaaccccatctctactaaaaatacaaaaattagccaggtgtgatggtgcatgcctgtaatcccagctcctcagtaggctgagacaggagcatcacttgaacgtgggaggcagaggttgcagtgagccgagattgcaccaccgcactccagcctgggtgacagagcgagacttatctcataaataaatagatagatactccagcctgggtgacagagcgagacttatagatagatagatagatagatggatagatagatagatagatagatagatagataaacggaattggagccattttgctttaagtgaatggcagtcccttgtcttattcagaatataaaattcagtctgaatggcatcttacagattttacttcaatttttgtgtacggtattttttatttgactaaatcaatatattgtacagcctaagttaataaatgttatttatatatgcaaaaaaaaaaaaaaaaaaaa

SEQ ID NO: 7140 - DNA, 1400 bp, Homo sapiens
ccaggtggcgggcgcagacttcgagagcgaggacgagggcgaggaatttgatgactgggaggacgactacgactatcccgaagaggagcagctcagtggtgccggctacagagtatcagccgctcttgaagaagccgacaagatgtttctgagaacaagagaaccagccctggatggcgggtttcagatgcattatgagaagaccccgtttgatcagttagcttttatcgaagagcttttttcactgatggttgtcaatcgtctgaccgaagaactcggctgtgatgagattattgatagagagtagttagatgctgttaaaagaggaggaaactacttgaggagggacccaactttccgctatcttttgggttcattccaaatagttttgtgccattgaaaaacttgaccttcaaaaaaatttgtttttcagaatagaacacaataggacagtgactgcacagttgtgaaaaaggaagagaatcattaaagaaaaagaaaaaagattttaagaccgttgaaatcaattatcaagaacgtcctaaaacacctatggctttgactttgttattgatccagattattttccttgcattggggaaaatatctttcatatttgtttgctgtaaagatggttttgcaagaataagtcatgaccaagacaaactgccaatacaaaagcccactgatactaattatataatgagaaaaaaatgtatccaactaggacacatatcttttgagttatttggactgaaagcttaagaaaacttggaaaattctattttgtgatctagtcaagccacagttatcaaaggctacattttcagtgtaagataaatggatgagtaaactcaaatatgtatcacgtgtgctttgtatcttaagatgtgtttccaagagcatctgaaattttgtttgtacatgtatcttgatcatttataaagccactgtgatctataaatcaagaaaatccattgtcataaccatttttaaaagtcaaaaattaagacatccttaattaaaaagtttcaaatctagacactaaatgtgtgtgaatgtacaaagaaaacaaaccattgcttatgctgttatatactagagaaattttgttttgcttgctgttttaacttgacagatgaaggactttagttgaacttcatattgtaagaactgttaataaaagttgtcaagtaaaaagcgctatatctaaaaagactttatgaacagttattctatcaacttttaaaggttttaaacctgcccagaaattaccttggtatctgaagtttccctctgtctcctcctctaattaagcttgttatttgtcatgcaccagcattggagataataaaatttcttgttctgtgtaaaaaaaaaaaaaaaaaaaaaaaaaaaaa

SEQ ID NO: 7141 - DNA, 1400 bp, Homo sapiens
gccattgtccagagtggacagaaaaagctggtacttatattaaataaatcagatctggtaccaaaggagaatttggagagctggctaaattatttgaagaaagaattgccaacagtggtgttcagagcctcaacaaaaccaaaggataaagggaagataaccaagcgtgtgaaggcaaagaagaatgctgctccattcagaagtgaagtctgctttgggaaagagggcctttggaaacttcttggaggttttcaggaaacttgcagcaaagccattcgggttggagtaattggtttcccaaatgtggggaaaagcagcattatcaatagcttaaaacaagaacagatgtgtaatgttggtgtatccatggggcttacaaggagcatgcaagttgtccccttggacaaacagatcacaatcatagatagtccgagcttcatcgtatctccacttaattcctcctctgcgcttgctctgcgaagtccagcaagtattgaagtagtaaaaccgatggaggctgccagtgccatcctttcccaggctgatgctcgacaggtagtactgaaatatactgtcccaggctacaggaattctctggaattttttactatgcttgctcagagaagaggtatgcaccaaaaaggtggaatcccaaatgttgaaggtgctgccaaactgctgtggtctgagtggacaggtgcctcattagcttactattgccatccccctacatcttggactcctcctccatattttaatgagagtattgtggtagacatgaaaagcggcttcaatctggaagaactggaaaagaacaatgcacagagcataagagccatcaagggccctcatttggccaatagcatccttttccagtcttccggtctgacaaatggaataatagaagaaaaggacatacatgaagaattgccaaaacggaaagaaaggaagcaggaggagagggaggatgacaaagacagtgaccaggaaactgttgatgaagaagttgatgaaaacagctcaggcatgtttgctgcagaagagacaggggaggcacttctgaggagactacagcaggtgaacagtctacaaggtcttttatcttggataaaatcattgaagaggatgatgcttatgacttcagtacagattatgtgtaacagaacaatggctttttatgatttttttttttaacattttaagcagactgctaaactgttctctgtataagttatggtatgcatgagctgtgtaaattttgtgaatatgtattatattaaaaccaggcaacttggaatccctaaattctgtaaaaagacaattcatctcattgtgagtggaagtagttatctggaataaaaaaagaagatacctattgaaaaaaaaaaaaaaaaaaaaaa

SEQ ID NO: 7142 - DNA, 600 bp, Homo sapiens
ctgacttggatgataaaaattcccaggaaaagggccctcaggaggcctttcctgtgcatctggacctaaccacgaatccccagggagaaaccctggatatttccttcctcttcctggagcctatggaggagaagctggtggtcctgcctttccccaaagaaaaagcacgcactgctgagtgcccagggccagcccagaatgccagccctcttgtccttccgccatgagaatcacacagagtcttctgtaggggtatggtgcgccgcatgacatgggaggcgatggggacgatggacagagacagagcgtgcacacgtagagtggctagtgaaggacgcctttttgactcttcttggtctcagcatgttgactgggattggaaataatgagactgaccctcggcttgggctgcactctaccctgtacactgccttgtaccctgagctgcatcacctcctaaactgagcagtctcataccatggagagatgcctctcttatgtcttcagccactcacttataaagatacttatcttttcagcagtatatatgtgctgaaatctcagcatgaaagcattgcatgagtaaagatactttcccta

SEQ ID NO: 7143 - DNA, 1400 bp, Homo sapiens
agtactgtgtcaacatgcaaggccaggtggccgtgaggaatgtcccaatgacaggctctatcagtcatgtcctggtgcagctcccacatgtcttccagaggatggaagctgaaaacctagcttcagtgattgatgccaggtttaacttttttgtgaacaagattttgccacagtatcgtgatgcagtcatgtctcacacgctcatctatatcccctcctactttgacttcgtgcgtcttcgaaattacttcaagaaggaggaattgaattttacccacatctgcgagtacacgcagaagtctggtgtctccagggccagacacttcttccttcaaggagagaaacagtttctacttttcacagagcgcttccatttctacaaaaggtatacaataaaaggcatcaggaacctgattttctatgaactgccgacatatccacacttttacagtgaaatctgtaatatgctgagagccaccaacagaggagaagaggccacgtggacctgcactgttctctactccaaatatgatgcccagaggttagctgccgtggttggtgtggagcgggcggcacagatgctacagtccaacaagaatgtccacctcttcattactggagaaaaatgaaattttgttgggcaggaagtggtatttggcatgatacataatgtttgattctatgccatttggacccaattctgattacttacagaagaaggactgatacaaagaaagtgcatgaggcaatgtcagtattatctgacatctttcttttcaggtcatgtgtccctgaaaagttaaatgtaaaccagattttggtaaatcccatctttcagaagtgaagagggggctagaaggactctgagaagttggtagaagaaaactcccacttgtgaatatttttgtgagacataaattcttttattacgatttacctctaatttattacacttagtaaattcttccagatttttctatttgtttgacacttccttaaagtaaggaatacacattgcttgcgagaactggttatgagacattggaatacttcttgctgctacatgtcatcttaattttggatggcatgggttttgtaaaacttattctgccccagccaaacttttttgaaaccttaaatagtctaccttaattcagcctagaagagtacattgatttactgatcttttttcatattcataatactaaatgttttagttttgttcaaatatatgcttaaaatcacgttatttaaaaaacacatcagctctgtctcaagaagtaattttgttgaaactccatgttaaaatatccatcttcaacagtagtgtcttcataataactagtcattttttcagtcataaacagatgcaaataaaaaggaaattacacttttaaaaa

SEQ ID NO: 7144 - DNA, 600 bp, Homo sapiens
tcctgctgttgcttctcagtgctctctttccaatatagatgtggtcatgtttgacttgtacagaatgttaatcatacagagaatccttgatggaattatatatgtgtgttttacttttgaatgttacaaaaggaaataactttaaaactattctcaagagaaaatattcaaagcatgaaatatgttgctttttccagaatacaaacagtatactcatgaattgctaagtgtttttttatttttgcatatttattgaactgtctaattgaatacagcttgctcttgtcacctcttcaagctttcaagcctttatagaaaagcttctttgtggcttacactggaaattatgaaagcagtttttctcctaagacttttggtttctcgcattgcctctcagactaagcactaaaaagcaaagcaaaacagaactagttctgtcttaatgaaatatatcaacccaaaagtgtaatgaggaaaatgcttcattagtttcccctagcagacttttacttctcttacactgctacaccattactttcttgagacatttgtaagtcctttgatacagaagagttatatttaggaggctttaatgaaggg

SEQ ID NO: 7145 - DNA, 428 bp, Homo sapiens; identical to SEQ ID NO: 1910

SEQ ID NO: 7146 - DNA, 600 bp, Homo sapiens
tatcagcttttaacgcctggaagtagctgagtctccagtcactggtggccttccccaagtgagctcagcagcatgtgctaataggtgccaatactgtgctggctccagtgggattcctctctgcaaagctgctggcttagcttgactgtttccctattcctctccttagaactttcatagccagtcaagcatagaattgcatccattcttctgaaataggtactgtgcctaatttttcattggcttggccaagattctgttacctgtaattatgtcatatgggctgactggtgtaggtttggtaggcctcactgctctccagaggctagtgttcctatcccaggatggctgttgggattaggagtggaatgaggaatagtttaggaccacaagagatttggcctccttggaacatgtaggaaggcctcaaggatgtaattctagcccagggaagaaaatccttttcagcagacgcttcccttcccttcccctagggaatgtgtccctactatagtaaactcttccttaagagagttttatgttttctctgtcagatcaatttgtttttcttaatgttgttcctatcaaaaaaaaaaaaaa

SEQ ID NO: 7147 - DNA, 1400 bp, Homo sapiens
gaagggttatattgcattctcacgtgaaatataaaaagcaagtcttgcccaataaaaacgctacattgtgtgtattttttgttcagctaagaattggaaaagtatttgcttgccttttaagttactgacatcagcttccaccagtgtaaaaattgagtaaaacctgaagttttgcataaaatgcaaatcggtgcctgtgcttgaaggttgctgtagagcatctgaccccttattaccaccttaagcaatgtatatgccatgcattaccatgcactaattcaatcacaggtgtttctatctagatttaaatatatttgtcaatgaatgtggaatagaaaatctaaacatgacaataatagacatatctttgtatggtaccagttagttttgccgtggatcagatggtttataaaagtaataaccataaagcaaaaaataatttgaaagcccgtctattcctatgctcaataaagttaagtttttcttcattagaacagttttatgatttatttgtctaggagtatgtcagaaaaatcaggcttttagtaggaattactcctattccccctgaagtcaggaccagtgcctgtgatctccattactttattttcctggaggtattagccaacacagttagatcagagaaagcaattgaagccaggcatgaaggctggcgcccgtaatcccagctactaaggctggaggatcacttcagcccaggagtttaaggctgcagtgagctatgatgatgccactgtactgcagcttgggtaacagattgagaacctgtctcattaaaaaaaaaaaaaaaaaaaaagccgttagacacacaggaaaaatccagaagggtaaactaaactaaagctacaattaatatgggaatttggaagaagtggtaggatttaaaatacagaaacagtttatgtataggatagctataagtaaatactgaaacacattatgcctctgtaattggggttgacacatgaacagaatagcagacacaatgcatatgaaagttacagaatatggtaaaagtggggtaaagatgggtttttaatgatactaagataactgaaaataggcatatagatatattccaagccgcctgacgatctaattgtaaaaagtaaagcatacaaatactagaagaaaatggaggaaaacgacattatatgtgacttaaaacctagaagaaataaataaaactattgatcaattttaactacataaaaatgtttataggacaagaaaaaccccaccataacccaaggcaaacaatgtattgacaggattccaataattaagaatacttcatacaaaaagaaatgtaaatgacctttaacatgtaaagatgctcaccttgttcagaagagaataaaccagtgtttttacctttc

SEQ ID NO: 7148 - DNA, 1400 bp, Homo sapiens
atggccctgatcagcaagtaaaaataggagactttggtctggcctgcacagacatcctacagaagaacacagactggaccaacagaaacgggaagagaacaccaacacatacgtccagagtgggtacttgtctgtacgcttcacccgaacagttggaaggatctgagtatgatgccaagtcagatatgtacagcttgggtgtggtcctgctagagctctttcagccgtttggaacagaaatggagcgagcagaagttctaacaggtttaagaactggtcagttgccggaatccctccgtaaaaggtgtccagtgcaagccaagtatatccagcacttaacgagaaggaactcatcgcagagaccatctgccattcagctgctgcagagtgaacttttccaaaattctggaaatgttaacctcaccctacagatgaagataatagagcaagaaaaagaaattgcagaactaaagaagcagctaaacctcctttctcaagacaaaggggtgagggatgacggaaaggatgggggcgtgggatgaaagtggacttaacttttaaggtagttaactggaatgtaaatttttaatctttattagggtatagttggtacaatgcttcgttgtatttagtaagcctttacaagacttgttaaagatgtcagagtgccccaagctgccgttccttcccttcctgccccacaagctccttttcctgaatttcctacctaaatattaaccatatgcctagtctctgaaactaaaaacttggacctcatcctcaattattttctcctttcaactctgttgaccctctgtctggtcttcctctagaaggttctaccgcagaaattgatgtgtgctccctgccctcgtcactgcccaagcccgggcctgcacatactcactggactgttccagttttgacagctgccagtcttcctgcccctttcacactgcagctgaagttcattacctgaaggacgcctcatcatttcattccttggctccaaaccttctgctgcctctaagataaaagctcaacttcttaacagtgtacagtgtgcaacttccaacctttttatctgttctctccaccttcagtttagcgtcattccaaaaccacacccttgcaaagctttgtactccgcaccccagatgatctccaggcagctcagatctctttcctgcctttgccctgcactgttccccggtacttcctcctttattgtagcactcagctccccagccaatctgtacatccctcagaggcagcgatctgatgaattggtttttgaatcccagaaagggtctgccatggagttggcagtcatcacggtagatggcgtatgattttgctgaattttaaataaaatgaaaaccataaaaaaaaaaaaaaaa

SEQ ID NO: 7149 - DNA, 1400 bp, Homo sapiens
gtgaaaagtgctgatgaagtcctttttactggagttaaggaggtagatgacttctttgagcaagagaagaacttccttattaactattacaataggatcaaagattcttgtgtgaaagctgacaaaatgaccagatctcataaaaatgttgccgatgactatatccacaccgcagcctgcttacatagcctggctttagaagagcccacagtcatcaaaaagtacctattgaaggttgctgagctatttgaaaaactaaggaaagtagagggtcgagtttcatcagatgaagatttgaagctaacagagctcctccgatactacatgctcaacattgaagctgctaaggatctcttatacagacgcaccaaagccctcattgactatgagaactcaaacaaagctctggataaggcccggttaaagagcaaagacgtcaagttggctgaggcacaccagcaggagtgctgccagaaatttgaacaactttccgaatctgcaaaagaagaactgataaatttcaaacggaagagagtggcagcatttagaaagaatctaattgaaatgtctgaactggaaataaaacatgccaggaacaatgtctcccttttgcagagctgtattgacttgttcaagaataactgatatgccttcactcagaagaaaagaaatgaatgtgaaagaaagccaagcatcacttgcacttaaatcattaccacggaagatatattagcttcaactttagtttaaaattatgtgaataaatattttgatttctacaaatcttaacatttaaccatgttggtttaaaaatattattgcttgctacttggacataactaatttttccttgtgcatttaatacctctgggcagaatccaaatactgggttctcccgtagttcgtctttagttactaagaaagggtgtaggacacattagccttctggaaacaagtagaagccatcacctggcccatgtccctacaaacccatgattgtcagggaggtgccagttacagcaggtgattcagctacttgaggtcggtaacagaccttccattcctcactgaaggtggggtttgtgtttttgttttgccctgttactccactggtagtcatctggtgtttgtactataacaacagcaagaaaatctcatttatctttatatactctttgcacctcctttttttagtcgagatataaatatttgaggggagagaaatatctacaggtatatatggaaacaaataatgtggtctgctttataagatggccagatctacattaggaaaagtataagccccctccctaatggccgctggggggtgagggcggtgtgttgtatgtctttgggtgtttgtttttttataaagcatataataaaataatcgtgctact

SEQ ID NO: 7150 - DNA, 1400 bp, Homo sapiens
aactgaaatcagagctgggacacagcgcaccagaagctaaagtcttgatgccatcaaaggacatcccctgccccattcacayattcacatctctgtcacgtccactaatcggcaaaaggagaaaagtgagagaagatgacctaagtgtgactgcagcaggcagctctggaaaatgaagccagagcagtgagccagcccctcctccgaccaaggaggaaggaaagagcagccccagcacaggagagaaccacccagcccagaagttccagggaaggaactctccggtccaccatggagtacctctcagctctgaaccccagtgacttactcaggtcagtatctaatataagctcggagtttggacggagggtctggacctcagctccaccaccccagcgacctttccgtgtctgtgatcacaagcggaccatccggaaaggcctgacagctgccacccgccaggagctgctagccaaagcattggagaccctactgctgaatggagtgctaaccctggtgctagaggaggatggaactgcagtggacagtgaggacttcttccagctgctggaggatgacacgtgcctgatggtgttgcagtctggtcagagctggagccctacaaggagtggagtgctgtcatatgggcctggacgggagagccccaagcacagcaaggacatcggccgattcacctttgacgtgtacaagcaaaaccctcgagacctctttggcagcctgaatgtcaaagccacattctacgggctctactctatgagttgtgactttcaaggacttggcccaaagaaagtactcagggagctccttcgttggacctccacactgctgcaaggcctgggccatatgttgctgggaatttcctccacccttcgtcatgcagtggagggggctgagcagtggcagcagaagggccgcctccattcctactaaggggctctgagcttctgcccccagaatcattccaaccgacccactgcaaagactatgacagcatcaaatttcaggacctgcagacagtacaggctagataacccacccaatttccccactgtcctctgatcccctcgtgacagaacctttcagcataacgcctcacatcccaagtctatacccttacctgaagaatgctgttctttcctagccacctttctagcctcccacttgccctgaaaggccaagatcaagatgtcccccaggcatcttgatcccagcctgactgctgctacatctaatcccctaccaatgcctcctgtccctaaactccccagcatactgatgacagccctctctgactttaccttgagatctgtcttcatacccttcccctcaaactaacaaaaacatttccaataaaaatatcaaatatttaccgtcaaccc

SEQ ID NO: 7151 - DNA, 1400 bp, Homo sapiens
atataaagggagatgcttatagccacaacatctattttaccaatattgtttccattacactaccttggattttgcatgagtgagtatagtaacccaagatgccataaaaaaaaacttgatcgttttctgacttaattagttactgtggtttcactaaaagctaccgtggtggagtgaagtcagtcagggaaggtttgtttatgttacatttatttcaccagaactattttaatatatcaaaggggtttactatgccaaacaaaattctagggaaaaatactgctaaaaatggatgcctcatcagaacatgctgttgagtccaatgtgccataagacattttagcatgttaaatagcacttttaatagcaaaaaaaggcacatcaactgcgaagttatccttagtttgcaaatgctttttctagattaatgatttttcaatcattagggtactagacacatcagcctaaagtggcatctggaattgaatggatttactgataatgatcagtctttagtcttccctttgttatatgactttataggttatgattgatcaaatttacgttttactaatggtaagggtgagggtcatagggcaggttttgggttttctagtactgttgaaaactgcaagtattggctatttgtatacttagccataacttggtgaaaaaaaacctgagcagtgtctatgtattaatgcgttggaaagaaagctgcttgtgtttgctttgttaattgcctcaggatatttcttttaaaataagctgttttaagaggaacagaagggaaatctgctacctagtctatacacagcgtgaacctcacagggggcttctgataccctcaaacatggagaacagtaagggagcagagtggttaaggactttcaggaacttaactattctggaataaggaatgaatcaactgaccttgggccagcaggtttttaactaaattgttacttgcctttctcacccagttaatcagtctctgtacttgtttccctttttgaaacaagtgtcttggttaactaattctgttttatggttgtgctaaattcatagcaggtgccttattctttgcttttagtcaaaccattccatatcagaattttccttggtttactatagatatttggctttaagttgttgtttgtgttttttaatgtacaatgttctgataaatttgactgttaaattgctatagctagcaatcattttacatatgtaaaaaattgcattccctttgtatttcatgtgtaattcaccaattaagtgcagtttatattcaggttggattatgcatgtttaggtaaacgaaagctgtgtcttacttgatttattctttaaaaataaagttccctgaatatttgaaaaaaaaaaaaaaaaaaaaaaaa

SEQ ID NO: 7152 - DNA, 1234 bp, Homo sapiens; identical to SEQ ID NO: 1917

SEQ ID NO: 7153 - DNA, 903 bp, Homo sapiens; identical to SEQ ID NO: 1918

SEQ ID NO: 7154 - DNA, 600 bp, Homo sapiens
ctgatgggcgaggaaaacggcatgccacgaagccatgtcccaacaacgtagaaaaatctaacaggatctatcaatgttctcctccatacagagtctcttccaacgaaactgagataatgaaagaaatcatgcaaaatggaccagttcaagccataatgcaagtccatgaagatttcttccattataagacagggatatacagacatgttaccagcacaaataaagaatcagaaaaatatcgaaagcttcagacacatgcagtcaaactcactggatggggcacactgagaggagcacaagggcagaaagaaaaattttggattgctgccaattcctggggaaagtcatggggagagaatggctatttcaggattcttcgaggagtaaatgagtccgacattgaaaagttgattatcgcagcttggggccaactgacgagttctgatgaaccataacatatcattaaatttccataaggtcatgcctttaagtaaccccctaaattgaagtttagcaatatgacattcttggtgacagtggaatctttgtctcttcaccgtgttaacataatctatctattttcttattttcccctctgga

SEQ ID NO: 7155 - DNA, 600 bp, Homo sapiens
tttgcggcatgtgaccatcattgaactggtgggacagccacctcaggaggtggggcgcatccgggagcaacagctgtcagccaacatcatcgaggagctcaggcaatttcagcgcctcactcgctcctacttcaacatggtgttgattgacaagcagggtattgaccgagaccgctacatggaacctgtcacccccgaggaaatcttcacattcattgatgactacctactgagcaatcaggagttgacccagcgtcgggagcaaagggacatatgcgagtgaacttgagccagggcatggttaaagtcaagggaaaagctcctctagttagctgaaactgggacctaataaaaggaggaaatgttttcccacagttctagggacaggactctgaggtgggtgagtttgacaaatcctgcagtgtttccaggcatccttttaggactgtgtaatagtttccctagaagctaggtagggactgaggacaggccttgggcagtgggttgggggtagaagttcttcctttcctaacccgggcccctgcccagctctccaaagtctttcagaaaagtaaatcctaaattcagtgaaaaaaaaac

SEQ ID NO: 7156 - DNA, 386 bp, Homo sapiens; identical to SEQ ID NO: 1921

SEQ ID NO: 7157 - DNA, 1400 bp, Homo sapiens
actcacttatggtctccacaagtatctgaagatgggaaagcccatcctttcaaaatcaacttagaatcagaaccacaggacgggaactactttgaacacaagcataatattcggcccaaacctttcgtgatcccgggccgaagcagtggatgcagcactccctccgggattgactgtggcagtggacgcagcaccccttcttctgtcagtactgttagtaccatttgcccaggtgacttgaaagttgcggctaagctggcccctaacattcctttggaaatggaacttcctggtgtgaagattgtacatgctcagtttaatacacctatgcagttgtactcagatgacaatattatggaaacactccagggtcaggtttcaacagccctaggggaaacacctttgatgaacgagcccacagcctcggtgccccccgagtcggacgtgtaccggatgctccacgacaatcggaatgagcccacacagcctcgccagtcgggctccttcagagtgctccagggaatggtggacgatggctctgatgaccgtccggctggaacgcggagtgtgagagctccggtgacgaaagtccatggcggttcaggcggggcacagaggatgccgctctgtgacaaatgtgggagtggcatagttggtgctgtggtgaaggcgcgggataagtaccggcaccctgagtgcttcgtgtgtgccgactgcaacctcaacctcaagcaaaagggctacttcttcatagaaggggagctgtactgcgaaacccacgcaagagcccgcacaaagcccccagagggctatgacacggtcactctgtatcccaaagcttaagtctctgcaggcgtggcacgcacgcacgcacccacccacgcgcacttacacgagaagacattcatggctttgggcagaaggattgtgcagattgtcaactccaaatctaaagtcaaggctttagacctttatcctattgtttattgaggaaaaggaatgggaggcaaatgcctgctatgtgaaaaaaacatacacttagctatgttttgcaactctttttggggctagcaataatgatatttaaagcaataattttttgtatgtcatactccacaatttacatgtatattacagccatcaaacacataaacatcaagatatttgaaggactctaattgtctttccttgacaagttgattttgcaattgtggtaaatagcaaataacaatcttgtattctaacataatctgcagttgtctgtatgtgttttaactattacagtgcatgttagggagaaattccctgaatttctttagttttgtattcaaacaattatgccactcgatgcaacaaacataataaatacataaaggatttaaaaaaaaaaaaaaaaaaaa

SEQ ID NO: 7158 - DNA, 1400 bp, Homo sapiens; identical to SEQ ID NO: 7157

SEQ ID NO: 7159 - DNA, 1400 bp, Homo sapiens
ctttgtgtttgatgtgatgaacctactcaatgtgatatataacaccatagatgttcaagtggccttggtaggtatggaaatctggtctgatggggataagataaaggtggtgcccagcgcaagcaccacgtttgacaacttcctgagatggcacagttctaacctggggaaaaagatccacgaccatgctcagcttctcagcgggattagcttcaacaatcgacgtgtgggactggcagcttcaaattccttgtgttccccatcttcggttgctgttattgaggctaaaaaaaagaataatgtggctcttgtaggagtgatgtcacatgagctgggccatgtccttggtatgcctgatgttccattcaacaccaagtgtccctctggcagttgtgtgatgaatcagtatctgagttcaaaattcccaaaggatttcagtacatcttgccgtgcacattttgaaagataccttttatctcagaaaccaaagtgcctgctgcaagcacctattcctacaaatataatgacaacaccagtgtgtgggaaccaccttctagaagtgggagaagactgtgattgtggctctcctaaggagtgtaccaatctctgctgtgaagccctaacgtgtaaactgaagcctggaactgattgcggaggagatgctccaaaccataccacagagtgaatccaaaagtctgcttcactgagatgctaccttgccaggacaagaaccaagaactctaactgtcccaggaatcttgtgaattttcacccataatggtctttcacttgtcattctactttctatattgttatcagtccaggaaacaggtaaacagatgtaattagagacattggctctttgtttaggcctaatctttctttttacttttttttttcttttttctttttttttaaagatcatgaatttgtgacttagttctgccctttggagaacaaaagaaagcagtcttccatcaaatcaccttaaaatgcacggctaaactattcagagttaacactccagaattgttaaattacaagtactatgctttaatgcttctttcatcttactagtatggcctataaaaaaaataataccacttgatgggtgaaggctttggcaatagaaagaagaatagaattcaggttttatgttattcctctgtgttcacttcgccttgctcttgaaagtgcagtatttttctacatcatgtcgagaatgattcaatgtaaatatttttcattttatcatgtatatcctatacacacatctccttcatcatcatatatgaagtttattttgagaagtctacattgcttacattttaattgagccagcaaagaaggcttaatgatttattgaaccataatgtcaataaaaacacaacttttgaggc

SEQ ID NO: 7160 - DNA, 1400 bp, Homo sapiens
cccgctctgccgcctcaacttcggcctcaatgtcgtggagaacctcgcgttgctagtgctcacttatgtctcctcctccgaggacttcaccatccacgaaaatgctttcattgtgttcattgcctcatccctcgggcacatgctcctcacctgcattctctggcggttgaccaagaagcacacagtaagtcaggaggatcgcaagtcctacagctggaaacagcggctcttcatcatcaacttcatctccttcttctcggcgctggctgtctactttcggcacaacatgtattgtgaggctggagtgtacaccatctttgccatcctggagtacactgttgtcttaaccaacatggcgttccacatgacggcctggtgggacttcgggaacaaggagctgctcataacctctcagcctgaggaaaagcgattctgaacccttcagtcctgcttgggaggacgcagcccactgcccagaaacaagaaacacgataccattctggccttccccaccccacatcctctcttggccttactgaagatgggggaagggtaagaaggaagggtgtaggccaaggctcaccccagtgctgctggcttctcctctccacccctcatatgggcgtggggtcctcaaacatcacctttacctgagaggccccaagaagctgagctggcagagagctccaccatttggtgctaaaaaaaaaaacgtcctgaggttcatgaccaccatccagtttctggcctttacacagtcacctttcactgaggtcaggagcccctgagcagtggctgctccctgacaaccacagccatttctctgcacgggggtcattcataggactaatgtatttcatgatctactgtgcacatccaggcctgtggccacagtcccctgctaaagttgctcaggtgttctagtcctgacttcacctttttgatttggtgtgtgccctagggtatgtacccttccccatctgagcctcggtgtgtccatgtgtctggcgggggatgggtggactgtatgatttccaaggactctaccagtcagtggttctgatgtcatcgggtggaggtggtgttctatacctaaaggatgacctgctccagaaacagcaccagcacagcatgtattttcttctcttctgaaagttctggcttgtagacccctcccctcctttgcaaaggtatgggatagaggggtcagatgcagatctctactgtaaaatgggctccctggtatctcctgtcttccctactgctccaaaccctaaattttggttgtacattttattttgaaaggaaaataaattttttttttgggccaacaaaaaaaaaaaaaaaaaaaaaaaaaaaaaaaaaaaaaaaaaaaaaaaaaaaaaaaaaaaaaaaaaaaa

SEQ ID NO: 7161 - DNA, 600 bp, Homo sapiens
atgtttttctgtaccttccccgagatggtggataaacttatcttgctggacacgccgctctttctcctggaatcagatgaaatggagaacttgctgacctacaagcggagagccatagagcacgtgctgcaggtagaggcctcccaggagccctcgcacgtgttcagcctgaagcagctgctgcagaggttactgaagagcaatagccacttgagtgaggagtgcggggagcttctcctgcaaagaggaaccacgaaggtggccacaggtctggttctgaacagagaccagaggctcgcctgggcagagaacagcattgacttcatcagcagggagctgtgtgcgcattccatcaggaagctgcaggcccatgtcctgttgatcaaagcagtccacggatattttgattcaagacagaattactctgagaaggagtccctgtcgttcatgatagacacgatgaaatccaccctcaaagagcagttccagtttgtggaagtcccaggcaatcactgtgtccacatgagcgaaccccagcacgtggccagtatcatcagctccttcttacagtgcacacacatgctcccagcccagctgtag

SEQ ID NO: 7162 - DNA, 600 bp, Homo sapiens
gggatggtgacggaccaatttggaatgattggcctgttaacatttatcagggcagcagagacagacccaggaatggtacatcttgcattaggaagtgacttaacaacattaggcctcaatctgaactctcctgaaaatctctaccccaaatttgcgtcaccctgggcatcttcaccttgtcgacctcaagacatagacttccatgttccatctgagtacttaacgaacattcacattagggataagctggctgcaataaaacttggccgatatggtgaagaccttctcttctatctctattacatgaatggaggagacgtattacaacttttagctgcagtggagctttttaaccgtgattggagataccacaaagaagaacgagtatggattaccagggcaccaggcatggagccaacaatgaaaaccaatacctatgagaggggaacatattacttctttgactgtcttaactggaggaaagtagctaaggagttccatctggaatatgacaaattagaagaacggcctcacctgccatccaccttcaactacaaccctgctcagcaagccttctaaaaaaaaaaaaaaaaaaaaaaa

SEQ ID NO: 7163 - DNA, 600 bp, Homo sapiens
gagactgaggtggtcccctgcccaggaggaaagtttcaggcagatggttgtcatccataaggaaattcccacagggaagaaagaccatgaatgtagtgaatgtggtaaaaccttcatttataactcacatcttgttgtccaccagagagttcattctggagagaaaccctataagtgtagtgactgtgggaaaactttcaaacagagctcaaacctcggtcagcatcagagaattcatacaggagagaaacccttcgaatgtaatgaatgtgggaaggccttcagatggggtgctcatcttgttcagcatcagaggattcactcaggagagaagccctatgagtgtaatgagtgtgggaaggcctttagtcaaagctcatatctaagtcagcatcggagaattcacagtggagagaaaccttttatatgtaaagaatgtgggaaagcttatggatggtgctcagagctcattagacatcggagagttcatgccagaaaagagccttcccattgaattgaaggggagaacgtctccagacagaattctacatcggtctaatctactttaggactggatcccataaaagttataagttcctt

SEQ ID NO: 7164 - DNA, 600 bp, Homo sapiens
acccaatagatatatggattcaattaagtttggtagaagatgagaacaaaataactactgatttaggaaaattggatgcagaataataattatagtaggggcaattttgtctgtagatggcagtatgacaattcttgctagagaatatattgaaaaaaacttcaacacaaagggttgtagcactgtcctcagtaccattgtgtgcatgaggatcagaatagtctgggctagatacatcacattaaagcttttcagaatctgataaatagctctaaatactaatgatattgagaagcctagcttcacttgggaaaatctgtggctgttcacagaaattcagcaccaagttattccccccatactctaccaggccttcaggtcctcataaagaaaagtgtcgttttcagattaggaactcaaaattattttggtgcatcaaatctacagtcacacaatataacaagaatgggattagaaaaatgaaagcctactcattctcatctttaagccagagaatgaaatatatatgaggtctctggatagctatttaaatatttgcatatttatgcaaggtattttgagcccttcagaagacattct

SEQ ID NO: 7165 - DNA, 600 bp, Homo sapiens
agtgaagcatttcgcctgaccattacacgcaaagatattcaaactctaaaccatctgaattggctcaatgatgagatcatcaatttctacatgaatatgctgatggagcgaagtaaagagaagggcttgccaagtgtgcatgcatttaatacctttttcttcactaaattaaaaacggctggttatcaggcagtgaaacgttggacaaagaaagtagatgtattttctgttgacattcttttggtgcccattcacctgggagtacactggtgtctagctgttgtggactttagaaagaagaatattacctattacgactccatgggtgggataaacaatgaagcctgcagaatactcttgcaatacctaaagcaagaaagcattgacaagaaaaggaaagagtttgacaccaatggctggcagcttttcagcaagaaaagccagattcctcagcagatgaatggaagtgactgtgggatgtttgcctgcaaatatgctgactgtattaccaaagacagaccaatcaacttcacacagcaacacatgccatacttccggaagcggatggtctgggagatcctccaccgaaaactcttgtga

SEQ ID NO: 7166 - DNA, 1400 bp, Homo sapiens
aaattggtggaaatcacatcttaatgtcaagctcattaagttaactgtaattactgtattttgtgggacaaagaaaaaaggactccagtatttgtggcctgtactggatgtgaactgagcgtatatctgtttttaggtgtctttaagccaatgtggagtctgatctttcaaaaaagttttttttttctcttcttcttcttcttttttttttttttttttttttttttttggactctgtgtgctgccttaggggttaggaatgtggtgctcttgttgggggaagtgagctccaagagtagctttttttcatctcttagtgatcttctgtttatcggttgaatgccacagattcccttttaaacttattttgctttaaaaaaaaaaaaaaaagaaaaagaaaatttaacttaaaatattttagcattagttgcacaaaatgtttggataaaattctagtttttataagtctttttatatatttagcctgtcacaacagtgctcaagattgtattgaagtttttctgcattatacaaccctaaaacacagagatctcactgacccgttgccctgtaaccactttctttccttcttttgcctaatacagctcagctaagtccttccataaagatgctaaataactttcatcatcacataaatgtcttcataaaccaaggactattaagtgtattaaaatgaaacagtggggtttagtactccaaatgaactcttaaagaaaaaaactaatcttggcatcctatcactatgtgatattttgtacatcttactgtattcacaagtttatttatcaaggattatccatcttgctaatggcctattatttatttcactttttgttggtctttatatccttttattaatgtgctaaaggaacctgtatatctattttggaactctttgaatagtctaaaatagactaaaaatggagtattttatagtttaaattacaaaccaaggtggttccccctaagatatatatcttggtttaccatgattccaaacaaaactaacttgtttaaaaatatttggagtaaagttttatttgcattacaaataggatacaaaaatagttgaatcaggatacagaaatctgctgtgttttgactagttatccctgttttatttttttagatgtgcttaatttatggtgtaactaaagattttgtttgtgtaatgcatgattaagacaataaagtattttttctagtcttccgagaaacttttctgatcagtttgcgagttttgatgagttttgtaaggtttttgttttacaaactatgaatcagcaaatttttaagattgtaccacatagcaaacatacagctgttgaaaaataatgtatataaaatgcatataataaatattaaattgtgtacctgta

SEQ ID NO: 7167 - DNA, 970 bp, Homo sapiens; identical to SEQ ID NO: 1932

SEQ ID NO: 7168 - DNA, 600 bp, Homo sapiens
tcatcgaggccaagctggaaggccacgggctgcccgccaacctgccccgtcgcctggtgccaccctccaagcgacgccacaagggctccgccgagtgagccgggcccccctcccatggccctgctgtggctccccagctccagtcggctgcacgcacacccctgctccggctcacacacgccctgcctgccctccctgcccagctgtaaggaccgggggtctccctcctcactaccgccagacaccccggtggaagcatttagaggggaccacgggagggacaaggcttctctgtccgcccttcacacctccagcctcacgttcacttaggcacatcacacacacactggcacacgcaggcatccatccatccgtcattcattcaaatattattgagcacctactatgtgcccagccctgttctaggcactgggcattaccatagagaacaaaatagacaaatacatctgccctcatggaaggtgacgttcccggagagggcacctacacagtcacgcaaacacacactaattcctggcaggcccccgcccctcccctggctgagcagccctgtggctgaaatgactagcagataaacag

SEQ ID NO: 7169 - DNA, 1400 bp, Homo sapiens
gggcgggccgagcggggcggcctttgttaagcagcgagggcgcgaccgcgggtactctgctgccggcttctcggagcggcgctgggcgaccagagcagggtcgagatgtcctacatcccgggccagccggtcaccgccgtggtgcaaagagttgaaattcacaagctgcgtcaaggtgagaacttaatcctgggtttcagcattggaggtggaatcgaccaggacccttcccagaatcccttctctgaagacaagacggacaagggtatttatgtcacacgggtgtctgaaggaggccctgctgaaatcgctgggctgcagattggagacaagatcatgcaggtgaacggctgggacatgaccatggtcacacacgaccaggcccgcaagcggctcaccaagcgctcggaggaggtggtgcgtctgctggtgacgcggcagtcgctgcagaaggccgtgcagcagtccatgctgtcctagcagccaccaccatctgcgactcctgcctgccgcctctctgtacagtaacgccacttccacactctgtccccatctggcttctgctgaccgctgggccccagctcagaagggctatagctggtcccagaggcctggcctggccttccttcccttctcccatccctggcctggggcctctgggaccagctttctctcctggacaccgaggattggaaataagggcctggagctgagtagtagccagtctgctgtgaccacaggctcaggtccgaccctgctgcttggccacagcagtggctgggcaagtgggaaccactatctcttgggagcccccaaaagctgggaaatgctggaggaaccaggcctttcccgcttttgcctggctgcagggttcggctccgcccctgccccccagccctcgtgtgtccacaccgcagtgcctctgcccctcgggggactggacacacatcctgccagaggcgctacgaagctttgcccagatgaagccaggtgggctccgcgttcactcccactctcccgaggggtgctggcctccccagggtttgccttcttacggatttagacgaggttcgaggctcacctatcagggcagctctcaggattgtcattttcctctttgcctgtgggtttaacttttgtatttttttaatcacaagtttgatacaaaatgtttttatcgtactctttggagatgcccattctacttttgaatttagcttttactaattcgcatctggaagctcagcaagtgcacaagccttactttggttaccgtggaaaccactgccgcccctccccgatgtggtgcgctcaataaaaatgctggaattcaaaaaaaaaaaaaaaaaaaaaaaaaaaaaaaaaaaaaaaaaaaaaaaaaaaaaaaaaaaaaaaaaaaa

SEQ ID NO: 7170 - DNA, 832 bp, Homo sapiens; identical to SEQ ID NO: 1935

SEQ ID NO: 7171 - DNA, 470 bp, Homo sapiens; identical to SEQ ID NO: 1936

SEQ ID NO: 7172 - DNA, 1400 bp, Homo sapiens
tgacaaaccactgaggtcatggtgactcagtgatcagcagatggtacttcaacagcaatcccctgtcaaacctcagaacttgaggctgaaacattgcttccacccaccatcagtgaagatgtaactagcatgttacaagagtgaataatctggacttcagagattaagtcaccaatagtgatctcacaagcactcaccggaactcctataatgtctccactttgtccatgccatttagcaatctcatctcctaaatggactgtgcctatgattcttaaggagaaagtgaatcattggtagatatcctgcacaagcagctggactttccagtaatagctttcttggggctattaggaaaattaaacaagaaatgaggctttctgggtctgcctgtatgtcttctgcataagacaaagaagagacatcgaatcaaccaataagaagagcccaaataagcatcctcaaatcttttgggatttggcacttggggacatgagtagttgtctgggatacgtcatattctcaacagtttctttgtagtagtaggatcaccttcttataataggatcaccttcttgttgctatagctgtacccgaccttcccttctcccttgagtgcttgcatgagctccacttttccttttgcttgaacagcttctcctgagtcctccttaccgatggttgtgactttaattatatacatctctgtccctccagacagatccctctgtcctcactctctgatttcattgaggatcttgggtgagagagagggacctgcaggatgaacaaatgtctactctaagacagctagattgggaggttggctggtcactgatggttataatgactgtgggacaggattaacttcagaataaatgaacaggagacacagatatgaagaaagtttctgattgatatggtctgaagtactcctggtattgcaagtcatttgctctaattctcaattgtaggcaaactgatttgtaaatttgcttcttcagccttctttcctgtagcctagcatggagaatctgaccagaccccattttgagaaggtcagcctacactggaatgaactttttacattagggcatttgtatttccctcacaatacttgccacattacttggcataggagagatgcttagtgtaattataagttaacaagcctttggatcagggcttgactcatgatagacaaagtatatgcctgctggatggaagaatctcttgggcgagcaccatttttctttccatcacctttccttgaaaatatatcttcagctttgggtaggaggaatcttggtgtatgaaatcattgcaaatttacttcatcttttctggagtttgaagttgtgactctcctgctaccaattaaataaagcttactttgccat

SEQ ID NO: 7173 - DNA, 600 bp, Homo sapiens
gcattagaccatggttgatgcaacaggggacatgtccaacgtgcagactccacgttttgctaccagaagaattccctggtcaccccagccggcagttgcccaagatctgatacaaggtcggggtgtctatgcaaaggaagctcagttttcttttattatgagctgcttgtttgagtggtgtaaaactatgtgctcttcaatatagtgctaaagaagccagctaattttatcaaagcagcagccaaagaagtcaggacaaatcttcaggacttgtgaaatgaactgaaagagcttgaagcagatggaattttaatagttacactatatatgctcttagtaggtttttttcttgtagtggaaacataactgttagcatatttcttaggatgttttttcttgtctttttaaattcttatttcactcatcctttactctcccctcaagtattctacactttaatttcctgaaataaatttaaggaaaagggaaatagtaaagaagtaggaatgggtgcagcacaccagcatggcacatgaatacacatgtaactaacctgcacattgtgcacatgtaccctaaaacttaaagtataataataat

SEQ ID NO: 7174 - DNA, 600 bp, Homo sapiens
tgtgccaggctctgtcaaatcttttacctgccttaaatcatctaatcatccaaacagtccagttgcataagcactgttattaccattttacaaatgaggtaacttggcacagggaggttgagtaacttggccaaagtcaaacagctctgacatggcagtgtagggatgcaaacccaggcaatctaggtcccaagactgcactgtcaaccctagcttctcaaaatacattgtgaaaaattcacactcattatcccacataattgtgtaaggtttattagccctgttttataggtgaggaaactgaggcttagtgaggggaaagccttgttccatgtcacacaggtaggccatgacagttctggatggaaacccaggtcggtctgattccaaaactgcatataatactgcctgcaacagttgcttaatgtatggggcttaggaaccaaatcaactttctttatagcattgaaaaccacaacttttaccttcgggttggccttggcctcccaggaaatatttgaatagagaattctgttttggggggacattaaggagcctggtctgccccacccgacctatcaacccaacattttgctctgg

SEQ ID NO: 7175 - DNA, 1400 bp, Homo sapiens
gagaggaggtgggaacagaagagagaaggaggcagggagatgtatttcttagggctcaccccttcacagactgacagaatggttttgttttgttttgttttgttttgttttgtttttgagatggactctagctctgtcacccaggctggagtgcagtggtgcgatctcggctcactgcaagctccgcctcccgggttctcaccattctcctgcctcagcctcccgagtagctgggactacaggcgcccaccaccacgcccggctaattttttgtattttttagtagagacggggtttcaccatgttagccaggatggtctcgatctcctgacctcgtgatccgcccgcctcggcctcccaaagtgctgggattacaggcgtgagccaccgtgcctgccccagaatggtttttaaagccacagttgagaggccacccattgcccggcgcctggacagtgatcatcttgttcatcttgttcagtcctttcttgtgtgattggaattattcatcccctttgaaagatgagaaggttgagatgcaaagagtctacctttccaagttctcactgctggaaagagctagaagcacagttcaaagttctggcttctggactctgcagtccaggtctcccttctcccacttgcctaccctcaatgccacactgtttttgaagtggcccataacttgaaggaaaagtttaaagacagttcaatttaatcatcagaatgcattcttttttttttcggagacggagtttcactcttgctgcccaggctggagtgcaatggtgcaatgatctcggctcactgcaacctctgcctcctgggttcaagtgattctccagcctcagcctcccgagtagctgggattatgggcgcccaccaccatgcccagctaatttttgtattttttttttttagtagagatggggtttcgccaggttggccaggctggtcttgtgaactcctggcctcaggtgatctgcccacctcatcctccaaaagtgctgggattacaggcatgagccactgcgcctggcctcagaatgcattcttacacatctatcctagacatttataagcactctaatggataacaatccaagaataaatgattgtaaaagatgatgccgaagagttgatgtcaatctttttttcctaagaaaaaaagtccgcgagtattaaatatttagatcaatgtttataaaatgattactttgtatatctcattattcctattttggaataaaaactgaccttctttaatcatatacttgtcttttgtaaatagcagcttttgtgtcattctccccactttattagttaatttaaattggaaaaaaccctcaaactaatattcttgtctgttccagtcttataaataaaacttataatgcatg

SEQ ID NO: 7176 - DNA, 1400 bp, Homo sapiens
tgtattttctactgtaataatgtaatttaaggccttccacaatgaacagttcactttattccctgggttttctataaacagttttaaggatatgatttggttaaaaaataatttgttataaaaattctgtttgcaaattaaactggaaaagtatccagagtctcaaaaggcaatgatttgtgagataatatggcatgcccggagccctgctcatcaatgaaaaacccatatgtaataatcgaattcatttaacatgaatcttgagtacgtggaccattgcttgcatgttaactttttgttttgttttgttttgttttgttttgcatttttaactccagatatcctaaagctcaattgtttggtctctggttttcatccttagagaagccatggagaacagacttgaaaagtttaggaaatcataatgtggcagaggtggtgggaagaagaaagttgagctttttccccttgagaaacttctgcatttagtttctatctttccaggcaaaacaaatgggtattcttttcatacaaccattttcaaatgaaccttagaaaagtcttaacatttaaggtattttatgcacagaatacacttagattgataggaaagaactcgtaatggagtttgagtaaagaaaatgactgatgtactaaacccagtaaaaattgttgaaaatgttaaaggtcagcatgttctaattgggaatctagatatagcttagatttcctattggcttagagtatttgctataacaaatgaagtgcaatgacaattatatattcctactcggtcatactggactggcttcgttctcttaatatactcagtaatgactcaagcctctggctattaacataccctagttgccgttttttaattgccatgagccaaatacttcttggtatacaattgatccatttattttaatggctgccttttcattttcatcttttcttgctgctacccatctatgtatgtagtcattggggggaaaatgtagccacattttttatgggaagactttgtgttaaaagtgaacattttgaaggtttttaactggtgaaactagcctggaataatgccaccagagactgagtggaaatcgccccttttgaaggtgccattcttatgagccaaaagtttgtcatttaaaagttcattttgagggaataacatgtaatataatttgaaataaaggtatagtaaccttaaaaagaacattataactgattgttgtgaatggggtgaatttgttaaaatgagtaactttgataaagtttttcatgcacaggcaaaatgtattcactagatttctacgtagtgatctgcttttactttgtaatttgtagttctcaaaagacttttttttaaaaaaataaagtccatacttacactt

SEQ ID NO: 7177 - DNA, 600 bp, Homo sapiens
cacatccagggaagaggagtgtcggtagttcttgcagtaggcactttatcaggacctgacctgttgctgggtgattttagtctctacaaacagaaagcgtttcaaagcgtcagctgtgggagcagagtgaccctttgctgatgctggggggaggggatctaaatcctcatttatctcttctatgtctagtattttactgtcactggaggctctgtgggctgtcatagttaattgaccataattagcaatatacttttaaagtgggaaagctgaatgacacttttaagacaatgaacattatcaaaacaaaatgtataatttcttaatttgaataataagcgtttaaatgctatttgtagtcttgatatacagaaataaaataattagggttggtcttttttattttaggttttatgttgaatgttctatatcttattagttaatttgtatattttattagtattttggaaatagcatatctgagactgaggagaaattgacaattcacttatttgtggtttttttctcagctattctgagcttatttatttatttgtatgttctaatggctaaacatttacattaaatattttttttccc

SEQ ID NO: 7178 - DNA, 600 bp, Homo sapiens
ttttttcttttgaaggaataaatgttctttatacagcctagttaatgtttaaaaagaaaaaaatagcttggttttatttgtcatctagtctcaagtatagcgagattctttctaaatgttattcaagattgagttctcactagtgtttttttaatcctaaaaaagtaatgttttgattttgtgacagtcaaaaggacgtgcaaaagtctagccttgcccgagctttccttacaatcagagcccctctcaccttgtaaagtgtgaatcgcccttcccttttgtacagaagatgaactgtattttgcattttgtctacttgtaagtgaatgtaacatactgtcaattttccttgtttgaatatagaattgtaacactacacggtgtacatttccagagccttgtgtatatttccaatgaacttttttgcaagcacacttgtaaccatatgtgtataattaacaaacctgtgtatgcttatgcctgggcaactattttttgtaactcttgtgtagattgtctctaaacaatgtgtgatctttattttgaaaaatacagaactttggaatctgaaaaaaaaaaaaaaaaaaaaaaaaaaaaaaa

SEQ ID NO: 7179 - DNA, 600 bp, Homo sapiens
gcttttactggtgtacagtatgagtggaatataaactgtacacataattatcatgttgatataaatcataatttcaactagatcaagacatgttaaccttttataaatttaaagtcaataaagcacctttttaaaggaaacactgcaactttccttaacagcctgttaataaaggctttgtgacaagctctcaaaaaatgcatttctaaataggaggacatcaatgtattgatgaagagaaaaaactagtacttagttgccacactcatgcttacatagaaagagagcccaagaatattagatttcctcatgatacaagatactacagtaacaggctttaatttaggatccttaagattttggggtattatttgtgactctcctgaaattgtaaacttgtgcttctgtgtccagttttctaatgagtaggttcgtagcttgattgaattaataattgtgagcccatagacacaagggaagtgagaaacagtgctctggtgacatgataaatatatgtgtcaaccaccatttcagctattaaaaactcctgttatctccttgtttgaatttcaggtcattaaattgtataaccatcatttg

SEQ ID NO: 7180 - DNA, 1400 bp, Homo sapiens
tcttcggaacctttcttcccctggatgggaaaacatctcaaggcctgaagctgcccagcaggcattccaaggcctgggtcctggtttctccggttacacaccctatgggtggcttcagctttcctggttccagcagatatatgcacgacagtactacatgcaatatttagcagccactgctgcatcaggggcttttgttccaccaccaagtgcacaagagatacctgtggtctctgcacctgctccagcccctattcacaaccagtttccagctgaaaaccagcctgccaatcagaatgctgctcctcaagtggttgttaatcctggagccaatcaaaatttgcggatgaatgcacaaggtggccctattgtggaagaagatgatgaaataaatcgagattggttggattggacctattcagcagctacattttctgtttttctcagtatcctctacttctactcctccctgagcagattcctcatggtcatgggggccaccgttgttatgtacctgcatcacgttgggtggtttccatttagaccgaggccggttcagaacttcccaaatgatggtcctcctcctgacgttgtaaatcaggaccccaacaataacttacaggaaggcactgatcctgaaactgaagaccccaaccacctccctccagacagggatgtactagatggcgagcagaccagcccctcctttatgagcacagcatggcttgtcttcaagactttctttgcctctcttcttccagaaggccccccagccatcgcaaactgatggtgtttgtgctgtagctgttggaggctttgacaggaatggactggatcacctgactccagctagattgcctctcctggacatggcaatgatgagtttttaaaaaacagtgtggatgatgatatgcttttgtgagcaagcaaaagcagaaacgtgaagccgtgatacaaattggtgaacaaaaaatgcccaaggcttctcatgtctttattctgaagagctttaatatatactctatgtagtttaataagcactgtacgtagaaggccttaggtgttgcatgtctatgcttgaggaacttttccaaatgtgtgtgtctgcatgtgtgtttgtacatagaagtcatagatgcagaagtggttctgctggtacgatttgattcctgttggaatgtttaaattacactaagtgtactactttatataatcaatgaaattgctagacatgttttagcaggacttttctaggaaagacttatgtataattgctttttaaaatgcagtgctttactttaaactaaggggaactttgcggaggtgaaaacctttgctgggttttctgttcaataaagttttactatgaatgaccctgaaaaaaaaaaaaaaaaaaaaaa

SEQ ID NO: 7181 - DNA, 1400 bp, Homo sapiens
aagaagctggcaggggcacgagccgggggcgggtttgaagacgcgtcgttgggttttggaggccgtgaaacagccgtttgagtttggctgcgggtggagaacgtttgtcaggggcccggccaagaaggaggcccgcctgttacgatggtgtccatgagtttcaagcggaaccgcagtgaccggttctacagcacccggtgctgcggctgttgccatgtccgcaccgggacgatcatcctggggacctggtacatggtagtaaacctattgatggcaattttgctgactgtggaagtgactcatccaaactccatgccagctgtcaacattcagtatgaagtcatcggtaattactattcgtctgagagaatggctgataatgcctgtgttctttttgccgtctctgttcttatgtttataatcagttcaatgctggtttatggagcaatttcttatcaagtgggttggctgattccattcttctgttaccgactttttgacttcgtcctcagttgcctggttgctattagttctctcacctatttgccaagaatcaaagaatatctggatcaactacctgattttccctacaaagatgacctcctggccttggactccagctgcctcctgttcattgttcttgtgttctttgccttattcatcatttttaaggcttatctaattaactgtgtttggaactgctataaatacatcaacaaccgaaacgtgccggagattgctgtgtaccctgcctttgaagcacctcctcagtacgttttgccaacctatgaaatggccgtgaaaatgcctgaaaaagaaccaccacctccttacttacctgcctgaagaaattctgcctttgacaataaatcctataccagctttttgtttgtttatgttacagaatgctgcaattcagggctcttcaaacttgtttgatataaaatatgttgtcttttgtttaagcatttattttcaaacactaaggagctttttgacatctgttaaacgtctttttgtttttttgttaagtcttttacattttaatagtttttgaagacaatctaggttaagcaagagcaaagtgccattgtttgcctttaattggggggtgggaagggaaagagggtacttgccacatagtttcctttttaactgcactttctttatataatcgtttgcattttgttacttgctaccctgagtactttcaggaagactgacttaaatattcggggtgagtaagtagttgggtataagatctgaacttttcatctgcagaggcaagaaaaatatttgacattgtgacttgactgtggaagatgatggttgcatgtttctagtttgtatatgtttccatctttgtgataagatgatttaataaatctctttaaatactt

SEQ ID NO: 7182 - DNA, 1400 bp, Homo sapiens
atggctttttctttttcctcttaagagttctattcttcaggtagataatttttcaaatgtgaattatcttttgtgtctatattgatagctcttaaaggagtgaaaatctaaaatagtaaatttcaatgttaagtgtctgctttatgggcatatataaaagtagacacatttcatttgttaatttagttgtgtgtgtgtgttaaaaggagctaatgcttattctgttaatgtaaacttttgaagatcttaagtgtattgctctttcatcttaaacactttcgaggatttgcagtgcgtctagcacctagattacagccaggaacattggttaagaactgttggaaacaaaactaaaagcaaactcaacatatgtgatgtttatggccctcagatccttagtattgtgtgattttcccccgttaacatgtctttctaaaattgtctattaaagcagaggaaatacctgccaaaggaagtatgtattgcattaatcagggcataactaatattctcctgttcagaataatacttatttacgtgtgaaagcaacatggatgtgattcccaacacagaattttcatgacccttttattgtatacaaataaataccataacagttacttggttagacatcaaatctgtgtgcatgactatgtgcttatccacttaagacaataggtaaaaggggatctgagaaattatgtaatagggagtgggaataaaactacttaattcctgtgggcaggttatattttaagttcaaatgcattgctttaacctttggttacttttattctgttaaacagaattgaagaaagagtattataccagagtgtagtaggctagggtgattgtaagaactctgtaatagaatgtcattgtggatgttacctttttcagatccaagcatataaaaagcctgtatattttttaaaaacacatcttaactccacgctttacgatattataaaagttgaatggttcctcttggtaaggatatttgcttacaagtgctaggaaataactcactgatacctgcgttaacatactttgttttgcctagagaggggcaataaaaatgaaccaaaggatatttccagaaaggattaagaaagctgtttaagaaggccatgactctttaggtgtgtatgtgtacctttcagcatcctaggaatttttatactaaaagcaaaatgttttttccagttagtcttcttcaaggaattactattgttccttttgtcacaggtaaaatcagtgttgggaattataatttgagaaaaatattacccagtaacattgaatgtagatggctaaacgattcttactcagtgtgatgtataatgatgcaacagggacccttgtaaattgtcatacgccaataaaatgtcacaagtaat

SEQ ID NO: 7183 - DNA, 600 bp, Homo sapiens
tggactggctgacggagaaaatgagggaagccaacttcactgtatcctcaatgcatggagacatgccccagaaagagcgggagtccatcatgaaggagttccggtcgggcgccagccgagtgcttatttctacagatgtctgggccagggggttggatgtccctcaggtgtccctcatcattaactatgatctccctaataacagagaattgtacatacacagaattgggagatcaggtcgatacggccggaagggtgtggccattaactttgtaaagaatgacgacatccgcatcctcagagatatcgagcagtactattccactcagattgatgagatgccgatgaacgttgctgatcttatctgaagcagcagatcagtgggatgagggagactgttcacctgctgtgtactcctgtttggaagtatttagatccagattctacttaatggggtttatatggactttcttctcataaatggcctgccgtctcccttcctttgaagaggatatggggattctgctctcttttcttatttacatgtaaataatacattgttctaagtctttttcattaaaaatttaaaacttttcccat

SEQ ID NO: 7184 - DNA, 1370 bp, Homo sapiens; identical to SEQ ID NO: 1949

SEQ ID NO: 7185 - DNA, 1400 bp, Homo sapiens
tgtttatgcaactctatcttaagaactgcccagcctcagctgaaaacccgaatctgagaaggaattgcgtcatgtaagggaagctggaattaagggagctgagccagtcatggttgtggcgtgtgagtcaggagacctaggtttcagcccctctctactgtcagcgagctgtgcaacgtgggcaagtcattgtcctctgagctgcagtttcctcatctgtcacatcgctacagacaagacctccctggaacccttctgattgtcttagacactgtggttgcaaaacccacggaaagcctcatttgtgtggaaagtcagaggaaaaatgatccagtggacacttggggattatctgtcattcaagatccttccttcaaccccaaggccagctcccatctcatttccagaaaggctcatacctggcttgcagggaagcatctgtcttgtcattccaggtgccagaatcctctcagagtcattgaagggtgttcacccatcccacccaaggcttggcacactgccagtgtcttagcagggtcttgtgagggctgggggcatccaggcactcagaaggcaaaggaaccaccctacccatttggcctctggagggggcagaagaaagaaagaaacctcatcctatattttacaaagcatgtgaattctggcattagctctcataggagacccatgtgcttccttgctcagtgcaaaactgatgattctacttgctgtagatgaatggttaacacgagctagttaaacagtgccattgttttgccagtgaagcctccaaccctaagccactgggacggtggccagagatgccagcagcctctgtcgcccttagtcatataaccaaaatccagaccttatccacaacccggggcttggaaaggaaggtattttggaatcacaccctccggttatgttgctccagtaaaatcttgcctggaaagaggcagtcttcttagcatggtgagctgagttcatggcttttttttgtagccagtcctgtccctggccatccatgtgatggttttggatggagttaaacttgatgccagtgggcagtgcatgtggaaagtatcagagtaagcctctcccctccagagccctgagtttcttggctgcatgaaggttttctttagaatcagaattgtagccagtttctttggccagaaggatgaatacttggatattactgaaagggaggggtggagatgggtgtggcagtgtatggtgtgtgatttttattttcttctttggtcatgggggccaaggagaaaggcatgaatcttccctgtcaggctcttacagccacaggcactgtgtctactgtctggaagacatgtccccgtggctgtggggccgctgcttctgtttaaataaaagtggcctgg

SEQ ID NO: 7186 - DNA, 1322 bp, Homo sapiens; identical to SEQ ID NO: 1951

SEQ ID NO: 7187 - DNA, 1400 bp, Homo sapiens
gggagccaacgtcctcgtaactcagcggaaggggaacttcttcatgggtggttcagatggtggctacaccatctggtgaggaaccaaggccacctctgtgccgggaaagacatcacataccttcagcacttctcacaatgtaactgctttagtcatattaacctgaagttgcagtttagacacatgttgttggggtgtctttctggtgcccaaactttcaggcacttttcaaatttaataaggaaccatgtaatggtagcagtacctccctaaagcattttgaggtaggggaggtatccattcataaaatgaatgtgggtgaagccgccctaaggattttcctttaatttctctggagtaatactgtaccatactggtctttgcttttagtaataaaacatcaaattaggtttggagggaactttgatcttcctaagaattaaagttgccaaattattctgattggtctttaatctcctttaagtctttgatatatattacttgttataaatggaacgcattagttgtctgccttttcctttccatcccttgccccacccatcccatctccaaccctagtcttccatttcctcccgccagtctccattgaatcaatggtgcaggacagaaagccagtcagactaatttccttctttcctcgcacttctccccactcgtcatcttttaactagtgtttcacaaggatcctctgaaaccctctctgtgccccaagtacagatgccattacttctgctttcgtatctcctcaggcaaaagtggagggtgccttatgggccctcctcataggttgtctctgcatacacgaacctaacccaaatttgctttggtgccagaaaaactgagctatgtttgaacaaagatgtcgtgcaaactgtactgtgaacaacagttggtttaaaatatgaggggcaaggaggaggatgcatttcaaaagcttgattgatgtgttcagagctaaattaagaggagttttcagatcaaaaactggttaccattttttgtcagagtgtctgatgcggccactcattcggctccccagaattcctagactgggttaatagggtcatattgtgaatgtctcactacaaaatgacttgagtccagtgaaatctcattagggtttaagaatatttcagggatccttaatgttttgatttttgttttctgaaattggattttattttattttatcttataatttcagttcatctaaattgtgtgttctgtacatgtgatgtttgactgtaccattgactgttatggaagttcagcgttgtatgtctctctctacactgtggtgcacttaacttgtggaatttttatactaaaaatgtagaataaagactattttgaagatttgaataaagtgatgaagttgc

SEQ ID NO: 7188 - DNA, 600 bp, Homo sapiens
ttacaaggtgatgtaatcagcttgttgtagtgatgctggccaaatggtgctcagcaggtgagaacaaaaaaaccccagatttcagtgaactaatacacagcttgagcgtttccatgtgctaatgttgcacacttactaaaaaactttggaaatggaaaataatgtattagtgcaacagttgatgtgcttctttgggcaaagatatagttttgttccacaatttgtacttaaaagcgaaagaacattgaaaacatagacttactggctgtagcaatgctggcctgttaactgataactagaacttaggttcacgtttatgtaaagtgtgtaaaacctagtagagcttgcatagtcggcactcagtaaatgtttggttccttttgccccttggtaagtttattttaccatcctcccacctgccattctgactttattaaatcaacatgtggaccagagtgttaatgagatgttattgcagaagagattgagaaaattggtatatcatgcagataacatacaaaatctttttgtaacgtaaaaaatgcagttttattattgcttgtgcctcaactgtttaagtgaatattaaagggcttggag

SEQ ID NO: 7189 - DNA, 1400 bp, Homo sapiens
tgtcctcttgatgtcaccctccgctcctgggacacgtgctctctctgtctctgggtcttctggctgtgcacgtttgtgtgtccttgtaaatatgttttaggaagaaagcaaaagggactgaactagcctctggtaggattgcaggggtccagccttgcctgtttccgaagcccccacactgcctttcgccccactgagactggtcccctcaaaaggtagacaaaacagcagctccctgtggagctgaagggcggcctcaaagtggctttttgttagacaaggttaaggtttcctcatgagcaaggttgcagatcggtccttcctcagctccttgatttgtgaccttgaccaaggggcctgccacccagcccctccagtgccctctcctcgatgcctcgctccttcctgcccccactcccctggcttaggcaggtaggggaattagggccatgctggaagaagcttaaccatgtgttcaaagaacggtttcttgcttgcttggtcctggaactccccttggctgccccaggcctccttggcccatgggtgctgggggaggtggatgtcagatctggtaggttgcagcagagaaaataaatgtgccttgagagaccactcagagagggtccaagggtgatggagaaggaagcatggcctgggagcttggaagggaggggtggtgggtggcggcatcttgactgccccctgttgtcccacacgtggggggtggtcaccccccttcactccagcccgcctgccttcagccttccatgagcttcacctgcttccaacttcactttggagggggtggggtccgttggcatcaacacggggaccctctgcttcaccaaagcccgagccctcagcccctggggagaacaaatggctgagctttgatacctggggtcgtcgagaggctgcgggctggcggcagtcccaggggagagacaccacagaaggagacccagacatcccgaggaagttcccagcagagcaaactgctttccagcctgaagcctgcttaaactgtgtgatgtgcaataactgagcttagagttaggaattgtgttcaagtgcttggatttccgtctgtagatttaactgctgaaattgtatctctcagtaattttagatgtcttttaaaaaattgaaaaacaaagtgttagactgtgtgcgtgtgcgttgatgggcactcaagagtcccgtgagtcatccagccctgcctttcccctgcgcccccatcctctcacgtcccgccctgcctccacttggggaccctgcctcgtgtcgtctttatctgcctattactcagcctaaggaaacaagtacactccacacatgcataaaggaaatcaaatgttatttttaagaaaatggaaaataaaaactttataaacacc

SEQ ID NO: 7190 - DNA, 1400 bp, Homo sapiens
gctatatttgtatatactgtaccataaatagtatgtctgtacctggaaggtatttttttgagaactgatttatatgaaatatacttgagggtaatgtagcttgtcctttttagtttcaaattcttattcataggcagatactttgaagacaccttaactctttgttgtgtgtattttcccttgcatcagataactatacatggagaaatccattttgttttttggtttatcttctgttcttcctaccttgtgcttgtctgactagtatcacccctgagccagtatacagtaccatcctctccccctaccaagtttggcagaggtgtttatactgcattctcagatctatgaatatttttgtcatcctgcctgagaaagtacatcttccaggcaaaagtagggtatcttgaactcctttcttctgagttgagcagactcactggcttaagcatcccataagcctattatttagtgtgaatttgggacttttatttgtatgttgtcttaacttactgagcctgtgacttgtatttagctgtagtcaagcctcaccagccatatctcatctctgagaggaagactggatagtgagtttggttttggttttggttttaaacccttttaccttttcagtctggcagctcctactgctgctttcctaagttactcaaagcactgcttcttggtccttgttttcttttgccttgtactatcttgtataatgtttactaaaagagcctccccataaatcagagaggcaaaaaggtagcatataaaaagaagaaccaaaagaagagaaaacctgacttctagatgactgtggtgtcatctaaaaggcagaggtgcctgaccctcaggaatgtgtatgatgcaacagagctgaagaatgggttcccttcacctactgctggccattgtcccttctgttggagattcctttctttatggttgctgttcataaccccttcaacacccccccttgctggtcctgccggtcacagttgaggattttggctgtgatgggctcatactcataatggcctgttgagttgtttttagtgacaggttttgtttgctgcacacctcattggcttgcttaccaacaccagctagaagtggtccctctttcatatccaaaccagaacacatttgggtattcctgagactttatagagcgtgtattgtttgttatacgaacctaacctaccttgttgttttctcatattaagaaatttaaatctactttgttttagtgaagctattttggtaatgtataagcaattttggttctgtttagggagaattcagggtttccatgacttgatttgagctttgcatatttcaaataagtaacacagccattttaatttagctaaataaaaaaatttcttttttctctc

SEQ ID NO: 7191 - DNA, 600 bp, Homo sapiens
gggtcctcaagattcgagatggcagcaaggaacccaggtcgagatgggacattgtgcggctcatcccacctcagacgtacctgcaagctgagggtgaagacggccagaacttggagaagagacggaatcttctgaactgcctcatcgtccgaatcctcaaggcccatggagatgaggggctgcacattgaccagcttgtctgtctggtgctggaggcttggcagaagggcccgtgtcctcccaggggtttggtcagcagccttggtaaggggtctgcatgcagcagcactgacgtcctctcctgcatcctacacctcctgggcaagggcacgctgagacgccatgacgaccggccccaggtgctgtcctatgcagtccctgtgactgtcatggagcctcacactgagtccctgaacccaggctcctcaggccccaacccacccctcaccttccataccctacagattcgctcccggggtgtgccctatgcctcctgcactgccacccagagcttctctaccttccggtagccctagacttggggtcaggggaaggtagagctggagcttttacagaaattaaacccaagagtttgattat

SEQ ID NO: 7192 - DNA, 600 bp, Homo sapiens
ttttaaggacttgagtgactttgaggccttaccttatgaagcagtgagcagcagtgataagccagctgttactaagccatgtggctccgcgtcggtagacattgttctgtggaaggctagcttgccagggccattctccttcctcagcatccagaccctctgctattctgttgccagagggagttattgtgcattgtccacaacctgctcaaaatacagttctgcttatgcacgtatattggtatagtagaacctaccacagagaatctatcccataaaaggaactcaagaaatatttgtagaaatgaagtccatattgggccaggtgcggtggctcccgcctgtgtaatgccagcattttgggaggccaaggtgggcagatcacaaggttaggagatcgagaccatcctggtcaacatggtgaaagccagtctctactaaaaatacaaaaattagctgggtgtggtggtgtgtgcttgtaatcccagctactcaggaggctgaggcaagagaatcacttgaaccagggagtcagaggttgcagtgagccgagattacaccactgcactccagcctggcaacagagcaagactctgtctc

SEQ ID NO: 7193 - DNA, 1400 bp, Homo sapiens
gcatgagtactgtatctggacagatggactgaatgcgctactcgggaaggacatgatgagcgacctgacgcggaatgacctggacaccctgctcagcatggaaatcaagctccgcctcctggacctggaaaacatccagatccctgacgcacctccgccgattcccaaggagcccagcaactatgacttcgtctatgactgtaactgaagtggccgggcccagacatgccccttccaaaactggaacacctagctaacaggagagaggaatgaaaacacacccacgccttggaaccgtcctttggtaaagggaagctgtgggtccacattcccttcagcatcacctctagccctggcaactttcagcccctagctggcatcttgctcaccgccctgattctgttcctcggctccactgcttcaggtcacttcccatggctgcagtccactggtgggacaagagcaaagcccactgccagtaagaaggccaaagggcccttccatcctagccctctgcaggcatgcccttccttcccttgggcaggaaagccagcagccccagactgcccaaaaacttgcccaccagaccaagggcagtgccccaaggcccctgtctggaggaaatggcctagctatttgatgagaagaccaaaccccacatcctcctttcccctctctctagaatcatctcgcaccaccagttacacttgaattaagatctgcgctcaaatctcctcccacctctctccctgcttttgccttgctctgttcctctttggtcccaagagcagcagccgcagcctcctcgtgatcctccctagcataaatttcccaaacagtccacaggtcccatgcccactttgcgtctgcactgtgatcgtgacaaatcttccctcctcaccagctagtctggggtttcctctccctgccccaggccagaactgccttcttcatttccacccacgctcccagcctcttagctgaaagcacaaatggtgaaatcagtagtctcgctccatctctaatagactaaacctaaatgcctctaggacggactgttgctatccaagcgtttggtgttaccttctcctgggaggtcctgctgcaactcaagttccacaggatggtcaagctgtcagacatccaagtttacatcattgtaattattactggtatttacaatttgcaagagttttgggttagtttttttttttttttttttgctttgtttttgtacaaaagagtctaacattttttgccaaacagatatatatttaatgaaaagaagagatacataaatgtgtgaatttccagttttttttttaattattttaatcccaaacatcttcctgaaaataacattcccttaaacatgctgtggaataaaatggattgtgatg

SEQ ID NO: 7194 - DNA, 1400 bp, Homo sapiens
gatttgataaaagaatgtgatgtatatgtagctgatgacccactggggaacaccagtgttccagttcacttaccacatctgtgacagtgtgtttagattggaataaatgtgatgcattacttcttatgtttttatcagtgacatggttgactgtgccctaattctcttgagttgcagttaagcaatgaaggttatttcctaatagggaagcaaaaggtgattgtcaattgatagtttaatgtttgaccacattagtgtctttatatgaaatagtagaggggaagaaattatagaaaacaaatgtgaaaaaaatacaccagtgggtatctgttctactaaaaccagaagattgttatgagtacttaaacctcactgtgaaataatgatatattttgcaattaatccctccccaactgagtgtcttactgtgttattaaatcttatcttttagttaatagttgcagtatttcttttaaatgtttttgttttaaacttaggggtaggatcctttatttgttcagttgtttccaactatttgggatactttcattccctgctatttatgaagtacatgtttatcactaagtgtagtggtttggtttacattaataattttatgtgtggtctaaaaatgcagtcactaagagaatgtacactgtggttatggtcacagtggttatggatttattggcagtggagtaccatggaggtcactgcaatggtgctaaggctgacagtggaatcttctgtttagggccttaagcccctgagggtcctggtgactcagggaatccatcacagccccgggtctttcaccccagttcactccttttatgtttggcctagattgacccatgcctgccctcttctcaacagctgagtagggaaccagccatctgaatgagctgatcgttgtttatgttcaaatgagtaaatgtccagaccacttaaaactacagctgcttttctggcagtctcgtctgcggggccaaaacttaataaaccacaggaaatagactgtcattcttagtttgctgccagggcttattttagattgagagcatactggtacatgagagcagtagtgttgtttgctcttattttcaaccagggagctatctggcaccttttgtgctcctggcttttttcaatcatagcactattgcatctcctagctatttcttttgcccagcagggtaatattgagtcccattgcaagtatggacaaggcctctggttctcctcaccacccaccttttcagccatagaacatcactgaaaatgcctaatgcctggatctgtgttctactttagtttcactgggaagtctttcagtgggagatgaataaatgttatacattgttatgtccagttatgtcaataaacccactaatagagat

SEQ ID NO: 7195 - DNA, 1400 bp, Homo sapiens
ctattcctcttgcctaccctgtcctgcagaatgaggtgtccggcccggtacagtgggtgttcatgcagatctgtctgggcgggaaacaccagcagctccggcatcaaggggtccaggagaaaatgcttccccttgagggctcgtaagtcatcgaggctgccagggaagaaccattcattcatcatttcctgaatttctccctgccaggccctatttcaacggtccattcatgcaacaaatgttaccacagctatggagaaatcaacagggtgataagggaatccgggatccgcagttgagggaatgggttgtcaagccagacttatgggtcaggagccccctctactgtttaccagcagtgggagcctgggcaagtgattcaatctcaagccccactggcatctctgtaaaatagtaggtgtgaggattcaatgagccaatatatccaagatacttacgtgccacaatttaataaatgttagctattcctgttgaagcataaccttggagaaaggttactttacaggggggtgaggagtggggaagtgagagctgagctcattcttgatggatgaggagttagtcatgtgaggcgcttaggttaaaactacattcactataactcagtaaagcagtcccgcccactctccgacccatgcagaaataggcctagagagtcacatgtctcagttcagaaatctatcgaagtggcagagctggaattcaaacacaagcagccgttctctgctattccaccctggtgtccaagcaacatggtagggcagaaggaagaggatcttacaaagagtaagggaaagggagaggggcagaggctgcttctcagagccaccaaaggacaaaataagacaggtgtgagcccagtggaggaggcacggggcagagaccagccactgttgctggcacgctggtgcacgtagcactgtggcagatggacctggagaggaagcaggagggacagcacaatggagccaagaaaggacttagcatggccgggcgcggtggttcatgcctgtaatcccagcattttgggaggccaaggtgggcagatcacctgaggtcaggagtttgagaccagcctggccaacatggagaaatcccgtctctactaaaaatacaaaattagccaggcatggtgctgcatgcctgcaatcctgtagggaaaagaaagagagatcagactgttactgtgtctgtgtagaaagggaagacataagaaattccattttgacctgtaccttgaacaattggttggctgagatgctgttaatttgtgactttgccccaaatttgagctcacaaaaacatgtgttgtatggaatcaaggtttaaaggatctagggctgtgcaggacatgccttgttaataaaacgtttacaagc

SEQ ID NO: 7196 - DNA, 600 bp, Homo sapiens
cagatctatttattagcttggtgacccagagcaagttattctgcctgtgactcaatttcctcacctttaaactggggatcatgctagttagcatttcataggattgttgtgaaatttaggtgagtgaatatatgaaacacttcatcagtgcttagcatatgtaggagagttggctgttcacatgattattcagtcctttagttttgtccagaactcatttttgtccctagctttctatatgtagaactagttttatgtcaaacccagggccaagtatgctactgtctccagaacacgaaaatgataggagggaagaggctgggtgtggtggctcacgcctgtaatcccagcactttgggaggccgaggcgggcggatcatgaggtcaggagatcaagaccatcctggctaacatggtgaaaccccatctctactaaaaatacagaaaaaaattagccaggcatggtggtgggtgcctggagtcccagctactcgggaggctgaggcaggagaatggcatgaacctgggaggcagagcttgcagtgagccgagattgcaccactgcactccagcctgggcgacagagcaagactccatctc

SEQ ID NO: 7197 - DNA, 600 bp, Homo sapiens
tcttcagagagagtggttggagccccccccgccccgtatgcttacattattgctcttttagtttgacatggtgtttgggttttgtttttttgaaaggtctgaaaaggtgaagccccctacccaatggcaatatgaaaccttttgtgcttctcttcagccccttccctgtgtccacctttctctcctcttcccaagcctttttcctactacctttacccagtttgtgtgtttgagctctgcattcaggcagctgcaacattccagtgtttgaactgtcactgattcttgcgccctagacaagctaaccaggtttaccatctcactcccagtaatacccagctcctatctaaagccccattctgcatgagaatttggtgtttggaatgttttctgactcttggggcgggattcctcgccttatcatcctcactgtggagtaatgagggggaggagaatctttatcagaaactggttttgtgtagtaaactttcttttgtggttttttgttttgttttctgggttttgttttttgtttttgtctgtgcaagacctgcagctgctgaaaatcagctttgcctttaattaaaccatgttctctcc

SEQ ID NO: 7198 - DNA, 1400 bp, Homo sapiens
aggggcccttgcttccctgttccaggggttccagaataggcttcctgccttccccatcattccctctgcctaggccctggtgaaaccacaggtatgcaattatgctaggggctggggctctggtgtagaccatggaccaaaagaacttcttagagtctgaagagtgggcctcgggtgccctctcacatctcctgttggatgctgggggagaagcaataaacctcagccctctggcctccactttcctctcaatttgggctgcaaatatgaagcctgaattttatgaaattagctttctgattcttatttattaatagattaagttctgaggcagctccgcaggactgtgtgtgaatgtgtatgtatacttacatatgtgtgtgcatgtgccatggggcggggggtatcactatactgtcctcaaatataagccaagggtaatttcagcggatgcacacacaaccctgcctcccacagttcctcccctaatctggtttctgtgttgagcctgggatggaggagccctaggccagcctgggataagagtcccacagtctagggagatctgagggcatccgacaaggcccatctccttccctcctcaagaagcagaggcctcctctggagtgagaggctccacccactacagcacaggcgggaatagcacagctgccctcccatgctccctacctgtcccctcacagggaggggagcaggggagggaaagaaaccaggcatctggtcaaaccagcagatcaaaaagcacaaagagctggggcagaggcaggaagcaggggccctcctggcagctcctctgagtggggagaggttgggcagtgagtgagggacccctaatgcagggactagaagcctcagtttccccattttacccttccacacaatagcctctgtaggttaggctgccccatcccaccctactctgtgtggctgctttctttggtgccctcccctcaccccactgtagctgtgacgtgttgtagtttttagatgtttgtaaaatgtttaaaaaaatgttaaaaggaaaaaagtgaaaataacaaaaaagaaaatcaaaattcaccttcgtcatgctgcgtccagtgccccaaccctgtggtcactctccccattttgtaacactgtaccaggtggtgactgtttaactctttggtgtctgtgctcaaaagactgccttctccagtgcccagtgtatgagtgtgtgccctgtgcccttgtccctcactccccacatgctggacgtagccctcttcctcgcacccctgggagggacccatccatctcccttgctctcctggggaaccctaaacccaactctgttgatgtgaaaaatgcagtgaaaaatattgacgaaaaataaaacggaaacaaatcctcaaaat

SEQ ID NO: 7199 - DNA, 1400 bp, Homo sapiens
tggctggttgccttaatatgtcccaggacccctgacagggctgcctggcctctccctcgtgctcctcaagagcccagtccatacactgtggatgtcattgctgtcgggttaggaagtcttgtcctagaacgccctggctggtatgaccacagttcatggcggctcttctcgcttgggtcatggtcatcttccagcacctgctgtgctgggaaggccgaggatgggggcccagcactgtccaggcctgctggggcctggctgggagtcctgtgggcagcatggaacatgcagctgggcttcctgtgaccaggcaccctctggcactgttgcttgccctgtgccctggaccttttcctgcccttctccttcctctgctcccttggggctaccccttggcccctcctggtctgtgcaaactccctcagggagcccccctgccctgtagctctcgcttaacttcctaggggctgctgagcccacccagaggttgttggagttcagcggggcagcttgtctcccttgtcagcaggggcgtaagggctgggtttggccatacaaggttggctacgccctcaatccctgaccgttccaggcactgagctgggcacccacggaaggacatgctgtccagactgtgatgactgccagcacagggcatctcgggcttggctggtctgcgaggccttgcccctgtggaactctgggttcctgttttctcagtcttttttgcggctttgctgtggttggcagctgccgtactccaggcttgtgtcggccactcagatgagggctgtggtgcgagccagtgcaggagagctgcgcttgggattgtgccctctcctgtgtctgtcctccggacctacccaggtctccaccatcaggaccctgtctttgggtttagaagaccaagtatggggaaaaccaggcaccagcctctgcagcaatgggtccctctagcctgtggacaccagctgggggatccagggtcaggccccctcctctccccagtttccctctgctgtgggttctgggctgtcatgtctccaccacttaaggatgtctttacactgacttcaggatagatgttgggatgcctgggcatggccacatgttacatgtacagaactttgtctacagcacaaattaagttatataaacacagtgactggtatttaatgctgatctactataaggtattctatatttatatgacttcagagacgcgtatgtaataaaggacgccctccctccagtgtccacatccagttcaccccagagggtcgggcaggttgacatatttatttttgtctattctgtaggcttccatgtccagaatcctgcttaaggttttagggtaccttcagtactttttgcaataaaagtatttcctatccatttgg

SEQ ID NO: 7200 - DNA, 1400 bp, Homo sapiens
cgattgtcccgcctcagcctcccaaggctgggattacaggtatgcaccaccacgcccggctaattttgtatttttcatagagactgggtttcaccatgtagaccaggctggtctcgaattcctgacctcaagtgatccacctacctcggcctcccaaagtgtggggattacgggtgtgagccaccacgcctggctaattttttgtatttttggtagacggggtttcaccatgtgggccaggctggtcttgaactcccaacctcaagtgatccacccaccttgttctcccaaagtgctgagattacaggtgtgagccaccatgcccagcctgttcctaaccctttcaactggggggtctcaagtgggtgaggactccatggccacggcagcagaactgtctcttctgaaaaccagactccggggcccctgggtcagcacctctaggtcattccacagacttacacagtttaaagaaagagccagcgaacatggggtgatcctggggtgccactgggatcccaagccaggcccggaggtctgcctgtttcgtccccagaaacttgagctggcatcctccgctggtttgcactgggcacggggactggagagccaccaggccactgagcacagcatgctatcacttctcaggaagttgtgagggtgaggagaatagccgggcccactctgcagaggggaggaacaggcacaggctagaggcacgggctgatagagtgagtcctctccctcattcattcattcattcattcattcatccatcagacacctgctgggcatctgctgtgtgcgagacactgtgctgggtgccccagacacaagacagaaactcgggtcgctctgtgtgcctccacactggccttccctgctgcgtggacgcaggctctgtctcctaggctttaagccccatgcatcaggtggaagacaatttccagcggcctctgcccgcttgtttttcctcctctccttttcctgccgccttggtcttttttgtcttttgtgcagggccgtctctcgcagcgcccgtctgtgctccgcagcgtctaggaaaggattagtgtgagcagagcatgcaggctttggtgaacagagccgagcttggtttcaacatctaattcaatttgttctgccgagattgaaatatgaaatggttgccagtcaaacgttcaaaggacggggaagggagagtgagcgcatgctgaaatttaaattttaatgaaaatgactttaaccctttggtacaccttgcaaaatgtaacccatcctcccatcctgtgaaagcggcctctcgggttagagcttttccacccacttctcttccactgagcttcactaataatatgtaatcatttttttcagccgtcttaataataaaagattaatag

SEQ ID NO: 7201 - DNA, 1400 bp, Homo sapiens
acccacctgatcctcaaggacatggtgaaggtgaaggggcaggtcagcgagatggcggtgctgctcatcgaccccgagcctcagattgctgccctggccaagaacttcttcaatgagctctcccacaagggcaacgcaatctataatctccttccagatatcatcagccgcctgtcagaccccgagctgggggtggaggaagagcctttccacaccatcatgaaacagctcctctcctacatcaccaaggacaagcagacagagagcctggtggaaaagctgtgtcagcggttccgcacatccctaactgagcggcagcagcgagacctggcctactgtgtgtcacagctgcccctcacagagcgaggcctccgtaagatgcttgacaattttgactgttttggagacaaactgtcagatgagtccatcttcagtgcttttttgtcagttgtaggcaagctgcgacgtggggccaagcctgagggcaaggctataatagatgaatttgagcagaagcttcgggcctgtcataccagaggtttggatggaatcaaggagcttgagattggccaagcaggtagccagagagcgccatcagccaagaaaccatccactggttctaggtaccagcctctggcttctacagcctcagacaatgactttgtcacaccagagccccgccgtactacccgtcggcatccaaacacccagcagcgagcttccaaaaagaaacccaaagttgtcttctcaagtgatgagtccagtgaggaagatctttcagcagagatgacagaagacgagacacccaagaaaacaactcccattctcagagcatcggctcgcaggcacagatcctaggaagtctgttcctgtcctccctgtgcagggtatcctgtagggtgacctggaattcgaattctgtttcccttgtaaaatatttgtctgtctcttttttttaaaaaaaaaaaaggccgggcactgtggctcacgcctgtaatcccagcactttgcgataccaaggcgggtggataacctgaggtagggagttcgagaccagcctgaccaacatggagaaaccccatctctactaaaaataaaaaattagccgggcgtattggcgtgcgcctgtaatcccagctactcaagaggctgaggcaggagaatcgcctgaacccagaggcggaggttgtagtgagccgaaatcacaccattgcactccagcttgggcaacaatagcgaacctccatctcaaattaaaaaaaaaatgcctacacgctctttaaaatgcaaggctttctcttaaattagcctaactgaactgcgttgagctgcttcaactttggaatatatgtttgccaatctccttgttttctaatgaataaatgtttttatatactttt

SEQ ID NO: 7202 - DNA, 1400 bp, Homo sapiens
gaggcattgctgagactgcctggcaacggctgatgccccaggtaggaccttttccatttcaaagtggtgttctaagtctgcgtccaacactgtgtaggaaaaaggttggtgcaaaaatattcctggtcatccacccattaaaatagttagatgaggctattgccttgatgacagctgtccacactcctcatgaaattaacccgtatgccggggcatttccaaatgtctgactcgtgaaattaacccatacgcaggggcctttccaaatgtctgaaaaggcagtggtgtcttttggggaaaatgttatgcatggaagcctgaccttttgcttagttgacagcaatcccttctgtattgccaatcaaggttcatttgagatgcagaggaatgagcttgagccttcctccttttccttccggttttattcttcctcttgggaacatccctccactccgcactgcttcctgcagctttgtagagctggatttggaacttcgggatttggtttctgagtctgtggaggcaccgacttctcctgtaagaaaatgaatgttgtggaaattctttggctacttaactaaaactcgtgactgtataagtttggctacaaataagtaagaaattaatcatctgctctgtttctgctaatttctggtgtcacttcagtaattctggtagcagccgttgaatctgtcagtctcttaggtaacttcctgtaaacgatttggaaataggatgttttcaacgttcttttgtcttttgctgaagtcaggatagattcaagacataatctcttgtaagatctaaatagagcaaatgtaaacaaaagtgcatttttgtattcttgttaattttagatgctttcctagcttacaaaaagttctatttttgggttaaaaatcaatcaactttctgatatttccccttctgcaatgttattgttcataagaaaacacgagctgaaaatggaaatctgcagttgtttcagttgtcttgaatttctttcagtggccacatcatttccacgttttccacatccgggaggaagcctggactgtgcagccttcgggcacccggcacagacactgtgctggcaggagcttcagacacgccaagtggatggatttggattgaacgcatatgaaacaggagacgggttctcatgtgagatcaaagctcctccaaagcctgttcaagctctaagcgattctcaaatgttaccatttattaaaggtaaactacacctgttgaaggccaagttcagggcagctgttgtgatctgtgtagttaatgtatttattaatgcttgacttttaaaatcctgggcataaatagtgcagagcctcgtatgtttgtcagttcatgccgagatgaaataaatcacgcagaaagtgccagtc

SEQ ID NO: 7203 - DNA, 1400 bp, Homo sapiens
gtgctggagtatctgtctgccttcgatgaagaaaccacggaagtttgttctctggacactccttctagacctcttgctctccctctggtagaagaggaggaagcagtgtctgaaccagagcctgaggggttgccagaggcctgtgatgacttggagttagcagatgacaatcttaaagaggggaccatttgcactgagtccagccagcaggaacccatcaccaagtcaggcttcacacgcctcagcagctctccttgttactacttttaccaagcggaagatggacagcatatgttcctgcaccctgtgaatgtgcgctgcctcgtgcgggagtacggcagcctggagaggagccccgagaagatctcagcaactgtggtggagattgctggctactccatgtctgaggatgttcgacagcgtcacagatatctctctcacttgccactcacctgtgagttcagcatctgtgaactggctttgcaacctcctgtggtctctaaggaaaccctagagatgttctcagatgacattgagaagaggaaacgtcagcgccaaaagaaggctcgggaggaacgccgccgagagcgcaggattgagatagaggagaacaagaaacagggcaagtacccagaagtccacattcccctcgagaatctacagcagtttcctgccttcaattcttatacctgctcctctgattctgctttgggtcccaccagcaccgagggccatggggccctctccatttctcctctcagcagaagtccaggttcccatgcagactttctgctgacccctctgtcacccactgccagtcagggcagtccctcattctgcgttgggagtctggaagaagactctcccttcccttcctttgcccagatgctgagggttggaaaagcaaaagcagatgtgtggcccaaaactgctccaaagaaagatgagaacagcttagttcctcctgcccctgtggacagcgacggggagagtgataattcagaccgtgttcctgtgcccagttttcaaaattccttcagccaagctattgaagcagccttcatgaaactggacacaccagctacttcagatcccctctctgaagagaaaggaggaaagaaaagaaaaaaacagaaacagaagctcctgttcagcacctcagtcgtccacaccaagtgacactactggcccaggctaccttctccatctggtttttgtttttgtttttttttcccccatgcttttgtttggctgctgtaatttttaagtatttgagtttgaacagattagctctggggggagggggtttccacaatgtgagggggaaccaagaaaattttaaatacagtgtattttccagcttcctgtctttacaccaaaataaagtattgacacaagag

SEQ ID NO: 7204 - DNA, 1400 bp, Homo sapiens
ggagattctttcctgaacactgactgcacttaccagtctgattttatcgtcaaacaccaagccaggctagcatgctcatggcaatctgtttggggctgttttgttgtggcactagccaaacataaaggggcttaagtcagcctgcatacagaggatcggggagagaaggggcctgtgttctcagcctcctgagtacttaccagagtttaatttttttaaaaaaaatctgcactaaaatccccaaactgacaggtaaatgtagccctcagagctcagcccaaggcagaatctaaatcacactattttcgagatcatgtataaaaagaaaaaaaagaagtcatgctgtgtggccaattataatttttttcaaagactttgtcacaaaactgtctatattagacattttggagggaccaggaaatgtaagacaccaaatcctccatctcttcagtgtgcctgatgtcacctcatgatttgctgttacttttttaactcctgcgccaaggacagtgggttctgtgtccacctttgtgctttgcgaggccgagcccaggcatctgctcgcctgccacggctgaccagagaaggtgcttcaggagctctgccttagacgacgtgttacagtatgaacacacagcagaggcaccctcgtatgttttgaaagttgccttctgaaagggcacagttttaaggaaaagaaaaagaatgtaaaactatactgacccgttttcagttttaaagggtcgtgagaaactggctggtccaatgggatttacagcaacattttccattgctgaagtgaggtagcagctctcttctgtcagctgaatgttaaggatggggaaaaagaatgcctttaagtttgctcttaatcgtatggaagcttgagctatgtgttggaagtgccctggttaatccatacacaaagacggtacataatcctacaggtttaaatgtacataaaaatatagtttggaattctttgctctactgtttacattgcagattgctataatttcaaggagtgagattataaataaaatgatgcactttaggatgtttcctatttttgaaatctgaacatgaatcattcacatgaccaaaaattgtgtttttttaaaaatacatgtctagtctgtcctttaatagctctcttaaataagctatgatattaatcagatcattaccagttagcttttaaagcacatttgtttaagactatgtttttggaaaaatacgctacagaatttttttttaagctacaaataaatgagatgctactaattgttttggaatctgttgtttctgccaaaggtaaattaactaaagatttattcaggaatccccatttgaatttgtatgattcaataaaagaaaacaccaagtaagttatataaaat

SEQ ID NO: 7205 - DNA, 600 bp, Homo sapiens
ggaaaatgggaagtccctctgcctaaagtacgtgcccagggagaaacagaagtattaaaagttattcgaacaggaaagagaaagaagaaggcatggaagagaatggttactaaagtgtgctttgttggagatggctttacaagaaaaccacctaaatatgaaagattcatcaggccaatgggcttgcgtttcaagaaagcccatgtaacacatcctgaactgaaagccaccttttgcctaccaatacttggtgtaaagaagaatccctcatccccactgtatacaactttgggtgttattaccaaaggtactgtcattgaagtaaatgtgagcgaattgggccttgtgacacaaggaggcaaagttatttggggaaaatatgcccaggttaccaacaatcctgaaaatgatggatgtataaatgcagtcttactggtttgacagcaatttcatatataattattgaggactacacaccaattgaagaaactgccattactgtgatgtttctgaatactaccaaacagccatacatgtctgcaatgaagagatttattaaattgtaaacattaaagtggaaaaaaaaaaaaaaaaaaaaaa

SEQ ID NO: 7206 - DNA, 1400 bp, Homo sapiens
ctaaaagtacaatgtttagactgctatggtaatacatattttaaattctaaaagcatacacaatgtgtaactgaatggtttgtgaaaaatatattgatatatatactagttgctatgaaaatatcatggaataatagggattttagggtggatactttattttcttttatgtttctatatgttgcgttgtgatgacattatcttttaaattaaaaagagatttggctagttgtgtgtgtaatgttactttacagtccgactctcctgatgtacctcttttcatgatctttttctttccttcccaagaaactgaggaatgtttaatatgaaaacatacatcggatatgtgaaaagcacaacaaaattcttaatgtacacagtaaaaaagtaaatatataaatgtagatggcatttaggaccacagcttgctggatttgtgttagctatgggaataacttgattttgtataagctatttagagtgaggctggaggtggcagcttcacagaactggagaaccaggccaagtcccctccccaacctaattaggtcattcaggacagctaagtcagtatatttagagcaatactagcatacgtttttcttaattgttatcagcattgaccaagtggtttggaaggaggcatgctttaatatcacaataattttgatttgtaaaccaagaaattaatcctgtgtttatctaacttcataatagcaattattgcccgaagctatagtggcatatttacaaaagttcttattactgggcggactgataacatttaaaaaataattgtgtttgaccccaaatgactttatacccaattctacataaaaatatagaagatctatctttttttgttaccttcagatgttcactaaataactcagtttttaagcagaagttttcagggcattaaatatatgttgtgtatgaagtatctcaaactggaacataaatttagtgatcaaactgccattcacagtgtaaggcagcacttaaatttcgaacctaaagtttagatgcattgtataaaaaaacctaaaagcagtatctgttatttagctgtaaaccaagttggaagctattcggataatttcttaaatattgatgaactttggagtactgtttcttccttcaaactgaatgtaattaattcatgaataaatgcaccttatatgtttaaacaatctttgtatacttttgggatttttggtgcttatatgctaaatcacattcagcatgtgtattttgacatttaaaatacttccctcaattctgtaaattaaaagaatagttattttacagttccagggattgtgaaataaatgttgcagttttttaaaataatgaaaataaatactcttggttttgctttgtgaaaaaaaaaaaaaaaa

SEQ ID NO: 7207 - DNA, 1400 bp, Homo sapiens
  misc_feature (709)..(709): n is a, c, g, or t
ctggatcgaaacctgccagacatgatgcagctatggagtgaaatatttaacaacccgtgctttgaagaagaggagcacttcaaggtgctggtgaagatgaccgcccaggagctcgccaatggaattcctgactctgggcacctgtacgcatccatcagggcaggccggaccctcacgcccgcaggggacctgcaggagaccttcagcgggatggatcaggtgcggctgatgaagaggattgcagaaatgacagatatcaaacccatcctgaggaagctcccgcgtatcaagaaacacttgttaaatggtgataatatgaggtgttcagtgaatgcgactcctcagcagatgcctcagacagaaaaagcggtcgaagacttccttagaagcatcggtcggagtaaaaaggaacggaggcctgtgcgcccacacacggtcgagaaacctgtgcccagcagctctggtggagatgcccacgttccccatggctcccaggtcattaggaagctggtcatggaacccaccttcaagccctggcagatgaagactcacttcctgatgcccttcccggtgaattacgtgggtgaatgcatccgaactgtcccctacacggacccagatcatgccagtcttaaaatccttgcacgtttgatgactgccaaattcttgcatacagaaattcgagaaaaaggcggtgcttatggtggangcgcaaaactcagccacaatgggattttcaccctttactcttacagggacccaaatacaatagagacgctccagtcttttgggaaggctgtcgactgggctaagtctggaaaattcacacagcaagacatcgacgaagccaaactttctgtcttctcaaccgtagatgctcctgtcgctccttcagacaaaggaatggaccacttcttgtacggcctctcggatgagatgaagcaggcccacagagagcagctctttgctgtcagccacgacaagctcctggccgtgagcgataggtacctcggcactgggaagagcacacacggcctggccatcctcggacccgagaacccgaaaattgccaaggacccatcctggatcatccgatgagcagccgtggcgctcgactgcacaggagcccgagacaatacacctccaagctgaatatgaaaagtcagaaatgctactgctttttccaagaatattatgtcattgagtgtcgccaaagcccttgactggcgagtcaaaaactcagatctatcttaagagtgaccaggaagaggttcattgaaataatcatgcatgaagcgccaaagatgcaccatgtagaattttcactttgtactggcaggctcgttttacctgattctagaatatttaagaatctaaaaataaagggcaactctgactta

SEQ ID NO: 7208 - DNA, 1400 bp, Homo sapiens
ttagtagacctccccctgtggatgttagagatgtggttgggcggcctatagatccaagagaaggtcctggacggcctccactagatggtagggatcattttggaagacctcctgtagatataagagagaatcttgtgaggccaggtatagatcatcttggtcgaagagaccactttggctttaatccagagaagccctgggggcatagaggagattttgatgagagagagcatcgggttctaccggtctatggtggtccaaaaggcttacatgaagaaagaggtagatttcggtctggaaactatcgatttgatcctagaagtggtccttggaaccgaggatttggacaagaagttcacagagattttgatgaccgcagaagaccctgggagaggcaaagggatagggatgacagagattttgatttctgcagagaaatgaatggaaatcgtcttggacgagacagaattcaaaacacttgggttccccctcctcatgctcgggtttttgattattttgaaggggccacttctcaacgaaaaggtgataatgtgcctcaggttaatggtgaaaatacagagagacatgctcagccaccacctataccagtacagaatgatcctgaactttatgaaaaactgacatcttcaaatgaaataaacaaggagaagagtgacacagttgctgatatagaaagtgaaccagtggtagaaagcacagaaactgaggggacataatcatcactcagtaggtaaaagataccttttgtaaagttgtcatctctctgtaatagataatggctgactggaccatagttgttcacttttgtctgccagaattaagttaatctgatgttcatgttcacctttctcttaaaataattgtacaactgacttgtatagacattgttcttaatatgaacatggtaggtaaactttttttttatttttttctgataaaatacaaatgttggccccagattcttttaacgtcaaggaaatgaataacagcttgtcagagacttcctatggaagaaagaattttttagatactatcattaggttggatatggtaatagatatatttcagaatagcaagtggtggtatatcttatccatatctttaggctgctgcagaattttaaggttatagataaagctgtgatattttatgcaaagactggctctaggtatttgaggagcacaatacagagattttaaaaagtgattttgtaaaatctacactatggtctctgtttctccaaagtaagtgtttgtgatttgttcctcatactgcagtgagtaaaaaagaaacaagaaaacaacaacataaatattaaagtacgtttcaatgttgggtgaattttgtttttagatgccaataaaacttatttgtttgat

SEQ ID NO: 7209 - DNA, 600 bp, Homo sapiens
tcctttcatcctgtctgtgttatgtgggtggagatggttttcattctttcattactgttttgttttatcctttgtatctgaaatacctttaatttatttaatatctgttgttcagagctctgccatttcttgagtacctgttagttagtattatttatgtgtatcgggagtgtgtttagtctgttttatttgcagtaaaccgatctccaaagatttccttttggaaacgctttttcccctccttaatttttatattccttactgttttactaaatattaagtgttctttgacaattttggtgctcatgtgttttggggacaaaagtgaaatgaatctgtcattataccagaaagttaaattctcagatcaaatgtgccttaataaatttgttttcatttagatttcaaacagtgatagacttgccattttaatacacgtcattggagggctgcgtatttgtaaatagcctgatgctcatttggaaaaataaaccagtgaacaatatttttctattgtacttttcagaaccattttgtctcattattcctgttttagctgaagaattgtattacatttggagagtaaaaaacttaaacacg

SEQ ID NO: 7210 - DNA, 1400 bp, Homo sapiens
tcaagtagctgatgtgcagttgagaaaactagaggactgaaaaaacaaattttaactagcaaatgctgtgaattactcttcctccccttctctgaaatgggtaaaggacaaattgtgtaaaaaaacctatgcactatagaagggaatagtaaccatttcttttgtctctctgtttctgttctgactgagaacctgcagccatttcttgttacatgaaaacaaaatgctacttgttacctctattttttgttactatacaattatgaaatgtaatgtaagacaccaacagaaatgatatacctgtaactgtacctatcaggactatacctcatttacagtcagaaagcttactgggatgtcaggaaatgatacagggttggttctcatttcgtgccgaaatgagacagaaattcagtgacgaaggtgcgttgtaggggtattgatgtgccccaggtagtgccagcagagtagggaaaactgcatttgcataaaaactactcttgacatgattgttcattttacaaaaaaattccattaattaccaagccctcacccagcccatgtgtgataggatttatgtaggaagaaacttgattttcaaataattttttaaatgtatctcttgcctaaaggactatatacatctaataaagtaacactgtgtcatcttctggagttatcaaaaattgtatacaatcaagacaacacaagaattattttatttttgagtgcaaatacaggtactgttggagttgatgggcaccatgctttctcatgaagtagcatttccctaccatcaagccattgttttgtgccattcaggagaggaaaaaaaggaatttatgctgtacatttcagttcagtgtatgaccaaaagcaatatgtttataagaagatgtttgacatactaattattttatatcatttaaaccatactgtagcaacataatatatggagctaatttgtagaattatttttacgatttccaaacaaatgtactgtactgttatataatttattgtgaggaccttctcatggaagccattaggaaaacaaactagaggtaaatatcacattaatctgtattatcaatttctcatagacactgtgctaatgtgaattttaaatgacctgcatcaagtcttctgatctcagataactcagtacagatagcaattagtcagctgatttgattacaatggagtaaccgacaatatatttatttataaagcacatattcataataacgagaagaattcagaaaaccacttaagcaagacccttctgaaataaaaaatgttgctttttaaatagtttgtcctaaggtgtttaaaacatgtcaaccttatgtaaggaaaaatttcctggtccaaataaagttgaagtttaagaaaaattg

SEQ ID NO: 7211 - DNA, 1400 bp, Homo sapiens
aacctttgaactatatgtatgtgtataagggtatacacatacatatatggcatataacaagtgtacacatatacacataacaagtgtagaagtatatattacatacatacactcactctgtctggtataggctaattttgaagaactcccataagtttctgctgcttctcccataactgctgccaccaccatcagaattcataatcaaacctaacctttttgtttggggcaccaaatctgaagacaaaattaatttgcaccagtaaacttcaagctgctttctttcttgaaaactaaacgtttaacgtataatgtctgtttggatactgttccaaattgttgattgcatgtggttaatgttgcattagagcactttgcaattgcataattcattaatgttttgtgagcttgcatttgtgagttattggatgatcagactgaattttgtcaagtatcacattgtacatcttgcctagatgtcgatgactgcaagtaataatacagtttataatgaaactatctacaattcttgttttagcacatctgttatccgtaaaacacctgtaactagcttttttaatttattatttgaattttaggatagcgaatcactaatttttagttgctgaggttggcattttagtgattattaagcacttctgtcagtctttgaaaaaagaacgtattttttgtgctttgaagatctctgaagaatttcttttataatagaatgggcatgtattgtaacagttttatgtcaaatgatctgtgctgtagaaaaacattaacccttgttcaaaaaagaaatggataaacttggcctttctaagtggtaagaatgacctgtcactataatatactgtatgtttacattttatttaaatttaatctcttatgtatagggtgataaccttccccagaaacaacagtgattgcgattgttttctagaaacttctttaaagtgccacatttggcagtacaaatgagtctgagtgtaatagcccagagatttatatatagttgaatgtctaaaatggtaaaatgtgccactgtgtcaagttacagtggcttatgtttttcatagtaattcaaatgaacttcctatttttgatagtaaatgtcatttaatagtatacttgccatttgagcctcactgcaaaattagtgcagaggagaaaacaatttttaatgtaatcttgattttacctcatatactgtacattccaaaaactctaaactttttaaagattatagatacactaccaaacatatcaccttaaaattgtataaggctgaatgaacttcatacaaatgaaaaaaatctcataaaaatacataaactatgtagcaaaagtatctgtaaaatccatggaaaataaaagttgtatcattctttttg

SEQ ID NO: 7212 - DNA, 1400 bp, Homo sapiens
cctccatataccccagctatatctgctttaaggagttttccctggctccaaaggccattggcacccacccaagtattatgggaaacctccagagaggggagggactcagatttatatggctttattgaatccatgcccaaggcaacatcttactagttcctgtgggggtacaggacacctagatttagctaatggggtttggcaatgggaaggcaaacaaatttaataactttatgggtgaggtactttgggccagtagagtatactacagttatgtttacatctgaaagtgtagtagggattaattcccataagttatagagagaattctaattccctgtaattcgcataagtcatagaattctaatcaggaataattgtatgtaaagatacctctgaggtccaacagctctgatcattttgggcttcaagtctctctctgtgactggtgattttgtgggttgaaacttctggcaaaagggggcagcccttgggagctgggggccaggggattgacttggttccctgacaagggtaccaggtccaccccttctgaaaagcagctgttagtttactcttgggctcttttacacattggatatctcttccttgggtagagggttctgacctaaaattccactttaggagtttgtcgtcttggactcaacaactaacaaaatgaaaaggacccagcaagcctcacttgtggaatgaaaatggggcattcaggaaagcacctgtcctggccccacagtatgtcagctgtataggcaatagtagtagctgtctcttagaagggaaataatgtatcacctctttccagaacgaagcaaagttgctggcttagtagagccctcaattcatagaggttactgtaattgggcctggctcactgatgctttcgccaactgaaactactaggatcctgtgtgtgttcaaactcagtgccattaacaaacccaaagtgaagcggtcactcctctcagtggaaagagcacgaggatgttctcagctctggccaatactccatttcataaaccatgttacatttttgttaagccttggctctggatgtggcctagatatttgatattctaattggaaattacagattaaaaagcaccctttctttgtacagtgggggtaaaagtcacagctgcttagtacaaccatctgggttgctcaagtagatgcccataataagagactattttctgataagactgactggaatcaagctgccgacagctttctccatccagattgtgacggttgctacctggatccatcattttactggtatggcaaaaaatcacccatgtgacactgggtgacatggtaaaagtacatggtacttttacagtaccatgtactgtacaaaataaaggtctctttatctg

SEQ ID NO: 7213 - DNA, 600 bp, Homo sapiens
agtgtggtggtgttcacctttaatcccagctacttgggaggctgaggtgggaggataacttgagcacaggagttcaagaccagcgtgggcaatatagcaagactccacccctccacaccccaaaaaagtaagtttaggattagaatatagctaggtccaatgttaaatacattttcctggagtacatttgtcacattcagctttgagccactgtaagcatgttactattaaatggttggttattttatatagcatattctttatcttggatattttatgaataaagtatagttattttaagtgccaattaatttatcagactaaatagaaaatatttgagccattactgaattcacatatgtatgtttttttttactatttaaaatacccaacatgtattatgaaatacctcaaaagtaatttagttacattcttaaacaatgacattgtcgaaagaaagttcttataagctgttttttgcatttttataacttggttatactatattctgtttccaagtaaccttttaactaaaagatttgttgggttttagatctcttttcatttgtcaaccttttcagtaaagccctctgttacatc

SEQ ID NO: 7214 - DNA, 600 bp, Homo sapiens
cgaggttctgcaagcagtggacgccggggacccagccgtggaagcctgtgagaaccggcggaaggtgctctaccagcgtgcacccaggaatatccaccgccatgtgatcctctctgagatcaaggaagccgtcgctgccctgcccccggacgtgaccacgcagtctgtgatggggtttgatcctctgcctccttcggacacaatctactcctacgtcaggccagagaggctaagtcctatcagccatggaaacaccattgctctcttcttccggtcactgttgccaaactataccatggagggggagaggcccgaggaaggagtggctgggggtctgaaccgcaaccagggcctgaacaggctgatgctggctgtgcgcgacatgatggccaacttccacctcaacgacctggaggcgccgcacgaggacgacgctgagggggagggggagtgggactgagcgtccgcagaggtgaccgaaaagccgtatgatgatgttcccgatttctctgttggtcggagtcggccagttgcctgaagtagggaagctgagtgtgtcgctccctggtccactgtttctcctataaatgtaaatgggtc

SEQ ID NO: 7215 - DNA, 1400 bp, Homo sapiens
acggggtcaaatggccccagtccaatcccaaattcctttgtgctgactatgccgagcaagatgagctggattatcaccgaggcctcttggtggaccgtccctctgaaactaagacagaggagcagggaataccacggcccctgcaccccccacccccacccccggtccagccaccacagcacccccgggcagagcagcgggagcaggaacgggcagtgcgggaacagtgggcagaacgggaacgggaaatggagcggcgggagcggactcgatcagagcgtgaatgggatcgggacaaagttcgagaagggccccgttcccgatcaaggtcccgtgaccgccgccgcaaggaacgtgcgaagtctaaagaaaagaagagtgagaagaaagagaaagcccaggaggaaccacctgccaagctgctggatgaccttttccgaaagaccaaggcagctccctgcatctattggctcccactgactgacagccagatcgttcagaaagaggcagagcgggccgaacgggccaaggagcgggagaagcggcgaaaggagcaagaagaagaagagcaaaaggagcgggagaaggaagccgagcgggaacggaaccgacagctggagcgagagaaacgtcgggagcacagtcgggagagggacagggagagagagagagaaagggagcgggacaggggggaccgagatcgggatagggaaagggaccgagaacgaggcagggaaagggatcgcagggacaccaagcgccacagcagaagccggagtcggagcacacctgtgcgggaccggggtgggcgccgctagctgggaaaacactagagctgcaggtaccagccactcggccccagggggttatggccacagagggataggcacagtctccaccaccctggagccaagggtctttcacatcacctatccctacatacataccaaatggaaaagtggccatccttttccccccaaacacacccccttaacctatctcttgggacttagcccgaccctccctctcatttcccattaagtctgagaggcaagagctaggttaggcaaggaggtggttggccagagatggggaacagccaggtgccccagtcctctgatttttcctccatcctgcttaccacctccctgggtacttacagccttctcttgggaacagccggggccaggactgggtcacctatgagctgaatcagcatctcctcctgagtcccagggcccctgcagttcccagtctcttctgtcctgcagcccttgcctctttcccacaggttccactttatatccaccttttccttttgttcaatttttatttttattttttttattattaaatgatgtggtctatggaaaaaaaaataaaaatctgacttagttttt

SEQ ID NO: 7216 - DNA, 600 bp, Homo sapiens
ttttgcctctgtgagttcatctgatgattgagcagtagcatttgccttttgggttttttgtttgttattatagaagagatgacttctgctgattttgctttagaatggttaccttagaagaatttgggtggctcatgttgaatttcacttctgcaatagctttcattttctcataggctttataagagatgggttcagtggtatgagcagaggaagagatcccagatagtagccagttaaccaagactcattcatatagcacgtagtttatgttcctgaggcagcacttttagatcctttgtgagcaagttctatttgttcattgcttgccagagatgaacacagaatgttctgtttcattttacaagaactatcctgagtttctgtggatggaaacattacatgtaatgcagatatagtgaacactggaaagatttattaaagaattatatttgtgtatactttataaattagtccctcattagatttttttttcttaagcataagactgaacttaaatgtgttaattttagtagaatcaggcactgctcgcagaaggaacacagattgtagagattaacataaattgttcttgttcta

SEQ ID NO: 7217 - DNA, 1400 bp, Homo sapiens
gcatattccaattcacttttaaaaaataccatttgaatttgtatttcataaagtgactctggggtgcttactttagtcaattcttaaaattttttatttgttccctaagaaagtaattactgtttctgttgcctggacagttacagtttccaggaaacatcaggaagtaggaaactgtagggccagagagtagtacaacgttaaattgtccgatttatgtgtattacttaaagctataaattgaactagatcttgccgtgctctgtattgagtataatttgtatacttttttataattaatgactaaatgatcactttggaggcagggtggtgggggtgtattagcagccaaataagcatatctgatcaaaaagaaccaggcttagattttttttaagtacattgatgttgatgttccaccagaaacaccttaagtgtatactgttgtgtaatgtctctagaaaggaatcctgtcttaaaactgggttttgctgttttttgaagtttctacctaaaatcatttttggtatatcctgataatctctataatactagaattgtctgcaaaatatagtaagaagaattggagcctaatagctgattcctcccaatttatctgttatgttttgtcactattcacattttagtcttttctacgataaaaattgtatgtgtactttcatgccagtataggaaacctcaatcttttttttttttcgcctttaagaaggttttcagtgattatacctcaggtatttctgagtgtcctattgtctaataggagaaatatcttcccgagctcagaattaaaagttctcctaaattatgaagatcccaaatcttatgtaaataaccttaggcatgagtccttagggagaagttaatgaccattgttaaagtgcttttttagaaaatgttgtgctgtatgttcttgatttgacataaatgaatagactttggcaagggaggaaataagttaaaaggcagcttacaagagcctattccctataaagggtataattttacacagtactcaaagcttgttatcttttctgaccattttagtacagaattagtacttggtggttactaacatcaacttgtgacatctagaactagggctcttagtgtttagtgggccacttctctgatgtcagatgcatgcagacctgtactccacatgcaacccaacagcagtgcagtgtgataactgagcggtcgcatggcagaggacatccccctcagagtgggcacaagtgccctctagggcagccaggggaatactattgttcgatacctgggatttgactttgtcaaacagctctttgtgcccctatctttgttttgtcaaatgtagatcagttaataaacatgagtagcttgaattttcaaaaaaaaaa

SEQ ID NO: 7218 - DNA, 1400 bp, Homo sapiens
cagctactcagggaggttgaggcagcaggattgctggagcccaggaaattgaggctgcagtgagccatgattgagccaccacactccaacctaggtgacagagcaagaccctgtctcaaaaaaaaaaaaacaaattaaccaataagttctaatatcaaagtgctcagtggtttgcccttggctaaatgaagcagagccaggaaaaacagactacatatttttcatgtctaaagaaattgggtattttggcagccctttcccctagacatctacccaaatgcaggtgtgtaggttgagtctttaacaaagtgattaagagcttggtctgtaaggccggatgatctggatttcagtaggcacaccacttactggctattacttaatctgtgtgttagtgtcatcatctgtaagtcaggaataatcataccaccaacttcctatggtaattaggagcaaatgagttattacaggcaaaacacttagaacagttcctggcatatagtaatacccaataaatattaactgctactttgaaaatatcctatcacgctgatttttgacctcactgcagcaattttcagttattccagattatctagcttatggattctggtggtaggggttgtttggttttggttttcactgtctctgtctcatctagtacctaccttagtttattttgcaacttactaatactttattaatggggagggacgagtagatggtaaaaagaaggaaaaggaggtaaaaggtgaaaggaacaacattaattaacaattttacgtcatgtccctggacataaaagtttagttagtattaaatttttcactaatacaaaataaaaaaatattgttttatgagttttatgaattcatgcccttcctttactctattagcataagcagtaaatttttttattttaatatagcccaataaacctagagtatacatgtacaaaatacatataattgttaacgtgtattaaccgaaaaatgacccaagacttagttcttgccctactgtatctgccttgtttggttggttctgtgaccttaagcaaataactcctgtgagcctcaattttatttgtaaagtgatggaataaaacccctaaaatcttacccacctctaaagatatttgtttctgtgaccttttgctagtagcatttcaagttaaaatctggtttgattttgctacccatgaaatacagttcggcccttacttattgatgacttaacctaaacagtgaaaatatgcactgtaaagggtggggtgatgtggcttaacaatcagacttcttctatttttgctgctatggtggttgtattagagaactgatgtattatcttgaataaagactttgtcttgtttactgccctaaaaaaaaaaaaaaaaaaaa

SEQ ID NO: 7219 - DNA, 1400 bp, Homo sapiens
ttacattcaccacatttgtaacggagccattgaagcatattggaaaaggaactggggaatttattaaagcactcatgaaggaaattccagcgctgcttcatcttccagtgctgataattatggcattagccatcctgagtttctgctatggtgctggaaaatcagttcatgtgctgagacatataggcggtcctgagagcgaacctccccaggcacttcggccacgggatagaagacggcaggaggaaattgattatagacctgatggtggagcaggtgatgccgatttccattataggggccaaatgggccccactgagcaaggcccttatgccaaaacgtatgagggtagaagagagattttgagagagagagatgttgacttgagatttcagactggcaacaagagccctgaagtgctccgggcatttgatgtaccagacgcagaggcacgagagcatcccacggtggtacccagtcataaatcacctgttttggatacaaagcccaaggagacaggtggaatcctgggggaaggcacaccgaaagaaagcagtactgaaagcagccagtcggccaagcctgtctctggccaagacacatcagggaatacagaaggttcacccgcagcggaaaaggcccagctcaagtctgaagccgcaggcagcccagaccaaggcagcacatacagccccgcaagaggtgtggctggaccacgtggacaggatccggtcagcagcccctgtggctagaggaacaccagcacaaacgacagcctcaagtctccttcgagctttatatccatttggggatgaagtctactttgacagctagcaaggcgacatgcaactgttgttgaatgatgacagcaattcaggaaagacttaaatatgaaagcaaattgaacacatcgggtgtttgttatcagaaaagagatgagatgagataagacttgtttattgactagccaatatgtcattaaaattaaggtttatattgtgaagcttttttgaaattttacttttttttgagagttttgctctgtcacccaggctggagtgaggtggtacaatctcggctcactgcaacctccacctcccaggttcaagagattctcctgcctcagtctcccgagtagctaggattacagatgtgcatcaccatgcctggctaatttttgtattttttagtagagatggggtttcaccatgttggtcaggctggtctcgaactcctgacctcaagtgacccgcccttgtcggcctcccaaagtgctgggattacaggcatgagccattgtgcccagcctatatctacttgagcctgtgtgcccactgaagagatgaagaataaaagcctaagctctcatcaaaaaaaaaaaaaaaaaaaaaaaaaaaaaa

SEQ ID NO: 7220 - DNA, 600 bp, Homo sapiens
gttataggaatttaatatttttaaaagttttacattgctgtatattcaaagatttgttttattaatatgcaataaaggcttagaaattttagttttattccttaattggtaaatatggttaactatggaatatatttacttcctctagtgaatgtcctttatataatgactaatttgggagtaatgtgtgctctgtaagtttgttttaaattgcactgtttttaaagaaactgtagaggagcaacaaaaatccaagcaacttcataatcagattatgctaatcatttagttgagcagtttttgaccaagaatcagaagcccaaggggtacatttattgctttaatctgcactcattgaagtcatttattaccatatactacagctttgtggtaggccattattttcattttcatttttggctcttcagaaacttgaatacttaagcttgtacatgatcttgtgttttgctatcctttttactgtaaaatgtaaatattttaagggatattttgattctaaatatgataaaataatttctcacctattttgtgtgtgtgacttgaaattcagtagtaaaagaatttcttctttaaagcttt

SEQ ID NO: 7221 - DNA, 600 bp, Homo sapiens
ggggtcacagacaggatgtacccagtctggaaggggccgtgaggaagatccgcagcctcatgaagacccaccggctggacaaggtgtttgtggccacagatgccgtcagaaaggaatatgaagagctaaaaaagctgttacccgagatggtgaggtttgaacccacgtgggaggagctggagctctacaaggacggaggcgttgcgattattgaccagtggatctgcgcacacgccaggtgcctgcccacgtcactgtcggccgagagcgggtcgggtggctttcaaaggttcttctgtcccaagtactcggtgtcagagcagatggtcgcctgtgttcacagtggtcatttccatactgtttgcctcctcgtctgagtctcctgtagcatctggttcagtgtttccctgggctgaagttaattgttcatcttgcccctttagttctcatgcacagaattcctccatagcaggctgttggcatagctggcctcgtctcagaacctcttcttgtgtcgcattttcccatcattcccggtttctgcccctgtctgccccctgccctgagagttgcccgtgccctggacttgggcatgtcctt

SEQ ID NO: 7222 - DNA, 1400 bp, Homo sapiens
cttattaaatgtgatgtgacttttttctttgtacagaagagtactgtatttttgaatagcctactcccaagtaagagcaaatctgtatgataacattttttcctctggacataagacataacagtaacacgatgtacatttacaagcggccttatgtacatttcccaacaatctttttaaggcaaaattgtgaccatatgtgtataattaaaatcgtttttaatcctttgcctatgaaaatattttggaaaaaaacttgctgtgtatattcagtttctgaaagataaagaaagtgctttgtattttgttgaagtcagtattttgtataaacatttatgttgacccacttatgttcagtgctgaaaactaaaatgaacatgctattctgtcagctgaatatggaagagatctttttttactagagatctgcagaagaaacgcaatcttctgagcacaatatggaatctaaaggttttatcacttagttgttcatattatgaacctaaaaataatggcataaagtttggggatgccaggcatactttttcatgtttggtgttgagttattttacttttctaacccaacattccttggtgagaccattaaatccaaacacttgtcaccgttccttctcatagtcactctgggtcatcagcatgtcccagtcactgcagcaacgccttgtgtttgtttcatttttttaaaacccacacaaagccgctgtctcactttttcctactttaccaacctcagagtatttcggcccgtatcgaacttttgttctcagtatcagcccatggtttcaggatcaaagctgtcatgttggagattggtaatggctttcctgtctttgtacagttgaattcctagtcttccttcatccttgccctctgttggcacaggcattatctctgcaattttagaaaatgacaagtagagaatactacattgagaaactaaaccctcttcttggggtcctgatactcattcccatttgtcccagtgctgacaacccaatcttcccaatactttcaggcctgctctacaaaagtacctgttcttgtagaaattttacagtctgccattttgggtgcccaccccaatttttaccttttagtaagttggcatgaaattttggtaaaatctgaaaatcacatttcagaataaaacaattgggcaaaactacctaggctttactcttgagtgtctccttttgatagggattgtttctggaccagtttgtctaagtcctggctcttattggttcatatgaaataatgttaacttcacttctttgtatattatgtataaattagaaaatgaaaaatgtgtgaataacattgtatgaaataaacctggtcttgtgtttttctctagataaaataaaaatctgtacctc

SEQ ID NO: 7223 - DNA, 1400 bp, Homo sapiens; identical to SEQ ID NO: 7222

SEQ ID NO: 7224 - DNA, 1400 bp, Homo sapiens
aatgccccaaaaaggcatcatttgccagtgcctctgctgaagtagggaagaaagggaagaagaaatgtcaaaaacagggcccaccttgcagtgactctgaggaagaagtagaaaggaagaagaaatgccacaaacaggctcttgttggcagtgactctgctgaagatgagaaaagaaagaggaaatgccagaaacatgcccctataaattcagcccagcacctggacaatgttgaccaaacaggtcccaaagcctggaagggtagtactacaaatgatccaccaaagcaaagccctgggtccacttcccctaaaccccctcatacattaagccgcaagcagtggcggaaccggcaaaagaataagagaagatgtaagaacaagtttcagccacctcaggtgccagaccaggccccagctgaggcccccacagagaagacagaggtgtctcctgttcccaggacagacagccatgaggctcgggcaggggctttgcgagcccgcatggcacagcggctggatggggcccgatttcgctacctcaatgaacagttgtactcagggcccagcagtgctgcacagcgtctcttccaggaagaccctgaggcttttcttctctaccaccgcggcttccagagccaagtgaagaagtggccactgcagccagtggaccgcatcgccagggatcttcgccagcggcctgcatccctagtggtggctgacttcggctgtggggattgccgcttggcttcaagtatccggaaccctgtgcattgctttgacttggcttctctggaccctagggtcactgtgtgtgacatggcccaggttcctctggaggatgagtctgtggatgtggctgtgttttgcctttcactgatgggaaccaacatcagggacttcctagaggaggcaaatagagtactgaagccagggggtctcctgaaagtggctgaggtcagcagccgctttgaggatgttcgaacctttctgcgggctgtgaccaagctaggcttcaagattgtctccaaggacctgaccaacagccatttcttcttgtttgatttccaaaagactgggccccctctggtagggcccaaggctcagctttcaggcctgcagcttcagccatgtctctacaagcgcaggtgacctctggatcttccttgaaaggggaggcagatctcaaactccaggctcagaactgtgaagactgtttccagcctggctgtgagccaagacctggttcctggtggaccctgaggacaaagtgtgataaaacctctggctcagacttgctctactgaaggcttcttggttataagatgcataaagtcactggggctagctaaacaataaagagtttattgtgagaaaaaaaaaaaaaaaaaaaaaaaaaaa

SEQ ID NO: 7225 - DNA, 1400 bp, Homo sapiens
aacttatggcccaatcttacctgttctccagggactggtcactgcctcaggacccccaagcctatgccctgagccatggctgctgactgactccagccaaggtgcaaagacgagattatgagacaggtcctcaggcctgtgttccaagtactcacaggggctctgggtgcccatcgccgggagtatggttcagctgccaccggcactgtccatttgcctgtctgtcaagctcagagcatggataagccacacagcagggcagtgcaccctggcaccatgcacggccagcaagaatcaaggcccgcagatgctaagagggcctattgtcaggggaaggtccccgctcctgcacactctctatggatacttgggttgtgggggctctcttggagagtaagtttgtggtttgtttctggtttacagtggtggctgacaccccttgtaagaaagcattcctgggaagtcttctgtgggtccaaacatgttgctccgatcatcacaggagagcaaaaggccctagataccccctttggaatgtgagagtcttgttgtctgatatttgccactgagctggtgaagcccctctaaagagatctcgaccctggggagcagaattcttgtcatctatgaggggtcctgagaaagacttgtcattttttttcctggagttcttcccattgaggtcctaggatttgcacaccactgtcccacaagagctttcctgcctaatgaaaggaggtcttgtggtgtgtgtctcctctcttctctatagttcccgagttggcccccattgcagcccccaccctgtgggtagtcttccagaagtgatgcagtggtgtgagatgccctgcaccttgttatttgggagactttgagagtcattcacttccatggtgactagtgtttgttttgcctgattttatattctgtgttgcatttctccccactccctgccctgctttaataaacagcaaaccaatatctaggaagaatgactgagggatagtattgggtattggccccatggcaggaacagccacttgcatctggtcccggtgccacactgcggtgcttggtgtggttgtggagcctgtccctgcgcgccttgctcccgttgagccacgctgtctggtgggtgattctctgccctgagccaccaccctggactggcccagtctccagagctggcacaccctgcctgttttctctttttagacacaacagccgcagtttggccagccactaagtcccaccagctgaggtccgaggaaagcggggtgactcatttcccttgtccagggcccgaggagagtgaggtgtccagcctgcaaagctattccagctccttggtgttggtttgcaataaattggtatttaagcaaaaaaaaaaaaaaaaaaaa

SEQ ID NO: 7226 - DNA, 1400 bp, Homo sapiens
  misc_feature (717)..(717): n is a, c, g, or t
  misc_feature (894)..(894): n is a, c, g, or t
tacaatctcttcttggaggaaaatataagtgaggtcaagtcatacaagtgtcttaaggtactggagaatattaagagcagtggtcaggggatcgacccaatgctactcctgacaaaccttggcatgatcaagatggatgttgttgatggcaaaactcccatgtctgcagagatgagagaggagcaggggaaccagacggcagagctccaagacagtgaaactaaagcaaataatggagagaagaatgcccgacagagacttctggattcttcttgctgatgatttttttccttgagctgtaaatctgtgacttctgcgacatgggatttaatttggctaaagcacccctgttggtttcacagctggtttgcaataaatggttcttggtggagatactgagcatgtcttattgagtccctaatggaaatggtgatcaacaaaaggttatggaagaatggtttatgaacttcccataggaagcacctgagagatagtaaactgcagcaagtaactatgtgtaaagtcctcatcaaatgaaaagcagaaagacaaagaacaattagtcaagagcagtagccctgtcagagcctcggagcaatacctttctgtacccgtggtgagacaagacccagagctactggaaaacaagcactttggaagatttgttttgttttcatggaataataatatgtcaggatataatttaacgtgagtttnttatgtgcccttaaagactgttagacaagaaaagcattcactggctaataatccataggtcgacctatgtcctaagttaggtgtaaggtccgatgccttggcccacactcgagctctctttacattgttagttgtcaaccttggctgatggaaatcccgtaaccactatttgttgcnctgtgccttgaagggcagcaggcccaagtgctgctctgactgaaaactgagttaacaagacgaaatctaaaggatattcacagtgacttcaattcaggaagaatgcttccaaaagagcccagtggggaaatctgacatcacagaagacattaattcagtcactttcaaagagtttgtctacaggcggtttctctgttatcaaaggcatttgaaataggattttacttaaacaataatggaacacaggagtatttaaagtgaagaacactttgcctgaatgtgatcagggcacataagtgacattggcgtgcttcatatggcgtgcttggagccagaaaaacttagcggtttattttgtttatatttaagcacagctttaaaaaattcattatcgtttattcagtgtccgaattgaggccatttgggaagaaaattctagcactggtggagaattatagaataaagattataaatggttggataaaaaaaaaaaaaaaaaaaaaaaa

SEQ ID NO: 7227 - DNA, 1400 bp, Homo sapiens
ggaaggactaaagatgatatcatcatttgtgaaattggagatgttttcaaggccaaaaacctaattgaggtaatgcggaaatctcatgaagcccgtgaaaaattgctccgtcttggaatttttagacaagtggatgttttgattgacacatgtcaaggtgatgacgcacttccaaatgggttagacgttacctttgaagtaactgaattgaggagattaacgggcagttataacaccatggttggaaacaatgaaggcagtatggtacttggcctcaagcttcctaatcttcttggtcgtgcagaaaaggtgacctttcagttttcctatggaacaaaagaaacttcgtatggcctgtccttcttcaaaccacggcccggaaacttcgaaagaaatttctctgtaaacttatataaagttactggacagttcccttggagctcactgcgggagacggacagaggaatgtcagctgagtacagttttcccatatggaagaccagccacactgtcaagtgggaaggcgtatggcgagaactgggctgcctctcaaggacggcgtcatttgctgttcgaaaagaaagcggacattcactgaaatcatctctttcgcacgccatggtcatcgattctcggaattcttccatcttaccaaggagaggtgctttgctgaaagttaaccaggaactggcaggctacactggcggggatgtgagcttcatcaaagaagattttgaacttcagttgaacaagcaactcatatttgattcagttttttcagcgtctttctggggcggaatgttggtacccattggtgataagccgtcaagcattgctgataggttttaccttgggggacccacaagcatccgcggattcagcatgcacagcatcgggccacagagcgaaggagactacctaggtggagaagcgtacttgggccggcgctggcacctctacaccccattacctttccggccaggccagggtggctttggagaacttttccgaacacacttctttctcaacgcaggaaacctctgcaacctcaactatggggagggccccaaagctcatattcgtaagctggctgagtgcatccgctggtcgtacggggccgggattgtcctcaggcttggcaacatcgctcggttggaacttaattactgcgtccccatgggagtacagacaggcgacaggatatgtgatggcgtccagtttggagctgggataaggttcctgtagccgacacccctacaggagaagctctgggactggggcagcagcaaggcgcccatgccacacaccgtctctcgaggaaacgcggttcagcgattctttgactgcggaccctgtgggaaaccccgtcaataaatgttaaagacacactcaaaaaaaaa

SEQ ID NO: 7228 - DNA, 600 bp, Homo sapiens
gtgttggtgtctcggaccgtgggccccacacagcggctgctcctctgtggcaccctggctgccctacacatgctcttcctgctctatctgcattttgcctaccacaaagtggtagaggggatcctggacacactggagggccccaacatcccgcccatccagagggtccccagagacatccctgccatgctccctgctgctcggcttcccaccaccgtcctcaacgccacagccaaagctgttgcggtgaccctgcagtcacactgaccccacctgaaattcttggccagtcctctttcccgcagctgcagagaggaggaagactattaaaggacagtcctgatgacatgtttcgtagatggggtttgcagctgccactgagctgtagctgcgtgagtacctccttgatgcctgtcggcacttctgaaaggcacaaggccaagaactcctggccaggactgcaaggctctgcagccaatgcagaaaatgggtcagctcctttgagaacccctccccacctaccccttccttcctctttatctctcccacattgtcttgctaaatatagacttggtaattaaaatgttgattgaagtctgg

SEQ ID NO: 7229 - DNA, 1400 bp, Homo sapiens
gaaactaaagaatattctacagacacccctgtagaaagaaacaaagaacaggatagtttagaaagctttctgttagctgtattcagcaaatttcatactagttgctcaggactgctagttggtatgcttttgtaaaacgagattgaaatttaataaaagatgcaactaaaatctttcctgcatgaagctaaaagcactcaagttgagagaggggcaagggaatctccccaggatgactgaagatgacttctttttacagcaagtactgttagcctttctgcaccccttagcttggcccctgctccaacttctgggtcagcagcaaggtgaactcaacagaagttgctcttgactgtttgaaggtagaagcagcctaccttttctctttgctaaaagaaggtcaaaggcttcgcaaccaggatgcaaggtctgcggtccagaagcttgcggtgagtgtgtgccactgatggagctccaagcccacccaccagccactcctgatggggttgctcacactgcagctgccctatcaccaccctgcacgttccttggaagatttaaatgtttggttgcaaatgaatgttttaaaaatgtatttaatgcaatttttcctgctctcaacatgaccacccaagattcaaacacagagacttccaagttactattttttcagaacatcaccgattttaaaatctgtcacaacaggacttggttttgtgcagatatcagagtgctaatgtgagaaacccagttaaaagaaaacttagtttattgggaagaaagcctcaggcccactcgtttctagaactgtgaaaatatccttggttggcatttttaacacaaaacactatagtgttggtattaaatagtactaggtaaatataaagaaaccaataatgaattgctgagacaatcttgaacccaaatagcattagaaagctgaaggcccaatgaaataacactttcacacttaaactctgtggataaattttgcctgtgggtataaacagatggtcaaattaaaaatgctttactataattaacttttctgatttgaatgaagggaaatgtatttattgaaacaaagctgtttgctgctttatgcaggtgcagtgttcagtcagcaaggaagtgggaagagtggacatggtattgtgtctacacccaagttcttaactaagcttctcgctctaatactgcattctgtttctccttttgtgccctgattgtaatccaaaatttatgaactagaaaagaatgtccaatttaataagttgcattttttttttctttaagcactttattcagaacaatacatgttcttctggtagtgtttggataatatgattttaacacatgctaataaaagccaagaaaaatcaaaaaaaaaaaaaaaaaaa

SEQ ID NO: 7230 - DNA, 545 bp, Homo sapiens; identical to SEQ ID NO: 1995

SEQ ID NO: 7231 - DNA, 1400 bp, Homo sapiens
gaagatcactgccagtttgtggattcatttttagatggacgcactgggcagcaactcacttctgaccagttaccaatcaaagaaggttatttcagagcagttcgccaggaacctgtccaatttggagaaataggtggtcacacccaaatcaattatgttcagtggtatgaatgtgggactacaattcctggaaaatggtagatgctgcacaaagttaccttctgtttcatcattgcaaacaaaaatcattgaaaatactatgccgcattcatttaaagctattttgtttactatgtataaaagtctacaatctaattaatagcaatactagatgtttattattagaaaagattgctgagagtatttatcaggttttacaaagtcattttaagaaagcaagatactgatgttaacagaataacatttttggggaagctggctccctattcatggtattttaagagatcatttgtatattatttatcacactgttgtaatgatgttttgagatacttttataacaaaattaacatcaaaaaggtatatactttttaaaaaaaatttacttttattgatgtgtactcttcctattgatgagttaattccataaatctctacttagtttaacttattggatcaaattatcttcagcatgtatatctggggaaaaaaggtccgaattttcacatttatatttaaacttcaattttttatatttaaacttcaattttttagcaacagctgaatagctttgcggaggagtttaatagttacacattcatgctaatatacatttcctttaaacatccacaaattcttaaaaagattgaatcagtaaatttcatttcagctaaaaatggagtctaatatattgtttcaaaagatacatttttacccaccataaatgttacaatatctgaatatgctttgtcaaactatccctttatgcaatcgtcttcatattgtttttatgattctaatcaagctgtatgtagagactgaatgtgaagtcaagtctgagcacaaaaagataatgcacgatgagattgcctaccattttataggatatttactatgtatttatacgttaagacctctatgaatgaatgtatcagagaatgtctttgtaactgtttaattcaatctgtaataaaaatctaactaactaactcatttatttctattaaaaaggtattgtcctttaggcggggaatgggaatccttgctgcactgttgcagtcattctgaaaggacctttccctgtacttacctttcaacatgcttcaatcttatcaacgctacattttgtatttttcaaacaagtataaattctgcaataaagagatgtagttttttttaaaaaaaaaaaaaaaaaaaaaaaaaaaaaaaaaaaaaaaaaa

SEQ ID NO: 7232 - DNA, 1400 bp, Homo sapiens
cggggtgaatgtcgtgctggtgatggcctacgggagcctggacttgaaagaggagattgatattcgactctccagggttcaggatatcaagtatgagccccagctccttgcagatgatgatgctagactactacaactggaaacccagggaaatcaaagttgctacaactatctgtataggatgaaagctctggatgccattcgtacctctgagatcccatttcattctgaaggccggcatccccgttccttaatgggcaagaatttccgctcctacctgctggatctgcgaaacactagtacgcctttcaagggtgtacgcaaagcactcattgatacccttttggatggctatgaaacagcccgctatgggacaggggtctttggccagaatgagtacctacgctatcaggaggccctgagtgagctggccactgcggttaaagcacgaattgggagctctcagcgacatcaccagtcagcagccaaagacctaactcagtcccctgaggtctccccaacaaccatccaggtgacatacctcccctccagtcagaagagtaaacgtgccaagcacttccttgaattgaagagctttaaggataactataacacattggagagtactctgtgacggagctgaaggactcttgccgtagattaagccagtcagttgcaatgtgcaagacaggctgcttgccgggccgccctcggaacatctggcccagcaggcccagactgtatccatccaagttcccgttgtatccagagttcttagagcttgtgtctaaagggtaattccccaacccttccttatgagcatttttagaacattggctaagactattttcccccagtagcgcttttttctggatttgcattcgggtgttattcttaatgtttctgtcaaagcttcttaaaaatcttcacttggtttcagccatagttcaccttccctgttccaggtttatttaattccaaaggtgagagttggagtgagatgtcttccatatctatacctttgtgcacagttgaatgggaactgtttgggtttagggcatcttagagttgattgatggaaaaagcagacaggaactggtgggaggtcaagtggggaagttggtgaatgtggaataacttacctttgtgctccacttaaaccagatgtgttgcagctttcctgacatgcaaggatctactttaattccacactctcattaataaattgaataaaagggaatgttttggcacctgatataatctgccaggctatgtgacagtaggaaggaatggtttcccctaacaagcccaatgcactggtctgactttataaattatttaataaaatgaactattatcaaataaaacgtatgaatcagtaaaaaaaaaaaaaaaaaaaa

SEQ ID NO: 7233 - DNA, 600 bp, Homo sapiens
gaaaagaatccaattgatcatgttagcttctattgtaagactgcccccaacagagcaatcaggattactaaaaaccaggtttcacaacttctgccagagaaatttgcagagcagctgattcgagtatattgtaagaaggtggacagaaagagtttgtatgccgcaagacaatattttgttcagtggtgtgcagacagaaatttcaccaagccgcaggatggcgatgttatagccccactcataacgcctcaaaaaaaggaatggaacgacagtacttcagtccaaaatccaactcgcctccgagaagcatccaaaagcagagtccagctttttaaagatgacccaatgtgaatgtctgtagtcagttgtttacaaactccctctcctgcacaattcatttagaggcttcaatcatagaattctgcaaattaatgacaactcatgccttaattttgtattttgaatgtacacgcatgctgaagctaagtaacttttaatcaaagaaataagatggtattaggcaaatcttactatactatgaaaagcattaccttgcctatttttaatattattaaagcctttctccttcgaaaaaaaaaa

SEQ ID NO: 7234 - DNA, 1344 bp, Homo sapiens; identical to SEQ ID NO: 1999

SEQ ID NO: 7235 - DNA, 600 bp, Homo sapiens
tgtggagaagtgggcttcagatttaaggctgacaggaagactgatgttcatgggtaaaataatactgattttactacagggagacagaaacaacctcaaggtgccaaaaagttaaatgtttctggcatttgaagtcaaagagtattcagcgttggatgaattacaaaaggaatttgaaactgcaggacttaagaagcttttctccgaatttgtacttgctctggtaaaatgaaatggaagacaggaatcttttagtaaaatagcagtgttttttgttgtttttgcattggatttggggagtggttaattgaaatagtcaattttaaagtttctctgaagcaaaatgataggcatcattctaacttcaggaacaaaagccagttctgttttatgaaatattaaacatgaagaaaacttgtatattctaatgtttgccaggaaaggctaggttcagtagatgagacattatttaaaagataaatttaaaaagatggtaaatgaacacttgtttttatagacaatatttgtttgaaactatgtaattttctggctaattttcttgtaattaaatgattttttaaaaaaaaaaaaaaaaaaaaa

SEQ ID NO: 7236 - DNA, 1400 bp, Homo sapiens
atgataatggtctcatggaagtagagggagctcatacatcacggacgatgagtattaatgctgcagagttaaaacagcttctacaaagcaaagaagaaagtccagaaaatttgttccttgaactagagaagcttgttttggaacattcaaaagatgatgacaatctggattctttgttggacagtgtagttggacttaagcagatgctggagtcatcaggtgaccctttacctctcagtgaccaggatgtagaaccagtactttcagctccagaatctcttcagaatctgtttaacaataggactgcctatgtgcttgctgatgtcatggatgatcagttgaaatctatgtggttcactccatttcaggctgaagagatagatacagatctggatttggtaaaggttgacttaattgaactctctgaaaaatgctgtagtgactttgatttgcactcagaattagagcgctcatttttgtcagaaccatcatctccaggaagaaccaagactactaaaggattcaaacttgggaagcacaagcatgagacctttataacgtcaagtggaaaatctgaatacattgaacctgccaaaagagctcatgttgtgccaccaccaagaggaaggggcaggggaggatttggacagggtatacgacctcatgatatttttcgtcagagaaaacagaacacaagtagaccaccatctatgcatgtggatgactttgttgctgctgaaagtaaagaagtggttcctcaagatggaatacctccaccaaaacggccactcaaagtatcacagaagatttcttcccgtggtgggttttcaggcaatagaggaggacggggtgctttccacagtcagaataggtttttcacaccacctgcttcaaaaggaaactacagtcgtcgggaaggaacaagaggctccagttggagtgctcagaatactcctcgaggaaattacaatgaaagtcgtggaggccagagcaattttaacagaggccctcttccaccattacgaccccttagttctacaggttaccgcccaagtcctcgggaccgtgcttctagaggtcgtgggggacttggaccttcctgggctagtgcaaatagcggcagtggaggctcaagaggaaagtttgttagtggaggcagtggtagaggtcgtcatgtacgctcctttacacgataaaaatccttttgggaacatcttaactgtatatgaacatttcacgaggacaataaaaataagacattgaaggaccaatttagacttagcagttatctggagacatctgagagaatatttttatctgaagaaagcagaatttgtttgatacctaacaagatttcaataaaaatccaaactttgtatgtaaaaaaaaaaaaaaaaaaa

SEQ ID NO: 7237 - DNA, 1287 bp, Homo sapiens; identical to SEQ ID NO: 2002

SEQ ID NO: 7238 - DNA, 1400 bp, Homo sapiens
gagtgaggagctggtggagagctggtggtttcacaagcagcagggggccccggacctcttccagtggctgtgctcagattccctgaagctctgctgccccgcaggcaccttcgggccctcctgccttccctgtcctgggggaacagagaggccctgcggtggctacgggcagtgtgaaggagaagggacacgagggggcagcgggcactgtgactgccaagccggctacgggggtgaggcctgtggccagtgtggccttggctactttgaggcagaacgcaacgccagccatctggtatgttcggcttgttttggcccctgtgcccgatgctcaggacctgaggaatcaaactgtttgcaatgcaagaagggctgggccctgcatcacctcaagtgtgtagacattgatgagtgtggcacagagggagccaactgtggagctgaccaattctgcgtgaacactgagggctcctatgagtgccgagactgtgccaaggcctgcctaggctgcatgggggcagggccaggtcgctgtaagaagtgtagccctggctatcagcaggtgggctccaagtgtctcgatgtggatgagtgtgagacagaggtgtgtccgggagagaacaagcagtgtgaaaacaccgagggcggttatcgctgcatctgtgccgagggctgcaagcagatggaaggcatctgtgtgaaggagcagatcccagagtcagcaggcttcttctcagagatgacagaagacgagttggtggtgctgcagcagatgttctttggcatcatcatctgtgcactggccacgctggctgctaagggcgacttggtgttcaccgccatcttcattggggctgtggcggccatgactggctactggttgtcagagcgcagtgaccgtgtgctggagggcttcatctagggcagataatcgcggccaccacctgtaggacctcctcccacccacgctgcccccagagcttgggctgccctcctgctggacactcaggacagcttggtttatttttgagagtggggtaagcacccctacctgccttacagagcagcccaggtacccaggcccgggcagacaaggcccctggggtaaaaagtagccctgaaggtggataccatgagctcttcacctggcggggactggcaggcttcacaatgtgtgaatttcaaaagtttttccttaatggtggctgctagagctttggcccctgcttaggattaggtggtcctcacaggggtggggccatcacagctccctcctgccagctgcatgctgccagttcctgttctgtgttcaccacatccccacaccccattgccacttatttattcatctcaggaaataaagaaaggtcttggaaagttaaaaaaaaaaaaaaaaaaaa

SEQ ID NO: 7239 - DNA, 1113 bp, Homo sapiens; identical to SEQ ID NO: 2004

SEQ ID NO: 7240 - DNA, 1400 bp, Homo sapiens
gagacagggtttcatattggccagactggtctcgaactcctgaccttgtgatccgcccacctcggcctcccaaagtgctgggattacaggtgtgagccaccacacccagccaacattttcctcttttaaaaaatatcttctcacgcctgtaatcccagcactttgggaggctgaggcaggcggatcatgaggtcaggagatcaagaccatcctggctaacacggtgaaactccatctctactaaaaatacaaaaaaaatagccgggcgtggtggcaggcgcctgtagtcccagctactggggaggctgaggcaggaaaatggtgtcaacccgggaggcggagcttgcagtgagccgagattgcgccactgcactccagcctgggcaatagagtgagactccgtctcaaaaaaaaaaaaaaaaaaaaaaacttcaacaataccctcaggttgataattttggatatctatctgtatctatatatcttgtttacctggtctccagaaaaagaacacatacacatatccatatataaaatatgtatacatgtatcaaatctacgtaaactataaaggtgggatggctttaattatggcccaagctactaagacaatgaagactttttggggctgcaagctactgcttcccttctttatctactagcctcttaaacaaggctcacttgtgctacaagacagtccaccgttttgttttttttttcttttttttgagacagggtctcactctttcccaggctgcagtacagtgacacagtctcagctcactgcagctttgaccttgccgggctcaggtgacccttacacttcagcctcccaagtagcagggactataggtgtgcaccaacatgcttggttaatttttgtattttttgtagagacagggttttgccatgttgtccaggctagtctcgaattcctgggctcaagtgattcacctgccttggcctcccaaagtgctaggattacagatgggagccaccacgcccagcccagtccagctcttatatgtagcacagggaaaggacaaatacttgtcaactataaataagaaacattgctaatgcattgcaaagaacactagtttcatttactttataacttagatgtctactgggtgagacgaatgtctttgttctttaaaaaataggaaaagagaagaaaaactagcataacataagtactcatttgtaagactttctgacatgtaacattagttccgtagttttgagacctggtagaactgactttcatatttggataacctggaaaacacccaaacacaaacttcaagtcttctttctcttttttcattatcttttttagtctgaggtgacaccatcattaaggattcgacacccgtttgtaaataaaatgacatcag

SEQ ID NO: 7241 - DNA, 1400 bp, Homo sapiens
gaagtgggacctgggggtggttggacccctgggatcctaaaggaggggcagggagggcgcagaactccgcttctgctccttgctaccaggacgcgcggcctcctcagcctctttcctcccgctgccatgcaccctgcagccttcccgcttcctgtggttgtggccgctgtgctgtggggagcggccccgacccgggggctcattcgagcgacctcggaccacaatgccagcatggactttgcagaccttccagctctgtttggggctaccttgagccaggagggcctccaggggttccttgtggaggctcacccagacaatgcctgcagccccattgccccaccacccccagccccggtcaatgggtcagtctttattgcgctgcttcgaagattcgactgcaactttgacctcaaggtcctaaatgcccagaaggctggatatggtgccgctgtagtacacaatgtgaattccaatgaacttctgaacatggtgtggaatagtgaggaaatccagcagcagatctggatcccgtctgtatttattggggagagaagctccgagtacctgcgtgccctctttgtctacgagaagggggctcgggtgcttctggttccagacaataccttccccttgggctattacctcatccctttcacagggattgtgggactgctggttttggccatgggagcagtaatgatagctcgttgtatccagcaccggaaacggctccagcggaatcgacttaccaaagagcaactgaaacagattcctacacatgactatcagaagggagaccagtatgatgtctgtgccatttgcctggatgaatatgaggatggggacaagctgcgggtactcccctgtgctcatgcctaccacagccgctgcgtggacccctggctcactcagacccggaagacctgccccatttgcaagcagcctgttcatcggggtcctggggacgaagaccaagaggaagaaactcaagggcaagaggagggtgatgaaggggagccaagggaccaccctgcctcagaaaggaccccacttttgggttctagccccactcttcccacctcctttggttccttagccccagctccccttgtttttcctgggccttcaacagatcccccactgtcccctccctcttcccctgttatcctggtctaataaccccccacacatacacctctggtgacctatttgcacagaccgtcgtcttccctccagtcttctgagggataggggacattccatcccaagcttctcccttacccacacctatccttttgaggggctttggggtggagctggggcaagcagagggactgggtcttcacttcttgggctaataaaattgtttctttgtggactaaaaaaaaaaaaaaaaa

SEQ ID NO: 7242 - DNA, 1400 bp, Homo sapiens; identical to SEQ ID NO: 7241

SEQ ID NO: 7243 - DNA, 600 bp, Homo sapiens
tttcctatagagttagttgttctccacggctggagagttcagctgtgtgtgcatagtaaagcaggagatccccgtcagtttatgcctcttttgcagttgcaaactgtggctggtgagtggcagtctaatactacagttaggggagatgccattcactctctgcaagaggagtattgaaaactggtggactgtcagctttatttagctcacctagtgttttcaagaaaattgagccaccgtctaagaaatcaagaggtttcacattaaaattagaatttctggcctctctcgatcggtcagaatgtgtggcaattctgatctgcattttcagaagaggacaatcaattgaaactaagtaggggtttcttcttttggcaagacttgtactctctcacctggcctgtttcatttatttgtattatctgcctggtccctgaggcgtctgggtctctcctctcccttgcaggtttgggtttgaagctgaggaactacaaagttgatgatttcttttttatctttatgcctgcaattttacctagctaccactaggtggatagtaaatttatacttatgtttccctaaaaaaaaaaaaaaaaaaaa

SEQ ID NO: 7244 - DNA, 600 bp, Homo sapiens
caacttctaaacccaaataaaaagaaaatatttataggaggaaatgattaatttgatattctttagtgaacttgtttaattcctcagtgggtgtgacatatttcatgggaatattcaaatatctatggtaatattttgaccctttatatttgttctaaaataagtcaaaatgtgaaaataatattaaatctaagatattttgaactaagcatctttatatgcttgtgtaacaggaacaaagtaacagcctttcaattcatatactgccttgtgttcagtgaacccaagaaatgtaataaatatttgtaattttacacaaatatttaagaggaaagagtattaagagcaattcaaaaaaagtaaccttatactactaaaaaaaaaattcttgcatatattatcatcaaatgcatttttgaagacatcaaagactcaggttaaaactattttggtaagtgcagcttgaatttcaaatatcccgtgttacctttctctattacagcttaaagtatgctacaatctgtgtcatatagttaattgataagcatttttaatctgtgtaaacacaggaatttaaataggaatttactatttttttat

SEQ ID NO: 7245 - DNA, 600 bp, Homo sapiens
ctcccagagtctcaggctccccttctgacccagtgtgcgcccttgactgctttctttgctgcccttccagggagctgcccccctggtagggcatgtgcctgtttccctctcagcctggaggctggctggacatctcctagggtcactgtgcctctcagctagttggcgggggtgctggactggactcttgttcactttaccttctgccaaatgcagagagggaggccagtgtcagggtcggagtggcctggctcttagcactgaccgaccattgccatttctggcctcgctaggcccaggagaggagggaggcaagccagtcgggtttcctggagcaatgggtgtgccagccctcagcatgactctgccaagcatccagaccacaaatgcaggaatttggctgaggagcagctttaggtatggattgatgactaagtcaagctacttcctgagcttctctcagatttccaagagccagagatgaattgtgctgcatcttgccccaattcttaggatttcttttcctccgccactgcagtgattgttagaggtagttttcttgaattaatattaaatcacagttccagccctgtaaaaaaa

SEQ ID NO: 7246 - DNA, 600 bp, Homo sapiens
caggagagttattagcactaccgatgctgaaagacaagcagttacacccccaggattacaggaggcaatcaatgacctggtgaagaagtacaagctttctcgagcttttgtccggccctctggtacagaagatgtcgtccgagtatatgcagaagcagactcacaagaaagtgcagatcaccttgcacatgaagtgagcttggcagtatttcagctggctggaggaattggagaaaggccccaaccaggtttctgaagataattttcatattcctgagaaactggactttttacaagtctttacaaaactgtcaataataatggcagtactaagagatttataatcataatgtttacaatgcagcctactggattgtctctagatctgtttttcttaaacactaacagaataattctttataaataggtaagccttacacttgttaaagaaatttacctctaatttcagtctcactaatgtaaaatactgggacttaagtatacaattcagtcactaactgtacagttttatgtggggaacaattcatgcaggctactggaaaattaaatcttattaccaaaaaaaaaaaaaaaaaaaaa

SEQ ID NO: 7247 - DNA, 600 bp, Homo sapiens
tctgaaatagggttctgttacatcctcttcgatagcctgtttaaaatgtttagaaggtctggagctcaaaaatgcgttcttccacattgataatttagtaaactgagaacattgacatcactacagggcagcataagaggttgcttacatgtggtagcagctctggtttgattcaagttgctaccatgtacattgacagcacatataccataaccagcgtgttgggttgaattgcactttctacctttgtatgagatttacagactttccttctgggtttgtatcatgaccagaggggtactatagggttggtttatactgcaatatagaggatcagaagccatttgatttggtaggtgtgtcagaagggagaatgatggcagacgaactgctggaagaggtcagaagatagccatgctaaaatgcaattatatcctcatgtttatcccaaactaatcttggacttttccactcattagctttgttttgcccttgtttcccttgaaggtttaagttcaaccatattctgtcaactgttcagtttcagtggaatcttgtatttctggttcattataacaaactgttcgcttaaaaaaaaaa

SEQ ID NO: 7248 - DNA, 600 bp, Homo sapiens
aaagtttttaaaattctggtttggtgttgagtctctctcctgctgcctatttatagattacactggccaccagctccgtgacccaggctggaatgcaatggctcactgcagcctcaacctcctgagctcaagcaatcctcccacctcagcctcccaagaagctagaaccacatgtacacaccaccacggtcggctgatgttttaattttgcagagatgggggggtctcactatgttgcccaggctggtctcgaactcccgtaatccagccatgtaggaaacctgagatgcagtgggccaaggggtatgttaaaacactgtgacgagttcagtgctaagaactgtaatgctcaggaaatcttacagcacgtgccatcctaagcctgtgtgtgtgtcctcgtgtctctctactttttcttcttcttgctggtgatggtcttgctggatggggacacggtcacatcctccttgggagggtccagtatgaggtgagaggatgacacgtctgccggctcctttagcactgtgatgtccacctcataagtcatgtctcttgggcctcttcctctctcaagatgaagatgttcagccttgcttccag

SEQ ID NO: 7249 - DNA, 1400 bp, Homo sapiens
ctcgggagaaagttccagctggtcggagtaaggccgaacttcgggctgagcgtcgagccaagcaggaggccgagcgggccctgaaacaggcaagaaaaggggaacaaggaggaccacctcctaaggccagccccagcacagctggagaaaccccctcaggagtgaagcgtctccctgagtaccctcaggttgatgacctacttctgagaaggcttgttaaaaaaccagagcgtcaacaggttcctacacgaaaggattatggatccaaagtcagtctcttctctcacctaccccagtacagcagacaaaactctctgacccagtttatgagcatcccatcctctgtgatccacccagccatggtgcgactcggcctgcagtactcccagggcctggtcagtggctccaatgcccggtgtattgccctgcttcgtgccttgcagcaggtgattcaggattacacaacaccgcctaatgaagaactctccagggatctagtgaataaactaaaaccctacatgagcttcctgactcagtgccgtcccctgtcagcgagcatgcacaacgccatcaagttccttaacaaggaaatcaccagtgtgggcagttccaagcgggaagaggaggccaagtcagaacttcgagcagccattgatcggtatgtgcaagagaagattgtgctagcagctcaggcaatttcacgctttgcttaccagaagatcagtaatggagatgtgatcctggtatatggatgctcatctctggtatcacgaattcttcaggaggcttggacagagggccggcggtttcgggtggtagtggtggacagccggccatggctggaaggaaggcacacactacgttctctagtccatgctggtgtcccagcctcctacctgctgattcctgcagcctcctatgtgctcccagaggtttccaaggtgctattgggagctcatgcactcttggccaacgggtctgtgatgtcacgggtagggacagcacagttagccctggtggctcgagcccataatgtaccagtgctggtttgctgtgaaacatacaagttctgtgagcgtgtgcagactgatgcctttgtctctaatgagctagatgaccctgatgatctgcaatgtaagcggggagaacatgttgcgctggctaactggcagaaccacgcatccctacggttgttgaatctagtctatgatgtgactcccccagagcttgtggatctggtgatcacggagctggggatgatcccttgcagttctgtacctgttgttctacgagtcaagagcagtgaccagtgacgggggaaacacagggttaataaatgccatactccctaccctcaaaaaaaaaaaaaaaaaaaaaaaaaaaaaaaaaaaaaaaaaaac

SEQ ID NO: 7250 - DNA, 1400 bp, Homo sapiens
aggtgaagaacatcatccagtggcagacactgaaaataaggagaatgaagttgaagaggtaaaagaggagggtccaaaagagatgactttggatgagtggaaggctattcaaaataaggaccgggcaaaagtagaatttaatatccgaaaaccaaatgaaggtgctgatgggcagtggaagaagggatttgttcttcataaatcaaagagtgaagaggctcatgctgaagattcggttatggaccatcatttccggaagccagcaaatgatataacgtctcagctggagatcaattttggagaccttggccgcccaggacgtggcggcaggggaggacgaggtggacgtgggcgtggtgggcgcccaaaccgtggcagcaggaccgacaagtcaagtgcttctgctcctgatgtggatgacccagaggcattcccagctctggcttaactggatgccataagacaaccctggttcctttgtgaacccttctgttcaaagcttttgcatgcttaaggattccaaacgactaagaaattaaaaaaaaaaagactgtcattcataccattcacacctaaagactgaattttatctgttttaaaaatgaacttctcccgctacacagaagtaacaaatatggtagtcagttttgtatttagaaatgtattggtagcagggatgttttcataattttcagagattatgcattcttcatgaatacttttgtattgctgcttgcaaatatgcatttccaaacttgaaatataggtgtgaacagtgtgtaccagtttaaagctttcacttcatttgtgttttttaattaaggacttagaagttcccccaattacaaactggttttaaatattggacatactggttttaatacctgctttgcatattcacacatggtcaactgggacatgttaaactttgatttgtcaaattttatgctgtgtggaatactaactatatgtattttaacttagttttaatattttcattttgggggaaaaatcttttttcacttctcatgatagctgttatatatatatgctaaatctttatatacagaaatatcagtacttgaacaaattcaaagcacatttggtttattaacccttgctccttgcatggctcattaggttcaaattataactaatttacattttcagctatatttactttttaaatgcttgagtttcccattttaaaatctaaactagacatcttaattggtgaaagttgtttaaactacttattgttggtaggcacatcgtgtcaagtgaagtagttttataggtatgggttttttctcccccttcaccagggtgggtggaataagttgatttggccaatgtgtaatatttaaactgttctgtaaaataaaaaaaaaaaaaaaaaa

SEQ ID NO: 7251 - DNA, 1400 bp, Homo sapiens
aggagatgctgaagctggtgaacggcaaccccgtggtgatgaaggacggcaagtgggtggtgcagaagtatattgagcggcccctcctcatctttggcaccaagtttgacctcagacagtggttcctggtaactgactggaacccacttaccgtgtggttctaccgcgacagctatatccgcttttccacgcagcccttctccctgaagaacctggacaactcagtgcacctgtgcaacaactccatccagaagcacctggagaactcatgccatcggcatccactgcttccgccagacaacatgtggtctagccagaggttccaggcccacctgcaggagatgggtgccccaaatgcttggtccaccatcatcgtgcctggcatgaaggatgctgtgatccacgcacttcagacctcccaggacaccgtgcagtgtcggaaggccagctttgagctctatggcgctgacttcgtgttcggggaggacttccagccctggctgattgagatcaacgccagccccacgatggcaccctccacagcagtcactgcccggctctgtgctggcgtgcaagctgacaccctgcgcgtggtcattgaccggatgctggaccgcaactgtgacacaggagcctttgagctcatctataagcagcccgtcaccacttccccagcctccacaccaaggcccagctgccttctccccatgtactccgacaccagggccaggtcctcagacgacagcacagcaagctggtgggcactaaggccctgtcgaccacaggcaaggccttgaggactctacccacggctaaggtcttcatttccctcccaccgaaccttgatttcaaggtggcacccagcatcctgaagccaagaaaggtgggcctcgacctgtgactcacacccagtggacagtgctgagcacggggtcagggctggagggcacaggcagagggcagctcccaggctggctggcaccccaagggaagagctggtctccctcagaagccccttcctccacagacttctgatcatctccctcttctcccctcctttcacaccgaggctcctgctctcctgtgcctccgaggcccccagctggaagtgccttgttgcctctgccctttgaagtcggaacaattcctagcacctgtcggaaggtcaaggccaaaggcaaattcaaggccagactgtgacaaacccagggctgaggcctgccccatgaagaggctgagccccctgaaacccctgccccttgttggtacattccagaggcgcaggggcctgggggatatgaagctagggaagcccctgcttcgattccccactgcccttgtcctggatccaacaccaaataaaaagaaacaagtgaagtaaaaaaaaaaaaaaaaaaaaa

SEQ ID NO: 7252 - DNA, 600 bp, Homo sapiens
gacgttgcctttaatatctgttgggaaggaaatgtccagacttttcaaatctcttattatatgtttcctttttttgtttacatagggaacaatgtttatagtcgtgtgtacagtgggggtctacaacaagaagtgtatattttcaaacaattttttaatgatttaacaatttttgtaaatcattttcaggcttctgcagctgtagattctcactgtgaatcccttgcttgctcatgcataagtgtatttgcaataccaaatatacaggtttagtatttttgcctgttagtgattgtttcacatgtgtaacgttttggttgagatgttaaatggtggacgagtactgtggatgtgaatgtgggaagtaattttaatcatatgtaattggtcacaaggcctaatttgcagtaactattgctgttttatttaacaatgccttgttgctttgtatgcattaatgtttggatgtaaagattgtgtgtctatccaacagggagccacagtatttaaattgaccaacctaatgttacaactactttgaggtggccaaatgtaaactaaaagccttaattaaagtggtgcaattttgtaaaaaaaaaa

SEQ ID NO: 7253 - DNA, 1400 bp, Homo sapiens
cgcttctacccgctgcgaatgcactgcatccgtgccctgacgctgctctcggggagctcgggggccttcatcccggtgctgcctttcatcctggagatgttccagcaggtcgacttcaacaggaagccagggcgcatgagctccaagcccatcaacttctccgtgatcctgaagctgtccaatgtcaacctgcaggagaaggcgtaccgggacggcctggtggagcagctgtacgacctcaccctggagtacctgcacagccaggcacactgcatcggcttcccggagctggtgctgcctgtggtcctgcagctgaagtcgttcctccgggagtgcaaggtggccaactactgccggcaggtgcagcagctgcttgggaaggttcaggagaactcggcatacatctgcagccgccgccagagggtttccttcggcgtctctgagcagcaggcagtggaagcctgggagaagctgacccgggaagaggggacacccttgaccttgtactacagccactggcgcaagctgcgtgaccgggagatccagctggagatcagtggcaaagagcggctggaagacctgaacttccctgagatcaaacgaaggaagatggctgacaggaaggatgaggacaggaagcaatttaaagacctctttgacctgaacagctctgaagaggacgacactgagggattctcggagagagggatactgaggcccctgagcactcggcatggggtggaagacgatgaagaggacgaggaggagggcgaggaggacagcagcaactcggaggatggagacccagacgcagaggcggggctggcccctggggagctgcagcagctggcccaggggccggaggacgagctggaggatctgcagctctcagaggacgactgaggcagcccatctggggggcctgtaggggctgccgggctggtggccagtgtttccacctccctggcagtcaggcctagaggctggcgtctgtgcagttgggggaggcagtagacacgggacaggctttattatttatttttcagcatgaaagaccaaacgtatcgagagctgggctgggctgggctggtgtggctgctgaagccccacagctgtgggctgctgaagtcagctccgcgggggagctgaccctgacgtcagcagaccgagaccagtcccagttccagggggaggcctgcaggcccctggccccttccaccacctctgccctccgtctgcagacctcgtccatctgcaccaggctctgccttcactcccccaagtctttggaaatttgttcttttcctttgaagtcacattttcttttaaaattttttgttttgcatccgaaaccgaaagaaataaagcggtgggaggcaggaaaaaaaaaaaaaaaaaaa

SEQ ID NO: 7254 - DNA, 1400 bp, Homo sapiens
ccctgatgccagcatcctcatcagcaatgtgtgcagcatcggggaccatgtggcccaggagctttttcagggctcagatttgggcatggcagaagaggcagagaggcctggggagaaagccggccagcacagccccctgcgagaggagcatgtgacctgcgtacagagcatcttggacgaattccttcaaacgtatggcagcctcatacccctcagcactgatgaggtagtagagaagctggaggacattttccagcaggagttttccaccccttccaggaagggcctggtgttgcagctgatccagtcttaccagcggatgccaggcaatgccatggtgaggggcttccgagtggcttataagcggcacgtgctgaccatggatgacttggggaccttgtatggacagaactggctcaatgaccaggtgatgaacatgtatggagacctggtcatggacacagtccctgaaaaggtgcatttcttcaatagtttcttctatgataaactccgtaccaagggttatgatggggtgaaaaggtggaccaaaaacgtggacatcttcaataaggagctactgctaatccccatccacctggaggtgcattggtccctcatctctgttgatgtgaggcgacgcaccatcacctattttgactcgcagcgtaccctaaaccgccgctgccctaagcatattgccaagtatctacaggcagaggcggtaaagaaagaccgactggatttccaccagggctggaaaggttacttcaaaatgaatgtggccaggcagaataatgacagtgactgtggtgcttttgtgttgcagtactgcaagcatctggccctgtctcagccattcagcttcacccagcaggacatgcccaaacttcgtcggcagatctacaaggagctgtgtcactgcaaactcactgtgtgagcctcgtaccccagaccccaagcccataaatgggaagggagacatgggagtcccttcccaagaaactccagttcctttcctctcttgcctcttcccactcacttccctttggtttttcatatttaaatgtttcaatttctgtatttttttttctttgagagaatacttgttgatttctgatgtgcagggggtggctacagaaaagcccctttcttcctctgtttgcaggggagtgtggccctgtggcctgggtggagcagtcatcctcccccttccccgtgcagggagcaggaaatcagtgctgggggtggtgggcggacaataggatcactgcctgccagatcttcaaacttttatatatatatatatatatatatatatatatataaaaatatataaatgccacggtcctgctctggtcaataaaggatcctttgttgatacgtaaaaaaaaaaaaaaaaa

SEQ ID NO: 7255 - DNA, 1400 bp, Homo sapiens
agatttgcaatcaactaaagaagagagatttccagcgatccacaagtcgattgctattggctctcagccagtgctcactgttgggacaacccacatatccaaattgacagatgaccaactcataaaagagtttcttagtggttcttactgctttcgtgggggtgtcggttggtggaaatatgaattctgctatggcaaacatgtacatcaataccatgaggacaaggatagtgggaaaacctctgtggttgtcgggacatggaaccaagaagagcatattgaatgggctaagaagaatactgctagagcttatcatcttcaagacgatggtacccagacagtcaggatggtgtcacatttttatggaaatggagatatttgtgatataactgacaaaccaagacaggtgactgtaaaactaaagtgcaaagaatcagattcacctcatgctgttactgtatatatgctagagcctcactcctgtcaatatattcttggggttgaatctccagtgatctgtaaaatcttagatacagcagatgaaaatggacttctttctctccccaactaaaggatattaaagttaggggaaagaaaagatcattgaaagtcatgataatttctgtcccactgtgtctcattatagagttctcagccattggacctcttctaaaggatggtataaaatgactctcaaccactttgtgaatacatatgtgtatataagaggttattgataaacttctgaggcagacatttgtctcgctttttttcatttttgttgtgtcttataaactgactgtttttctttgcttggatactgtgattccaaaataaatctcatccaagcaagttagagtccagcctaatcaaatgtcataattgttgtacctattgaaagtttttaaataatagatttattatgtaaattatagtatatgtaagtagctaatgaagtaaagatcatgaagaaagaaattgataggtgtaaatgagagaccatgtaaaatatgtaaattctagtacctgaaatcctttcaacagatttttatatagcaactgctctctgcaagtagttaaactagaaactgggcacatggtagaggctcacatgggagttgtcctcacccttgttaatctcaagaaactcttatttataataggttgcttctctctcagaacttttatctattacttttttcttcttatgagtatgtttactctcagagtatctatctgatgtagacagttggtgatgcttctgagactcagaatggtttactctaacaaaacactgtgctgtctatcccttgtacttgcctactgtaatatggatttcacttctgaacagtttacagcacaatatttattttaaagtgaataaaatgtccacaagcaaa

SEQ ID NO: 7256 - DNA, 1400 bp, Homo sapiens
taggtgctaccaccgctgccgtcgccgccgccattttgatggcaggaagagtccggttctgggacagctggagacagtggtggtgactgaaataactttaccaaaggaaagctattttgcgaactatcttctccagcggagatggccaatgtgctttgtaacagagccagactggtttcctatctcccaggattttgctctttagttaaaagggttgtcaatcccaaagccttttcgactgcaggatcatcaggttcggatgagtctcatgtggctgctgcacctccagatatatgctctcgaacagtgtggcctgatgaaactatgggaccctttggacctcaagatcagaggttccagcttcctgggaacataggttttgattgtcacctcaatgggactgcttcacagaagaaaagcctggttcataaaactttgcctgatgttctagcagaacctttatcaagtgaaagacatgagtttgtgatggcacaatatgtgaatgaatttcagggtaatgatgcacctgttgaacaagaaattaacagtgcagaaacttactttgaaagtgccagagtagagtgtgcaatacaaacatgtccagaattgctgcgaaaagattttgaatcactgtttccagaagtagctaatggcaaactaatgattctgactgtaacacaaaaaactaagaatgatatgactgtttggagtgaagaagtagaaattgaaagagaagtgctcttagaaaagttcatcaatggtgctaaggaaatttgctatgctcttcgagctgagggttattgggctgactttattgacccatcatctggtttggcattttttggaccatatacaaacaacactctttttgaaactgatgaacgctaccgacatttaggattctctgttgatgaccttggatgctgtaaagtgattcgtcatagtctctggggtacccatgtagttgtagggagtatcttcactaatgcaacaccagacagccatattatgaagaaattaagtggaaattagcagaaatatccattcatttgctgtactatttgtatgtaatatttgggttgatctataaacactgtcagactaaagtttttaaaatatacttatttctaagtatttatttcagcatttatgaatttgcaacattggcaagtgatttgggattttaaaattgcaaatgttcatttattcatatcattgaatacacgttgaacacatccacattgtataggatgtggtaattagcttgtaaccagggtatgatctgctattgttatttctcctctttattggaaaaaggcctcagttttaattattttcttcccaaaataaatcacacatttggttacaaaaaaaaaaaaaaaaaaaaaaaaaaaaaaaaa

SEQ ID NO: 7257 - DNA, 600 bp, Homo sapiens
tgaggtcacagatgttgaagttggaatctcgctccttcccctgactaccatcctaggctgggctcaagactagtgaggcctgtccccaccatccctggccttgttgtggggctcaggaactcagagtcccagtgttgagtctgggagcactaggtcttcatagttccaggcccagagctacagctgggctgggagcatgtgtgtgcactgtaagaaggagctgatgatactggccacgtgctggggttcgctcatgtggacacagtgattgcctgggacttccacaaactggaactgctctttgagggtggatttcatcgtgtctatcatgaacgacagggactccttctcagagtaattctgtcttgaatcaaaatatccgtggactgctttgatcaacaggacatggcctgcagcttcctgatggaatgcgcacacagctccctgctgatgaagtcaatgctgttctctgcccaggcgagcctctggtctctgttcagaaccagacctgtgggcaccttcgtggttcctctttgcaggagaactccccgcactcctcactcaagtggctattgctcttcagtaacctctgcagcagct

SEQ ID NO: 7258 - DNA, 1400 bp, Homo sapiens
ggcggcgaggcccaagaaataagaagcggggctggcggcggcttgctcaggagccgctggggctggaggttgaccagttcctggaagacgtgcggctacaggagcgcacgagcggtggcttgttgtcagaggccccaaatgaaaaactcttcttcgtggacactggctccaaggaaaaagggctgacaaagaagagaaccaaagtccagaagaagtcactgcttctcaagaaaccccttcgggttgacctcatcctcgagaacacatccaaagtccctgcccccaaagacgtcctcgcccaccaggtccccaacgccaagaagctcaggcggaaggagcagctatgggagaagctggccaagcagggcgagctgccccgggaggtgcgcagggcccaggcccggctcctcaacccttctgcaacaagggccaagcccgggccccaggacaccgtagagcggcccttctacgacctctgggcctcagacaaccccctggacaggccgttggttggccaggatgagtttttcctggagcagaccaagaagaaaggagtgaagcggccagcacgcctgcacaccaagccgtcccaggcgcccgccgtggaggtggcgcctgccggagcttcctacaatccatcctttgaagaccaccagaccctgctctcagcggcccacgaggtggagttgcagcggcagaaggaggcggagaagctggagcggcagctggccctgcccgccacggagcaggccgccacccaggagtccacattccaggagctgtgcgaggggctgctggaggagtcggatggtgagggggagccaggccagggcgaggggccggaggctggggatgccgaggtctgtcccacgcccgcccgcctggccaccacagagaagaagacggagcagcagcggcggcgggagaaggctgtgcacaggctgcgggtacagcaggccgcgttgcgggccgcccggctccggcaccaggagctgttccggctgcgcgggatcaaggcccaggtggccctgaggctggcggagctggcgcggcggcggaggcggcggcaggcgcggcgggaggctgaggctgacaagccccgaaggctgggacggctcaagtaccaggcacctgacatcgacgtgcagctgagctcggagctgacagactcgctcaggaccctgaagcccgagggcaacatccttcgagaccggttcaagagcttccagaggaggaatatgatcgagcctcgagagagagccaagttcaaacgcaagtacaaggtgaagctggtggagaagcgggcgttccgtgagatccagttgtagctgccatcagatgccggagactcgcccttcaataaaaaatctcttctagctgaaaaaaaaaaaaaaaaaaaa

SEQ ID NO: 7259 - DNA, 600 bp, Homo sapiens
  misc_feature (262)..(262): n is a, c, g, or t
  misc_feature (382)..(382): n is a, c, g, or t
cacaccacacacatacatacacactctctcactctgtctctcttacctttagctgcttgatcattaagccatccaacttcatgccagttcccttctttatagaagagtgaagggaaagacttcctgggtttgacttaaaccttgtccaccttcttgatattttaggattgaggaataaagtcattaatctaaggaactgattacagtggctggagcttgggcacttgtcttatcactggtcactgagtctgaaagtcccagntgaattcttgcccttaagtgcttttgctgctatttttttgcccccagttccacaagatccaaccaagaattctgtatcctggcaacagtcagattcttctaaatcagccagcaagagggnaaagagtgagagatggtattcccagatcattcttcctcctgcccctttcccagcagctctagaccagatgttggctgctgtacttactccctgaggtagggaatgtgtggtgatcgagtggtctgtgttcctattgctggtggggtgatagggtgggctaaaaaccatgcactctggaatttgttgtattttctcccagtaaagcttttcttctcccg

SEQ ID NO: 7260 - DNA, 1353 bp, Homo sapiens; identical to SEQ ID NO: 2025

SEQ ID NO: 7261 - DNA, 600 bp, Homo sapiens
gtcagtgtctctaagattgtggtgcacaaggactggaactccaaccaggtctccaaagggaacgacattgccctgctcaaactggctaaccccgtctccctcaccgacaagatccagctggcctgcctccctcctgccggcaccattctacccaacaactacccctgctacgtcacaggctggggaaggctgcagaccaacggggctctccctgatgacctgaagcagggccggttgctggttgtggactatgccacctgctccagctctggctggtggggcagcaccgtgaagacgaatatgatctgtgctgggggtgatggcgtgatatgcacctgcaacggagactccggtgggccgctgaactgtcaggcatctgacggccggtgggaggtgcatggcatcggcagcctcacgtcggtccttggttgcaactactactacaagccctccatcttcacgcgggtctccaactacaacgactggatcaattcggtgattgcaaataactaaccaaaagaagtccctgggactgtttcagacttggaaaggtcacagaaggaaaataatattatataaagtgacaactatgcaaatcac

SEQ ID NO: 7262 - DNA, 600 bp, Homo sapiens
tcttacatattaaagaaaagttacttactgtatttatgaaatactcagcttaggcatttttactttaacccctaaattgattttgtaaatgccacaaatgcatagaattgttaccaacctccaaagggctctttaaaatcatatttttttattcatttgaggatgtcttataaagactgaaggcaaaggtcagaatgcttacgggtgttatttttataagttgttgaattccttaatttagaaaagctcattattttttgcacactcacaatattctctctcagaaatcaatggcatttgaaccaccaaaaagaaataaagggctgagtgtggtgctcacgcctgtaatcccagcactttggggagcccaggcgggcagattgcttgaacccaggagttcaagaccagcctgggcagcatggtgaaaccctgtatctacaaaaaatacaaaaattagccaggcatggtggtgggtgcctgtagttccagctacttgggaggctgaggtgggaaaatgacttgagcccaggaggaggaggctgcagtgagctaagattgcaccactgcactccaacctgggtgacaagagtgaaactgaat

SEQ ID NO: 7263 - DNA, 1400 bp, Homo sapiens
ttttcaagttcatgaccttattaaaatgaacttgtgtttttttaacaaacgtctattttattttgatagtttctttccgaagataattgaaatattatactgtaacccttttcttttcttttttgaaaagtccaagaatgtacttatacaggatttttccccacctatttttggccattctcataccacagacaaaagagtgaatgattgtcattgtagcttattgtttatcagtagttcttttgtagctgcttacattttttctttcatggtttgtgaatcatttcagtatgtaatttataggaaccttgtcctctggtatagtagactgtgtgccctcctccaggatggcattattagacatgctggtcatttaccctcagaaagactctcttatagaatggtgagtgcttcagttatagtatgtttgaattttaaaaaattcctgtttagaatgtatctatgctctcatgactatgcagtttctaacatacacatagaagctgagtctctgatccaatatgtttttatttgttccattaatttatcacatagattgggaaggcaagctaaaagccttaaaaatgccctttatattttgagtgatttcagcgttgaacacagtatactatctaaatttgctgctcactttcttaaactgttgcaattaaaggcatgtttatacatgactaatcgtgaaatgtttgtcactcttactgcacagacttatctgcaatcaaactggttagtttttttgttttgttttgttttattgtttttaatgaatctggtaccatctgtgctttcacaaaaaacttccaatgccatttttgagaactaacctaacagtcatgctaaccagaaaatccactggggaggaggttcctttgaaacaaaatgctgttcagttagtaaccaagttactttgattgcaaaagcagctgtgtttctgataagtactgaacaaatgtgtgtaattttctgtgccagacttatgactttgttttcaagcactgtaatgtgggatggatggttagaaacaataatatatagggtttctgttaaccctttcaggactcaactgtatctccttttgttaattttcccctgtgttgtgataaattgtttgccagcattcagtactgtgttggtgcagatgaggtttatatctcattttagcttatttcttgtacctttcagcatgcctacgcattcagtccttaaggggtttattttacaaactgtgcgcctgaagtttattagcaataagatagaaaatgagcaagtttataccataattttgagaaaaaaagaatctgctcagttccatatttcatccgtgaaaaacttgcaatacgagcagtttcaaggaataaataaaaaggaaatgaaaccattgt

SEQ ID NO: 7264 - DNA, 1400 bp, Homo sapiens
ggcactaccctgaagaactgtaggcatctcttggaatgtgctaaggaacttgatgtccaaataattggggttaaatttcatgtttcgagtgcttgcaaagaatctcaagtatatgtacatgctctatctgatgctcgatgtgtgtttgacatggctggagaaattggctttacgatgaacatgttagacattggtggaggattcacgggaactgaatttcaattggaagaggttaatcatgttatcagccctctgttggatatctactttcctgaaggatctggtgttaagataatttcagaacccggaagctactatgtgtcttctgcatttacactcgcagttaatatcatagcaaagaaagttgttgaaaatgataaatttccctctggagtagaaaaaaccggaagtgatgaaccagccttcatgtattatatgaatgatggtgtttatggttcttttgcaagtaaactgtctgaggacttaaataccattccagaggttcacaagaaatacaaggaagatgagcctctgtttacaagcagcctttggggtccatcctgtgatgagcttgatcaaattgtggaaagctgtcttcttcctgagctgaatgtgggagattggcttatctttgataacatgggagcagattctttccatgaaccatctgcttttaatgattttcagaggccagccatttattacatgatgtcattcagtgattggtatgagatgcaagatgctggaattacttcagactcaatgatgaagaacttcttctttgtgccttcttgcattcagctgagccaagaagacagcttttccgctgaagcttaaacaggcattaacgcttctttagatctgaagttgcaggttaagcttgtctggtcaacattccagtgtggaaaaataatttaaacaatcttattctcttaattcttttggcaacaaaaactattagtaatagctatttgggaccagacaaaatcagctttcatctataattcattggggataatgggagatttagataatgtatccagatttaaacctaccagtttgtcctaccccttaagcgtttaaaataaaatatgcaacaaaatggatgacttagtggagatggaagcccattaattgggttccccattaaatcgtttacatacaagaacacagtttttatactaaggatttgtgtttaaagtcttgtaaagttcatgtctttcacccagatatatcaaatgttagaagaccagtgtgacttcattagataacgtttagtgtatttagaatgtgtaaatttgtgctttgaactgtagtttaataaatgtaaaattgcatcatagtatttgttgacctaatgtaacccttgtatgattgcaataaaattttgtgtagatttt

SEQ ID NO: 7265 - DNA, 600 bp, Homo sapiens
  misc_feature (54)..(54): n is a, c, g, or t
  misc_feature (171)..(174): n is a, c, g, or t
  misc_feature (241)..(241): n is a, c, g, or t
  misc_feature (445)..(446): n is a, c, g, or t
  misc_feature (582)..(583): n is a, c, g, or t
tatcaaaccatgtagaacaaacggctgtctgccaactggtagaggcaaagcagncaataatctggaattccgatcaacaaaatggtatttgttctcatactatgataaagacatacttgagaccgcattatttatggggaaaagaagtttaattgactcacagttccacannnngtacaggaggtcatggctagggaggcctcaggaaacttagaatcatggtggaaggtgaagaggaagnatgcaccatcttcacatggcagagcaggagagagagagcaaagttggaagtgctacacacttttaaacaaccagatctcttgagaactcactcactatcacaagatagcaagggagaaatccacccccatggtccaatcatcttccaccaagcccctcttccaaccttgggtattacaattgaatcatgagatttgggtggggnnagaaaagcaaaccatatcagagattgaatcaataatccaaagcctttcagcaaagaaaagcctgcaaccagatgttttactagtgaattccacaaacatttaaaaaatataaatgccaatacttttcaagctcctnnaaaaaattgaaaagggc

SEQ ID NO: 7266 - DNA, 600 bp, Homo sapiens
gtttgcatacatgtcttcctgcccggaaagcagttgaagcaactcaagtttgcagaaccaataaagactgtaaaaaaagctcaagttcaagtttctgtataataccttctttggaaactcacactcgcttaataaaagtaaaacacccacctcagattgatatgttatacgtaggacatcctctgcatcttcactacacagtgagcatcaccagttttatcccacgttttaactttctaagcatagatctgccagtggttgtggagacatttgtcaagtacctgatttccctctcaggagctctggctattgttaatgcagtaccctgctttgctttggatggacaatggattctaaactctttcttggatgccacccttacctcagtgattggagacaatgatgtcaaagatctaatagggtttttcatcttgctgggtggcagtgtacttttggctgccaatgtgaccctgggactctggatggttacagcacggtaatgtttgcactcatctgacagaatccctgagttacagtatacagctatgtggtaatattcattgccattgaaattcttacttggtatgaaatataaagtgt

SEQ ID NO: 7267 - DNA, 1400 bp, Homo sapiens
actaagacaagtaaaactataccctctgaaaaactaaattcatccaagcaagaaaaaagtaaatcaggtgaaaaaataaccaagaaagaacttgaccaattagattctaaatcgaaatcgaaatcgaaatcaccctcacctttgaaaaacaaattatctcacacaaaagacttgaaaaatcaagaatcggaaagtatgaggttgtctgatatgaacaagagagatccaagattaaaaaaacatcttcaggataagaccgatggcaaagatgatgatgtgaaagagaagagaaaaactgcagaaaaaaaggataaagatgagcacatgaagtcatccgaacacagactggctggaagtagaaataaaatcataaatggcattgtacaaaaacaggatacaataacagaagagtcagaaaaacaggggacaaaaccagggagatcgagtactagaaagcgatcaagatctcgatcacccaagtctaggtcaccaattatacattccccaaagagaagagataggcggtcacccaaacgaaggcaaagaagtatgtctccaacatcgacacctaaagctggaaagattcgccaatctggagctaagcagtcacatatggaagagtttacaccaccttctagggaagacagaaatgctaagagaagtactaaacaggatattcgggatccaaggcgaatgaaaaagactgaagaggagcgaccacaagaaactacaaatcagcattctacaaagtcaggcactgaaccaaaggagaatgtagaaaactggcaaagttccaagtctgccaaaagatggaaatctggttgggaagaaaataaaagcttacaacaggttgatgaacatagtaaacctcctcatctgaggcatagggagagctggtcaagcactaaaggaattttatcacctcgagccccaaagcagcaacagcatcgattaagtgtagatgccaatcttcagattcctaaagagttaactcttgcaagcaaaagagaattacttcaaaagacgagtgaacgtttagcatctggtgaaattacacaggatgacttccttgttgttgtgcatcaaattcgacagctatttcagtatcaagaaggtgtgcgagaagagcagagatctccattcaatgatcgtttccacttaagcgacctcgatatgaagattcagataaaccatttgtagatagtccagcatcaagatccgccggcctggatacaaatcagcgacttacagctttagctgaagacagaccgttatttgatggacctagtaggccatcagtagcaagagatggcccaacgaagatgatttttgaaggacccaataaattaagccctcgaattgatggactccggaaaaaaaaaaaaaaaaaaaaaaaaaaa

SEQ ID NO: 7268 - DNA, 600 bp, Homo sapiens
atttttgggccaaaatctatctgtacgcactggaagatatcgctctattctccagttggtcaagccatggtatgatgaagtgaaagattatgcttttccatatccccaggattgcaaccccagatgtcctatgagatgttttggtcccatgtgcacacattatacgcagatggtttgggccacttccaatcggataggatgcgcaattcatacttgccaaaacatgaatgtttggggatctgtgtggcgacgtgcagtttacttggtatgcaactatgccccaaagggcaattggattggagaagcaccatataaagtaggggtaccatgttcatcttgtcctccaagttatgggggatcttgtactgacaatctgtgttttccaggagttacgtcaaactacctgtactggtttaaataagtttaccttttcctccaggaaatataatgatttctgggaacatgggcatgtatatatatatatggagagagaattttgcacatattatacatattttgtgctaatcttgttttcctcttagtattcctttgtataaattagtgtttgtctagcatgtttgtttaatcctttgggaattc

SEQ ID NO: 7269 - DNA, 600 bp, Homo sapiens
gtatttttagtagggacggggttttaccatgttggtcaggctggtcttgaactcctgacctcatggtctgcctgcctcggcctctcaaagtgctgggattacaggcgtgaaccactgcgcccggcctgttgtgggttttgaatgacatactatgttgacagcgtcttgctgggcctgcagctgggtggggaagaagtcctcattccgcacatactgttgtccacacacaccatagcgctttccgacaccatcctgccaccctcctccctcccatttcttgaaataatccttcatgtataacttaggttaatagtgcctcatagtctacttagaaagaatcagatagaattttctttagtaaggaaatttccaaatagagaatagaaaagttaattgatggcaatgtatttaatagcgaggatcagtgaggaaatgaattaaagaggttccttttacacttttcttctctgaagctaggtacaccttagttcatgttgcagcttctttggtgctgtcagatcatagttggtatgaaatgggaagtttctgaaagtcagatgacacatttgtgaaatgcaacctcactgttatctacccggc

SEQ ID NO: 7270 - DNA, 600 bp, Homo sapiens
taggaaacccttaaaacacacatgggattctctggtcacagttttgggttcaggctatgctgctttgggcaggtggagcaccccccgaggaagcctgcaagtccagggcacaggctgccttttggagggagggctggcccataggtgctgctggctccccgccaccagctgggcctcagccctcacggcattcctgctgagcaccgtggggcacccagggagcaggggcgtcagggatcctgctgccggcacccctgtgccgctggcatgagggccgtgtccccactgtgaaggatgaagagcaaggccctcaggacccgtgtcctcagagcaccacacactgagcacccagagacagcgggcttggcagcgggccgggccatgcagggagcgcctccctatgttgcctgccactctgggcaccggccagcaccctctggtgagaagaggtcccccctttttatgtgcactaccccaccatctgtgattataataaatttattattcctgtggaaaaaaaaaaaaaaaaaaaaaaaaaaaaaaaaaaaaaaaaaaaaaaaaaaaaaaaaaaaaaaaaaaaaaaaaaaaaaaaaaaaaaaa

SEQ ID NO: 7271 - DNA, 600 bp, Homo sapiens
ttgtgataatttgcaacatagtaagaaggggaaaactgcgcaggggttaagccccgtggaccaaaggaaatgtgaacgtcttctgctttacctctattgccatgaattaagtattgaattccaggagcctgttcctgcttcgataccaaactactataaaattataaagaaaccaatggatttatccaccgtgaaaaagaagcttcagaaaaaacattcccaacactaccaaatcccggatgactttgtggccgatgtccgtttgatcttcaagaactgtgaaaggtttaatgaaatgatgaaagttgttcaagtttatgcagacacacaagagattaatttgaaggctgattcagaagtagctcaggcagggaaagcagttgcattgtactttgaagataaactcacagagatctactcagacaggaccttcgcacctttgccagagtttgagcaggaagaggatgatggtgaggtaactgaggactctgatgaagactttatacagccccgcagaaaacgcctaaagtcagatgagagaccagtacatataaagtaaaatgacatggatttaaatgaattgtttaaaaaaaaaaaaaa

SEQ ID NO: 7272 - DNA, 600 bp, Homo sapiens
cttccaaacctgttgaggttcattttgcatcactcagaccctgcttccagcccccagaatgtggctaactctcctaccaaggagtgtcttcagagcgaggcagtcttacagcgggggcacatctcccacttggagagagagatccagaaactgagagcagaaataagcagcctccagcgagcacaagtgcaggtggagtcccagctctccagtgcccgcagagatgagcaccggctgcggcagcagcagcgggccctggaagagcagcacagcctgctccacgcacacagtgagcagctgcaggccctctatgagcagaagacacgtgagctgcaggagctggcccgcaagctgcaggagctggccgatgcctcagaaaacctccttaccgagaacacgtggctcaagatcctggtggcgaccatggagaggaaactggagggcagggatggagctgaaagcctggcggcccagagagaggtccaccccaagcagcctgagccctcagccaccccccagctccctggcagctcccctccacctgccaatgtcagcgccacactggtgtctgaaaggaataaggagaacaggacagactaa

SEQ ID NO: 7273 - DNA, 1400 bp, Homo sapiens
cagcgtcgtagaaactggaaattgaaagagcttgcaagagagagagaaaacatggatacagatgatgaaaggcaataccaagattttcttgaagatcttgaagaagatgaggcaattcgaaaaaatgtcaacatttacagagattcagccatccctgtggaaagtgacaccgatgatgaaggagcacctcgaattagtctggctgagatgcttgaagaccttcatatttcccaagatgccactggtgaagaaggtgcatcaatgctgacataatgagatgttgtagactgtttccatacatgggcttaagaagttggacagagttaccttaagtgtctctactatctttgcctccagatttcaagaggagaaatttagttttaaacctgaataaacatgtttgttttcagtgctcactcaaaccactaaaacagatggatagctttgaggttttagataaggaaagattatggagaatgtagttgttattgatttttggcaattttacatttggaattttatcactgtgcttttttatatgaggcactgtagtattttcacatagtatagtactctggatgtaaaagctcaaaaattgtgattccttgaacgttcactaaatcttcaagcaaaaacacatttttacattatttttacgttgattattttagtgaaagaccatatgaagaagcatttttaatattaacttgttacatactttgatccactttacatcatttttatgttgttgaggtagggaaattagggttcagtttatcactggacattcaggaggcaagtcaatcttttttatttccttataaaattaactcttcaaaagccgttaaacagagagttatcttaatttttattgcagtaggaggaaatatatttaaaatatttgtagatttatagcaaatagagactcgttatttaaaggttaaataacaatttgttcttttgttgtttttgccagtttagggcagtagctgcttttgtcataaatatcttcctaccacatcaaaaatgctgcttttaaaatttttgtttataaattgagaaggaattttctctctataagtttctgtcattgaacagatcaccattaaaaagaatattagaatccagcatgaagataatggctaataaaaatgaggtacatactttataaaaccattaatcagatttgaatgaggaatgcttcccacatccttgaaagaaaaactgtggcttacgttttgaagtattctgagaatgaagtattaagatccaatttctataagcaagatcagacttgttaagtatgccgcaagtaagagctaattcattcattccatgtgtgccactaaataaagagattgagcaagtgcaaaaaaaaaaaaaaaaaaaaaaaaaaaaaa

SEQ ID NO: 7274 - DNA, 1400 bp, Homo sapiens
aactgatggaaggcagtgacttaaattactatttcaattggataaaaactcagctgagttcacagaaactgcgtggtagcggtgttgctgttgaaacaggaacagtctcttcaagtgatagttcgcagtatgtgcagtgcgtggccgggtgtttgcagctgatgctccgggtcaatgagtaccgctttgcttgggtggaagcagatggggtaaattgcataatgggagtattgagtaacaagtgtggctttcagctccagtatcaaatgattttttcaatatggctcctggcattcagtcctcaaatgtgtgaacacctgcggcgctataatatcattccagttctgtctgatatccttcaggagtctgtcaaagagaaagtaacaagaatcattcttgcagcatttcgtaactttttagaaaaatcaactgaaagagaaactcgccaagaatatgccctggctatgattcagtgcaaagttctgaaacagttggagaacttggaacagcagaagtacgatgatgaagatatcagcgaagatatcaaatttcttttggaaaaacttggagagagtgtccaggaccttagttcatttgatgaatacagttcagaacttaaatctggaaggttggaatggagtcctgtgcacaaatctgagaaattttggagagagaatgctgtgaggttaaatgagaagaattatgaactcttgaaaatcttgacaaaacttttggaagtgtcagatgatccccaagtcttagctgttgctgctcacgatgttggagaatatgtgcggcattatccacgaggcaaacgggtcatcgagcagctcggtgggaagcagctggtcatgaaccacatgcatcatgaagaccagcaggtccgctataatgctctgctggccgtgcagaagctcatggtgcacaactgggaataccttggcaagcagctccagtccgagcagccccagaccgctgccgcccgaagctaagcctgcctctggccttcccctccgcctcaatgcagaaccagtagtgggagcactgtgtttagagttaagagtgaacactgtttgattttacttggaatttcctctgttatatagcttttcccaatgctaatttccaaacaacaacaacaaaataacatgtttgcctgttaagttgtataaaagtaggtgattctgtatttaaagaaaatattactgttacatatactgcttgcaatttctgtatttattgttctctggaaataaatatagttattaaaggattctcactccaaacatggcctctctctttacttggactttgaacaaaagtcaactgttgtctcttttcaaaccaaattgggagaattgttgcaaagtagtgaatggcaaataaatgttttaaaatct

SEQ ID NO: 7275 - DNA, 982 bp, Homo sapiens; identical to SEQ ID NO: 2040

SEQ ID NO: 7276 - DNA, 600 bp, Homo sapiens
attgagaggcagatttaccatcatgtgactggaagatatgcagcttatcatgatcttccaatgtcttaaatcagtcaccagttccagaaaagttctttacgacaatgtttaaaaattatttttctacgtaattgctaaaattatttaattaaaaaattgggcagtaggtaactggcattcctctctttaaaatttctaccgaacttaatggaatggaaaaagcaaactcatccacatgtggtactcatttcaggcacatctgaaatgatcttaattactagaagatctgcactattaactttgtgaagagtttctcctaaaaactttaagtaaaatgttaatggtagctttgataacatcaaattctaagggagaaaaaaacaatattaaaccgcccaagcagtgtgccctagcagaggaaaatgcaacatctcgcaagcgctgctgtaacgacttcaggagtcactgattcagcactaatttcctgctgtgaaaactcatctttcatttttgccgtggataggcgcttttattaattgttgtcctaatgaaatttctgacattgtcatatacaacgatgaatatcattaaaatttttaa

SEQ ID NO: 7277 - DNA, 979 bp, Homo sapiens; identical to SEQ ID NO: 2042

SEQ ID NO: 7278 - DNA, 600 bp, Homo sapiens
tgacaacatcaacatgacccactacatccagcacctgtcatttggggaggactatccaggcattgtgaaccccctggaccacaccaatgtcactgcgccccaagcctccatgatgttccagtactttgtgaaggtggtgcccactgtgtacatgaaggtggacggagaggtactgaggacaaatcagttctctgtgaccagacatgagaaggttgccaatgggctgttgggcgaccaaggccttcccggagtcttcgtcctctatgagctctcgcccatgatggtgaagctgacggagaagcacaggtccttcacccacttcctgacaggtgtgtgcgccatcattgggggcatgttcacagtggctggactcatcgattcgctcatctaccactcagcacgagccatccagaagaaaattgatctagggaagacaacgtagtcaccctcggtgcttcctctgtctcctctttctccctggcctgtggttgtcccccagcctctgccaccctccacctcctcggtcagccccagccccaggttgataaatctattgattgattgtgatagtaaaaaaaaaaaaaaaaaaaaaaaaaaaaa

SEQ ID NO: 7279 - DNA, 1400 bp, Homo sapiens
tgtctctatgggtacctcagtggagtcattgggcgactgggccatgctgtttgccagtggaggcttccaggtgaaactctatgacattgagcaacagcagataaggaacgccctggaaaacatcagaaaggagatgaagttgctggagcaggcaggttctctgaaaggctccctgagtgtggaagagcagctgtcactcatcagtggttgtcccaatatccaagaagcagtagagggtgccatgcacattcaggaatgtgttccagaagatctagaactgaagaagaagatttttgctcagttagattccatcattgatgatcgagtgatcttaagcagttccacttcttgtctcatgccttccaagttgtttgctggcttggtccatgtgaagcaatgcatcgtggctcatcctgtgaatccgccatactacatcccgctggttgagctggtcccccacccggagacggcccctacgacagtggacagaacccacgccctgatgaagaagattgggacagtgccccatgcgagtccagaaggaggtggccggcttcgttctgaaccgcctgcaatatgcaatcatcagcgaggcctggcggctagtggaggaaggaattcgtgtctcctagtgacctgggaccttgtcatgtcagaagggttgggcatgcggtatgcattcattggacccctggaaaccatgcatctcaatgcagaaggtatgttaagctactgcgacagatacagcgaaggcataaaacatgtcctacagacttttggacccattccagagttttccagggccactgctgagaaggttaaccaggacatgtgcatgaaggtccctgatgacccggagcacttagctgccaggaggcagtggagggacgagtgcctcatgagactcgccaagttgaagagtcaagtgcagccccagtgaatttcttgtaatgcagcttccactcctctcattggaggccctatttgggaacactgcaagcccttaatcagccctctgtgacataggtagcagcccacggagatcctaagctggctgtcttgtgtgcagcctgagtggggtggtgcaggccggtagtctgcccgtcactttggatcatagccctggcctggcggcacagcagcacttgcgttctcggggctgtcgatttcctgccacctgggcagataacctggagatttccaccttttcttttcagcttgattgcatttgactatattttacagccagtgattgtagtttcatgttaatatgtggcaaaatatttttgtaattattttctaatccctttctgagtactctggggccctgcatttatgaggcacctaccttcatttttaacgcttattctgaataaaagtttttgattccttaaaaaaaa

SEQ ID NO: 7280 - DNA, 1400 bp, Homo sapiens
ctctgtggttcaggactcccgacttgacacgatattttttgctaagcaggtaattaataatgcttgtgctactcaagccatagtgagtgtgttactgaactgtacccaccaggatgtccatttaggcgagacattatcagagtttaaagaattttcacaaagttttgatgcagctatgaaaggcttggcactgagcaattcagatgtgattcgacaagtacacaacagtttcgccagacagcaaatgtttgaatttgatacgaagacatcagcaaaagaagaagatgcttttcactttgtcagttatgttcctgttaatgggagactgtatgaattagatggattaagagaaggaccgattgatttaggtgcatgcaatcaagatgattggatcagtgcagtaaggcctgtcatagaaaaaaggatacaaaagtacagtgaaggtgaaattcgatttaatttaatggccattgtgtctgacagaaaaatgatatatgagcagaagatagcagagttacaaagacaacttgcagaggaggaacccatggatacagatcaaggtaatagtatgttaagtgctattcagtcagaagttgccaaaaatcagatgcttattgaagaagaagtacagaaattaaaaagatacaagattgagaatatcagaaggaagcataattatctgcctttcattatggaattgttaaagactttagcagaacaccagcagttaataccactagtagaaaaggcaaaagaaaaacagaacgcaaagaaagctcaggaaaccaaatgaagatgttttcagatatgtacacatttctgcttctgcacatattttcatggaaaccattatgtataaagaacttagagcaacatcctaattggctcagtgcacgtttggcaatagtgccagcctgtcttgtctttaatgcatggattcataaacttcttccctacctgcatcatgtgcatgtagtgcatattaaatgaaagtgatattaagaatgctttcccaaattccattatttgacattgagtctgacaactgttagttttctggttgtccaactaccatatgaagctagaaaatgcacaaacgatattccttatctgtaatttaaatacttaaaatttgcaattgtcagatcttgattaaactggttgtcttatttcttctcatcattaacggaaaaaaaatcagtatttctatctttgatatctaagtgttttgaggattttaaaactgaattttatctgctataccagttatttgagaaagtatgattttaatgtaaatcatttaaaaaggacaaaagtataatttccagtgattttcactgctgtcagtagaaaagtaataaacatctcaattttaaaaaaaaaaaaaaaaaaaaaaaaaa

SEQ ID NO: 7281 - DNA, 600 bp, Homo sapiens
tggcctgtgcctgtaaacccagctactcaggaggttggggcagaattgcttgaacccagggggcagaggttgcagtgagccgagattgcacccctgcactccaggctgggcaacagtacgagactctgttccaaaaaaaataaaaaagaacagcctttttaggccacagtgacctgcgcaatgtttatatgctttgacctactaactttctcctaactaaatatttgattttaggagagtgtttaaataaattacagtatgtctatatgatgaaatgttattttgccattaaaattttgtttacaaagataatttttattgacataaaaataactttaatgtaatttatgttgaaaaagctgaatacaagtctttatatagagtaatatttgagctgtgttcaaaaatacataggaaaagactgataaaatgaaatatggcaaaatgttaatagttttccctggaataggataataggcaattttaaaacagactcctttaaaaaaacaaacaaacaaaaaaaacatagacttctttatatcttttgagctccctcccttttattatgtaatgaatatgtgttgcttttgtaataggaaa

SEQ ID NO: 7282 - DNA, 600 bp, Homo sapiens
gagtctccaaccttcaggaattccgttacggcctagaaggcgggctgtactgatgacacccttctctgagccttcccacctgcggggtggaggaggaacttcccaagtgcttttaaaaataacttctttgctgaagtgagaggaagagtctgagttgtctgtttctagaagaaacctcttagagaattcagtaccaaccaagcttcagcccactttcacacccactgggcaataaactttccatttccattctcctagctggggatggggcatggtcaaacttagccatcccctcctcagcaaggcatctaccggcccctcacagagacagtactttgaaactcatgttgagattttaccctctcctccaaccattttgggaaaattatggactgggactcttcagaaattctgtcttttcttctggaagaaaatgtccctcccttacccccatccttaactttgtatcctggcttataacaggccatccatttttgtagcacacttttcaaaaacaattatataccctggtcccatctttctagggcctggatctgcttatagagcaggaagaatcaagccaccaacttttacctaaaa

SEQ ID NO: 7283 - DNA, 600 bp, Homo sapiens
ttaacaggagccagacatatggaaagtgagaaacttgctcaaatattggcagctagacagttagaaattaaacagattccatctgatggccactgtatgtataaagccattgaagatcaactgaaagaaaaggattgtgctctgactgtggttgccttgagaagtcagaccgctgagtatatgcaaagccatgtggaagactttctgccatttttaacaaaccctaatacaggagatatgtatactccagaagaatttcagaagtactgtgaagatattgtaaacacagctgcatggggaggtcagcttgagctaagagctctgtctcacattttacaaacaccaatagagataatacaggcagattctcctcccattatagttggtgaagaatattcaaaaaaaccactaatacttgtatatatgagacatgcatatggcttaggagaacattataattcggttacacggttgggtaaacatagttactgaaaattgcaggctaatttattacaatgttgtacaattatgtttttaatacagtgtggctggaactgagtattttctacccagtgttggggttgtttcttaaatgctact

SEQ ID NO: 7284 - DNA, 1400 bp, Homo sapiens
ttgcagtgaacactgagtcagtaaaaaaaaaaaacagaaacaaaaacccagcctcattcagatacagaacttcagggacccctccccccacccccccagttaatgctgctgtgaaaaatgcaaaataacctggttctgactttgtgatcactcatgtcccatacactgaactttgtttttttctggacaatctcaggttctcagaattgaaacattcagttttgtctactgacaaaatgcaactaaaaatgttttaattcaacttcttactctacacttatatacctctctcccagagcttggctcttccctgaaatccttaaaggagtttattatttgccaagaatatggtttgatgaagaccgtgtcagactcatgcattctggaatccgtgagtgcctccaaccataaacccagaaatgctgccatagaggaacccattagcaagatcaataaccatcgtggatattccaaagagcagagcatttaacccagaatctgaaatctcagtaataacagaaatgtcaatatgagattgtggttattaacaatatgttatcctcactactttatttcttttttcatccaggtgtttcattaagtattctcatttatatgctcatagaagtcatcagatcaacacattcactccaacacctgggtataaaggcgaattaaaacctgaagaattactttattattcattaagaactgcattcccacatcctcacaccaatatcttccactgttactgtgcagtcataataagagttgggttatgtgatttatgcaaaattgttattggtgtgttctaatgatttttttccaggaattcaagtaagtgaagtacaaatacttagcaccatagattgtaaaaatagaaagaggaaatgagaaaacttaatgtcgttcttgtacagttgagttttgcttctttataaactgtctgttaaaatcaggggttgctgttagactgtcaagcagaagtgatggatgttcaaggaggcaggttgccccaaagtgttttctaactttcaagtagagaactttatgctctaataagaaaaatacaactcattcttaaccacccccccaaaacagagaaaacacatacatttatgcattttaaagataaaaagtagtttctcaaaaaaatctgaagttctctgaaaaccagcttattaaaagtgctgttttgtggtgaaaattgaaaccaaatccactcacatttcctatcgggtcttgaaattcttggtggtgtgtcaccattccactagatggcagtgttgcttactgagtgtcaatggcttttttccccgtaaatggaatcatgtttttctcccccaaagtacaataaagctgccttgtctgcaccaaaaacaaaaaaaaaaaaaaaaaaa

SEQ ID NO: 7285 - DNA, 600 bp, Homo sapiens
agattaaagaaagctttgttttattttgctttgagagaatggtatgttttcttaactataggttattttatagagaatataaaagtataaaacattaaaaataaccctagatatactttaaaataatgttatatttatgctaaaatatgtaaattacactatacaaccatatgataggttatttctctaaccttgtcttctaacgttttaccaaaaattcataatctaatagtttatcagttttcaatagattaaataaaatgattactttaaaaataataaaatttatctaatttaaagttgatattatttttggccgttagttatctattactagtgatcagttatactgttttctatagctactttatttaacagcacagatttctatgcacctttactctttcctcaacccttgtctctatctgtacataattgctttgtcttgatgtttctatcaactatatcatgactatctattggttccataactctgtatcatgtgtattttcttattctggtataccacaaatgattcatgcaaatgaatttttggtgattgaaaaatattaaattcccaatttaaagtattatatgata

SEQ ID NO: 7286 - DNA, 1282 bp, Homo sapiens; identical to SEQ ID NO: 2051

SEQ ID NO: 7287 - DNA, 600 bp, Homo sapiens
aatgaagacatcaaaggatcatggacagggaagaatcgcgtccagaatccctacagccatggcaatattgtgaagaactgctgtgaagtgctgtgtggccccttgccccccagtgtgctggatcgaaggggtattttgccactggaggaaagtggaagtcgacctcccagtactcaagagaccagtagcagcctcttgccacagagcccagcccccacagaacacctgaactcaaatgagatgccggaggacagcagcactcccgaagagatgccacctccagagcccccagagccaccacaggaggcagctgaagctgagaagtagcctatctatggaagagacttttgtttgtgtttaattagggctatgagagatttcaggtgagaagttaaacctgagacagagagcaagtaagctgtcccttttaattgtttttctttggtctttagtcacccagttgcacactgggcattttcttggctggcaagctttttttaaaatttgctgaaacttcaagggcagtggccaggaaggatgttcagttcacctctggataaactgggaaaaatggggtctcttggggccgggcactggttt

SEQ ID NO: 7288 - DNA, 1400 bp, Homo sapiens
ttccttcgcctacttggcctacatgccttctgcccgtgaagcgatgtttcccctcgaaaggccgtagacgccgtcagaatcggtttttcagtgagttttgacccctccgacgctccgtctctgacagaatcgcggcgttcttcgtacccgcccatcctccgcggacgccgtgccatggcgactctgctgcgccctgtcctccgtcggctctgcgggctcccgggcctacagcggcctgcggcagaaatgcccctccgggctaggagcgacggcgccggcccgctatactcgcaccacctccccacctccccgctgcagaaagcgctgttggccgccggctccgcggcgatggcgctctataacccctaccgccacgacatggtcgcagttctaggggagaccacaggacaccgcaccctgaaggtcctcagggaccagatgaggagggatccagagggtgcccagatcctgcaggagcgtccccggatttcgacatccaccctcgacctgggcaagctccagagcctgccggaaggctccctcggtcgcgagtatctccgtttcctggatgtgaacagggtctccccagacacccgagcacccacccgcttcgtggatgatgaggagctagcgtatgtaattcagcggtaccgggaggtgcacgacatgcttcacaccctgctggggatgcccaccaacatcctgggggagatcgtggtgaaatggtttgaggctgtccagactggcctgcccatgtgcatcctgggtgcattctttggaccgatccgacttggcgctcagagcctgcaagtgctggtctcggagttgatcccatgggccgttcagaacgggcgcagagcccattgtgtcctcaacctgtactatgagcggcgctgggagcagtccctgagggctctgcgggaggagctgggcattacagcaccacccatgcacgtccagggcttggcctgagctcctgagccagcggggcctggcctacctcccccatcccctgcttcccttggaggcagagggctcccttgactacctttgttcctcttctttgaacactgacccttggacaacatttatcataatttgtcataaccactgctgagtggccttgaggacgaaccccgcagggagcaagcagtacagtggcattcccagggggaccagcagctacccaaggagaaccatgcatgaacagtatcagtcgtctgggctcatgctgggattgtgcagtgctcctgttgcaactcctcccagccagccaggtttgctgggggccaggctgggtgtcctcacaggagtgagggctacacccaattccaaaagcctgagaagagagaagtggagggggaggcgagtgtgtgaataaaggctcccatcaggtcaaa

SEQ ID NO: 7289 - DNA, 600 bp, Homo sapiens
aaaggtcaggttgccaaaaaggaagatctcatcagtgcgtttggaacagatgaccaaactgaaatctgtaagcagattttggctaaaggagaagttcaagtttcagataaagaaagacacacacaactggggcagatgtttagggacattgcaacttttgtggcagacaaatgtgtgaatcctgaaacaaagggaccatacaccgtgatccttattgagagagccatgaaggacatccactatttggtgaaaccaaacaagagtacaaaacagcaggctttggaagtgataaagcagttaaaagagaaaatgaagatagaacgtgctcacatgaggcttcggttcatccttccagtcaatgaaggcaagaagctgaaagaaaagctcaagccactgatcaaggtcatagaaagtgaagattatggccaacagttagaaatcgtatgtctgattgacccgggctgcttccgagaaattgatgagctaataaaaaaggaaactaaaggcaaaggttctttggaagtactcaatctgaaagatgtagaagaaggagatgagaaatttgaatgacacccatcaatctcttcacctctaaaacac

SEQ ID NO: 7290 - DNA, 1123 bp, Homo sapiens; identical to SEQ ID NO: 2055

SEQ ID NO: 7291 - DNA, 860 bp, Homo sapiens; identical to SEQ ID NO: 2056

SEQ ID NO: 7292 - DNA, 1400 bp, Homo sapiens
acctgtaagaactttgctgagttggctcgtcgaggttactacaatggcacaaaattccacagaattatcaaagacttcatgatccaaggaggtgacccaacagggacaggtcgaggtggtgcatctatctatggcaaacagtttgaagatgaacttcatccagacttgaaattcacgggggctggaattctcgcaatggccaatgcggggccagataccaatggcagccagttctttgtgaccctcgcccccacccagtggcttgacggcaaacacaccatttttggccgagtgtgtcagggcataggaatggtgaatcgcgtgggaatggtagaaacaaactcccaggaccgccctgtggacgacgtgaagatcattaaggcatacccttctgggtagacttgctaccctcttgagcagctcttctgagatggccccagtgaaccagcttctagatgacatagaatgacatgtaatgctaaatttcattttggctttgcaagtcatgaagcttaggaggcctggcatcttgggtgagttagagatggaagtacattttaataggatgcttcttttctcttcccccagtgcctaggttgccagagcatttgcacaaatgcccctgtttatcaataggtgactacttactacacatgaaccataatgctgcttcttgtgcatgtctgctctgatatacgtcgaacaatgtagcagccactgtcatttctcagtggttttgcctaaccaaacttcttcctaaggagatttatattctggcctacacagcagtccttgatggctgacagccacagaattccaaaccaagtagtgtctgtcagccctcttaactctgtgcacgccctatttcagtcttttacatttgttcttctagggaatgtatgcatctctatatatattttccctctcaaaaccagaacatcaacagtgctgtttctgacacttcagacatcccacgcaaagccacattgaatttttgccaaatgaaaaacacatccaacaatcaagtttctaagaaggtgtcaagtggggaataataataatgtataataatcaagaaattagtttattaaaaggaagcagaagcattgaccattttttcccagagaagaggagaaatctgtagtgagcaaaggacagaccatgaatcctccttgagaagtagtactctcagaaaggagaagcgccactcaagttcttttaacccaagactttagagaaattaggtccaagatttttatatgttcagttgtttatgtataaaaataactttctggattttgtggggaggagcaggagaggaaggaagttaatacctatgtaatacatagaaacttccacaataaaatgccattgatggttgaaaaaaaaaaaaaaaaaaa

SEQ ID NO: 7293 - DNA, 1400 bp, Homo sapiens
gaaaaaaatctgggctgttagagtgaaaaagtgtgttttatgtcaattgtgaaaggaaaatgttaggagtatggtttttaaacttgggcttcattttaaacttttttttttaaacccagttatttcacttgatttgctagcttcagagaagagatccgaatctgtgcccagcgctaaaggctcagtgttagcatggcttgtgctggccggtgtgccatattcttgttggagatgaaccgtagcaccagagcccattcttccttgtcagtcttggcccaaagatgtcaccattcctagttatttgtcaccacataattggtgttgattggaaactttttctgagatgggacagaactgctgggttgtctttttccatgtaacttaagcatagtaatataaataaagtaatagttggatgcttttggtcctgtgttgcttttaaaaacaccttataaaagaggagagtatttgataagcaattttcatagtagtaaagttttttttcatctcttaaactaaattgaccatgcatataatattctttgtttaaatgaaagcatactgttgaaacccgcagtgttgcatttagaaaacagttgaacagaatgtcaatgtgcattcatgcaaaaaaacatttaatctgcatctgttttagaaaagggggaaatgaagcaacttgtctaaaaatactgctttacaaagcatttcagcctttccccctcagttttgcattgattttttgacaagtctgtagagcctaatagtttccatcaaaggcctagatctcttatttagcatttttttcagctcttctctcagaagttcagctgttgaaacgaaaactgtactttgtaccctcacatacaaagggatcaaatttgacctggtgttattttagccccaaatttatgacattacacaatattaaaatgtaaatgtttctttacccaaactacttctagatattctagtatttgcttctggtggaattaaatgacggtaaaattggctaattatttgaatgaatgaatggatggatgttttgcatgctcaatttctaggtcctttgtctagaaaggaaatttgcctcagttgaattagtgaaatatttctgtcgttgatattaaaagtgacttctgagtacagttaagttcctcctatttgccactgggctgttggttagaagcataggtaactgattaagtaggtatgatactgcatttgaaataagtggacacaaactatcctttctccaccatggactcaatctgagaacaacagcattcatttccattcatttccatactggcttttgattatatgcagattcctagtagcatgccttacctacagcactatgtgcatttgctgtcacaataaagtatattttgtcttgcaaa

SEQ ID NO: 7294 - DNA, 903 bp, Homo sapiens; identical to SEQ ID NO: 2059

SEQ ID NO: 7295 - DNA, 600 bp, Homo sapiens
attagggccagtggtattaactactttataaaattttatttttgtttgtaagaagtcatctacttaaggcccagttaatataagtggaatcatcatagtttaaggaatacccagagattgctgctgttctatttattttacagaaagggtagctagattgaaagctcttcagtggaccttgagctaatagatcttttaccactaaaagagcattattctcatgtcataatgagaataataatttacatacttggcataataaatgcctaaaagacattttattttctgaatctatttttttcttgctataatggggatattgtaaattatgcatttgtattaatggtatttcttaaagcaatctatgtaactgtaaattaaaccaatctacaaactattgtaggcatctgtaaattctgttgtaggtattataaactttgttgaagtcttaatcagcagattatgttgtgaatatatttgtacattgttaaaatagtttttaagattatttgtttaattgaataagtgtcttattggagtgatagctttgaaggtgcaaaactttatatttgtataaaattctactatttacaaggcaaa

SEQ ID NO: 7296 - DNA, 600 bp, Homo sapiens
cctacagcatgagacagaagacacgggcatatcataggctgaaggatgatgtcccggaagaggtaaaattaaggcgtttggaggaactcatcactatcttccgagaagaagcaacaaaagccaatcagacctctgtgggctgtacccagttggtgctagtggaagggctcagtaaacgctctgccactgacctgtgtggcaggaatgatggaaaccttaaggtgatcttccctgatgcagagatggaggatgtcaataaccctgggctcagggtcagagcccagcctggggactatgtgctggtgaagatcaccttcagcccagttctcagacacttaggggacatgttctctgcaggaccactctgagggactcttctgcatattgctgacctgagaggatggcctcagagctgacttgggcaatcctccccaacaggaaggggagacattgcctgccactgaggaaacaggtcatgaaggtggagataagctgcaaggggcgaagcaactttatgtcagtggaaaacgtgtctctttaaagctgctatgtgaacagcttttacagtcattaaatttacctaaactaaggttaaaaaaa

SEQ ID NO: 7297 - DNA, 1400 bp, Homo sapiens
cgaggacgcctacacgcctaccatcgaggacttccaccgcaagttctactccatccgcggcgaggtctaccagctcgacatcctcgacacgtccggcaaccacccgttccccgccatgcggcgcctctccatcctcacaggagacgttttcatcctggtgttcagtctggacaaccgcgactccttcgaggaggtgcagcggctcaggcagcagatcctcgacaccaagtcttgcctcaagaacaaaaccaaggagaacgtggacgtgcccctggtcatctgcggcaacaagggtgaccgcgacttctaccgcgaggtggaccagcgcgagatcgagcagctggtgggcgacgacccccagcgctgcgcctacttcgagatctcggccaagaagaacagcagcctggaccagatgttccgcgcgctcttcgccatggccaagctgcccagcgagatgagcccagacctgcaccgcaaggtctcggtgcagtactgcgacgtgctgcacaagaaggcgctgcggaacaagaagctgctgcgggccggcagcggcggcggcggcggcgacccgggcgacgcctttggcatcgtggcacccttcgcgcgccggcccagcgtacacagcgacctcatgtacatccgcgagaaggccagcgccggcagccaggccaaggacaaggagcgctgcgtcatcagctaggagccccgccgcgctggcgacacaacctaaggaggacctttttgttaagtcaaatccaacggcccggtgcgccccaggccgggagcgcgcgcggactggcgtctcccctcccggcgatccgcccccagcactggggaggcgccactgaaccgagaagggacggtcatctgctccggaaggaaagagaacgggccaagactgggactattccccacccccggtcccccattgaggcccgccacccccataactttgggagcgagggcccagccgagggtggatttatcttctcaaagacctaagagtgagcgcggggtgggggagggatgtgaagttatccagcctctgctaggcttcaagaaaccgtcatgcccgcttgagggtcaggacccacggggcattatcttgtctgtgattccgggttgctgtgacagccggtagagcctctgccctcccgaaactaagcgggggggcgtgggtcaaatcatagccaagtgacttgtttacatgtgagtgaaactgcacaaaggaacacaaaacaaaacttgcactttaacggtagttccggtgtcaacatggacacgaacaaaaccttacccaggtgtttatactgtgtgtgtgtgaggtctttaaagttattgctttatttggttttttaatatacaataaaataatttaaaatgcaaaaaaaaaaaaaaaa

SEQ ID NO: 7298 - DNA, 1086 bp, Homo sapiens; identical to SEQ ID NO: 2063

SEQ ID NO: 7299 - DNA, 600 bp, Homo sapiens
tgtagtgcccaactatgataatgtgcaccccaactaccacaaagagcccttcctgcagcagctgaaggtgttttctgatgaagtacagcagcaggcccagctttcaaccatccgcagcttcctgaagctctacaccaccatgcctgtggccaagctggctggcttcctggacctcacagagcaggagttccggatccagcttcttgtcttcaaacacaagatgaagaacctcgtgtggaccagcggtatctcagccctggatggtgaatttcagtcagcctcagaggttgacttctacattgataaggacatgatccacatcgcggacaccaaggtcgccaggcgttatggggatttcttcatccgtcagatccacaaatttgaggagcttaatcgaaccctgaagaagatgggacagagaccttgatgatattcacacacattcaggaacctgttttgatgtattataggcaggaagtgtttttgctaccgtgaaacctttacctagatcagccatcagcctgtcaactcagttaacaagttaaggaccgaagtgtttcaagtggatctcagtaaaggatctttggagccagaaaaaaa

SEQ ID NO: 7300 - DNA, 600 bp, Homo sapiens
ctgaatgatgagaccagaccagtgtctacagattttcattgtcagaaaaatctataagtctgccctttttacaatgatgatttaaaaaaaacaacagcgtaaatattagcccacaagagcagtcctaaacaatcacaattacactgtactacccaagaagactgtttattgtgaagcatttacctttcaaaaaatcattacatttctatttcttggtggagcagcacattgtggagtgtgattcttaattcttcattgagtttgtcaataggacattgatgctggataggttgtcttttgtttttatgtctcagaccatcttgtgagattgtttgcctatctcataatacagttttatgcagaaaggttgaaactatgtaaatggtttttatggaaattatcagttacaatattttaaaggtgtagaatggcatctttgtttataggagaacatttgtaaataaagttaaatttctaagcctttaaaatattgtaactgataatttccataaaaaccatttacatagtttcaacctttctgcataaaactgtattatgagataggcaaacaatctcacaagatggtctgagacataaaaa

SEQ ID NO: 7301 - DNA, 1400 bp, Homo sapiens
tatccactggccgaccgcagagtgtccctacctcctctccagagcatcattcctttctatctgctgccagagccacggtgccatttactccaaggactcactttctaaaattccacacctggagtgacctctagtcgctcagcatccactttgtgtctccaaattgtgtaggactctgtaatcttttgattagtttctgagaaaacacaatgaagcacttcacttttttttattcaaagccatttaataaaacacagttggtcagcccagtgcaaagcttgttatctgccaccagtacataccattggttctcttcattccttgggccagcttctcaggtggctttagacctcaacaagccgtatcttcaccagtgttctatcttgttcccctaaattaataaaatgtttttctccaggattttggtgagggttggctgtggctgtcgttttgcacctcccagatttcaaagaattactggttttaccatgactcaaatcttaagatctgtttctactattcagttcctcaaactgaagcttattgaaaaaaaaatgtataatgttatttgttttattatagcaattattcctaattaaagcagtatttaatgcaatttccagttatttctttggagaattttatgtcattgttccattaccttgaatgttggaaagatatgatacgtgctgcttgttcatcacaaaaatcagtaagcacaataaagtggatgccaaaccatcagacacataaatgttcccgctgtgtccctggatatggaataagcaggtataaaaaatattttaattatagttttgttataaatataacttatgagaaaaaaatttgataggaataatactgtatattactaatttttaactatccctaaggcaaaccttatgacccacagaattttctcatatacagtattcagtgcacagaaatcttatgattggctcaagtacagtaagttacttctcagtaaaactctcaagtctgagtccatatttgtagctctgcttttggctgtacgttcctaggatcggggctgcttatgcctttcgtttatccttggggtttgagagcgctgtatttgggagagagtttaaaaatacattaggagagagaaaccattaaaagtttcactgtcagagatattgtaggtgctaatactggatttcgtctcagatttaatttcttttatgggtctgttagtcattcaacaaatcccataagtatgtgttaatattttaattgtgtaaaactcatttgttactttacagcctgtaatagtgtgtctgcattttcaacctgttgcaataactttgctgaaatattaacacattaataaaacttttcttaaacaaaaaaaaaaaaaaaaaaaaaaaaaaaaaaaa

SEQ ID NO: 7302 - DNA, 600 bp, Homo sapiens
agcaacggggagcctgatgaggacgcttatgatatgaggaaagcactttccagggatactgagaagaaatccatcataccattacctcatcctgtgaggcctgaagacattgaataaccctgggcagtggttcttaggcagatactctagatgctttatggacaatattattttcattggatgattctggagctctattaggagaaaagtaatcattttaggtcttaaagacttcaagaaaatacaggttatcaatttattttaaatctcattgtttccagttagcaatatcatacctattaaagctgttcattgtaacaaaattcaatcaaaaaggcagctaggtcagaaggaaacataccactctcatggttcatagtattcactgtatgtatgctagggaaaagacttgctccagtctcctcctcagttctgtgcctgagaaccactgctgcatatatttgtttttaaattttgtattgaactgttaattgaagctttaaaagcatatatgaaatgtataaatctaagatgtataatacattattgactctaaaaaaaaaaaaaaaaaaaaaaaaaaaaaaaaaaaaaaaaaaaaaa

SEQ ID NO: 7303 - DNA, 1280 bp, Homo sapiens; identical to SEQ ID NO: 2068

SEQ ID NO: 7304 - DNA, 1398 bp, Homo sapiens; identical to SEQ ID NO: 2069

SEQ ID NO: 7305 - DNA, 1400 bp, Homo sapiens
gtgcctcaacagacgaagacatggagacagaggccgtcaatgagatactggaagacattccagagcatgaggaagactatcttgactcaactctggaagatgaagaaattattattgcagagtacctatcctatgtagaaaataggaagtcagcaacaaagaaaaactaaataatgaacagaaatagcgctaattttctgcttataaatgctatcattatgaaaaggctaatgcagctctttctgttcttactttttatctgaattacaagtcctctttgggtgtaggagggggtgggcaggggacaagtccaggaggggtcccagggccttcatgcatggtctcggggaagaagcttcctctggcctggcgcaggccgttccatctgcctcccaggtctgcgtcccataaccctttccccagcttggtgttttaccccgaaacaggaaggaacaggggtcctgtagaacaggggtcctggggaaggtgtccagggcagggtcctgggaagggtgtcccgactgcttcctctccagctgtggctccatctgcccagcttgcctgcctcctgcacccactgccctgaccttcctgcttcccacgctgccatctctgccagggtgccacatgggttcctgtgccaccctttccccgcccctcaaatcgtcctttaagtcttccttccaagtgctgtggggcataacgatgaggcgctggccttgggggccacaccaggtcgcagcaaatggcttcagcctgggacgccagtgttttatgctcttagttcagtaaaatacgcccccgaaattcaagattgagtgtcaggctttatatatattcagcattcctcattacagaaatcttctattgaatgggaaaggtttaaatgctaaccaaagcaatttatttttaattaatatttttagactctgtgctgtcatactgaactcactgctagctaagagacctatcagagatttagatatattttctccaggttttttgtgggttttctttgttgttgttgttgttctagccatgtgacagaggctctttctaaaagtatgtagttcgctgtgtgtcggctccagcagtaaccgtcctcactgcgccacgcactcctctgtagatgtgtgcccagtgggagttccttccagccccaggaccgcagcagcagccaggtgccgagtggattgagtgccaggtgcatccaagactttccctcccttccagaaggcactgactgaagacaggatggatcatgcggagccggctgaaatgctccaactttttcaaagtgtgggtggtccagtttggactgatgggaatcttcttgtcattctttttaaacggatgataccgatggaaataaaaggtgggaaatatattcaaaaaaaaaa

SEQ ID NO: 7306 - DNA, 1400 bp, Homo sapiens
ggaccgagccaccttctacctaaatgtcctggagcagaagcagaaggcccttaatgcaggctatatcctaaatggtctgactgtgtccatccctggtctggagagggctctgcagcagtacactctagaaccatcagaaaaaccttttgacctcaagtctgtgcccctggccacggcgcccatggcagagcagagaacagaaagtacccccatcacagcagtcaaacagcctgagaaagtggcagctaccaggcaggagatcttccaggagcagttggcagcagtgccagagttccgcggtcttgggcccctcttcaagtcctcgcctgagcccgtggccctcaccgagtcagagacggagtatgtcatccgctgcaccaaacacaccttcaccaaccacatggtttttcagtttgactgcacaaacacactcaatgaccagaccttggagaatgtcacagtgcagatggagcccactgaggcctatgaggtgctctgttacgtgcctgcccggagcctgccctacaaccagcccgggacctgctacacactggtggcactgcccaaagaagaccccacagctgtggcctgcacattcagctgcatgatgaagttcactgtcaaggactgtgatcccaccactggggagactgatgacgaaggctatgaggatgagtatgtgctggaagatctggaagttactgtagctgatcacattcaaaaggtcatgaaactgaacttcgaagcagcctgggatgaggtaggggatgaatttgagaaggaggaaacgttcaccttgtctaccatcaagacacttgaagaggctgtgggtaatattgtgaagttcttgggaatgcacccttgtgagaggtcagacaaagtgccggataacaagaacacccacacgttgctcctggctggtgtgttccggggtggtcatgacatcctggtgcgctcccggctgctgcttttggacacagtgacaatgcaggtgacagccagaagtttggaggagctgccagtagacatcatcttggcatctgtgggataagaggccagcctgcataggacctcatacccttccccaacactacctggaagttgtgccttcctcatgaaactggcagaaaccccttcccaagcttctgtattgaaaaacaattaggaatcattgcagatttttttttattctgctcccacctcccacccgggactacttgctggtgactttttttttttttttttttttaaataggggatgattttagcttgtcctaaatcttgctgtccacccttccaggaaagggacattgtaaatgaataaaacattctcaactcctcttgaatctatcccccaagaaaccatcttatccctgtaataaatcagcatgtatttattg

SEQ ID NO: 7307 - DNA, 1400 bp, Homo sapiens
acacatcttcctaacttgcctgatagcacagccaaagaaatctatcacttcaccttggaaaagatccagcctagagtcatttcatttgaggagcaggttgcttccataagacagcatcttgcatctatatatgagaaagaagaagattggagaaatgcagcccaagtgttggtgggaattcctttggaaacaggacaaaaacagtacaatgtagattataaactggagacttacttgaagattgctaggctatatctggaggatgatgatccagtccaggcagaggcttacataaatcgagcatcgttgcttcagaatgaatcaaccaatgaacaattacagatacattataaggtatgctatgcacgtgttcttgattatagaagaaaattcattgaagctgcacaaaggtacaatgagctctcttacaagacaatagtccacgaaagtgaaagactagaggccttaaaacatgctttgcactgtacgatcttagcatcagcagggcagcagcgttctcggatgctagctactctttttaaggatgaaaggtgccagcaacttgctgcctatgggatcctagagaaaatgtatctagataggatcatcagaggaaatcaacttcaagaatttgctgccatgctgatgcctcaccaaaaagcaactacagctgatggttccagcatcttggacagagctgttattgaacacaatttgttgtctgcaagcaaattatataataatattaccttcgaagaacttggagctcttttagagatccctgcagctaaggcggaaaagatagcatctcaaatgataaccgaaggacgtatgaatggatttattgaccagattgatggaatagttcattttgaaacacgagaagccctgccaacgtgggataagcagatccaatcactttgtttccaagtgaataaccttttggagaaaattagtcaaacagcaccagaatggacagcacaagccatggaagcccagatggctcagtgaatccttgcagaacttctgtgcacatgacatctttttccatgttgtgcagatcagtttcactatctccaaagcatttgcatcatgaccttatacatttcaatcccttttatgctggattccgtttaaagaagacattattagagcaggaagtacaagcatttaaaatatgtagttcccatatatttcagggtctctgtgtattaagctaactcagatgttttgaaagctttttctttaaacagaggtgaaatatctgtggctaaaaagtttgagatttgtgataactttgtagtcatgtaaaacttaagtgcttcatgcctctccaaatgtggttattctaataaatggagaaatgagccaaaaaaaaaaaaaaaaaaaaaaaaaaaaaa

SEQ ID NO: 7308 - DNA, 1400 bp, Homo sapiens
atggaagagttaactgcatgcactagtgtttggagggtgttgtggtttgtctttctaattaggtgtatagcctattcactttcctaggaataaatctcttaacctaaatttgagtagtctgcattttggcaactcctctaagcagcttggtagcctaagtacaggttgtttttttaaaaaaggaaaagcaggaaggaggagtgaattttattaacatgtttgccaaatgtattgagatttggcctctgaagaacactttttcagtgttaagtttctttaccttaagattccgaaatactttagaatattattaattttaagtcctgtctttacatccttttggaaaacttgtattaccatgagtttggaaaaaggacaacgaaaggcttttcatgtaaagataagatctttagctatctctaaccctgtccttttttcactgcattttttctagttttgcttcattgcttatcattaggatagggtaagtgaagtttgctatgctgctagcatcctaagatgatacctttgttgaaagaattgtgaatagcatgattcatttctagcagaggctgagtttaggacagcagcttccattgagaagtctttctgtgtcgtgaatagcattttaatgacctcttggctcacataagcaaacaacatagggacgtatctgctatgaaaatccacaaatttttcagatagtgccctaaaaacaattttatatgcctcactggttgttattcttaggttattcccacacttgactttatcattgtttactactagtaaaaagcagcattgccaaataatccctaattttccactaaaaatataatgaaatgatgttaagctttttgaaaagtttaggttaaacctactgttgttagattaatgtatttgttgcttccctttatctggaatgtggcattagcttttttattttaaccctctttaattcttattcaattccatgacttaaggttggagagctaaacactgggatttttggataacagactgacagttttgcataattataatcggcattgtacatagaaaggatatggctaccttttgttaaatctgcactttctaaatatcaaaaaagggaaatgaagtataaatcaatttttgtataatctgtttgaaacatgagttttatttgcttaatattagctttgccccttttctgtaagtctcttgggatcctgtgtagaagctgttctcattaaacaccaaacagttaagtccattctctggtactagctacaaattcggtttcatattctacttaacaatttaaataaactgaaatatttctagatggtctacttctgttcatataaaaacaaaacttgatttccaaaaaaaaaaaaaaaaaaaaaaaaaaaaaaaaa

SEQ ID NO: 7309 - DNA, 841 bp, Homo sapiens; identical to SEQ ID NO: 2074

SEQ ID NO: 7310 - DNA, 1400 bp, Homo sapiens
gaaaaccaagaagaactaagcatgataactgcattgtaacttggccagatgctccagcatatgcacgttcactgcaaagcaccctactggttttgaaaatctgaccttgtcatttcaatagttattaacatgactaaatattatcttaattaagaggaaaatagaagttgcttttaggggtttctgacatatattctggatactatccgaggtaattttgaagtttaatataaatgctcatatcaaatgaatatagaactaatattgtcgggaacacctaatagaaaggaatactattatagcaaatcacagaatgatagactcaagcataaaacttggcagttttatctgcttcaaaatgccattgatcattattcctgtattttctctgaaactgattataaaaaccaatgtccagctactcttttgtttttgacacttgaagaaatggagatcgatttgatttgtttataagcagacacactgcaatttacaaagatctctttacggttttataaaattatcttccagtttgtacatttatatggaattgttctttatcaagggtagctaatgacatgaaaataattgtgaaatatggaattatttctgacacatgaagcccactaaactatgctttcctataatgcatatttcttctcagtttaaatgtatgtaaatatcgaagctatatggtatgatttataaagataaatgggccaaagtgtacattgagactggcagccatctatggtaccactgaaaccctgacccagaaaagtggcttgcttggacacccagctgcctttgtttctgcattaaaccaatattgatcacacatatgacacaggctagtcctataaaagtaatgacttcatagaaatggcattataatttttaagttgatactctacaggtagctattgatataattagttttaataaaacatgctgcaaccatggtatacaacaaaaatacatttctttggtgattgaaattaaggccgtatttacaatgacttaatataagactgacttttatcctgcttcataacttgtatggagaactcaccaagaaagaattcaatactgtgaaatatgcagcaagaagattggtctttacctaggctgtgtttcctaagctctgagttttcagcaccagtagatttgtattaaaagaaaaaaaaatggggccttagcttctggcttttaattttgccagctaaggacataaaacaaaaataaacaaacaaaaacaaatagccatctgctatcagcatcattatgtaaaagaaaatatattttagcccctaaaattaggaagaatgtaatctcagaataaaggttgtcatttaagttgaataaatatatagctttatgaaaaacacaaaaaaaaaaaa

SEQ ID NO: 7311 - DNA, 1400 bp, Homo sapiens; identical to SEQ ID NO: 7310

SEQ ID NO: 7312 - DNA, 1400 bp, Homo sapiens
ccgccggagcgctttggaaggcgcacggggcgaagatggcggcggagcgacaggaggcgctgagggagttcgtggcggtgacgggcgccgaggaggaccgggcccgcttctttctcgagtcggccggctgggacttgcagatcgcgctagcgagcttttatgaggacggaggggatgaagacattgtgaccatttcgcaggcaacccccagttcagtgtccagaggcacagcccccagtgataatagagtgacatccttcagagacctcattcatgaccaagatgaagatgaggaggaagaggaaggccagaggttttatgctgggggctcagagagaagtggacagcagattgttggccctcccaggaagaaaagtcccaacgagctggtggatgatctctttaaaggtgccaaagagcatggagctgtagctgtggagcgagtgaccaagagccctggagagaccagtaaaccgagaccatttgcaggaggtggctaccgccttggggcagcaccagaggaagagtctgcctatgtggcaggagaaaagaggcagcattccagccaagatgttcatgtagtattgaaactctggaagagtggattcagcctggataatggagaactcagaagctaccaagacccatccaatgcccagtttctggagtctatccgcagaggggaggtgccagcagagcttcggaggctagctcacggtggacaggtgaacttggatatggaggaccatcgggacgaggactttgtgaagcccaaaggagccttcaaagccttcactggcgagggtcagaaactgggcagcactgccccccaggtgttgagtaccagctctccagcccaacaggcagaaaatgaagccaaagccagctcttccatcttaatcgacgaatcagagcctaccacaaacatccaaattcggcttgcagacggcgggaggctggtgcagaaatttaaccacagccacaggatcagcgacatccgactcttcatcgtggatgcccggccagccatggctgccaccagctttatcctcatgactactttcccgaacaaagagctggctgatgagagccagaccctgaaggaagccaacctgctcaatgctgtcatcgtgcagcggttaacataaccgcccagccagctgcctggcctccctcctgtgtttcccatggccagtggccatgccccatggggatcgcccctcctgcccccttgtgcacacccagcagtccagtgcaacgtctcctccatagctctgggttcttagatcttggttggacgtttgttttctccttagttgcatttcctgggtttttgtgatgatcaatggactttaatgaaaaaaaaaaataaaaacaaccaaaaaaaaaaaaaaaaaaaa

SEQ ID NO: 7313 - DNA, 600 bp, Homo sapiens
ggtggctgccaccatgctgctgctgctgccgccactgtcaccaggcgccctgtggacagcggcccaggccctgacgctatgacacacagcgcgagcccatgagaggacagaggcggtgggacagcctggccacagagggcaaggactgtgccggagtccctgggggaggtgctggcgcgggatgaggacgggccaccctggcaccggaaggccagcagagggcacggcccgccagggctgggcaggctcaggtggcaaggacggagctgtcccctagtgagggactgtgttgactgacgagccgaggggtggccgctccagaagggtgcccagtcaggccgcaccgccgccagcctcctccggccctggagggagcatctcgggctgggggcccacccctctctgtgccggcgccaccaaccccacccacactgctgcctggtgctcccgccggcccacagggcctccgtccccaggtccccagtggggcagccctccccacagacgagccccccacatggtgccgcggcacgtcccccctgtgacgcgttccagaccaacatgacctctccctgctttgtaaaaaaaaaaaaaaaaaaa

SEQ ID NO: 7314 - DNA, 600 bp, Homo sapiens
tgcaggaggactgcagactcagctgcaattctgaggggggtttgggaggcttgtgcgaggtctcaggcctgtgtggggagctggtgcctcttcctgcccgtatctttctcttccaagggcagtgctccaaggcagggactggagaagccaaggggagagtctaaaagggctagagcatttttaaaaatagacacagggtcttgggactggggtttcggattgagttgcaagcagggagaaaacctgaaggtcggtgcccctatggggctgaccagtagagaatttcctttactgtatttttgtgtctggtcttccctttctggcttctaggacatccatgccaggtgaggtgcctgggtccctgttacaagtcaggagccctgtagggagacccctccttttgtacaagtacctgaatgctgcgacaagcagatttttgtaaaattttatattagtttttaatgtcagtggcgactcggttcctggggctgcagccagcctgggacttttgtaagaatttttgggtgactcacttagatgtcgtttccttcttgccccctcttcctctctgtaatctaagtgcattaaacatctttgcag

SEQ ID NO: 7315 - DNA, 600 bp, Homo sapiens
tccatctgggaagaggtggttgccaggggcctggcccgggtcctggtgtttgaggatgacgtgcgctttgagagcaacttcagggggcggctggagcggctgatggaggatgtggaggcagagaaactgtcttgggacctgatctaccttggacggaaacaggtgaaccctgagaaggagacggccgtggaggggctgccgggcctggtggtggctgggtactcctactggacgctggcctatgccctgcgtctggcgggtgcccgcaagctgctggcctcacagcctctgcgccgcatgctgcccgtggacgagttcctgcccatcatgttcgaccagcaccccaacgagcagtacaaggcacacttctggccacgggacctggtggccttctccgcccagcccctgctcgctgcccctacccactatgccggggacgccgagtggctcagtgacacggagacatcctctccatgggatgatgacagcggccgcctcatcagctggagcggctcccaaaagaccctgcgcagcccccgcctggacctgactggcagcagcgggcacagcctccaaccccagccccgagatgagctctag

SEQ ID NO: 7316 - DNA, 600 bp, Homo sapiens
gataccagcaatggatggcaggggagagtgttccttttgttcttaactagtttagggtgttctcaaataaatacagtagtccccacttatctgagggggatacattcaaagacccccagcagatgcctgaaacggtggacagtgctgaaccttatatatattttttcctacacatacatacctatgataaagtttaatttataaattaggcacagtaagagattaacaataataacaacattaagtaaaatgagttacttgaatgcaagcactgcaataccataacagtcaaactgattatagagaaggctactaagtgactcatgggcgaggagcatagacagtgtggagacattgggcaaggggagaattcacatcctgggtgggacagagcaggacaatgcaagattccatcccactactcagaatggcatgctgcttaagacttttagattgtttatttctggaatttttcatttaatgtttttggaccatggttgaccatggttaactgagactgcagaaagcaaaaccatggataagggaggactactacaaaagcattaaattgatacatattttttaaaaaaaaaaaaaaaa

SEQ ID NO: 7317 - DNA, 1400 bp, Homo sapiens
gcggcagtgcagcagctggacactttgcgagggcttttgctggctgctgctgctgcccgtcatgctactcatcgtagcccgcccggtgaagctcgctgctttccctacctccttaagtgactgccaaacgcccaccggctggaattgctctggttatgatgacagagaaaatgatctcttcctctgtgacaccaacacctgtaaatttgatggggaatgtttaagaattggagacactgtgacttgcgtctgtcagttcaagtgcaacaatgactatgtgcctgtgtgtggctccaatggggagagctaccagaatgagtgttacctgcgacaggctgcatgcaaacagcagagtgagatacttgtggtgtcagaaggatcatgtgccacagatgcaggatcaggatctggagatggagtccatgaaggctctggagaaactagtcaaaaggagacatccacctgtgatatttgccagtttggtgcagaatgtgacgaagatgccgaggatgtctggtgtgtgtgtaatattgactgttctcaaaccaacttcaatcccctctgcgcttctgatgggaaatcttatgataatgcatgccaaatcaaagaagcatcgtgtcagaaacaggagaaaattgaagtcatgtctttgggtcgatgtcaagataacacaactacaactactaagtctgaagatgggcattatgcaagaacagattatgcagagaatgctaacaaattagaagaaagtgccagagaacaccacataccttgtccggaacattacaatggcttctgcatgcatgggaagtgtgagcattctatcaatatgcaggagccatcttgcaggtgtgatgctggttatactggacaacactgtgaaaaaaaggactacagtgttctatacgttgttcccggtcctgtacgatttcagtatgtcttaatcgcagctgtgattggaacaattcagattgctgtcatctgtgtggtggtcctctgcatcacaaggaaatgccccagaagcaacagaattcacagacagaagcaaaatacagggcactacagttcagacaatacaacaagagcgtccacgaggttaatctaaagggagcatgtttcacagtggctggactaccgagagcttggactacacaatacagtattatagacaaaagaataagacaagagatctacacatgttgccttgcatttgtggtaatctacaccaatgaaaacatgtactacagctatatttgattatgtatggatatatttgaaatagtatacattgtcttgatgttttttctgtaatgtaaataaactatttatatcacacaatatagttttttctttcccatgtatttgttatatataataaatactcagtgatgagaaaaaaa

SEQ ID NO: 7318 - DNA, 537 bp, Homo sapiens; identical to SEQ ID NO: 2083

SEQ ID NO: 7319 - DNA, 1400 bp, Homo sapiens
ccatccttaatctcagttgtttgcttcaaggacctttcatcttcaggatttacagtgcattctgaaagaggagacatcaaacagaattaggagttgtgcaacagctcttttgagaggaggcctaaaggacaggagaaaaggtcttcaatcgtggaaagaaaattaaatgttgtattaaatagatcaccagctagtttcagagttaccatgtacgtattccactagctgggttctgtatttcagttctttcgatacggcttagggtaatgtcagtacaggaaaaaaactgtgcaagtgagcacctgattccgttgccttgcttaactctaaagctccatgtcctgggcctaaaatcgtataaaatctggatttttttttttttttttgctcatattcacatatgtaaaccagaacattctatgtactacaaacctggtttttaaaaaggaactatgttgctatgaattaaacttgtgtcgtgctgataggacagactggatttttcatatttcttattaaaatttctgccatttagaagaagagaactacattcatggtttggaagagataaacctgaaaagaagagtggccttatcttcactttatcgataagtcagtttatttgtttcattgtgtacatttttatattctccttttgacattataactgttggcttttctaatcttgttaaatatatctatttttaccaaaggtatttaatattcttttttatgacaacttagatcaactatttttagcttggtaaatttttctaaacacaattgttatagccagaggaacaaagatgatataaaatattgttgctctgacaaaaatacatgtatttcattctcgtatggtgctagagttagattaatctgcattttaaaaaactgaattggaatagaattggtaagttgcaaagactttttgaaaataattaaattatcatatcttccattcctgttattggagatgaaaataaaaagcaacttatgaaagtagacattcagatccagccattactaacctattccttttttggggaaatctgagcctagctcagaaaaacataaagcaccttgaaaaagacttggcagcttcctgataaagcgtgctgtgctgtgcagtaggaacacatcctatttattgtgatgttgtggttttattatcttaaactctgttccatacacttgtataaatacatggatatttttatgtacagaagtatgtctcttaaccagttcacttattgtactctggcaatttaaaagaaaatcagtaaaatattttgcttgtaaaatgcttaatatcgtgcctaggttatgtggtgactatttgaatcaaaaatgtattgaatcatcaaataaaagaatgtggctattttggggagaaaatt

SEQ ID NO: 7320 - DNA, 600 bp, Homo sapiens
tgagggcagtaatcacaggctgcaggctagagggggcagttatgactgcctgaaagtgggtgagggattgcacttcagaaaaacatctaaaaaacttagtctatgtttgaattccccacctccatcccatctatgggaagagccgttcagtgtttagagagtggggagatgggtccctgcacttggcctctccataagccttggagggtcagggctgataccaggggtcctggcaagccattgggcagagacagaccacaagagcagggcatttttttacgctgggcatacatatgcacacaagcatgcacagaggcatgtcccgtgcccagcctctccaccgtcactgtccgctgctggctggaggggatgcaggggtagtgtatgcagaccttccactgggcaaatgccatgtgtcaggagggaaaggcctaggaagcccccatggggaaggttctggatttattccctcctctaaatgctataaatacgttagcacttgagtcgactggaggctgccaggaattcaggatgcatacagctgtaatttaacccagagcagctccacgtgagagcattaaagatgtaatgaagatgttt

SEQ ID NO: 7321 - DNA, 600 bp, Homo sapiens
cagccacagctaaaaaaccctcccctcaagaagtctcagaactccaggctacatatcgtcttcttcgtgggaaagatgtggaatttcctaatgactatccgtcaggttgtcttctgggctgtgtggacctaattgactgcttgtcccagaagcaatttaaggagcagtttccagacatcagtcaagaatctgattctccatttgttttcatctgcaaaaatcctcaggaaatggttgtgaagtttcctattaaaggaaatccaaaaatctggaaattggattccaagatccatcaaggagcaaagaaggggttaatgaagcagaataaagctgtctgacccaggagaaaaggaactatacagcatagtggagttttgtgtactaaaattgctatctactggtcctttggaattgaagtagtagaaacctaaaggcttggcgtcaggcttgaatatctcagaacttaaactcttaccaaaatctgtatatttttcttaaggagtgggattcctactttatgtaatggggtcgaaatctttgaacacattatttataaaaacctgtttaaaaattctaaaaaaaaaaaaaaaaaaaaaaaaa

SEQ ID NO: 7322 - DNA, 600 bp, Homo sapiens
cccctgcctagggtggatggctgctggtgtggggacttcgggtgggcagaggcaccttgctgggtctgtggcattttccaaggcccacgtagcaccggcaaccgccaagtggcccaggctctgaactggctctgggctcctcctcgtctctgctttaatcaggacaccgtgaggacaagtgaggccgtcagtcttggtgtgatgcggggtgggctgggccgctggagcctccgcctgcttcctccagaagacacgaatcatgactcacgattgctgaagcctgagcaggtctctgtgggccgaccagaggggggcttcgaggtggtccctggtactggggtgaccgagtggacagcccagggtgcagctctgcccgggctcgtgaagcctcagrtgtccccaatccaagggtctggaggggctgccgtgactccagaggcctgaggctccagggctggctctggtgtttacaagctggactcagggatcctcctggccgccccgcagggggcttggagggctggacggcaagtccgtctagctcacgggcccctccagtggaatgggtcttttcggtggagataaaagttgatttgctct

SEQ ID NO: 7323 - DNA, 1400 bp, Homo sapiens
gatattaagaactttcccccttactaagtttaagacttttgtcatgtggtgagtcaaataagaccattttgattgtaaaccataaaatagttcagcaagtagcccacagttctggcctaacagcagacttgctgttttcacttggtatcctggagttgggttgctaaccttaatttctatgatgttttctaaaatgaaacttgataaagtagaccaccagctgcaccgtgttttctgtaaaagtattgttagtaagtggccaagagacttgaggaaaatacagattttttgtttaccttggtcttgttttaagtcttaaaaaattaaagataacattataatgtagaatacagatgggacatagtccttgtaagcttcccttgaaaatgttttaaatatttaggaagcttttaaaagacactaaattgtactctaaaagacactaaattgtactaattgtacaaaggtcaagccaattttatgaaacagtcctacagagtaatatatgtgatgcagtgtaagaaggaaaatactcatctctaacattatggtaataacatttagcctcttaggagttggagcagggggatgggtaattacagatttgcagactatagaaagagtttcatttttttgtgaccccacagagtctcaaatttttattccactacctgctagagcctactgtgaaatcactgctccatatttgccagtggaggaaatgggcatagagtagagaatagcttcatatgtttacacgtttgcatagactacacacatgtcatgcgtttatggcaggtagctggtatttattccccaaagtaataatgttgaagtatgggtctcatcattcccatacacagaaacacaaaacactttgatcataaacttttttcttcagaagccaaactaacttgcagaataatagagccactggtttaatgtttcctcaagataggttttagtgtaagctagtattctgtgtgttcgtagaaatgattcaatacctgcagctggtgaattaggaattgtatttgttgccttttttatattagatgaggtgcaaaaattttaatgctagtcagtatgcaccaccacaggaaagttagatcccattagcacttgagactacagctttggaaacttaggctaagttaatttggatttgttacttgattcacctactgaccttttcttttgtttgaagtgcttatcagcataatgagctaagtgtcatgcatatttgtgaagaaacacccttgtttggtcccttttgggacagagaggtactccttgatctttatgaatgaccggttactgttttgccttattgcttaacttaatgtagtgaaataaagcagaccaagcttgaaaaaaaaaaaaaaaaaaaaaaaaaaaaa

SEQ ID NO: 7324 - DNA, 600 bp, Homo sapiens
attattccatcatttgtgttgatggatatccaggcttctacagtggtcacctatgtgtatcagctaattggagatgatgtgaaagtagaacgaatcgaatacaaaaaaccttaaagccaggcctgtcttgatgatttttggttttttttcattgtcctgttgaaatcaagtaattaaacatttaagagccacaaaattgtatcacttttataatattttgcagtaaaatataataccatcttctctgttaatacataattgctccaagcttcctgtaaactataagaatatatttagtttacagtatatggattctatgaaaaaatgtccacaacacagtaattggtcacttgttaagaaaaatttatccttgtaagtatcttcaaagttgatatttggaactttattccaaaagtagtgcatgtggagaaagaatctagactttcttgtatacatttttctcttctccagtaataaacaattacctttcatttatactttgataacctgtatttaatttaaaaaaaaacataaaaatgaggaaccaagtgaaactacggatataaatattaaagtggacgagatgacctttcaaaaaaa

SEQ ID NO: 7325 - DNA, 1400 bp, Homo sapiens
gagctggctttatgtgctggggcagaagagatccgatagctatgttctgctggagcattctgtgaagaaggcagtacattttgggttaccgtacctcgcctccctgggaatacagtcccttgttcaacagagagcttttgctgggaagacggcaaacaagctgatggatgccctaaaggactccgacctcctgcactggaaacacagcctgtcagagctcatcgatatcagcatcgcacagaaaacggccatctggaggctgtatggccgcagcaccatggcactgcaacaggcccagatgttgctgagcatgaacagcctggaggcggtgaatgcgggcgtgcagcagaacaacacagagtcctttgctgtcgcactctgccacctcgcagagctacacgcggagcagggctgttttgctgcagcttctgaagtgttaaagcacttgaaggaacgatttccgcctaatagtcagcacgcccagttatggatgttatgtgatcaaaaaatacagtttgacagagcaatgaatgatggcaaatatcatttggctgattcacttgttacaggaatcacagctctcaatagcatagagggtgtttataggaaagcggttgtattacaagctcagaaccaaatgtcagaggcacataagcttttacaaaaattgttggttcattgtcagaaactgaagaacacagaaatggtgatcagtgtcctactgtccgtggcagagctgtactggcgatcttcctcccctaccatcgcgctgcccatgctcctgcaggctctggccctctccaaggagtaccggttacagtacttggcctctgaaacagtgctgaacttggcttttgcgcagctcattcttggaatcccagaacaggccttaagtcttctccacatggccatcgagcccatcttggctgacggggctatcctggacaaaggtcgtgccatgttcttagtggccaagtgccaggtggcttcagcagcttcctacgatcagccgaagaaagcagaagctctggaggctgccatcgagaacctcaatgaagccaagaactattttgcaaaggttgactgcaaagagcgcatcagggacgtcgtttacttccaggccagactctaccataccctggggaagacccaggagaggaaccggtgtgcgatgctcttccggcagctgcatcaggagctgccctctcatggggtacccttgataaaccatctctagagaggacatccctgctgggctgctgtgcagagtataagattttggacttgttcatgtcccctctctccctataaatgatgtatttgtgacaccctatcttgtcaataaacagcattctgattaaaaaaaaaaaaaaaaaaaaaaaaaaaaaaaaaaaaaaaaa

SEQ ID NO: 7326 - DNA, 1400 bp, Homo sapiens
tcttccattccggagatgatccttggacatcttttcagccaggaagagctctctggaaattctgagttgatacaaaagtacagaaatatcattacacatgcacccaacctggataacattgaattgtactggaacagctacaacaaccgccgagacctgaactttgagcgtggaggtgatatcaccctcaggtgtcctgtgatgctggtggtaggagaccaagcacctcatgaagatgcagtggtggaatgtaactcaaaactggaccccacccagacctcgttcctcaagatggctgactccggaggtcagccccagctgactcagccaggcaagctgaccgaggccttcaagtacttcctgcaaggcatgggctacatggcctcatcctgcatgactcgcctgtcccggtctcgtacagcctctctgaccagtgcagcatccgttgatggcaaccggtcccgctctcgcaccctgtcccagagcagcgagtctggaactctttcttcggggcccccggggcacaccatggaggtctcctgttgaatggcccttgttgccctagagtgggacccagccctcacctcccccagagctaacctgggaggtgctgaaggggcattgggccaccgtaagcaagggaaaaagggcagatcatgcggggagatgaccttgatctttgattgctaccctaaccttgacctttaacccgtgattccccccagctcctggaagagatgtcctaatatctcttagggacccagacccctaaattctcctcctcccccattttgatgttaaggtggagagggcatatgcatcctctgtcctgatctaggtgtctatagctgaggggtaagaggttgttgtagttgtcctggtgcctccatcagactctccctacttgtcccatatttgcaaggggaggggatttggggctggggctccattcaccaaagctgaggtggcttctcattaaccccttaggactctgaagggtatggacctacgtgaatgtgtgtcagggggagacttgctggtgggttagtggtcctcaggatgtgataaaaacatccagtgtaaaaaggaagttggaatgggagttggcgggcagtgaacgagtgtggggaaggattggtgctggggcaacaggaaggggcctggggccgtttggctgcactaactttggtagctcagtgtgcatctaaagtgggactggggagggagctaagcttgggctgggctgcttggggcttggcatagggtggaaagggctaccctggggcttctgacccccctgtagtatgtgtggagggtgccctcccgtctcccacaacttctgctataacaataaactgtagaggaatcggaaaaaaaaaaaaaaaaaaaaaaaaaaaaaa

SEQ ID NO: 7327 - DNA, 1400 bp, Homo sapiens
tgcacattttctatatatgagttattcagattagtatctatgtaggttcagtcagatccaaccatggattcgaggtattatactgtataaccctacaaaatacatagaagtattatttgccttcataatagaacccaagagtctgtttcaatttatgaattcagtatttgcaccgagattttgattcccaaagtttggaaaaaaatgacaaaacaacgagggaagaaggaaccagaccttagtgccacatatttttctcttggggttgtaaggtagtctcctgctttccagaacactttattatatttcacttatagacctgattttctgtgtcaaagtataattctcatgctgaagctgtagcctaaaaagccaaaagaaagttgtcttcattgtacaaacatattcatcactttaacaataagggaacaaaatttagtattcaagctgagtgagaatactggttcaatggacatgtccctaagataaaccagaattggcagttaatttaggcgtctagaaaatctcagttcccaccagtaaaattatcctgagtagctaatgcaccttgagaaaaatctggcatactgaataagtaacattaacttgggagccaagagctgggtaagccttacctttagactactctgtgactacagaaataaagccagcacttttggaactaataagccttcacttgtcagtatcataaagagtattgcccaactgaactttgctcccactggtttaatagttacttatttctgcctaagcactcaccttccgattttacccaagtatatatataggatagaaaaaaatgcattatatttgagagctcacttcgcccgaattacaaaatgagtgtttttagattcaagtgacggtaaaaggatttgttcccttcagtgacttgagtgttttagttatgcataagtatttctagcaaaggaagggtagaaaggaattgaaaattaatttacactagttgctacttgggaataaagggctttttgaggggggtatggatattaaatgttttcgttatatacttatccctattaaaacaggcagttgtttctttgaatatgcctaaataacagtattcttaaaatctgacagacaagtaacatgtcaattacttgatattccttgtctccagtaccacaggccactcttgacatcccatgtttgcctggataaagttcctcatttcaaacagtatacatacttctttgcagttcattatagtaaggcttaacctgtaaacagtatctgatggcccacctataaataaaattcagcattctatttttaataatttgtatgccaccaatttgtattatttgtctcaataaatacttagtcatcgatgcaaaaaaaaaaaaaaaaaaaaaaaa

SEQ ID NO: 7328 - DNA, 1400 bp, Homo sapiens
ccattaataactataaccccaaagattttgactggaatctgaaacatggccgggttttcatcattaagagctactctgaggacgatattcaccgttccattaagtataatatttggtgcagcacagagcatggtaacaagagactggatgctgcttatcgttccatgaacgggaaaggccccgtttacttacttttcagtgtcaacggcagtggacacttctgtggcgtggcagaaatgaaatctgctgtggactacaacacatgtgcaggtgtgtggtcccaggacaaatggaagggtcgttttgatgtcaggtggatttttgtgaaggacgttcccaatagccaactgcgacacattcgcctagagaacaacgagaataaaccagtgaccaactctagggacactcaggaagtgcctctggaaaaggctaagcaggtgttgaaaattatagccagctacaagcacaccacttccatttttgatgacttctcacactatgagaaacgccaaagaggaagaagaaagtgttaaaaaggaacgtcaaggtcgtgggaaataaaaggcagttctacacagactgcagcaacggttgcatctgcatatcctaagaggaaaaaatgaccttcaagagaattaggacttttttcttaatttcactgacttcagagacgattgcagacttgcagtttaagtattggaatttcacaaaagacataggacttaactggaaaatgaaaagaaaagaaaaagaaaaaactaaacaaaaaatccctctaggtagtttaggtgaaaaatgtcccttttattttggctttggttgtgatttcagagcataatgctatgttttttgtctttttactatgtttttcggatttttaagtccgtaagtgcatacagttttctctaatttttaaaccctttcctcctcccatttggacatttgcacttggagaacacttgagttgtgaaggttttgggcatccaccccagaaagtgggaatttgattttatccttccgaactggaagaacatttttatgaagaatttttgtctaggagaatataacagtgttacccaaggttgtgtctttaagggtggttcattttctctgaccttttgttactcaaagtaaagtactaggagtcctaagaaatgttctgttcttgtacattatactgattaagtcaggattaatttgatttcaaagctgagaacagtggtaaaaactcgtttacagaaatgcattttggaagagaaaaatactgtaaaacgtgtcgtgaatgtttcttcagtttcttgttcagccaatgaggaaagggcattgcctttctttttaccattaatcacttctcaataaacgtgagatcctgttgagcatcaaaaaaaaaaaaaaaaaaa

SEQ ID NO: 7329 - DNA, 600 bp, Homo sapiens
ctgcagaaatgcgaaaagaatgggtggatggaacagatctctgggaaagggttcagtggcaccttccagctctgttttccctattatcccagcccaggagttctgtttccgaagaaagagccagatgattctagagatgaggatgaagatgaagatgagtcatcagaagaagactctgaggatgaagagccgccacctaagagaaggttgcagaagaaaaccccagccaagtccccagggaaggccgcatctgtgaagcagagagggtccaaacctgcacctaaagtctcagctgcccagcgggggaaagctaggcccttgcctaagaaagcacctcctaaggccaaaacgcctgccaagaagaccagaccctcatccacagtcatcaagaaacctagtggtggctcctcaaagaagcctgcaaccagtgcaagaaaggaagtaaaattgccgggcaagggcaaatccaccatgaagaagtctttcagagtgaaaaagtaaattttataggaaaaaagggtatgatgatgaaattcaaaatcttattttctaagcacttttgatatcaagcaagtggcttcctttttgagatattaaaac

SEQ ID NO: 7330 - DNA, 600 bp, Homo sapiens
  misc_feature (558)..(558): n is a, c, g, or t
tgctggtcatttatgatggcaaggagcggcccgaagtggtcctggactcagatgctgaggatttggaggacctgtcagaggaatcagctgatgagtctgctggtgcctatgcctacaaacccatcggcgccagctctgtagatgtgcgcatgatcgactttgcacacaccacctgcaggctgtatggcgaggacaccgtggtgcatgagggccaggatgctggctatatcttcgggctccagagcctgatagacattgtcacagagataagtgaggagagtggggagtgagcttgctagctgctccagtacttgagagcgactctgtgtcccaggcacagctgtgctgcggcagccacgaagccagtatggccaggtggtggctcctgcagcctggaaaaaaatgtgcagtggcctctgagagccccagcctgagccagtcccagctgtgcttggagtctttatttattttaactatttcttcgaacattccacatttgatgatgatacctctttcttccctgagtgtatatgttcgtaatacaaatctttttgttanatgaaaaaaaaaaaaaaaaaaaaaaaagaaaaactcgaaaag

SEQ ID NO: 7331 - DNA, 600 bp, Homo sapiens
agtttgacaagaagaagctgatctctgtggagacggacatagtcgtggatcactacaaggaggagaagtttgaggacaggtccccagccgccgagtgcctatcagagaaggagacggaggagctcatggcctggatgagaaatgtgctggggtcgcgtgtcaccaacgtgaaggtgaccctccgactggacacccaccctgccatggtcaccgtgctggagatgggggctgcccgccacttcctgcgcatgcagcagctggccaagacccaggaggagcgcgcacagctcctgcagcccacgctggagatcaaccccaggcacgcgctcatcaagaagctgaatcagctgcgcgcaagcgagcctggcctggctcagctgctggtggatcagatatacgagaacgccatgattgctgctggacttgttgacgaccctagggccatggtgggccgcttgaatgagctgcttgtcaaggccctggagcgacactgacagccagggggccagaaggactgacaccacagatgacagccccacctccttgagctttatttacctaaatttaaaggtatttcttaacccgaaaaaaaaaaaaaaa

SEQ ID NO: 7332 - DNA, 600 bp, Homo sapiens
ttcaatatggagaagacctagaatttaaagaaccaaaggaacgtgaagatgagtcttcctctatgtttgacgaatattttcaagaatgccaggatgaatgaagagtttactaaaagtaaccatctaaagagcttgtggccaaaccagcagaacattcttctcttcaaaggatgcaatagtagaaagctacttattttaatgaaaaaaagtaaaacttcgttctttatcagcctcatgcctgaatcaaatttttaattattctgaaactgctgctgtttaaagtggaatcttttagtattataacagcatcactttagattttgtaagtcaaaattgaaatgaatgcacatagatttatatataaattagcacctgagctaaggttaaggctggtctaaacttattttcactttttgtattatttttgagatgcaggaattactgtaacaaaatatgtatgtccgaagggaaaaagctgcaaggatatatataagaccactgcttatctgtatcttcccattttcctatattgaaaatgtatattatttatataacttaaaaagtaaaaataactatgttttgaaaaaaaaaaaaaaaaaa

SEQ ID NO: 7333 - DNA, 600 bp, Homo sapiens
cacttactgtgtataaggcttgcaacttgaatctgataggccggccttctacagaacacagctggtttcctgggtatgcctggactgttgcccagtgtaagatctgtgcaagcccatattggatgggaagtttacggccaccaaaaaagacatgtcacctcaaaaattttggggcttaacgcgatctgctctgttgcccacgatcccagacactgaagatgaaataagtccagacaaagtaatactttgcttgtaaacagatgtgatagagataaagttatctaacaaattggttatattctaagatctgctttggaaattattgcctctgatacatacctaagtaaacataacattaatacctaagtaaacataacattacttggagggttgcagtttctaagtgaaactgtatttgaaacttttaagtatactttaggaaacaagcatgaacggcagtctagaataccagaaacatctacttgggtagcttggtgccattatcctgtggaatctgatatgtctggtagcatgtcattgatgggacatgaagacatctttggaaatgatgagattatttcctgtgttaaaaaaaaaaaa

SEQ ID NO: 7334 - DNA, 600 bp, Homo sapiens
tatacacaacaggcatttaagcaatgaagatatgtttagagaagtggatgaaatagatgagataaggagagtcagaaacaaacttatagtgatgcgttggaaggttaatcgaaaccatccttacccctatttaatgtagtttaccttgatttttatctgatattaacaataccatatagcttgctttttattagcatttcctgatattcctttgtccatatttctacttataacctgttgctattaatggttttagatgtatctcttgttatctgcatctcattgtttattgtattttgaaccaatctacaagtctctgtcttttaataaaagaactttacacatttgtaaaaaagaggttcttggtaagatataaaatggaaaaaggctaagtaatatgtgaatatcatatttttgaaaggtaaaaagtacatttgtatattacatatatggacataacttgtgaaggatgaaagaaagtcagcctctcggtggtgggattatgaatgatttttctccttttgcttgttagtattttctatattctaaaattaacacacattattatagctagaatataaaagttttataaaaaaaaaa

SEQ ID NO: 7335 - DNA, 1400 bp, Homo sapiens
gcatcacttcctctcaagcttggcgtttgtttggtggggttacacgcgggttcaacatgcgtatcgaaaagtgttatttctgttcggggcccatctatcctggacacggcatgatgttcgtccgcaacgattgcaaggtgttcagattttgcaaatctaaatgtcataaaaactttaaaaagaagcgcaatcctcgcaaagttaggtggaccaaagcattccggaaagcagctggtaaagagcttacagtggataattcatttgaatttgaaaaacgtagaaatgaacctatcaaataccagcgagagctatggaataaaactattgatgcgatgaagagagttgaagaaatcaaacagaagcgccaagctaaatttataatgaacagattgaagaaaaataaagagctacagaaagttcaggatatcaaagaagtcaagcaaaacatccatcttatccgagcccctcttgcaggcaaagggaaacagttggaagagaaaatggtacagcagttacaagaggatgtggacatggaagatgctccttaaaaatctctgtaaccatttcttttatgtacatttgaaaatgccctttggatacttggaactgctaaattattttattttttacataaggtcacttaaatgaaaagcgattaaaagacatctttcctgcattgccatctacataatatcagatattacggatgttagattgcatctcagtgttaaatctttactgatagatgtacttaagtaaatcatgaaaattctacttgtaactatagaagtgaattgtggacgtaaaatggttgtgctatttggataatggcactaggcagcatttgtatagtaactaatggcaaaaattcatggctagtgatgtataaaataaaatattctttgcagtaaaatattccctttgttaatgttatagaaggggggatacaaaaaggaactaacaatttgtatggcagtgtcagatatttttattttagtatttcctgttttggtttatttgcatcttagaagagcataatgacattgtttgatgaagcctaattatgctggactgttttgacctggtttaacccttctgataggtagttgtggatgctggggatgagaactgaataatctttgcctggagtgacactacactctagaatttccactttggagaatactcagttccaacttgtgattcctgatagaacagactttacttttctagcccagcattgatctagaagcagaggaatcccagcgccttttaaaagttgttatgtggttttcttttaaaaagctcctgtttttggaaagtagaatttatgggtacaacgtatgttcattatttgtacataaaataaaaccatttaaaaagtaaaaaaaaaaaaaaaa

SEQ ID NO: 7336 - DNA, 600 bp, Homo sapiens
cccgggataagatcaccaggccaggagcgaagctatggaagaaaggggaagggctccccaactttgacaacaacaatatcaagggctctttgataatcacttttgatgtggattttccaaaagaacagttaacagaggaagcgagagaaggtatcaaacagctactgaaacaagggtcagtgcagaaggtatacaatggactgcaaggatattgagagtgaataaaattggactttgtttaaaataagtgaataagcgatatttattatctgcaaggtttttttgtgtgtgtttttgtttttattttcaatatgcaagttaggcttaatttttttatctaatgatcatcatgaaatgaataagagggcttaagaatttgtccatttgcattcggaaaagaatgaccagcaaaaggtttactaatacgtctccctttggggatttaatgtctggtgctgccgcctgagtttcaagaattaaagctgcaagaggactccaggagcaaaagaaacacaatatagagggttggagttgttagcaatttcattcaaaatgccaactggagaagtctgtttttaaatacattttgttgttattttt

SEQ ID NO: 7337 - DNA, 1400 bp, Homo sapiens
tactctattatatagtgttattcatgattcagctgatcttaacaaaattcgtagcagtggaaccttgaaatgcatgtggctagatttatgctaaaatgattctcagttagcattttagtaacacttcaaaggtttttttttgtttgttttctagacttaataaaagcttaggattaattagaagaagcaatctagttaaatttcccatttgtattttattttcttgaatacttttttcatagttatttgtttaaaaagatttaaaaatcattgcactttggtcagaaaaataataaatatatcttataaatgtttgattcccttccttgctatttttattcagtagatttttgtttggcatcatgttgaagcaccgaaagataaatgatttttaaaaggctatagagtccaaaggaatattcttttacaccaattcttcctttaaaaatctctgaggaatttgttttcgccttacttttttttcttctgtcacaatgctaagtggtatccgaggttcttaatatgagatttaaaatcttaaaatgtttcttattttcagcacttacatcatttggtacacagggtcaaatagggcaaataattttgtctttgtataatagatttgatatttaaagtcactggaaataggacaagttaatggatgtttttatattttaatagaatcatttatttctatgtgttatgaaattcacttaatgataaatttttcaacatacttgccattagaaaacaaagtattgctaagtactataacatattggccactaaaattcatattgagattatcttggtttcttggaagagataggaatgagttcttatctagtgttgcaggccagcaaatacagaggtggtttaatcaaacagctctagtatgaagcaagagtaaagactaaggtttcgagagcattcctactcacataagtgaagaaatctgtcagataggaatctaaatatttatagtgagattgtgaaagcaaccttaaagttttgaagaagactgatgagactaggtgctttgcttcctttcatcaggtatctttctgtggcatttgagaacagaaaccaagaaacatggtaattactaaattatgaggctttgctttttgtttgcttttaagtagaaaaacatgttggcaacattgagttttggagttgattgagataatatgacttaactagttttgtcattccatttgttaaagatacagtcaccaagaatgttttgagttttttgaaagaccccaatttaagccttgcttatttttaaattatttccattcagtgatgttggatgtatatcagttatttagtaaataatctcaataaattttgtgctgtggcctttgctaaaaaaaaaaaaaaaaaaaaaaaaaaaa

SEQ ID NO: 7338 - DNA, 600 bp, Homo sapiens
gagtaggtgggtagccctgatgggggtcgctctgtctggagcataacccacaggcgttttttctgccaccccatccctgcatgcctgatccccagttcctataccctacccctgacctattgagcagcctctgaagagccatagggcccccacctttactcacaccctgagaattctgggagccagtctgccatgccaggagtcactggacatgttcatcctagaatcctgtcacactacagtcatttcttttcctctctctggcccttgggtcctgggaatgctgctgcttcaaccccagagcctaagaatggcagccgtttcttaacatgttgagagatgattctttcttggccctggccatctcgggaagcttgatggcaatcctggaagggtttaatctccttttgtgagtttggtggggaagggaagggtatatagattgtattaaaaaaaaaaaggtatatatgcatatatctatatataatatgacgcagaaataaatctatgagaaatctatctacaaaaaaaaaaaaaaaaaaaaaaaaaaaaaaaaaaaaaaaaaaaaaaaaaaaaaaaaaaaaaaaaaaaaaaaaaaaa

SEQ ID NO: 7339 - DNA, 600 bp, Homo sapiens
gggtgcagctggtctctgaatgacgttacaccctcaccttcttttcctggccctgtctctggactctcccctgtgaggcccaattccaagacagactctcgtcctcaccgaagcttaggcccacatctcccaggctgcttaggagacagaatggaaacggaggccgcccctgccagccgccctggccctggtcactgcatgatccgctctggtcaaacccttccaggccagccagagtggggatggtctgtgacctgctgggaaggcaggctgatggggcacacccttggcctctcgtccacgaggggagaaacctaaaccctgtttcacaatctgtgcggaagtagcttgcctcacttctgcttaggaaagcggctgttgctccataactctaaccagcacagggctgaggcctgcagtgcacacctgcagggaggcccttcccaaggtgtggtgactgtgccttactgtacatgctcggaggcctggccatataggagggtgggtgatgctgaaatcaccccccatcttaagtaattactttctggagtaatcaggtggaaatccatagacaaatgaaaaaaaaaaaaaaaaaaaaaa

SEQ ID NO: 7340 - DNA, 1400 bp, Homo sapiens
cgtcaggtgcagaatggcccctctcctgatgagatggacatccagagaagacaagtgatggagcagcaccagcagcagcgtcaggaatctctagaaagaagaacctcggccacagggcccatcctcccaccaggacatccttcatctgcagccagcgcccccgtctcatgtagtgggcctccaccgccccccccacccccagtcccacctccacccactggggctaccccacctcccccacccccactgccagccggaggagcccaggggtccagccacgacgagagctccatgtcaggactggccgctgccatagctggggccaagctgagaagagtccaacggccagaagacgcatctggaggctccagtcccagtgggacctcaaagtccgatgccaaccgggcaagcagcgggggtggcggaggaggcctcatggaggaaatgaacaaactgctggccaagaggagaaaagcagcctcccagtcagacaagccagccgagaagaaggaagatgaaagccaaatggaagatcctagtacctccccctctccggggacccgagcagccagccagccacctaactcctcagaggctggccggaagccctgggagcggagcaactcggtggagaagcctgtgtcctcgattctgtccagaaccccgtctgtggcaaagagccccgaagctaagagcccccttcagtcgcagcctcactctaggatgaagcctgctgggagcgtgaatgacatggccctggatgccttcgacttggaccggatgaagcaggagatcctagaggaggtggtgagagagctccacaaggtgaaggaggagatcatcgacgccatcaggcaggagctgagtgggatcagcaccacgtaaggggccggcctcgctgcgctgattcgtcgagcccatccggcgacagaggacagccagaagcccagccagccccagactccagtgcaccagagcacgcacaggagcctgggcgcgctgctgtgaaacgtcctgacctgtgatcacacatgacagtgaggaaaccaagtgcaactcctgggtttttttagattctgcctgacacggaacaccaggtctgctcgtcttttttgtgttttatatttgcttatttaaggtacatttctttgggtttctagagacgcccctaagtcacctgcttcattagacggtttccaggttttctcccaggtgacgctgttagcgcctcagctggcggtgacagccggcccagcgtggcgccaccacacaccgcagagctgtccaggcacagctccgtccccagcgctcatggtgttgaaactgtctgtcatgcaccacggtgtctgtgtccacacagtaataaacggtttactgtccgcaaaaaaaaaaaaaaaaaa

SEQ ID NO: 7341 - DNA, 600 bp, Homo sapiens
cagagcttctttcctttagtatctgaaggtttgagtcaaagctgttttcccatctggaatcagttgcccatttggctatccgcccgagcgttgtggtttcctctcctgttcctggcctgcctttgtgactcactctggagatcaccttcgaggttaatggcttgtggaagagttccaagttttatctctgtcctagttggttaaacatcattttctctttttcaagcaagtgaaaagctttcaatagatagatgtttatttcctaagcactaaatgactcataaattaagtccctgtagatttggaaaaactccttaaactgtatctagaggtctagcacttcctagtaggatagacagtcctttctagatactgtaacttttttctgtaccgctttggagtacagtctttatgaagttgtttgtaagcaaaagggaatagaatttaagcctaaaggctgggcgcgatggctcacatctgtaatcccaatgctttgggaggccaaggcaggtggatcacctgaggtcaggagttcgagaccagcctgaccaacatggtgaaaccccatctcaaaatacaaaaaattatctgggtgtggtg

SEQ ID NO: 7342 - DNA, 1400 bp, Homo sapiens
cctgcccctctccagccagctccctggagtcgtgtgtcctggcggtgtccctgcaagaactggttctgccagcctgctcaattttggtcctgctgtttttgatgagccttttgtctgtttctccttccaccctgctggctgggcggctgcactcagcatcaccccttcctgggtggcatgtctctctctacctcatttttagaaccaaagaacatctgagatgattctctaccctcattcacatctagccaagccagtgacctttgctctggtggcactgtgggagacaccacttgtctttaggtgggtctcaaagatgatgtagaatttcctttaatttctcgcagtcttcctggaaaatattttcctttgagcagcaaatcttgtagggatatcagtgaaggtctctccctccctcctctcctgttttttttttttgaggcagagttttgctcttgttgcccaggctggagtgtgatgggctcgatcttggctcaccacaacctctgcctcctgggttcaagcaattctcctgcctcagcctcttgagtagcttggtttataggcgcatgccaccatgcctggctaattttgtgtttttagtagagacagggtttctccatgttggtcaggctggtctcaaactcccaacctcaggtgatctgccctccttggcctcccagagtgctgggattacagggggagccactgtgccggtcccgtcccctccttttttaggcctgaatacaaagtagaagatcactttccttcactgtgctgagaatttctagatactacagttcttactcctctcttccctttgttattcagtgtgaccaggatgggcgggaggggatctgtgtcactgtaggtactgtgcccaggaaggctgggtgaagtccccatctaaattgcaggatggcgaaattatccccatctgtcctaatgggcttccctcctctttgccttttgaactcacttcaaagatgtaggcctcatcttacaggtcctaaatcactcatctggcctggataatctcactgccctggcacattcccatttgtgctggggtatcctgtgtttccttgtcctggtttgtgtgtgtgtgtgtgtgtgtgtgtgtgtgtgtgtgtgtttgtgtgtgtgtgtctgtctattttgatccggcccaagttcctaagtagagcaagaattcatcaaccagctgcctttgtttcatttcacctcagcacgtaccatcgtcctttggggggttgtttgtttttgttttttgctttaaccaaaatgtttgtaaatcttaacctcctgcctaggatttgtacagcatttggtgtgtgcttataagccaataaatattcaatgtgagttccaaaaaaaaaaaaaaaaaaaaaaaaaaaaaa

SEQ ID NO: 7343 - DNA, 600 bp, Homo sapiens
tgtaccagaattcggccatgagccgctacatactcatcatggggctcctgtacaaggtgctgggcgtcctcttctttgccatagcctgcttcttatacaagcccctgtcggagtcttcagatggcctggaaacttgtctgcccagccagtcctcagcccctgacagtgccacagatagccagctccagagcagcgtctgaccaccgcccgcgcccacccggccacggcgggcactcagcatttcctgatgacagaacagtgccgttgggtgatgcaatcacacgggaacttctatttgacctgcaaccttctacttaacctgtggtttaaagtcggctgtgacctcctgtccccagagctgtacggccctgcagtgggtgggaggaacttgcataaatatatatttatggacacacagtttgcatcagaacgtgtttatagaatgtgttttatacccgatcgtgtgtggtgtgcgtgaggacaaactccgcaggggctgtgaatcccactgggagggcggtgggcctgcagcccgaggaaggcttgtgtgtcctcagttaaaactgtgcatatcgaaatatattttgttatttaagcctg

SEQ ID NO: 7344 - DNA, 1400 bp, Homo sapiens
ttcactactcagaatcagaaatcccaggatgtggaactctgggagggagaagtggtcaaagagctctctgtggaagaacagataaagagaaatcggtattatgatgaggatgaggatgaagagtgacaaattgcaatgatgctgggccttaaattcatgttagtgttagcgagccactgccctttgtcaaaatgtgatgcacataagcaggtatcccagcatgaaatgtaatttacttggaagtaactttggaaaagaattccttcttaaaatcaaaaacaaaacaaaaaaacacaaaaaacacattctaaatactagagataactttacttaaattcttcattttagcagtgatgatatgcataagtgctgtaaggcttgtaactggggaaatattccacctgataatagcccagattctactgtattcccaaaaggcaatattaaggtagatagatgattagtagtatattgttacacactattttggaattagagaacatacagaaggaatttaggggcttaaacattacgactgaatgcactttagtataaagggcacagtttgtatatttttaaatgaataccaatttaattttttagtatttacctgttaagagattatttagtctttaaattttttaggttaattttcttgctgtgatatatatgaggaatttactactttatgtcctgctctctaaactacatcctgaactcgacgtcctgaggtataatacaacagagcactttttgaggcaattgaaaaaccaacctacactcttcggtgcttagagagatctgctgtctcccaaataagcttttgtatctgccagtgaatttactgtactccaaatgattgctttcttttctggtgatatctgtgcttctcataattactgaaagctgcaatattttagtaataccttcgggatcactgtcccccatcttccgtgttagagcaaagtgaagagtttaaaggaggaagaagaaagaactgtcttacaccacttgagctcagacctctaaaccctgtatttcccttatgatgtcccctttttgagacactaatttttaaatacttactagctctgaaatatattgatttttatcacagtattctcagggtgaaattaaaccaactataggcctttttcttgggatgattttctagtcttaaggtttggggacattataaacttgagtacatttgttgtacacagttgatattccaaattgtatggatgggagggagaggtgtcttaagctgtaggcttttctttgtactgcatttatagagatttagctttaatattttttagagatgtaaaacattctgctttcttagtcttacctagtctgaaacatttttattcaataaagattttaattaaaatttg

SEQ ID NO: 7345 - DNA, 1400 bp, Homo sapiens
ttccatctgctcgggcgaagatccgcatcacctccagccccatttttatcaccttctacatcctggtgtttgtggtggcgctggtgggcattgcccgggccgtggtatccatgacggtgagcacctcgaacgctgcaactgttgctgataagatcctgtgggagatcacccgcttcttcctgctggccatcgagctgagtgtgatcatcctgggcctggcctttggcacctgggagagtaagtccagcatcaagcgggtgctggccatcaccacagtgctgtccctggcctactctgtcacccaggggaccctggagatcctgtaccctgatgcccatctctcagctgaggactttaatatctatggccatgggggccgccagttctggctggtcagctcctgcttcttcttcctggtctactctctggtggtcatccttcccaagaccccgctgaaggagcgcatctccctgccttctcggaggagcttctacgtgtatgcgggcatcctggcactgctcaacctactgcaggggctggggagtgtgctgctgtgcttcgacatcatcgaggggctctgctgtgtagatgccacaaccttcctgtacttcagcttcttcgctccgctcatctacgtggctttcctccggggcttcttcggctcggagcccaagatcctcttctcctacaaatgccaagtggacgagacagaggagccagatgtacacctaccccagccctacgctgtggcccggcgggagggcctggaggctgcaggggctgctggggcctcagctgccagctactcgagcacgcagttcgactctgccggcggggtggcctacctggatgacatcgcttccatgccctgccacactggcagcatcaacagcacagacagcgagcgctggaaggccatcaatgcctgagggcagctgccagggcctgtggaggacaggccagagaggaggccagcaggcccagagtccccaggggaggaggaccaggtcaagggacgttctgtgggcagtagccctgtgtggccctgttcccaccatgagtctggaggccccacctccctggggctcccaatcccctttgccatctctgctctcactggggaccctcctccccttcccacctgctctcatactgctcagtgacatggcccaggctttccttccagggccatgcttggcaaggttggctgagggcaccctccttctctgcacccttggcacgagggcagggctggctctcccaatgcctccatcccatccccatggtgctttggcctcctcaaagcatccaccatggtggatggactgaagtgtgtatattttcttgatctattttttaataaaaaggaaaaggagcaaaaaaaaaaaaaaaaagttttg

SEQ ID NO: 7346 - DNA, 1400 bp, Homo sapiens
tggaggcttttcactgcctgtagagacaatacagtaagcatagttaaggggtgggtcagaacatgttaagataacttactgtatatgtattcccttgtattttgttaaagctggaacatttgatatttttccatttatttatgaaaaaatatgaacctattttcatttgtacaaggtaattgttttttaaagcaagtcaccttagggtggctttaattgtataagtcaagcacatgtaataaattcaaaacctgcagttaacaggatattagacatcaatcctggtaaccaaatattaaagattctctttaaaaaagactgaacatgtttacaggtttgaattaggctaaaaggtcttgcagtggcttttcatggcccttcaaattggaatggaactactgtactttgccatttttctataaatcagtatttttttttaattttgatatacattgtgtgaaaaaagaaaatggctaataaactgtattaaatcttaaacaatgtataaagattgtacttagccagttcaaagtgtatatttattcataatgaattataacagttatatttttgtgttttcttgtaaatgtttcttttcccttaaatacagataattcatttgtattgcttattttattatgagctacaacaaaaggacttcaggaacaagtaatgtattagtatggttcaagattgttgataggaactgtctcaaaaggatggtggttattttaaatataaatagctaatgggggtggtaggcctataaaattaaatgccttgtataaaatccaaaatgaatgcaaaattgttttcacttgtattgactttatgttgtatgattccaatctctgttctgtttggcacttgtatttaattcttcacctttgtaagacatttgtatattgtggatgtgttcattcaagctatttaatatctggcactgttaatacacagtactttattgtacagactgttttactgttttaattgtagttctgtgtactttttttggatggggctggcatgttttctttgtttcctggcaatacgacgtgggaatttcaatgcgttttgttgtagatgctaacgtgtcagaatcctttacattcaacttttctaagaaaagcattttcagtcttgtagtgtgtgcttacagtaactaattttgttgaaaatggtttcaagttattcaaatttgtacaggactgtaaagatttgttgacagcaaaatgttgaagaaaaaagcttatagaataaaagctataaagtatatattaggatctgcaaacaatgaagaattatgtaatatattgtacaaatgtaagcaaaggctctgaaataaaatgccatagtttgtgaatccttaaaaaaaaaaaaaaaaaaaaaaaaaaaaaaaa

SEQ ID NO: 7347 - DNA, 1137 bp, Homo sapiens; identical to SEQ ID NO: 2112

SEQ ID NO: 7348 - DNA, 1400 bp, Homo sapiens
ataacaaagatgccgtcattgaatttctcttggacaaatctgcagaaaaggctcttgggaaggcagcatctcacattaaaagcattaagaatgtgacagagctgaagctttctgataatcctgcctgggaaggggataaaggaaacactaaaggtgacaagcacgatgacctccagcgggcgcgtttcatctgccccgttgtgggcctggagatgaacggccgacacaggttctgcttccttcggtgctgcggctgtgtgttttctgagcgagccttgaaagagataaaagcggaagtttgccacacgtgtggggctgccttccaggaggatgatgtcatcgtgctcaatggcaccaaggaggatgtggacgtgctgaagacaaggatggaggagagaaggctgagagcgaagctggaaaagaaaccaaagaaacccaaggcagcagagtctgcttcaaaaccagatgtcagtgaagaagccccagggccatcaaaagttaagacagggaagcctgaagaagccagccttgattctagagagaagaaaaccaacttggctcccaaaagcacagcaatgaatgagagctcttctggaaaagctgggaagcctccgtgtggagccacaaagaggtccatcgctgacagtgaagaatcggaggcctacaagtccctctttaccactcacagctccgccaagcgctccaaggaggagtctgcccactgggtcacccacacgtcctactgcttctgaagcccgcactgccaccgctcctgccccagaaggttgtttagtttccacgtaggcaggtcgctttgtgcctctgagtgcgctgctgtgtgttctctctatagttctgtgtcataaagctgtcctgggccagccttcaagctgggtgttggccactcttgatgtgaggcgtgtcggttccaggggggacatgggaggggctgcacagtggcccgaggtcatgcttgcttccacctgcaggtgcatttggtcctttccatggccaggaagccctgtgggctgcactttttatgcttgcagtaacaagagactccagagtcctcaccggtgcagagttggcacatattaattaactaaaattctaatgatcttgctaccagcaataaatcaagtaggccaagtgaaactgggctttaaaaaggatggatttcaaatacactgtgcccactagaagcttcgaagggcctcgtccctctgctacagccctgggaggagccaggatccttgttggtctagctaaatactgttaggggagtgtgccccatctcatcatttcgaagatagcagagtcatagttgggcacccagtgattgggttcaaaaataaagctggtctgcctctccaaaaaaaaaaaaaaaaaaaaaaaaaaaa

SEQ ID NO: 7349 - DNA, 1400 bp, Homo sapiens
  misc_feature (90)..(90): n is a, c, g, or t
atgaattattgcagctgactaccatacctcacacagcgttggtgttgtgagcggcccatgaaaagccaaattaaaaatcaaggattcagncaaactaagcaggtactcatgccaggtactcctttctctacccacatccatgtttgaatgctattgcctgtgatctttacgcttaactgttgtgtatcttttttgttctttacaagaagtgcagaggggttttttgtgtattgcgtgaaaacttataaaacaaatgttaacagaatggaattttttttcaactgtatgtagggctgcagtggtggccagaattagatatctttaaagaattttaaatacaataaacacttcatattattcgccttgttacactcaatgcaattctcaagtctataagaggtatgtgcttaatatttcctactgtgtaggagaatttgcagtcagccataggtatgtaggaatagtcactcactggctgatacatttaaagcagcagtgtgaatagcaaggacagacaccttcaatttgtgaaatcaaagaactgatgcactatatagaacgaatttgggtttttaaagaaatattaaaagttaggtactgtaagtgttcttaaaacctgtaaacttcattctgtgggctagtggtgtgggacaaaatattcctaatgaaaggaagtaccaattagttgatttgttggtggcattccccttttgggaaagcaatgtaaggttatgtctgtgtatgtcattcacacttaggcaagcatacacaggcacatggctttaagaaccacactgatgccttgataattaaaaagaatacaagcattccatgtacacatgttaattagcagttagtgactgggccaacactttctcataaaaattggccttttacatgttgtctaattatcatttttccccaaattgggcgttgtaggactactgttcgaagatttttggaagaatactgagaacggcataaagtgaagatcgacatttaaaaaatgaggtgaaagaaagctatagtggcatagaaaaagtataaagctcagttagtttttttattattattattattaaaagttaattcaggactgatgtgacctaccagatttcagaacatgtgttaatagtatatatgccactgaaaacttaggtcctgtatcatacttttttctttaagactttttaagaaatattacttaaacatgtggcttgctcagtgtttaattgcaagttttcaatcttggactttgaaaacaggattaaacgttagtattcgtgtgaatcagactaagtgggatttcatttttacaactctgctctacttagcctttggatttagaagtaaaaataaagtatctctgactttctgttaaaaaaaaaaaaaaaaagctt

SEQ ID NO: 7350 - DNA, 875 bp, Homo sapiens; identical to SEQ ID NO: 2115

SEQ ID NO: 7351 - DNA, 875 bp, Homo sapiens; identical to SEQ ID NO: 2115

SEQ ID NO: 7352 - DNA, 600 bp, Homo sapiens
ccagagcagcccagggtcctgccagagtctgcaggggacagccctcgttttttaagtcttttttttttttttttttggtctattctaaaggaccagtaaataatgatcttacttccaaatctccttggaatttcacgacagcacagactgactttataccttcatttcagcgtggtaaaaaccgattaacacttctaatgagtcaagtcctagggttttttggttttgttttgttgccaacgaggaacacagctctgggggaatggtgtcatccacctcgctttaaaaataagcacatgatggctgggcaccgtggctcacgcctgtaatcccagcactttgggaggctgaggcgggtggatcacctgaggtcgggagtttgagaccagcctggccaacatggtgaaaccccatcgctactaaaaatataaaaaattagctgggcatggtggcgcacgcctgtagttccagctactcaggaggctgaggcaggagaatcgcttgaacccgggaggtggaggttgcagtgagctgagatcgcaccattgcactccagcctgggcaacaagagcgaaactctgtctcaaaaaaaaaaaaaaa

SEQ ID NO: 7353 - DNA, 1400 bp, Homo sapiens
ctctttaaactttagcaattataggagtatttatgtaactatcttatgcttcaaaaaacaaaagtatttgtgtgcatgtgtatataatatatatatatacatatatatttatacacatacaatttatgttttcctgttgaatgtatttttatgagattttaaccagaacaaaggcagataaacaggcattccatagcagtgcttttgatcacttacaaattttttgaataacacaaaatctcattctacctgcagtttaattggaaagatgtgtgtgtgagagtatgtatgtgtgtgtgtgtgtgtgtgtgtgtgcgcgcgcacgcacgccttgagcagtcagcattgcacctgctatggagaagggtattcctttattaaaatcttcctcatttggatttgctttcagttggttttcaatttgctcactggccagagacattgatggcagttcttatctgcatcactaatcagctcctggattttttttttttttttttcaaacaatggtttgaaacaactactggaatattgtccacaataagctggaagtttgttgtagtatgcctcaaatataactgactgtatactatagtggtaacttttcaaacagcccttagcacttttatactaattaacccatttgtgcattgagttttcttttaaaaatgcttgttgtgaaagacacagatacccagtatgcttaacgtgaaaagaaaatgtgttctgttttgtaaaggaactttcaagtattgttgtaaatacttggacagaggttgctgaactttaaaaaaaattaatttattattataatgacctaatttattaatctgaagattaaccatttttttgtcttagaatatcaaaaagaaaaagaaaaaggtgttctagctgtttgcatcaaaggaaaaaaagatttattatcaaggggcaatatttttatcttttccaaaataaatttgttaatgatacattacaaaaatagattgacatcagcctgattagtataaattttgttggtaattaatccattcctggcataaaaagtctttatcaaaaaaaattgtagatgcttgctttttgttttttcaatcatggccatattatgaaaatactaacaggatataggacaaggtgtaaatttttttattattattttaaagatatgatttatcctgagtgctgtatctattactcttttactttggttcctgttgtgctcttgtaaaagaaaaatataatttcctgaagaataaaatagatatatggcacttggagtgcatcatagttctacagtttgtttttgttttcttcaaaaaagctgtaagagaattatctgcaacttgattcttggcaggaaataaacattttgagttgaaatcaaaaaaaaaaaaaaaaaa

SEQ ID NO: 7354 - DNA, 1400 bp, Homo sapiens
gccatcacttaactataactcttaaagatagcttaatgactgtttattctcttgaccaaatagactcataataacatataattttaaaagaaatttaaattctttcttctctattgtattattttatacaatttgctatttctatttccttctcatattgattattctaaatactatgcaataatataacttagagttccacggtttgtttacacatttcctgttgtacatttaggttattcaaagttttcagctcttttaaaattgctctgaataagttctagtgagtgagttatggtgctggctatattttgctaaactgccctctcaaatgttgctaggaattcatactgcgaaaagcaatgaataagcatgcctgttttcccatggccttgcttgccagaatttgacttttattatgataatcagtgtaaaatgatatactactattgcttgtatattgtggtatacggtgtcaggtttcagggttttttttcaacgttaaatattctagaaactttctgaaataatttctgtttaaaaatattgaatatttgcttcatttcaaatactcccttttgacaaaaaaacttaggtataactgttgatgaaaaaccagaaaaaagtccagaactctttggtgactccaactatggatagcttattttgaaaaaggagaattgcaaattttaccaaaagatggagaaaagcacattaaaaagataccaacattcagaaattcatttcagcatgttattattggaaattatttaaactaatttagataactataagatacttattgtccatttataccctgtaaagccgttttagaatgtaatattttaggtaatccaaaatgtactaaattaaattcatttttagttatgagaaatctttgcttatatgacaaatgaaaagaataacaagttgtcaaatgaaaagaatgacattgaaacatttgtattgtctcttcttaaactatcttattgacttattatttaagccttttaatactaagtatgaaacaacctatggtctggaaatttgtatcgcaaagctatatgtgcatatgttatttaattcatctaacgctacacaaaagcataaaataatgatttttcactctctttaaaaatactaaatcatttatgtccatttctcaattttttcattgatctatgctttgagtttgctttctcaacattattgtattttccacttattattactgtataacatatgctagtgtttagttggattaatcttacctaaaagtactgaaaaatgctttttagtactttttcatattttatacatttattttccgaatgtatcattgaataattttattgagttataaaagtatcttattgctatttaataaaaaattaacacat

SEQ ID NO: 7355 - DNA, 1400 bp, Homo sapiens
tacaaggtctttgtgcccagcttcacttacagggtttcagcacagctggtgtgtgtggggggccgtggggtatctgcctgccccctgtcactgcgtctgcgtcccaaagccccacccctgcacaactcaagctctgtggcctgtggaggtgcctcaggatgccagctggagctggcactgcccccctgggggcactgggtctacgtgcgtgtggaaacatcatcccggggccctggtaggaccatccgcttccagctgtgtgtgcagttgcaagagtgcccacagcccggcctgctccgagccctggtccctggagctgccatgaacatgccccagtccctgggcaaccagccactgcccccagaaccgccatcccttggaacccctgcggaggggcctgggaccacgtccccacccgagcactgctggccagtgcgcccgactctgcgcaacgagctggacaccttctctgtccacttctacatcttctttggcccaagtgtggcccttccccctgagcgcccagccgtgttcgccatgaggctgttgccagtgctggacagtggaggcgtcctcagcctggagctccagctcaatgcgagctccgtgcgccaggaaaacgtgacggtgtttggatgcttgactcacgaggtgcccttgagcctgggggatgcagcagtgacctgttccaaagagtccctggccggcttcctcctctctgtcagtgccaccaccagggttgccaggctgcgaatcccattcccgcagacggggacctggttcctggccctccgctccctgtgcggggtggggcctcggttcgtgcggtgccgcaacgcgacggccgaggtgcggatgcgcaccttcctgtccccatgcgtggacgactgcgggccctacggccagtgcaagctgctgcgcacacacaattatctgtacgcagcctgcgagtgcaaggccgggtggagaggctggggctgcaccgacagtgcagatgcgctcacctatggattccagctgctgtccacactcctgctctgcctgagcaacctcatgtttctgccacctgtggtcctggccattcggagtcgatatgtgctggaagctgcagtctacaccttcaccatgttcttctccacggtatgcggtggtgtctgcatcttatcactgggtgcttgtgcatggtggtgggtcacagtctgtatttccaccacgttctccgagggtttgggaatgtctgtgccttcactgtgtcttctacagacagagacagcagtgcttcccaaactgtcatgcatagataatggtcatttttgtaagacacattggagtaaatgaacaaaactgtttgcaacttaataaagtaagtttgggcctccaaaaaaaaaaaaaaaaaaaaa

SEQ ID NO: 7356 - DNA, 1400 bp, Homo sapiens
gctatgttgctcatggctactatcctgcatttgggaaaatcctctcttcctaagaagccaattactgatgatgatgtggatcgaatttccctgtgcctcaaggtcttgtctgaatgttcacctttaatgaatgacattttcaataaggaatgcagacagtccctttctcacatgttatctgctaaactagaagaagagaaattatcccaaaagaaagaatctgaaaagaggaatgtgacagtacagcctgatgaccccatttccttcatgcaactaactgctaagaatgaaatgaactgcaaggaagatcagtttcagctgagtttactggcagcaatgggtaacacacagaggaaagaggcagcagatcccctagcatctaaacttaacaaggtcacccaattgacaggtttctcagatcctgtatatgcagaagcttacgttcatgtcaaccaatatgatattgtcctggatgtacttgttgtgaaccaaaccagtgatactttgcagaattgcacattagaactagctacactaggggatctgaaacttgtggaaaagccgtctcctttgactcttgctcctcatgacttcgcaaatattaaagctaacgtcaaagtagcatcaacagaaaatggaataatttttggtaatatagtttatgatgtctctggagcagcaagtgacagaaattgtgtggttctcagtgatattcacatcgacatcatggactatatccagcctgcaacttgcactgatgcagaattccgtcagatgtgggccgaatttgaatgggaaaacaaagtgacagttaacaccaacatggttgatttaaatgactacttacagcacatattaaagtcaaccaatatgaaatgcctgactccagaaaaggccctttctggttactgtggctttatggcagccaacctttatgctcgttccatatttggtgaagatgcacttgcaaatgtcagcattgagaagccaattcaccagggaccagatgctgctgttaccggccatataagaattcgtgcaaagagccagggaatggccttaagtcttggagataaaatcaacttgtcacagaagaaaactagtatataaaaataaacaaaaagtccttgaagctttacagttaatttaggtatgggcttactggactccaacatcttttgtactctttcatgcttatatagaatctgagttcatgctgaatacttttcagccaataatttatagcctttcccttaaatcaagattgagtttaaaattatagtttgtcttttgtcttaacagttctgaatgctgtcctcaaagtatataatgtttcatgtaccaagacccttttcacagtacaataaacagatctattcataaaaaaaaaaaaaaaaaaa

SEQ ID NO: 7357 - DNA, 552 bp, Homo sapiens; identical to SEQ ID NO: 2122

SEQ ID NO: 7358 - DNA, 552 bp, Homo sapiens; identical to SEQ ID NO: 2123

SEQ ID NO: 7359 - DNA, 600 bp, Homo sapiens
tgaggacatcaatgaccagatccagaacgccgccttcatgtacccggccagcccctggagccacatctcagctggagccattgacctcatcaacaacctgctgcaggtgaagatgcgcaaacgctacagcgtggacaaatctctcagccacccctggttacaggagtaccagacgtggctggacctccgagagctggaggggaagatgggagagcgatacatcacgcatgagagtgacgacgcgcgctgggagcagtttgcagcagagcatccgctgcctgggtctgggctgcccacggacagggatctcggtggggcctgtccaccacaggaccacgacatgcaggggctggcggagcgcatcagtgttctctgaggtcctgtgccctcgtccagctgctgccctccacagcggttcttcacaggatcccagcaatgaactgttctagggaaagtggcttcctgcccaaactggatgggacacgtggggagtggggtggggggagctatttccaaggcccctccctgtttccccagcaattaaaacggactcatctctggccccatggccttgatctcaaaaaaaaaaaaaaaaaaaaa

SEQ ID NO: 7360 - DNA, 339 bp, Homo sapiens; identical to SEQ ID NO: 2125

SEQ ID NO: 7361 - DNA, 600 bp, Homo sapiens
gcaggtgccgaagccctcaatggccagtccgacttcccctacctgggcgctttccccatcaacccaggcctcttcattatgaccccggcaggtgtgttcctggccgagagcgcgctgcacatggcgggcctggctgagtaccccatgcagggagagctgcctctgccatcagctccggcaagaagaagcggaaacgctgcggcattgtgcgcgccctgccggcggcgcatcaactgcgagcagtgcagcagttgtaggaatcgaaagactggccatcagatttgcaaattcagaaaatgtgaggaactcaaaaagaagccttccgctgctctggagaaggtgatgcttccgacgggagccgccttccggtggtttcagtgacggcggcggaacccaaagctgccctctccgtgcaatgtcactgctcgtgtggtctccagcaagggattcgggcgaagacaaacggatgcacccgtctttagaaccaaaaatattctctcacagatttcattcctgtttttatatatatattttttgttgtcgttttaacatctccacgtccctagcataaaaaaaaaaaaaaaaaaaaaaaaaaaaaaa

SEQ ID NO: 7362 - DNA, 462 bp, Homo sapiens; identical to SEQ ID NO: 2127

SEQ ID NO: 7363 - DNA, 600 bp, Homo sapiens
cattgcagtacaatagcgtcttcttccagcagtcaactcaagcacaaaagccagactgactcacctgatggcagcagtgggctgggaatttcatcccctaaagagttcagtgcaggagaaagctctacttctctcgatgctaatcacacaggggcagtcgttgagcctttgagaacttctgttccaaggctcccatcagagagtaagaaggaagactcctctgacgctacccaagtcccccaagcaagtctcaaagccagtgatctctctgactttcaatcagtttccaagctaaaccagggcaagccatgcacatgcataggcaaggaatgccagtgtaagagatggcatgatatggaagtgtattccttttcaggcctgcagagtgtccctcccttggctccagaacgaagatccacacttgaggactactctcagtcgctgcacgccagaactctgtctggctctccccgatcctgttctgagcaagctcgagtcttcgtggatgatgtgaccattgaggacctgtcaggctacatggagtattacttgtatattcccaagaaaatgtcccacatggcagaaatgatgtacacctga

SEQ ID NO: 7364 - DNA, 468 bp, Homo sapiens; identical to SEQ ID NO: 2129

SEQ ID NO: 7365 - DNA, 513 bp, Homo sapiens; identical to SEQ ID NO: 2130

SEQ ID NO: 7366 - DNA, 1400 bp, Homo sapiens
gtgcattgggttaaaaacgacaaccaacatcagccatgaaagatccaagtcgcagcagtactagcccaagcatcatcaatgaagatgtgattattaacggtcattctcatgaagatgacaatccatttgcagagtacatgtggatggaaaatgaagaagaattcaacagacaaatagaagaggagttatgggaagaagaatttattgaacgctgtttccaagaaatgctggaagaggaagaagagcatgaatggtttattccagctcgagatctcccacaaactatggaccaaatccaagaccagtttaatgaccttgttatcagtgaaggctcttctctggaagatcttgtggtcaagagcaatctgaatccaaatgcaaaggagtttgttcctggggtgaagtacggaaatatttgagtagacggggccctcttttggtggatgtagcacaatttccacactgtgaaggcagtattagaagacttaattgtaaaagcactcttgtcactgtgttacacttatgcattgccaaagtttttgttagtcttgcatgcttaataaaagtgctgagactgttactaagtaaaaagctgtcaaacatttactgaaaatagaattggccccatggcttgatgtgaagacagcaaggaaagaagcaccagtcaagttgtgaacaagcaccaaattaaaagacctaaaccttaccaaattgtctttttttgaggctaatctatcacttgttaatgtctaaactttaaaatcagtacatttaatttgagttccaactgttaagcatatttctcagacttaaatttgattatgtccccatcaaaaagaatctccattttctgaaggtctgttagttaatttgagataatttgttaaaggcaagtatgtcatattactgaggctacaagttagtcagcagatgagtgccagtccagccttttccggtatgttattgttagaaatattgagttctaatgttacatctgaggaagtatgtaatttgagaattgtaacttctaagggattcactgcatcatagctatgcctgtatggagtctaacatatgaccaataccaacccataatccagctgaacaaagatactgtaacattatgatttgagtggtgcttttccttgctttgttaaccatcacgagagtctgcagcacaacttttaacaaagctagaacagttttggcttcttaaacttcatatttgggtaggttaagctgccatacgtgttcagtgtgaatagtgtttaagttgaaaatattgtaaaaaaattatattttttcaaaaatatttaaaaaaataaataatagtagaactgaaaaaaaaaaaaaaaaaaaaaaaaaaaaaaaaaaaaaaaagaaaaaaaaaaaaaaaaaaa

SEQ ID NO: 7367 - DNA, 1400 bp, Homo sapiens
ctgttggaattgaagaagataatgatattgaagaaaatgaagatgctggagcagcctctctgcccactcagccaactcagccatcatcatcttcaacttatgacccaagcaacatgccatcaggcaactatactggaatacagattcctccgggtgcacacgctccagctaatacaccagcagaagtgcctcacagcacaggtgtagcaagtaatactatccaacctactccacagactatacctgccattgatcccgcacttttcaatacaatttcccagggggatgttcgtctaaccccagaagactttgctagagctcagaagtactgcaaatatgctggcagtgctttgcagtatgaagatgtaagcactgctgtccagaatctacaaaaggctctcaagttactgacgacaggcagagaatgaagcctttgtatgacagacccatgtatttttggcatgaggaactaacagtccattactctatcttcagcctatcaggatcacagttttaaggaagacttggttttgttgaatatgacaatgaaatctgtgtgtatcagatttttattgaagcattcatcagcagcctcaaccagttttcattgtccatttactagattcaatcgtctctgagtatatagggctgatgttagcaagaccctaaaaatgtccattgaaccctgcttcaaaaaatgaaaacacacctctataaaatgtgtactgggaataagctttgtatttacatacattaggggaattttttaaaatctgtaatgtttggacaaacagatgatattactttgctataaaattataaatgtaacttttaataaagatagccagaatattctaaattagaaattacgtttttgtttccctcaagacataaaacaaatataacattctaaactgctggatgaatctgaaaagacattaagttcaaattttaatttattctcatattaaatataactccattaaaagtttaaaatttcatgggagaaaatataataaggtaaagaggtagaatcactttcagacttaagaataatgttgatttcccaagtgctttaccttatctgttaaagcgtaagatgaattggtatttgcttcataggcagtttgactgcatgtattagagaatgaaaagaagatatttgtagtaatgcctggaaacttggtgctttaaattaaggtactcctctgctgctgtagaatggattccacacagtggatagctatgggtgattcagaatattatgtttagattcccatttgttaagtttataagttttgtggggaattatgaacttactgtgtactacctgcatttgtgctgtgtgaaaaataaatacaaggattcgtttagctaattcaattaaaaaaaaaaaaaaa

SEQ ID NO: 7368 - DNA, 600 bp, Homo sapiens
ttggctttcctctcatttccagcgtatatgagcaagacacagtgctatcatacatccccctgcagctttaaaaagcagcagaagcaagcacttctagccagaccctcaagcaccatcacttacctaactgacagcccaaagccagcattatgtgtaactctggcaggactaatccccttcgttgctccaccactggtcatgctgatgacaaaaacttatattcccatattagcttttactcagatggcttatggagccagtttcctatctttcttgggtgggatcagatggggttttgctctaccagaaggtagtccagccaaaccagactaccttaatttagctagcagtgcagctcctcttttcttttcatggtttgccttccttatttctgaaagacttagtgaagccatagtcacagtaataatgggtatgggagtagcattccaccttgaactttttctcttaccacattatcccaactggtttaaagccctgaggatagtagtcactttattggccactttttcatttataatcactttagtagttaaaagtagttttccagaaaaaggacataagagacctggtcaagtataa

SEQ ID NO: 7369 - DNA, 600 bp, Homo sapiens
catagaaagtccgtgcgtcctggtgcctcctacaaacgggcagaattgaaggaaatcctgaaagagataagagaggcctgtccagtctttgaaacatcaggagatacttcaccctcaagtggttcagcagtttcttcatcaaaggtgttagacaaacccagtaggctaactgaaaaggaacttgctgaggctgcaagcaagtgggctgctgaaaagctagagaaatcagatgaaagtaacttgcctgaaatttctgagtatgaggcgggatccacagcaccattgtttactgaccagccagaggaacctgagtcaaacacaacacatgggatagaattatttgaagatagtcagctaaccactcgctctaaagcaatagcatcaaaaaccaaagagattgaacaggtttaccgacaagactgtgaaactttcgggatggtggtgaaaatgctgattgaaaaagatccttcattagaaaagtctatacagtttgcattgaggcagaatttacatgaaataggtgagcggtgtgttgaagaactcaagcatttcattgcagagtatgatacttccactcaagattttggagagcctttttag

SEQ ID NO: 7370 - DNA, 1087 bp, Homo sapiens; identical to SEQ ID NO: 2135

SEQ ID NO: 7371 - DNA, 600 bp, Homo sapiens
cggaggttgtggtgagccgagattgcacctttgtactccagcctgggcaacgagcaaaaaactctgtctcaaagaaaaaaaaaaaagaaagaaaaagaaaaatggcttccaggacagagcatgctcatttgctggcggacagttccagaaacagaccctgttagtccttctacttacctgctggatttttcaagcactaaatttataactttttgcaacaaaataatgtgtaattttccatttgggggcaaactctattctggtgagcattattaaatcttgtttgtaaatatattgtctttctcttaatatttgctctgggtcaggaagaagctgttcacggtgtgataatactctttagattgtgctttcattattatagatgcatcatgtcttctgctttcacgtgtctgggatggggtcagaaatgcatcctccagctgacagaaaaatccaggatgagatcagaaggatactggtgttttctgacttttacaaaattacttgtttgttttcatttaaaaaaaagcataaactatgtttcttgttactattagaattattaaatttcaaaatgaatccaaaaaaaaaaaaaaaaaa

SEQ ID NO: 7372 - DNA, 545 bp, Homo sapiens; identical to SEQ ID NO: 2137

SEQ ID NO: 7373 - DNA, 600 bp, Homo sapiens
cagaaaaccgatcaaagaagaccagtttctttcgttgctcgctactttgatgaactctttctgagagactgcagcacacctagagggccctttcctgcttctctgaaagcacaggtcacccagcctcagaatcacacctcccggctgctgctgagagcaccactgaacttagacctctcaacacagtatgccaagtggattccagcctcatggcctagcaaaagaacagactccctttttcaaacatggaagcaatgaagtggagacacatgcaggacctaactcgttttttccttgttttattacctgttgcagaagcggttatctttcttttttactttgcacatcagtgttagcctttccctatttcagcacaatcttagactcatatttgcacacttttgtgtcgtgaagttctagacaaatttgtacatgtggcaatgttaaaagagcatttacagcagaggttaatatactaaaattaaagggtatttggtctggttcatatggtcaaatattactgccttggtagcatttatttaagggctttttcttaaataagaatcattaaagtcattaaaaaatttactgaaatgccca

SEQ ID NO: 7374 - DNA, 600 bp, Homo sapiens
tccagatcctgacagagagaactgggaaggatccaggttcgcttccgttggtagcttgagtcccatgcctccaccctgccatctgaggaaggggtgacaagtggtcaaggagctgtggccacagacttttccagggtggtccttggcaggtgaggtgcgtctgtgccacccttgtcaggagccattgacgacgggccccccctggaccccccgggacctcagagtgggggcaggcagaagggagaaccagctcaagacattttggaggatctggccctggggttcttcagagaacaccctctaggggctttggggacatggcctgtccccacatccagcacttgcctccgccatggtcactcggcagcccttttcccaggagaagacacctctgggagcctgctcagtgcttgtcctgccatcctgtgtcctgggactgagggttactccagttgctctgtgttgcatactctcccccgcaagcctgtgtatgaagaattgtcccctggcttccagcaggccatggctggctgttttgtgactgttacattgtgcaggggtaattattagcgtggcttttaaaaaaaaaaaaaaaaaaaa

SEQ ID NO: 7375 - DNA, 1400 bp, Homo sapiens
gcatccccgacttcaggggtccccacggagtctggaccatggaggagcgaggtctggcccccaagttcgacaccacctttgagagcgcgcggcccacgcagacccacatggcgctggtgcagctggagcgcgtgggcctcctccgcttcctggtcagccagaacgtggacgggctccatgtgcgctcaggcttccccagggacaaactggcagagctccacgggaacatgtttgtggaagaatgtgccaagtgtaagacgcagtacgtccgagacacagtcgtgggcaccatgggcctgaaggccacgggccggctctgcaccgtggctaaggcaagggggctgcgagcctgcaggggagagctgagggacaccatcctagactgggaggactccctgcccgaccgggacctggcactcgccgatgaggccagcaggaacgccgacctgtccatcacgctgggtacatcgctgcagatccggcccagcgggaacctgccgctggctaccaagcgccggggaggccgcctggtcatcgtcaacctgcagcccaccaagcacgaccgccatgctgacctccgcatccatggctacgttgacgaggtcatgacccggctcatggagcacctggggctggagatccccgcctgggacggcccccgtgtgctggagagggcgctgccacccctgccccgcccgcccacccccaagctggagcccaaggaggaatctcccacccggatcaacggctctatccccgccggccccaagcaggagccctgcgcccagcacaacggctcagagcccgccagccccaaacgggagcggcccaccagccctgccccccacagaccccccaaaagggtgaaggccaaggcggtccccagctgaccagggtgcttggggagggtggggctttttgtagaaactgtggattctttttctctcgtggtctcactttgttacttgtttctgtccccgggagcctcagggctctgagagctgtgctccaggccaggggttacacctgccctccgtggtccctccctgggctccaggggcctctggtgcggttccgggaagaagccacaccccagaggtgacagctgagcccctgccacaccccagcctctgacttgctgtgttgtccagaggtgaggctgggccctccctggtctccagcttaaacaggagtgaactccctctgtccccagggcctcccttctgggccccctacagcccaccctacccctcctccatgggccctgcaggaggggagacccaccttgaagtgggggatcagtagaggcttgcactgcctttggggctggagggagacgtgggtccaccaggcttctggaaaagtcctcaatgcaataaaaacaatttctttcttgcaaa

SEQ ID NO: 7376 - DNA, 1400 bp, Homo sapiens
aaaaagctttttttttaaaaaaaaaaacatgcatattctaaaaatgactattggtggggaggtgtaaataagtcataccttcttaaaacagaaaatttaagtaaagtcttttaaatgaaacctgtaaaagtattgactcttctaccaagttggtatgatattccaggcagctcaatgattatcacatttgagaccctgtgtttgaagcatttacaggcaatgtacagcaacagaggtacctcttggtgtatagtatttacattctcttttaggtagaagaggcaattttacccttatttcacatggttagaaatttaaagcaagatcatttacccaaggataggtgtttggtaatgttgaaggagttagtctggcttcatgttttacatcttcaactaaaatcccatactatctgcttggatttggagagccaaaaaataaagctgattgtcatgtgattaaatatctgatcaacaggtatgaatataacttaaatcagcatatttttgccatggtaataaattgtcctataaactatttatatatttttgttcttcataattatcactaataagcatcagtttgttgtttttaaaaggatatttaagtgagcattttctagttcatatgaaaataaccatagtacaggatgatttctgtccacacaaaggttaaattagattgcacagttaattttcacttatatttatggtactattatgtgggtgatgcctttttcttttaagcccagtacatatattatgcctgcctaagttctgaactggggctgtatttcagtagttgtagaattattgatatttagttttgatagctaatgtttaattgtttggatctgcacagtttggtttttgcacaaaagtcatttaaaaaaatctgagtaattgtcaaatattaaaagaaagatattcttcctgtaaggaatacagtttttagtcaaagtggccattacatcctctttttaatttacataatacagatacttgagaaagttgttgtggtgttgtatgccaagaaaattctttttattggtgcctatattgtaacaattatttttaatgcattgtattttgaagtaacggttcagttaaatttttcacctgctgtgtaactgaagcacaattacagtttataatcatctgtagaagtctggagataattttgcaactcatgttatgggttaaatgaatatttttgtaaaagtaaaagcaacaaatttataaattgattatttgaaactttacaacacaattgcatcccaaatacaaattgtattgcttattcattatagctattcgtcctgtaatctgtttctaggtgaagcatactccagtgttttaggggttttgaaaataaatatttaaatttcacagtcaaaaaaa

SEQ ID NO: 7377 - DNA, 600 bp, Homo sapiens
aaaaaagattggaggtgatttacagtgaaagacacaaataaaatacaactgttcaatggaaatagaaaataaacaccataaaagagagaagagaggtaatttgttagcatcaagagtcaagttgctatatggtcaaaggttaaatttatctctaaaaaatggcaggattcaaagttgtacatacatgtgattacttctgttttttacacccacatacagtacaaaagattattaaaaatattcccaaaaggcaggtgcaatgatgcacacttatacccccagccactcaggaggctgatgcaagaggatcgcttgagcccaggagttgaagtccagcctaagcaacatagtgaaaccccatctccaaaaatataataataattctctcaaaatactaaacagaggtggttttattgataagattttggctgtttggttttccactattctctattggctaaaatttgtttaatgagcatgaaatgtttttattttattttgcttatttttatgattgcaaaaaatgatatgagtttctccctgccaaggcaaaaaatatatatatatacctataaaaaaaaaaaaaaaaaaaaaaaaaaa

SEQ ID NO: 7378 - DNA, 1400 bp, Homo sapiens
ggcgacagcggggcttcctgattctggaatataactttgtgtaaattaacagccacctatagaagagtccatctgctgtgaaggagagacagagaactctgggttccgtcgtcctgtccacgtgctgtaccaagtgctggtgccagcctgttacctgttctcactgaaaagtctggctaatgctcttgtgtagtcacttctgattctgacaatcaatcaatcaatggcctagagcactgactgttaacacaaacgtcactagcaaagtagcaacagctttaagtctaaatacaaagctgttctgtgtgagaattttttaaaaggctacttgtataataacccttgtcatttttaatgtacaaaacgctattaagtggcttagaatttgaacatttgtggtctttatttactttgcttcgtgtgtgggcaaagcaacatcttccctaaatatatattaccaagaaaagcaagaagcagattaggtttttgacaaaacaaacaggccaaaagggggctgacctggagcagagcatggtgagaggcaaggcatgagagggcaagtttgttgtggacagatctgtgcctactttattactggagtaaaagaaaacaaagttcattgatgtcgaaggatatatacagtgttagaaattaggactgtttagaaaaacaggaatacaatggttgtttttatcatagtgtacacatttagcttgtggtaaatgactcacaaaactgattttaaaatcaagttaatgtgaattttgaaaattactacttaatcctaattcacaataacaatggcattaaggtttgacttgagttggttcttagtattatttatggtaaataggctcttaccacttgcaaataactggccacatcattaatgactgacttcccagtaaggctctctaaggggtaagtaggaggatccacaggatttgagatgctaaggccccagagatcgtttgatccaaccctcttattttcagaggggaaaatggggcctagaagttacagagcatctagctggtgcgctggcacccctggcctcacacagactcccgagtagctgggactacaggcacacagtcactgaagcaggccctgtttgcaattcacgttgccacctccaacttaaacattcttcatatgtgatgtccttagtcactaaggttaaactttcccacccagaaaaggcaacttagataaaatcttagagtactttcatactcttctaagtcctcttccagcctcactttgagtcctccttggggttgataggaattttctcttgctttctcaataaagtctctattcatctcatgtttaatttgtacgcatagaattgctgagaaataaaatgttctgttcaacttaaaaaaaaaaaaaaaaaa

SEQ ID NO: 7379 - DNA, 600 bp, Homo sapiens
agaatgagaaagatgaccaaaaggttggtggtagggaggctttttcttatttccaaatacttgagaaattaccttttggtttacaaatctatgatcaacttattccattaaatagatacattaaaaaaattaaaaactgcaaaaaaaaaaaaaaaactggtgtttctttttataaccccttgaaacaagtctctcacctgagcctgtctaaactttcggagggagtttattattgagtctttatctgtgacagtatttggagatttagggatttgatacttaggcctttgaattttagaatacaaaaagagaagcaagccagacatggtggctcacacctgtaatcccaatactgggaagccaaggtgggagtatcgcttgagcccaggagtttgagaccgacatgggcaacatgacaagaccccatctctacaaaaaaaattaaaaaattagccaggcatggtggcacatgcctactcccagctcccaaggagactgagatgggaggatccctggagccctgaagattgaggctacagtgagccttgattgtgtcactgcactccagcttgggtgacagagaccctgtctcgagaaatt

SEQ ID NO: 7380 - DNA, 600 bp, Homo sapiens
gtcctctaagtcaagtttaggaaaacaaggataagattctgtcataggcatagagagttgcacataaaaaataccgaagaaaacccaaaattcaatcaacaattctgtcttattgaagagttgctaggattcagagtaaaactcaaaggattcagtttgagcctagaatgatggttagacttgtagtcactgggcttttgttttgctttatggaaatcattgaaggtctggatccctttctctgaatggagagattgagagggatgtcgggcagttcccattagatttagtggccttcatgttattcagaattgttttggtgatacctcacccctgtaatcccagcactttgggtgggtgaggcaggcggatcacttgaagccaggacttcaagaccagcttggccaacatggtgaaacctcatctctactaaaaatacaaaaattagccaagtgtgatggcacatacctgtaatcccagctacttggaattggaaatcgcctgaacccaggaggcggaggttgcagggagggagactgcaccactgcacttcagcctgggtgacagagggagactctgtcttaaaaaaaaaaaaaaaaa

SEQ ID NO: 7381 - DNA, 600 bp, Homo sapiens
gtggaagcaggaaaaaacaattccaaaaagaaacctagcaacaaaaagaaagctgcgttaatgtttgcaaatgcagaggaagaatttttctatgaggagcagggaaaacctgaggtgcttggaggtccagacacaagaagaggattggaaccagttccgatacagcacaatggtggttcacgggggcaagtgacagccctggtttctctgaaggctggactaattcaatcaagatcaactctaagtgatttccagggaaccttcatgactgttggaattgctctgtcataataagtcagggatatttaggaggctcatagtctcctggagggataaaacatctcggcacctagtaatggtaaattagtcaatatttgttagtttcgtttgagatctcaaatgttaggattttctgaagtctcagtgtctttcagagtttgagataccttgttttcattttttctaatttttaatttaaaagtaataaagaatattttgtaatgattaggatgaaaattttatcgtcaattataagccaaaatttgctaaaattaaagtcagtatacttggaaaaaaaaaaaaaaaaaaaaaaaaaaaaaa

SEQ ID NO: 7382 - DNA, 1378 bp, Homo sapiens; identical to SEQ ID NO: 2147

SEQ ID NO: 7383 - DNA, 1400 bp, Homo sapiens
gacagcaaatcaaagaagaaaagagatgctgctgacaaaccaagaggatttgccagaggtcttgatcctgaaagaataattggtgccacagacagcagtggagaattgatgtttctcatgaaatggaaagattcagatgaggcagacttggtgctggcgaaagaggcaaatatgaagtgtcctcaaattgtaattgctttttatgaagagagactaacttggcattcttgtccagaagatgaagctcaataattgttcacattgttcttttatatatatttatatatatatataaaaattgggtcttagattttgatttactagtgtgacaaaataactacatcctaatgaaaatcaagtttgatatgtttgttttgaaagtagcgttggaagagttgttgggggttttttgcatccatagcactggttactttgaacaaataaataaaagctttctgtagttgcttcctttatcagaaaagaacatttgataccatggtatatcatttcctcttcattaaagaacagcttttctaaatgttgggggaaatgtccatagtcattactcagtcaaaacttgtgttctcatgagcctaaggaccattctagatttattacgtgttttttgtgtgtgtgtgtgtgtgtgtgtgtgtgtgtatccataaaatgcatatgtaaatttttttttgtttttaagcattcacccaaacaaaaaaatcacaggtaaacccatgtttctgagatgccattattccaagcaaaataagagataatcccttcaagttaaattgaaaattttcctgaaaccatacatttcaagtgaaataagtaattctagataggacaatttaaattggataattttaaagtgtctataattgcagtggtttatttgcaaaattcctaaaaggaaaaattttatcactgccatcacagcaggtttcctcatccagatgaggaaactagacaaatgctagtgtgttttaactagctaaacaaaactaagttaaatgaacatttaaaagtttccctagcgggccattccttagcaaaatgttggaatccctgttgctacattgactaaaaggtcatgatgaatggaatatgtaagacttggctcatagaaacctaatcagatggttagaggtgttggcagtttaggacctgctgtcataaatgtgtgaacaaccttttgtaacctaacctattgacctgcatgttttttctttaccccaattcattacatggaggctcaatcttgagtttgctttactggttcagcaaaagccaggaagaacaactttgtagtaatcaaaatgttatccaactgtatattgtttactttattgtaaatactggtgaacagtggttaataaatagttttatattcctttatgcaa

SEQ ID NO: 7384 - DNA, 1400 bp, Homo sapiens
agatatatttcactgatcctcgcggtgcaaatagcgtatctggtgcaggccgtgagagcagcgggcaagtgcgatgcggtcttcaagggcttttcggactgtttgctcaagctgggcgacagcatggccaactacccgcagggcctggacgacaagacgaacatcaagaccgtgtgcacatactgggaggatttccacagctgcacggtcacagcccttacggattgccaggaaggggcgaaagatatgtgggataaactgagaaaagaatccaaaaacctcaacatccaaggcagcttattcgaactctgcggcagcggcaacggggcggcggggtccctgctcccggcgttcccggtgctcctggtgtctctctcggcagctttagcgacctggctttccttctgagcgtggggccagctccccccgcgcgcccacccacactcactccatgctcccggaaatcgagaggaagatccattagttctttggggacgttgtgattctctgtgatgctgaaaacactcatataggattgtgggaaatcctgattctcttttttatttcgtttgatttcttgtgttttatttgccaaatgttaccaatcagtgagcaagcaagcacagccaaaatcggacctcagctttagtccgtcttcacacacaaataagaaaacggcaaacccaccccattttttaattttattattattaattttttttgttggcaaaagaatctcaggaacggccctgggccacctactatattaatcatgctagtaacatgaaaaatgatgggctcctcctaataggaaggcgaggagaggagaaggccaggggaatgaattcaagagagatgtccacggccgaaacatacggtgaataattcacgctcacgtcgttcttccacagtatcttgttttgatcatttccactgcacatttctcctcaagaaaagcgaaaggacagactgttggctttgtgtttggaggataggagggagagagggaaggggctgaggaaatctctggggtaagagtaaaggcttccagaagacatgctgctatggtcactgaggggttagctttatctgctgttgttgatgcatccgtccaagttcactgcctttattttccctcctccctcttgttttagctgttacacacacagtaatacctgaatatccaacggtatagatcacaagggggggatgttaaatgttaatctaaaatatagctaaaaaaagattttgacataaaagagccttgattttaaaaaaaaaagagagagagatgtaatttaaaaagtttattataaattaaattcagcaaaaaaagatttgctacaaagtatagagaagtataaaataaaagttattgtttgaaaaaaaaaaaaaaaaaa

SEQ ID NO: 7385 - DNA, 600 bp, Homo sapiens
tatgatttttagaaatcagctacccattatagcacaaaatcagccaaagcagaatttttaaaaattggcttttttaggattctttttctccccctcccatcttagtcttaccttgagggaacagtcatatgagaaggaactttgtcacatctaagctgtggtgtgttccccatgtgtgtgtacaacactggtgactccaggaaccattttcacctattaccagtgttccctggggactcctcttaatgtttccaaatgggaaggacagttgatttccaacatgaggttttttgttttttatccagaaatattttcagcaaaactttccaactgagtggagtctgattaaggatttatttgaaaatggtgggattcattggcccataggtacattggaaaatgtatatctctccagctgtactgtagtgccctgcaggctgtttatatgttcacagttactttttttttttttttaaataaaagtcatttaatgtagaatacttttaatttcactttctgtattttaattttgttgaagggctgattgggatttccatgttcttattaaaaatctaacaaatctgtaaaaaaaaaaaaaaa

SEQ ID NO: 7386 - DNA, 1400 bp, Homo sapiens
tggccacagtgatgggtttaagtaccttggtagggctggcaccagtggaaacacatactgaagctgccaccacaatagcttgtgaggttttatccagctttggttagaccctgcatgaccaaatttgacctgcccttgtttatggcaagaagggcatttttctcttcaatttccagggtttcctaggacccagttcctcatgtaagggaggaagaccaaggtctttgtgttttcttcctcatggaattgaacctgacattttctggatctcctgcatgtcaggagcatcagtgaggcttcagcctccttgtctccactccagagaggaggtggctatgtcttcttaagcctctggccctcagaggctcctccctatctcctggctagttaccactaggctaccaggtctctaggggcctgagagaggccctctagagaatccagggaaactgtgagcccaggagttgcccatctatggtttcattcctcccctggctcttctccctcttcaggccataatttccctggtgccaatttcttttcctcctggggcatcctcatcccagggctctctgctgtagattggctgtgccagcttccaacaggttactggcaatgccagtgagtttctgtaggccctaagctgaagaagtgaggcagtgattctgcctccatcctggtttccccaaagccccagggcaccatccttaagggagaaggtctacagttatcattattttaattccattactttcagtctggaaaactaagctagtcagaactgtcatcttgcttcccaatctaagaacctgtggccctggaacacttttcaagaattggttcattttgctttacacagtagatctgttccaacagttctgtgtaaaccaaatgctatttttcaatgcatttggactgctgaccatttaaaagcagcctatgattgcttctttttgtaaagcaagcaacctccctccactttagctgttttgactatttgaattttcacatattgggcttacccagagtggagcacacctccagggcatgtggctgacactgggtcaatgtctgcatctgtgctgtgtgtgtagtgtggttggccagtaggtgagtatccctgtgtgtgtgagtgaagccactccccaggctggtgctctcctcctgtgcccagtgactgcccagtggcagctcagctgcccttcactcccacctgctgccaaagtccctgtgctaatgggattacaaatacaaaaagtggaaaaaaattttcgtaaactttgttttatattaaaagaaaaatccataagtctgtgtgtgttaaacatgaggttctgcctctgtggctgtgtttgaaaaaataaagttttattagaataatccattttcccaagcaaaaa

SEQ ID NO: 7387 - DNA, 600 bp, Homo sapiens
tgctgaggtgaaaaaatctgatgtttgaggaagtttttatttttatttatttgttttgtttttttttttttttgaggcagactctctgtcgccaggcttctcctgcctcagcctcacgagtagctgggactacaggcatgcaccaccacgcccagctaatttttgtatttttagcagagacagggaggaagtttttatttttataaacaaaatctgatgttcagaggccccgtttcttacaataaatgttgagtcttagttaagcaggaatttatgaacacccatttcctgactttttgctttaatttagatttttctccatcctgtttctagcacaaaaatttgcctgctgtgttacaaaaataaatttatgttgtcctgtgccataaagtgatatatttaatatttttattctttggttttgaacattgtaagttcctaaaaacattttattaaacaagtagacattttgttattaaaaaaatgtgatctgtaatttctttgtgcagaatgatttgaagtattgtattcagtttacatgcattattggtttataattaatatctaatgaaaatacatgttgttatattgtaaaaaaaa

SEQ ID NO: 7388 - DNA, 600 bp, Homo sapiens
gtgccaagcatcatatcctaaggcatacggaatttggggaagccaccatgcaatccagtgaggcttcagtgtacagcaaccaaaatggtagggaggtcttgaagccaatgagggatttatagcatcttgaatagagagctgcaaaccaccagggggcagagttgcacttttccaggctttttaggaagctctgcaacagatgtgatctgatcataggcaattagaactggaagaaacttccaaaaatatctaggtttgtcctcattttacaaatgaggaaactaaactctgtggaagggaaggggttgcctcaaaagtcacagcttagctgggcacagtggctcatgccgataatcccagcaattcagaaagctgaggcaggaggattacttgaggccagactgggcaatatagcaagaccccatctctaaaaaattaggcatggtggtgcatgcctgtattcccagctactcaggaggttgaggtgggaggatcacttgagcccagaagttcaaggctgcaatgagccatgattacaccacggcactacaaccttggtggcacagtgagaacctgactcttaaaaaaaaaaaaaaaaaa

SEQ ID NO: 7389 - DNA, 1400 bp, Homo sapiens
cgggaccactggtcccttcattagtgacgtatttcatcatcagtttagagagttcggcatgcttacaggcagttattgttctaggtgttagctttctgggtgtacggagcagctctaagccggcaacatggcccggttgcccttgcgatcaaagagaagagggctgggcgctccatgatttagcctgaggctcttcaaacatccattctgcttccacgcatggcttctgccattggttctcttcccccagcaccctgaaacgacagaaacaagcaatccgattccagaaaattcggaggcaaatggaggcgcctggtgccccgcccaggaccctgacgtgggaagccatggagcagatacggtatttacatgaggaatttccagagtcctggtcagttcccaggttggctgaaggctttgatgtcagcactgatgtgatccgaagagttttaaaaagcaagtttttacccacattggagcagaagctgaagcaggatcaaaaagtccttaagaaagctgggcttgcccactcgctgcagcacctccggggctctggaaatacctcaaagctgctccctgcaggccactctgtatcaggctctttgcttatgccagggcatgaagcctcatctaaagacccaaatcacagcacagctttgaaagtgatagagtcagacactcacaggacaaatacaccaaggagaaggaagggaagaaataaagaaatccaggacctggaggagagctttgtgcctgttgctgcacccctaggtcatccaagagagctgcagaagtactccagtgattctgagagccccagaggaactggcagtggtgcgttgccaagtggtcagaagctggaggagttgaaggcagaggagccagataacttcagcagcaaagtagtgcagaggggccgagagttctttgacagcaacgggaacttcctgtacagaatttgagtcggggcttggcttatggagatgcctcgtgaaacacagctgggcaagtattaatgtatatggaacagcctggatttctgcatatggataagccaccttggaataggaagaggtgttgagcctggactgtgggaggaaagagctgcgtggatagattcaaacttcctgtggtagtgctcccagtctgacctctgtagaccttcagtactcactcttcttgcttaggctctctgtgtgttgaaagccatcccgtgttgcatgtgttgttacaattttctgtgatacttgcaatttatgtttgagaagaagtgaaaagtttgccttctgacctcatttccttcttgatcagtgaacactaacattttggggacaacttagtcaattggttttccttacaacaaaataaagtaaaatgtagcaaaaaaaaaaaaaaaaaaa

SEQ ID NO: 7390 - DNA, 1400 bp, Homo sapiens
gcccacagggtcctgcaggctccatcagtcaccgctttctatggcgtttgtagttgtgtcttttaagaagtgagtgtgattgtttacttgataaatcagctcactctctggtgctttttagagaagtccctgattccttcttaaacttggaatgatagatgaaattcacacccctgcagatcagaaaaaacaaatagaagaaaatgagggttacagtaacctgttgtctttatataacttgcaacaaactaatttatttttttttcctttttttgtttttggttttttatggttttttaaggaaaatacttttctcctttgaagttttacagctttttgtaaatgcgtcctgataatgattaggaaaatcgaccttttcatccatgatgaccatcctcatagctcagatctcctttcaaagtagtggctttctggatggtaattccatcttaaggtgtcagaactattttcaaatgctgcctttgacagttcttggaattttctgatattaagcagttccatgcaaatattcgtgttttataaatagctctcatagtctgctccatcttgatagttaagtgatttctgaagcgtttgtgtgtgtgttgatcaggttgtgtgatatttttgcttgatagagaatcaaatttgaaacaattaaccagccagtagattgtctgtcagtgaccttctgtagtaataaagtttttgccactgtaaataaaaacagtatccgtagctatcaggatcattgcgcactcatatatgctaagccttctgttctctaatagaagcctttcttttccattgtttctggatatttgtattatccaaatgtgcttatttctttgccttagcacacgttttatggagtacttgttatactaggtttgatttgaaactggtgcttgtcgcagaactgtcagagcatgaggagcgctcctcctgtgggtggacgcattcacgcactcccaggttgcacctgctgctggcggtgagcagggggttcagcagcttgaccgatgccccccgagggggctctccccagcttaaactttgttgtttaaatttgttaactttttatattaatgactattgaaagtggtaataaaaatttatattataggcttcaatgttttcatgaatgttacccaaaaagctgtgttttctttggtcagaggtcaaaatttatgaaaaacaaaatgctgtatgaatggaaatcattttgcaattgagtgacacttcattgtaattcacagtgtaaatttaatccaaactgaaattttgtttcaactgaatttgtaattaactctgaatttgtttttaatcattagtaatatttcagttgggtatctttttaagtaaaaacaacaaataaactctgtacatgtaaaacgtga

SEQ ID NO: 7391 - DNA, 600 bp, Homo sapiens
gcagctaaagttatagaactttatgtttaaataagaatcatttgctttgagtttttatattccttacacaaaaagaaaatacatatgcagtctagtcagacaaaataaagttttgaagtgctactataataartttttcacgagaacaaactttgtaaatcttccataagcaaaatgacagctagtgcttgggatcgtacatgttaattttytgaaagataattctaagtgaaatttaaaataaataaatttttaatgacctgggtcttaaggatttaggaaaaatatgcatgctttaattgcatttccaaagtagcatcttgctagacctagatgagtcaggataacagagagataccacatggcaagaaaaacaaagtgacaattgtagagtcctcaattgtgtttacattaatagtggtgtttttacctawgaaattattctggatctaayaggacattttacaaaatggcaagtatggaaaaccatggattctgaaagttaaaaatttagttgttctccccaatgtgtattttaatttggatggcagtctcatgcagattttttaaaagattctttaataacatgatttgtttgcc

SEQ ID NO: 7392 - DNA, 1400 bp, Homo sapiens
gagaagatgcaggacagccggcagaaagcagtgcggcccctggagctggcctactgcctgcagaagtgcaacgtgcccttgtttgtccaacatgatgctgcccaactgtacctcaaactctggaacctgattaaggaccagatcactgatgtgcacttggtggagagactgcaggccctgtatacgatccgggtgaaggactccttgatttgcgttgactgtgccatggagagtagcagaaacagcagcatgctcaccctcccactttctctttttgatgtggactcaaagcccctgaagacactggaggacgccctgcactgcttcttccagcccagggagttatcaagcaaaagcaagtgcttctgtgagaactgtgggaagaagacccgtgggaaacaggtcttgaagctgacccatttgccccagaccctgacaatccacctcatgcgattctccatcaggaattcacagacgagaaagatctgccactccctgtacttcccccagagcttggatttcagccagatccttccaatgaagcgagagtcttgtgatgctgaggagcagtctggagggcagtatgagctttttgctgtgattgcgcacgtgggaatggcagactccggtcattactgtgtctacatccggaatgctgtggatggaaaatggtcttgcttcaatgactccaatatttgcttggtgtcctgggaagacatccagtgtacctacggaaatcctaactaccactggcaggaaactgcatatcttctggtttacatgaagatggagtgctaatggaaatgcccaaaaccttcagagattgacacgctgtcattttccatttccgttcctggatctacggagtcttctaagagattttgcaatgaggagaagcattgttttcaaactatataactgaccttatttataattagggatattatcaaaatatgtaaccatgaggcccctcaggtcctgatcagtcagaatggatgctttcaccagcagacccggccatgtggctgctcggtcctgggtgctcgctgctgtgcaagacattagccctttagttatgagcctgtgggaacttcaggggttcccagtggggagagcagtggcagtgggaggcatctgggggccaaaggtcagtggcagggggtatttcagtattatacaactgctgtgaccagacttgtatactggctgaatatcagtgctgtttgtaatttttcactttgagaaccaacattaattccatatgaatcaagtgttttgtaactgctattcatttattcagcaaatatttattgagcatctcttctccataagatagtgtgataaacacggtcatgaataaagttattttccccgaaaaaaaaaaaaaaaaaaaaaaaaaa

SEQ ID NO: 7393 - DNA, 1400 bp, Homo sapiens; identical to SEQ ID NO: 7392

SEQ ID NO: 7394 - DNA, 600 bp, Homo sapiens
atcccctacgaccagagcggcttcgtcagtgccatccggcaggtcatcaccacccgcaagcaggcagtgggacctggtggtgtcaactcaggcccagtccagatcgtcaacaacaagtttctggcatggagtggtgtcatggagtggcaggagcccaggcctgagcccaacagtcggtccaagaggtggctgccatcccacgtctacgtgaaccagggggagatcctgaggaccgagcagtggccaaggaagctgtacatgcagctcatcccgcagcagctgctgaccaccctagtgccgctgttccggaactcgcgcctggtccagttccacttcaccaaggacctggagacactgaagagcctgtgccggatcatggacaatggcttcgccggctgcgtgcacttttcctacaaagcatcgtgtgagatccgcgtgcttatgctcctgtactcttcagagaagaaaatcttcattggcctcatcccccatgaccagggcaactttgtcaacggcatccggcgtgtcattgccaaccagcagcaggtcctgcagcggaacctggagcaggagcaacagcaacgagggatgggggggtag

SEQ ID NO: 7395 - DNA, 910 bp, Homo sapiens; identical to SEQ ID NO: 2160

SEQ ID NO: 7396 - DNA, 600 bp, Homo sapiens
gacgtcccttgtgacaacaccaccaagcctggtgtctataccaaagtctgccactacttggagtggatcagggaaaccatgaagaggaactgactattctagcctatctcctgtgcccctgactgagcagaagcccccacagctggccagcagccccgcctgacatggaacagaacggagccatcccccaagaccctgtccaaggcccagatgttagccaaggacttgtcccacctgaggacaaagctggcgctcaaggtcacctgtttaatgccaagataacaaagcgctgatccaagttgctctgtaggaatttctgtgacttttttctggggtcaaagagaaaccccgagacactgtacactgttccttttcacccaccaccccgatccctaggtgaggagaagcggcttgaagcagggctccattcattcaacacacatgaccacccgtgtgatcttgaacaagaggcccaatctcacttcgccttggtttccttatctgtaaaatgagaccatcttattgctgacttcaaagggctgttgtgaggattaaatgagatgattcgtctgaactgattaaaatcgtgtctggcactga

SEQ ID NO: 7397 - DNA, 600 bp, Homo sapiens
ctgtatacatgtgcacatgcggcattttactatgaaatttaatatgctgggttttttaatacctttatatatcatgttcactttaagaaagacttcataagtaggagatgagttttattctcagcaaatagacctgtcaaatttagattatgttactcaaattatgttacttgtttggctgttcatgtagtcacggtgctctcagaaaatatattaacgcagtcttgtaggcagctgccaccttatgcagtgcatcgaaaccttttgcttggggatgtgcttggagaggcagataacgctgaagcaggcctctcatgacccaggaaggccggggtggatccctctttgtgttgtagtccatgctattaaaagtgtggcccacagaccaagagcctcaacatttcctagagccttattagaaatgcagaatctgaagccccactctggacccaggacattttgatgagatccaaaggagttgtatgcacatgaaagtttgagaagcatcatcatagagaagtaaacatcacacccaacttccttatctttccagtggctaaaccacttaacctctctgggtgttacctgctcatttgttta

SEQ ID NO: 7398 - DNA, 600 bp, Homo sapiens
ctgatcacaacccaggccacaaaggcaggcttctccggtggcatggtggtagactaccctaacagtgccaaagcaaagaaattctacctctgcttgttttctgggccttcgacctttataccagaggggctgagtgaaaatcaggatgaagttgaacccagggagtctgtgttcaccaatgagaggttcccattaaggatgtcgaggcggggaatggtgaggaagagtcgggcatgggtgctggagaagaaggagcggcacaggcgccagggcagggaagtcagacctgacacccagtacaccggccgcaagcgcaagccccgcttctaagtcaccacgcggttctggaaaggcacttgcctctgcacttttctatattgttcagctgacaaagtagtattttagaaaagttctaaagttataaaaatgttttctgcagtaaaaaaaaagttctctgggccgggcgtggtggctcacacctgtaatcccagcaccttgggaggctgaggtgggaggatcatttgaggccaggagtttgagacctgcctgggcaacataatgaaacttcctttccagggagaaaaaaaaaaaaaaaaaaaa

SEQ ID NO: 7399 - DNA, 1400 bp, Homo sapiens
gcagctatggacatgcgggatatctccccctgctctctgggtatttgaaatgtcaattttagcactctccaggcacaaggacagcccagcaccagctttacagggcagtgtttcagatggccctgagcccacggaaaaggccaggtagacctccaaactagaaatgctggctgatttgccctgatccatgcttccatttccctgtctctcttccccaggcaattactggcctcaaaagaggaacagaggtgctgcgaggtgctcacctcacagagtctggaggcctccaggatcaactgtgggcaaagtgcctgcctctgacctcatcatggttctagttctcatacagaactccagaatttttaaagaactctataattggattgcaaactaggatgctacataggattctggtattccacatccaatatggatttctagaatgctgtgattaaaggagccagccaggtgtaatacagtcaaggcagcccccagcctagagacaatctgtgaaatccaaagttggtggtgttgggaaagcagggggacatgtgtccctcagctcagcagaggctgtggtacaacatggtccttggtgaagacctgcacccctggaacctcccaccatcatcacaactgtagtctcatttgcagtggagaaaagaacccgacgtcccacagccagatatacacccagctccatgccagcccttcatgtttaccttttgctttgttaattacatgtcagactcctagagggcctccagactaataggaagcatttctgtaaccaacctgccacccactgattcagaaatggaaatcacattccacaatctatggcttccaccagctagcccaggaaatacttgaaatcagcattccaattagtgttgagtctcttgattgtgtcatttaccaattaaataactgagacctaagtctgggaacagagccacgaatctgcctttgagatgctggcagatctcaaggccatcaattattgggggagggagggacaaacactcccaatcatccaccagtcagactgaatgtgtagctggcgaggaattacttccacttctggcccagcacaagccctgctttggccacctgtctgcaagagaggcggcccctgtgcttgcaacgcttacgtgttgatcccagtgtccttttccaaatgagtgctgtagctttagaagtggccctctatagaaagaagtcaaaagatgaggccccttctagaatctaggataacaagagtgttgacagtttgaggagtcgaattgagattcatcatcaaagagcaatgcagcgtcgttaaaataaaaactgtgccttttaaaaagaaaaatgcaaatatagagcaaatccctaaacttgaaaaaaaaaaaaaaaaa

SEQ ID NO: 7400 - DNA, 600 bp, Homo sapiens
tgggataaatcgatgtgtgttaagaatagcactggtgtggagatcaaacgaataatggccaaagccttcaaaagccccttatcctctccccaacaaacacagctacttggtgagttggaaaaagaccccaaacttgtctaccatattggcctcaccccagccaaacttcctgaccttgtggaaaacaaccctttagtcgctatagaaatgttgctgaaattaatgcagtcaagccagatcactgagtatttctctgtcctggtcaatatggacatgtctttacattcaatggaagttgtaaatcgactaactacagctgttgatctacctcctgaatttattcacctttatatatcaaattgcatctctacttgtgaacagattaaggataaatatatgcagaatcggttggtgcgtcttgtgtgtgtgtttctccaatccttgatccgtaacaaaattattaatgtacaggatttgtttatagaagtgcaggcattctgtattgaattcagtaggatacgagaagctgctggtcttttccggttgttgaagacattggatactggggaaacaccttctgagaccaaaatgtcaaaataa

SEQ ID NO: 7401 - DNA, 1187 bp, Homo sapiens; identical to SEQ ID NO: 2166

SEQ ID NO: 7402 - DNA, 1400 bp, Homo sapiens
cagcccgccctgacatgcccgccagccagcccattgacatcccggacgccaagaagaggggcaagaagaagaagcgcggccgggccaccgacagcttctcgggcaggtttgaagacgtctaccagctgcaggaagatgtgctgggggagggcgctcatgcccgagtgcagacctgcatcaacctgatcaccagccaggagtacgccgtcaagatcattgagaagcagccaggccacattcggagcagggttttcagggaggtggagatgctgtaccagtgccagggacacaggaacgtcctagagctgattgagttcttcgaggaggaggaccgcttctacctggtgtttgagaagatgcggggaggctccatcctgagccacatccacaagcgccggcacttcaacgagctggaggccagcgtggtggtgcaggacgtggccagcgccttggactttctgcataacaaaggcatcgcccacagggacctaaagccggaaaacatcctctgtgagcaccccaaccaggtctcccccgtgaagatctgtgacttcgacctgggcagcggcatcaaactcaacggggactgctcccctatctccaccccggagctgctcactccgtgcggctcggcggagtacatggccccggagttagtggaggccttcagcgaggaggctagcatctacgacaagcgctgcgacctgtggagcctgggcgtcatcttgtatatcctactcagcggctacccgcccttcgtgggccgctgtggcagcgactgcggctgggaccgcggcgaggcctgccctgcctgccagaacatgctgtttgagagcatccaggagggcaagtacgagttccccgacaaggactgggcccacatctcctgcgctgccaaagacctcatctccaagctgctggtccgtgacgccaagcagaggctgagtgccgcccaagtcctgcaacacccctgggttcaggggtgcgccccggagaacaccttgcccactcccatggtcctgcagaggtgggacagtcacttcctcctccctccccacccctgtcgcatccacgtgcgacctggaggactggtcagaaccgttactgtgaatgagtgaagatcctggaggaccctggccccaggccagctcccatcgctgggggacggtgaacggccatgtgttaatgttacgatgtttttaaaagacaaaaaaaaaaaaaaaacctcaaaagtttttttaaagtgggggaaaaacatccaagcactttaattccaatgtaccaggtgaactgacggagctcagaagttttcctttacaccaactgtcaatgccggaattttgtattctgttttgtaaagatttaataaaagtcaaaaaacttgcaaaaaaaaaaaaaaa

SEQ ID NO: 7403 - DNA, 1400 bp, Homo sapiens
agcttttcccggcatctgtacagttccatagagcatttgacaactttattggcttcctctgatatgcaagtggtgctggcagtcctcaatctcctatatgtatttagcaaaagatcaaactacatcactcgtctgggatctgacaagaggaccccgctgctaactcggctacaacatttggcagagagctggggtggaaaggagaatggctttggacttgcagaatgttgcagagacttgcatatgatgaaatatccacccagtgcaactacactacactttgaattctatgcagatcctggggccgaggtcaaaattgagaaaaggacaactagtaacacactacattatattcacatagagcaacttgacaagatttcagaaagcccttctgaaatcatggaatctcttaccaaaatgtacagcattcctaaggataagcagatgctgttatttacacacatacgactggcccatggcttttctaatcacaggaagcgattgcaggcagttcaggccagactgcatgcaatatctatattagtgtattccaatgccttgcaggaatcagcaaacagtatcttgtataatggcttgatagaggagttggtagatgtccttcagataacggataagcagcttatggagattaaagcagcttctttacgaacattaacatcaattgtccacttggagagaactcccaaactcagcagtattattgactgtactggaactgcctcctaccatggatttttgccagtgcttgtaaggaactgtatccaggccatgattgatccttccatggatccataccctcaccagtttgccactgctctcttctcttttttataccatctggccagctacgatgctggtggtgaagccttggtctcctgtggaatgatggaagccttattgaaggtcataaagtttcttggcgatgaacagagaccagaaagagtaaaaccttttatgacaggggctgcagaacaaatcaagcacatccttgctaatttcaaaaactaccagttctttattggtgaaaacatgaatccagatggcatggttgctctattggactaccgtgaggatggtgtgaccccatatatgattttctttaaggatggtttagaaatggaaaaatgttaacaaatgtggcaattattttggatctatcacctgtcatcataactggcttctgcttgtcatccacacaacaccaggacttaagacaaacgggactgatgtcatcttgagctcttcatttattttgactgtgatttatttggagtggaggcattgtttttaagaaaaacatgtcatgtaggttgtctaaaaataaaatgcatttaaactcaaaaaaaaaaaaaaaaaaaaaaaaaaaaaaaaaaaaaaaa

SEQ ID NO: 7404 - DNA, 600 bp, Homo sapiens
ttccaggaagcctttgatcacctttgtaacaagatcattgccaccaggaacccagaggaaatccgagggggaggcctgcttaagtactgcaacctcttggtgaggggctttaggcccgcctctgatgaaatcaaggcccttcaaaggtacatgtgttccaggtttttcatcgacttctcagacattggagagcagcagagaaaactggagtcctatttgcagaaccactttgtgggattggaagaccgcaagtatgagtatctcatgacccttcatggagtggtaaatgagagcacagtgtgcctgatgggacatgaaagaagacagactttaaaccttatcaccatgctggctatccgggtgttagctgaccaaaatgtcattcctaatgtggctaatgtcacttgctattaccagccagccccctatgtagcagatgccaactttagcaattactacattgcacaggttcagccagtattcacgtgccagcaacagacctactccacttggctaccctgcaattaagaatcatttaaaaatgtcctgtggggaagccatttcagacaagacaggagagaaaaaaaaaaaaaaaaaaaa

SEQ ID NO: 7405 - DNA, 1400 bp, Homo sapiens
atctttcctggtcaaaagatgatcactacatccttacttcatcatctgatggcactgccaggatatggaaaaatgaaataaacaatacaaatactttcagagttttatctcatccttcttttgtttacacggctaaattccatccagctgtaagagagctagtagttacaggatgctatgattccatgatacggatatggaaagttgagatgagagaagattctgccatattggtccgacagtttgatgttcacaaaagttttatcaactcactttgttttgatactgaaggtcatcatatgtattcaggagattgtacaggggtgattgttgtttggaatacctatgtcaagattaatgatttggaacattcagtgcaccactggactataaataaggaaattaaagaaactgagtttaagggaattccaataagttatttggagattcatcccaatggaaaacgtttgttaatccataccaaagacagtactttgagaattatggatctccggatattagtagcaaggaagtttgtaggagcagcaaattatcgggagaagattcatagtactttgactccatgtgggacttttctgtttgctggaagtgaggatggtatagtgtatgtttggaacccagaaacaggagaacaagtagccatgtattctgacttgccattcaagtcacccattcgagacatttcttatcatccatttgaaaatatggttgcattctgtgcatttgggcaaaatgagccaattcttctgtatatttacgatttccatgttgcccagcaggaggctgaaatgttcaaacgctacaatggaacatttccattacctggaatacaccaaagtcaagatgccctatgtacctgtccaaaactaccccatcaaggctcttttcagattgatgaatttgtccacactgaaagttcttcaacgaagatgcagctagtaaaacagaggcttgaaactgtcacagaggtgatacgttcctgtgctgcaaaagtcaacaaaaatctctcatttacttcaccaccagcagtttcctcacaacagtctaagttaaagcagtcaaacatgctgaccgctcaagagattctacatcagtttggtttcactcagaccgacagtcactttgctgaattcaacacatgtatattatggtggaaaaagcactagactcagggtcagccagccagaagaactgagccgacctgggatcccaccacttcctaactgttttgttaggtagttcactttctctcttcggataaatgtctccacatttcctacttcatagaattgtcagaatcaacacaatacatttaatactttgaaactcataaaatattgggagaataaacagtatgaggttaaaaaaaaaaaaaaaaa

SEQ ID NO: 7406 - DNA, 1400 bp, Homo sapiens
gaggcactgctggatgacagcaaggagttgcagcggttcaaggctgtgtctgccaagagcaaggaagacctggtgtcccagggcttcactgaattcacaattgaggatttccacaacacgttcatggacctgattgagcaggtggagaggcagacctctgtcgccgacctgctggcctccttcaatgaccagagcacctccgactaccttgtggtctacctgcggctgctcacctcgggctacctgcagcgcgagagcaagttcttcgagcacttcatcgagggtggacggactgtcaaggagttctgccagcaggaggtggagcccatgtgcaaggagagcgaccacatccacatcattgcgctggcccaggccctcagcgtgtccatccaggtggagtacatggaccgcggcgagggcggcaccaccaatccgcacatcttccctgagggctccgagcccaaggtctaccttctctaccggcctggacactacgatatcctctacaaatagggctggctccagcccgctgctgccctgctgcccccctctgccaggcgctagacatgtacagaggtttttctgtggttgtaaatggtcctatttcacccccttcttcctgtcacatgacccccccccatgttttattaaagggggtgctggtggtgagccgtgtgtgcgtgtccctgctctgctgcccgcctggctgctctgtctgctgccccctccccccaggtgggtccccctgcttttcacctatctactcctgagcttccccaacaggagcaggtttgaggggccaggcctcttggaggcccctcctgcttcgttgggttctgcttccttcccttcttagctggctcaggggcttctatgggatcctggaagttccttagggacttgcccagggtcccagggccacccacacttcatctgctccctcataggccccacctccacgtcccggctgggccccagaccccagcttcctgccctccaccgggagtctgcatggttgggagtcctgggtggaggggcctttgtgaggctggacccggctcagggcaggtggaggagctgggcctcccacagggtgcccgggcagtgccatcctggtgggggagggcagccttcaaacgtgtggggtctacagtcctcaggtctaggcagggcagccggttctccacctccccatccgccccaggccccctgcctgtgcctgccttgcaccccctctgcttgggccacggtgtctctgcattgcctgcctttttgccttcacctcttttcttccccgccccctgcacattcggggtctcagcccccaggctgtgagctccttgggggcaggccctcaataaatgtgaactgctgctgccgccaaaaaaaaaaaaaaaaaa

SEQ ID NO: 7407 - DNA, 600 bp, Homo sapiens
agtatgatttgatataatcttattgaaattaccttatcatgtcttagagcccgtctttatgtttaaaactaatttcttaaaataaagccttcagtaaatgttcattaccaacttgataaatgctactcataagagctggtttggggctatagcatatgcttttttttttttaattattacctgatttaaaaatctctgtaaaaacgtgtagtgtttcataaaatctgtaactcgcattttaatgatccgctattataagcttttaatagcatgaaaattgttaggctatataacattgccacttcaactctaaggaatatttttgagatatccctttggaagaccttgcttggaagagcctggacactaacaattctacaccaaattgtctcttcaaatacgtatggactggataactctgagaaacacatctagtataactgaataagcagagcatcaaattaaacagacagaaaccgaaagctctatataaatgctcagagttctttatgtatttcttattggcattcaacatatgtaaaatcagaaaacagggaaattttcattaaaaatattggtttgaaaaaaaaaaaaaaaaaa

SEQ ID NO: 7408 - DNA, 600 bp, Homo sapiens
agcaggagctcaacccttattcaccatcagagaatccacactgaagctcttcccacattcgttacactgataaggcttctccccagtgtggatccgatagtgacgaatgaggctgcctttcccgctgaaagccttgccacaatctttgcactgatatggcgcctcttctgtgtgcattctctgatgtttaagaaggtctgagctctgcccaaaagcttttccacacttacagtcatagggccggtccaccaagtgtgttctgtaatggagggtgaggtttgagctgtggctgaaagctttcccacacttggtgcacacgtaaggtttctccccagtgtgtgttctcctgtgtttggtgagatttgagctattactaaaggctttgccacattcagcacatatataacgtctctctcctggggtaggtttagtaggaactgattctctacctttcttggagcctgcctcttgaagagggggttttgttcctttttcattttcaaggtttacgcactgcctctctaagctggcctcaggtttattggcgataatcacagaaattatatcccctttgagcccctcaaaaaaaaaaaaaaaaaa

SEQ ID NO: 7409 - DNA, 1400 bp, Homo sapiens
tgctagccaacaagcgtgtgccaagctctactcctacagtctgcaaggctacagctggctgggggagacactgccgctctggggctcccacctgctcaccgtggtgcggcccagcttgcagctggcctgggctcacaccaatgccacagtcagcttcctttctgcccactgtgcctctcaccttgcgtggtttggtgacagtctcaccagtctctctcagaggctacagatccagctccccgattccgtgaatcagctactccgctatctgagagagctgcccctgcttttccaccagaatgtgctgctgccactgtggcacctcttgcttgaggccctggcctgggcccaggagcactgccatgaggcatgcagaggtgaggtgacctgggactgcatgaagacacagctcagtgaggctgtccactggacctggctttgcctacaggacattacagtggctttcttggactgggcacttgccctgatatcccagcagtaggccctgccttcctggccactgatttctgcatgggtagaccatccaagactgcagcgggtagaaggtggcagttcttcatgggagtctttttaacttggtgcctgagttctctcctaggcaagtggccagttgcctccacctcagttcttccatctttggtggggacagggcccagcagcatctcagcctcctacccacaattccactgaacacttttctggccctactgcacatggcccccagcctccatccttgtgctggtagcctctcacaactccgcccttgccctctgccttccacttccttccatctcatttctaaaccccaaacagctcatctctaaaaagatagaactcccagcaggtggcttctgtgttcttctgacaaatgattcctgcttctccagactttagcagcctcctgttcccattcttggtcacagctctagccacagcagaaggaaaggggcttccagaagaatatagcaccgcattgggaaacagcagcctcacctccacctgaagcctgggtgtggctgtcagtggacatggggagctggatggaaatgcctctcacttcaaaatgcccagcctgccccaaatgcctctaagcccctccctgtcccctcccttgtagtcctacttcttccaactttccattccccatcatgctgggggtcttggtcacaaggctcagcttctctccactgtccatccctcctatcatctgtagagcagagcacaggcagttgtgtgccttgggcccagggaaccctccatcaacctgagacaggactcagtatatggttcttgggtatgccctaccaggtggaataaaggacacagatttgatttctaaaaaaaaaaaaaaaaaaaaaaaaaaaaaaaaaaaaaaaaaa

SEQ ID NO: 7410 - DNA, 1400 bp, Homo sapiens
gtattggaacgcctgaagattttctattgctgtcaagtaccacctcactgggccattcagcgccaacttgcaagtttgctctttgagttgggatgtaccagttcagcccttcagatatttgaaaagctagaaatgtgggaagatgttgtcatttgttatgaaagagccgggcagcacggaaaggcagaagaaatccttagacaagagctggagaaaaaagaaacgcctagtttatactgcttgcttggagatgtcctcggagaccattcttgctatgacaaggcctgggagttgtcccggtaccacagtgctcgtgctcagcgctccaaagccctccttcatcttcggaacaaggagtttcaagagtgtgtagagtgcttcgaacgctcggttaagattaatcccatgcagctcggggtgtggttttctctcggttgtgcctatttggccttggaagactatcaaggttcagcaaaggcatttcagcgctgtgtgactctagaacccgataatgctgaagcttggaacaatttgtcaacttcctatatccgattaaaacaaaaagtaaaagcttttagaactttacaagaagctctcaagtgtaactatgaacactggcagatttgggaaaactacatcctcaccagcactgacgttggggaattttcagaagccattaaagcttatcaccggctcttggacttacgtgacaaatacaaagatgttcaggtccttaaaattctagtcagggcagtgattgatgggatgactgatcgaagtggagatgttgcaactggcctcaaaggaaagctgcaggagttatttggcagagtgacttcaagagtgacaaatgatggagaaatctggaggctgtatgcccacgtatatggaaatgggcagagtgaaaagcctgatgaaaatgaaaaggcattccagtgcctctcaaaggcatacaagtgtgacacccagtccaattgttgggagaaagatattacatcatttaaggaagtcgttcaaagagccttaggacttgcacatgtggccataaaatgcagtaaaaacaaatccagttcccaagaagctgtacaaatgctttcttctgttcgactcaatttacggggcttgttatctaaagcaaagcaactttttacagatgtggcaactggagaaatgtccagggaattagctgatgacataacagctatggacaccttagtgacagagctccaagacctaagcaaccagtttcgaaatcagtattgattctgctggaagcagattctggaaaaggtgctttcacctgctggtaaaaggttacatctgtatatctgaaatgcaagatattgatttttaaaataaatttgttttaatgacttaaaaaaaaaaaaaaaaaaaaaaaa

SEQ ID NO: 7411 - DNA, 600 bp, Homo sapiens
tgtgcattgtctgtgacatgcaacttacaaaactagcaattgtaacaataaatcacagccacttgacaagaaaggatattcattattttcaaatggcttttggactatcaaaaacagtaaggcttttgttcagaaatcacctttagtcaaaaggtttaagaagcaaattatttagtagcagaacttatctcaggaaaggaaaatatgcatggttggtgagaatctaataacattaaaatgctggggcaagatgcagtacaagttgaagagactttattctcaataagttgatttactgatgatatgtcatatgatgcaaaaaaggttttgtgtcattaactgaaaagtagcagcttctctatccaggatgatgagtcaacaggtttcactaatatttgtcatgctgtagcatttgtaagatttgtaaatgatgaaattcaaagaaaactttttctattgctaggagcctgccagaacaaggccaatatataatgttgtgacatcatatctgataaccagaggtctggtatctacactcctggtgccccatcagtggttgtctccataagtcattttgcgttaaaaaaaaaaaaaaaaaaa

SEQ ID NO: 7412 - DNA, 600 bp, Homo sapiens
caggatacacggaacgttatatgggtcaccctgaccagaatgaacagggctattacttaggatctgtggccatgcaagcagaaaagttcccctctgaaccaaatcgtttactgctcttacatggtttcctggatgagaatgtccattttgcacataccagtatattactgagttttttagtgagggctggaaagccatatgatttacagatctatcctcaggagagacacagcataagagttcctgaatcgggagaacattatgaactgcatcttttgcactaccttcaagaaaaccttggatcacgtattgctgctctaaaagtgatataattttgacctgtgtagaactctctggtatacactggctatttaaccaaatgaggaggtttaatcaacagaaaacacagaattgatcatcacattttgatacctgccatgtaacatctactcctgaaaataaatgtggtgccatgcaggggtctacggtttgtggtagtaatctaataccttaaccccacatgctcaaaatcaaatgatacatattcctgagagacccagcaataccataagaattactaaaaaaaaaaaaaaaaaaaaa

SEQ ID NO: 7413 - DNA, 600 bp, Homo sapiens
gcaattcatagagctgtggaatttaatcctcatgttccaaaatatttattagagatgaaaagtttaattttacctccagaacacattctgaaacggggtgatagtgaagcaattgcctatgctttctttcatcttcagcactggaaacgaatagaaggtgctcttaatctgttacagtgtacatgggaaggcacttttagaatgattccatacccgttagagaaaggacatctattttacccttatcccagctgcacagagacggctgatagagagctattacctacctttcatcatgtttctgtttacccaaaaaaggagcttcctttgttcatccatttcacagcaggattttgctcttctacagcaatgatagccattctcactcaccagtttcctgaaatcatgggtatttttgctaaagctgtgctgggactctggtgcccccaaccctgggcatcctcaggctttgaggagaatacacaggatttgaagtcagaagacctaggtttgagttctggctgagccacgcactgttcatgtgaccttggacaaatcaccaaatttttctgaacagcatctataaagtgacagtaaccc

SEQ ID NO: 7414 - DNA, 1400 bp, Homo sapiens
attaagtgttctcaactgagtaacttttaagtggaaaccaagtttagatttggggagtggtaaaggaatcagctttttctattgttaggggaagacagtaatttatcattcatggaccagtagattgttgaaagttggtgaatcggattataagcttctagctaacacaaggattcagaattaggtaaacatctgaaggtttagtatattagaaacacccaaaccagtaatatgctaacctgatgcactgctgaaagaaaatgtgaatttttcgtaataattgcattttagtgaattgtacagtgggtggaaagggcatttggagctcattagaatgagacatagtacaccccaatggccctgtttattaaatgtagtggattaagtgtctgtcaacaaatacaccaaaaccattttttatagaaacagtatttaatggtcactcaatagctttcaaaatacatttttgtattacagcactgcacaagctattctaatagtgctctcgcctcatcattcctgcaaagcttgctttggggagttggataatgtgaaaattttaagtacctaggggagaaagagccatgtaaatatctgtaataaacttgtagcatatgtaaagttttcttggcctttatcttacaaaaatggagtattttagtatgaatttgctgaatgtaagaccgtggactgttttttataatatggcctaattttaaaggtccaaaataacttgtttttaaagtttgcccttgtgctaaagtgccagtgtatgtatgttatacttgatttggttgtaaactatatttcaaagtaaaccctagtgtaataagttttataactaaaaaggtttaagctgctaaaactatttttaagagatgtgaaatgcagtatgggactatctttttttcctcctctaagcccaaagattaactagagtccctccaaccttatagattgttggctttcacaatcttataacctaggatacaggtagtttcgagtatggtgccagtgatgttttgtttttgtttggtcaaggggtaggtgcaacccaatggaccacttatgcaaaagatgtaaactcttgcataatacattgataacatgttttgccaactttaaatgcttaaacataagcgaaaccagtagcaagtatgtgggtcagcttaaaaattttgattgttaatgccctattttctaatttggcacctcttgatgcctaagcaggtaagcagatgcctaagctgtatttctccaaataaatcaagatgaagtactgcccaagttaaatattgatagcctaaagacaagtttatgtagtacttaatgtacatgatatgaatgtgaagcataaaattaaataaaatttttccccattaaaaaaaaaaaaaaaaaaa

SEQ ID NO: 7415 - DNA, 1400 bp, Homo sapiens
gattattcacaccgatagcaacaccgtcttgggccagaacgacacgggcttcagctgcgacggctcagccagcaccttccgcgtcatgttcaaggagccggtggaggtgctgcccaacgtcaactacacggcctgtgccacgctcaagggcccagactcccactacggcaccaaaggcctgcgcaaggtgacacacgagtcgcccaccacgggcgccaagacctgcttcaccttttgctacgcggccgggaacaacaatggcacatccgtggaggacggccagatccccgaggtcatcttctacacctaggctgcccgacaccgacaccgccctccctccgcggggatagccgcagccccaggccatcatctgctgctggggtccccccaccacgcggtgccaggcccagtgtcccccaggccgtctgtccactccatgccacctttctcagcatcaggacggggttgccctgtgttcaccacgagtgtggctgctggatcagggcagccggggaggtggccaggccagtggccaggccctgtggagacaatccctcaggactagggacagggctgtgccggcctgggccagggcccacggacccgcagctcagggcgcctgcccacgtcgtctgccggcggtgcgccgcgggcgtccctcgcgtctcttcactgcacattgcaatgcatttgcgattcccatttctctgctaggagccagcctgggtggcgctgctcccagagccgtgggtcccagaccttgcgttccttttgttcctgtccgtttatcaggacacgggccccacctgtcacgtgcccgaggccacccaagcccagcctgcggggcgttcccactgcctggatgccggcttgagttctgcgcacgcaggattcagtgtggggacggcccctgccggataggcctagccctggcccaggtggtgagcggtttgcagtgtccgttctcatccacctgatgggcccagataaaggcccccgctgtccagcctccctggacggccctcgcggtccctgcagcccaagatgggactcagaccctgtgccccagagctcccctgccgcagaatggggccccagccggccccgaccgggtccaggagcactgctcgcctgtacatactgttgccctagcccacctggtgccgtgggagccacccccaggtgctgggggcacagcccctccccactccggccacgcccccacccaccccgcgtgtttctgccctgtgactcctggaacctgcgtcctccccaaagccatgggaggggtgtcctcctcagaccatgcccccagatgatttttttaaataaagaaacaaatgcacctgcaaaaaaaaaaaatagaaaataaaaaaaaaaaaaaaaaaaaaaaaaaaaaa

SEQ ID NO: 7416 - DNA, 1400 bp, Homo sapiens
gcagagatacatgtcttccaaaataccagctgttacttatcctaaaaatgagagtacacccccttctgaagagctagagttggataagtggaaaactaccatgaaatctagtgtgcaagaagaatgtgtttcaacaatctcaagcagtaaggatgaagatcctctagctgccaccagagagttcattgagatgtggagattgcttggcagagaagtaccagaacacatcactgaagaagagctcaaaacccttatggaatgtgtttctaacacagcaaaaaaaaaaaatatttaaaatatttatatacgaaggaaaaagtgaaaaaagctaggcaaataaaaaaggaaatgaaagcagcagcaagggaagaagcaaaaaatatcaagctgctagaaaccactgaggaagataaacagaaaaactttctatttttacgactttgggataggaatatggacatagcaatgggctggaagggtgcccaggccatgcagtttggacaacctttggtttttgacatggcttacgaaaattatatgaaacgaaaagaattgcagaatactgtttcccagcttttagaaagtgaaggatggaacagaagaaatgttgatcctttccatatttatttctgcaatctaaaaatagatggtgctttgcacagagagttagttaaacggtatcaagaaaaatgggacaaattgcttttaacatcaacagaaaagtctcatgtagatttatttccaaaggacagtattatctatttaactgcagattctcccaatgttatgactactttcaggcatgacaaagtttatgtaattgggtcttttgttgataagagtatgcagccaggcacatccctagccaaggcaaaacggctgaacctggcaactgaatgccttccattagataaatatttacaatgggaaattggtaacaaaaatctcaccttagatcaaatgatacgtattttgttatgtctgaaaaacaatggtaattggcaagaggctctgcaattcgttcccaagagaaaacatactggttttctggagatttctcagcattctcaagagtttatcaacagactaaagaaggcaaagacttaattcattttcaaaaggttctctgaatgtgcacagaacacgtggctcaaatgagaacatttgatggcttaaaaagtaaatgcgttagaaatacagtcctgttaatgtatttcttcccaaacaattcatttttctcttctaaaggtagtctttcccaactgactgtagggttgtgtcttttcccaattaagtatctgcagaactttgggattatactttgtttactgtagaaagataataaaaagagttgtccaaaaaaaaaaaaaaaaaaaaaaaaaaaaaaaaaaaaaaaaaaa

SEQ ID NO: 7417 - DNA, 1400 bp, Homo sapiens
tgagaagcggatgctggtgtctggacaggggcccgtgatggaaaatgcccagggactgggcttccgaaatgtcgtcaccgtggatgagctgcggatggcctttcctctgcttgacatggtggacctggagcggcggctaaagaccacgcccctcccgaggaatgacttcccccgcattgaaggggtgctcctcctaggggagccggtccgctgggagaccagcctgcagctgatcatggatgtcctcctcagcaatgggagccctggggctggcctggcaacacccccctacccccacctccccgtcctagccagcaacatggatctcctgtggatggctgaagccaagatgcccaggtttggacatggcacctttctgctgtgcctggaaaccatttaccagaaagtgacgggcaaggagctgagatacgagggcctgatgggcaaacccagcatcctcacttaccagtatgccgaggacctgatcaggcgacaggcggagaggcggggctgggccgcccccatccggaagctctatgctgtgggtgataaccctatgtctgacgtatacggcgccaacctgttccaccagtacctgcagaaggcaacgcatgatggggcgccagaactaggggccgggggcacacggcagcaacagccctcagcaagccagagctgcatctccatcctggtgtgtacaggcgtctacaatcccaggaacccacagtccacggagcctgtccttggaggaggggagcctccattccacgggcaccgagacttatgcttcagtccagggctcatggaggcctcccacgtggtgaatgacgtgaatgaggctgtgcagctggtcttccgcaaggagggctgggctttggagtgagggcagtgcggtggaggtgagggggtgagcctggacctgtgggcgagtcccattggctgggctctggcctgatcactgggctcaggtcagggcttggttcccttgccacccttcttgctgccccatgagtgtggcattactggtcacttggaagaagacagtgactctttttccctgctgggtagcattttgtatggaacggttggaattttctgggcccagttcccacgtgcctttcgtggcagtctaacctcaggccattctcttcccctgtgtgcctcagtgtccttctcatttcagtagggacttctgaaatgggggaggcagtgtggaatactgtggatgtctgtgcagagcctttgccggcactgaaggcatgcagcctgtcggcagagtgtcttaacaccagatgctactttttactgtattgtagtttattgcccggagatgtggggctttttttttaaataaaataatcataataaatgttcatgatgctgaaaaaaaaaaaaaaaaa

SEQ ID NO: 7418 - DNA, 1400 bp, Homo sapiens
tacccctccccctccccgcggtaccttgcacttttctccctccctgccccctctcgagtccaccctccgggccttctgcccctgatcgcttggttttccttgcagtcgcctgctgctgtcgtcgggaggaaagatgaatgggagggctgattttcgagagccgaatgcagaggttccaagaccaattccccacatagggcctgattacattccaacagaggaagaaaggagagtcttcgcagaatgcaatgatgaaagcttctggttcagatctgtgcctttggctgcaacaagtatgttgattactcaaggattaattagtaaaggaatactttcaagtcatcccaaatatggttccatccctaaacttatacttgcttgtatcatgggatactttgctggaaaactttcttatgtgaaaacttgccaagagaaattcaagaaacttgaaaattccccccttggagaagctttacgatcaggacaagcacgacgatcttcaccacctgggcactattatcaaaagtcaaaatatgactcaagtgtgagtggtcaatcatcttttgtgacatccccagcagcagacaacatagaaatgcttcctcattatgagccaattccattcagttcttctatgaatgaatctgctcccactggtattactgatcatattgtccaaggacctgatcccaaccttgaagaaagtcctaaaagaaaaaatattacatatgaggaattaaggaataagaacagagagtcatatgaagtatctttaacacaaaagactgacccctcagtcaggcctatgcatgaaagagtgccaaaaaaagaagtcaaagtaaacaagtatggagatacttgggatgagtgaaaaattacatcattggacatgaaggagtttcaacatccagcttcatctaggtggtcatgattacctgcatgctttgagctcagcagcagtcttcataaacacatttaaaacaagatcctgggtttttgtggtttgacttctatggtgttttaaaaaaacacagatttttagtgttaatattgtgtaaatgtactcaccttagggattcatttgaatgatggtattataccatgattgtatacagtttgtgaaattgttgcaagggcaaagataactcttaaaaaaccgtcgagattacaatgctctagaatcagcatataagaaaataaatgatatctgcatgttgaattggggtggatggggggagcaagcataatttttaagtgtgaagctttgcatcaagaaattattaaaaagctttttttctccagtattttctgtattatcttaatgtttatggcaaataaaatgtaaaggaacatgccaaaaaaaaaaaaaaaaaaaaaaaaaaaaaaaaaaaaaaaaaaaa

SEQ ID NO: 7419 - DNA, 1400 bp, Homo sapiens
gtactcctctttgcctttgccactggggtacgctccaacgggctggtcagtgttggcttcctcatgcattctcaatgccaaggctttttctcttctctaacgatgctgaatcctctgagacagctctttaagctgatggcctctctgtttctgtcggtgttcacacttggccttccctttgccctctttcagtattatgcctacacccaattctgtctgccaggctcagcccgccccattcctgagcctttggtacagttagctgtagacaagggctaccggattgcagagggaaatgaaccgccttggtgcttctgggatgttccactaatatacagctatatccaggatgtctactggaatgttggctttttgaaatactatgagctcaagcaggtgcccaattttctactggctgcaccagtggctatactggttgcctgggcaacttggacatacgtgaccactcacccttggctctgccttacacttgggctgcaaaggagcaagaacaataagaccctagagaagcccgatcttggattcctcagtcctcaggtgtttgtgtacgtggtccacgctgcagtgctgctgctgtttggaggtctgtgcatgcatgttcaggttctcaccaggtttttgggctcctccactcctattatgtactggtttccagctcacttgcttcaggatcaagagccgctgttgagatccttaaagactgtgccttggaagcctcttgcagaggactccccaccaggacaaaaggtccccagaaatcctatcatgggacttttgtatcactggaaaacctgttctccagtcacacgatacattctaggctacttcctgacttactggctcctgggactactcctacattgcaacttcctgccttggacatgacctggactctccagggacaggttggaagccaacttaacccaggggtctgaaagtaaaaatacacattggaactgcctctgctgccctgggatcattactgtgtccattataatctttctctttctctttgaaagctggtcaggaatgggagaagtgtcagacactagagagccccttctggtcctggctagggcaaattttagacaactattttctctgtaagtgaagattgtcgtattccaagtctaaaatacacctggatctgtctagtcaatcaacatagcagagacagtcttaaacctaccattgacctgtgtgtaaatttaaatgtcaatttattgaagtgtaaatttcatcaaaggcattagctgacaggctggtaacagtccacacaagatggtataggcctgaacagtgtagtggcagtaataaagtgggaccattttttccaaaaaaaaaaaaaaaaaaaaaaaaaaaaaaaaaaaaaaaaaaaa

SEQ ID NO: 7420 - DNA, 1114 bp, Homo sapiens; identical to SEQ ID NO: 2185

SEQ ID NO: 7421 - DNA, 600 bp, Homo sapiens
cctttgccttcagtaatccccttaaggagaaaatatatggacctgatttcagccttcagaatctccaaaagaggagtcatcaattcatagagcacactagggtgttaggagagagctttgcatactctgagaggctacttggaaaggcattttcccaggagagctctgtcaggtggctgcgcttcagccccacccctacaccacagggtctccttgggtatgttcttgggcaagcaatcacaaagccagagaagctgtaagctgcctgccgggcctgaggagctccaaccagggaagactggatgtgaggagaggagtcactgtcaccaggtcacagactgactgaggtgatggtaggatgaggaggaacagatgcccttctttaattggttctcagttaacttctcagaggctctggagaacgggacagtggctttctagcctctgaatgttccaaataaaattttttggtcttggcccctgtactgttttacctctaaattctggcatttttttttccctgcaattaaagtgctgtactttatttattgaactttatcattgaaagctgtttggaaaacctaaaaaaaaaaaaaaaaa

SEQ ID NO: 7422 - DNA, 794 bp, Homo sapiens; identical to SEQ ID NO: 2187

SEQ ID NO: 7423 - DNA, 600 bp, Homo sapiens
tggttgtacagtttgggatcccatgaagagaggggtccttggacagctcttctcctctcttcatcccatctctaccccacccccttggcccccagcctcactgcggcttatacagtaccctaacctgctactaatcacagagaaaaatgtgaagaaggaggagaagaggaaggctagaagcctgagcaagtgagggtagaaccttttgggactggcctttgaagctctggccagggatggggtgggggccaaaaggacagagcctggtatgtcttcatagtcattgagaatgtggagataccagtttgggtggggggtgatcaccaggggacctagggagatccccttcccaccctctccgttggcctcagagtcactcctgccccctctccctgacttggtgctcacatgcacctcactagggtttgtgaccagggtctggatgagcttgaatttgaatgaattgagtttgtatttctagaaccctgggtttttacatgtttggtctttttttgttttggtttgtcaccctcgataaaggaagtatattcatccaaaaaaaaaaaaaaaaaaaaaaaaaaaaaaaaaaaaaaaaaaaaa

SEQ ID NO: 7424 - DNA, 1400 bp, Homo sapiens
gcaccgcctggctgagggcgttaggggctgtgcctcttgtgagggccatttgggacctccctggggcactgcacaattgatagtgtaccaatagggggagactgggcgatctggaacagcacgtggtggggtcctgcttgtgtgctctgcgttcctctgtggcgtggccaggccggggcctggctcttacccggggagtggtgggcatctcgatgcttctttgccttaatgatggccacatctgggctgctctgcacccacgggagaggctggcccagctgcagactgcttagggacttctgtgtccatcctggggggtaagcccacgtgacccacattcttggcactatgaacagagaacatttgcctgttggcttctgaagtggtcagggccatggctgacacctccaggtccgcctggcatgggacaccaagtggaaggcccaagcagctcatctgctcttgggaccaggggccagttgggttgggtctggtcacggcagagcttttgtggagggtcaggaagggtggagaggagctgggttgaagcggactgctgcggatgcaactcccagcttgcccaccgcgggctgtctgctctccctcctagcagctgtcacactgaagttttgtcctctgctgtctcctctggtcctgagatgagctgtgagcctaggtggccaaggcttcctgcattgcttccctgtgagtccaaggccttcccccaccactgggcagaggctggacagcacggacttctagagagagccgcgttgccagttcctctcccactcgctcgtccttatccaccacgctattatagtttccgttgtcctccaccagcatttcccttactctgaagttccggcattcacatcattcatgttttcttttgtcttttagctaaaggaaaagcattggcgatttgtctgattctggttttgagttactctttgttcagtaatgcactttattttattgtccaaagagagtcagagctaagcatacaggcttgggggtgagccctgctgtgagagttcaggccctgggaggctcagccacctcctcttgtgggaaggaggtctcagccccacctcgcatcttcacctgcccttggtgtggacacaccctctcatgctaccagcaccataatccagtgggggtgactgggtgcacacctgcccaggtgaacacagcggctgccagtctcctggtcccgagaggaggtggggcctggccctggctccctccaaccagctgctcctgggacacaggtgctcctgcttcggctctgtttcggctcacaggtgtgcatcactgggcttggatttgcattacattgaccccagccctgcagtggaacctaataaaagcgcctgaagcaaaaaaaaaaaaaaaaa

SEQ ID NO: 7425 - DNA, 1400 bp, Homo sapiens
agcaacagctcctccgaagaggtttcccaggaattggaatccgatgatggctgaatgaacttgagacgcttcagcaaaggcagcattggtcacggagttcaagggaatagatgagtaagcaacgtttcaaatttgggatgaaaagactgccaaactattggctgaccaaggtttttaaattcagaagagcaattctaaatctaaagaaatgtatcattaaagtaattacgttacattgaaacctgctgctgctgtgactgtgaggagggtgggagtgtggatggggaggaaggttctaggctctcttcttatttttctcatttcccaatgcctctctgtgggagagcttcatgccagttttcaccacgctcaggcaaatactctgcagctgttattggatgggccattccgatctgccttatgaaattccacaagaatgttaggggcaccctctttccccttctaacatccttagagggatgaaatctcagcatatgttgcaggacaccaaaaggaagaaaacaatcaagcaaataaaataaacagtcaaacaaaccaggagtttaaaacaacaaccccaacaacagaagccttggcaaagaggaataagtgatcagcaagtgaacacactctatgtcaactctccttttatccagctgagatttatggtaacttatttaattaatggtcctgtctgatgcatccttgatggcaagcttcaaatctgatttggtatcaccgaggaaaccttgcccccatcactcagcattgcacttagatacagaatgagttagataaacttggcttgtctagagacccatgtcatcttaacctaaagggaaatcttattgcgttatcataaaattgatgatatcttagggtcagaattgcccttttttttattttgaatgggaagctctcactaaaacaatcctgagatttcttaatttcatggttctttaaatattataaacacagagtcaacatagaatgaaattgtatttgttaaaatacacacattggaggacaagagcagatgactacttttcgaagtaatgctgctccttcctaaaagtctgttttcaatcctggtaatattaggggcactgcggcacctaagaagccttaaatgagagctaatccaatttagagagcgatggtgtcagcatttcggtctgcatatctgtgtgtccgtatctgcgtttgtgtgcgtgtacgtgtgcccctgtgtgtgggcccagttttcaggcatgtagaataagcatggagtcatattgaggaggactcacttcttgaagatatgcttgttgctttacaacatatgtaagctattctttagcataaatgcattcattctttaataaaaatatgtttgcattaaaaaaaaaaaaaaaaaaaaa

SEQ ID NO: 7426 - DNA, 600 bp, Homo sapiens
cccatgacagcagctggcgcctcagtccccatctgactcatgtctcttctcatctggttcagaacttagaagggcgtggcctctgatcagctggttccctccaaaccccagtggcaacctgtcccttgagagccaggaatggctcttagcagtgggcagtgagcccccgagaggataaagcggctgctcgaacagattgcgagcacattacttgctgcatgggaggaggtttaaaacaaatcaaagattccttgagggcattttacagaaaacaagatgtcaagagcatcactgttgttatttaaaagcccatttgaggccaggcgcggtggctcacgtctgtaatcccagcactttgggaggccgaggcggacggatcacgaggtcaggagatcgagaccatcctggctaacatggtgaaacccccgtctctactaaaaatacaaaaaattagccgggtgtggtggctggcgcctgtagtcccagctactcggaaggctaaggcaggagaatggcgtgaacctgggaggcagagcttgcagtgagccaagatcgcgccactgcactccagcctgggcgacacagcaagactccgtctcg

SEQ ID NO: 7427 - DNA, 600 bp, Homo sapiens
ctgtttttaattttgaaacagggtcttgatttcgcttaggccagagtgatggcaccatcatagctcactgattttgctatttacttttagaaaaatattctttagatcaattagaggctttgctgggacataacatccagaagtcatttttaagtatcttcatgttttcttatttcagctctggattaatcgaattacagctgctagccaggaacatggactgaagtatccagcgctcattgggaatttagttaagtgccaggtggagctcaacaggaaagtcctagcggatctggccatctacgagccaaagactttcaaatctttggctgccttggccagtaggaggcgacacgaaggatttgctgctgccttgggggatgggaaggaacctgaaggcattttttccagagtggtgcagtaccactgaggactgttgctgtattgattaggaaaagagacagagtaatttgcagtttgtttgatttatacttttgtttatctacaacccaataacagacatgagggatggccctgtctctctgggacagagcctcaaagatgatgtccatgttttgtgtgaatgaaactcaaacactc

SEQ ID NO: 7428 - DNA, 600 bp, Homo sapiens
ttgttgaacctgtattgatttttttttttttaactatattgattcgtttactagaacagtctaattggggcattgaggaaatgaagactggatacttctgtatctgtgaagttggcacaggtaacatttggacatgttcatcttattcttaggaaggaaaaaatcacttgccaaaataatacatacttcatagaccactgagttctagtttttattcacactacaacattctctttaacgatgttgcaggtattctcaatttccttttaagaaaaatgaaatgtgaggagaattctggttgtaatagatgacagtacatatgatctgcaggtttgggcatatgctttcatcattaaattatctgataaagttacaagtcacaaaggagaatgagaacttaatgattctattggatttaatatattagcaagaaaacatactatttacatatgtgtagcttagtaaggcattaacataagtacaaaaactatgaaacagatgcatatttcctcaacatactgtgtcaggtatactgttttataatttggttgttttagccttattgcacaccaactcccaaaatataggttactcttgttc

SEQ ID NO: 7429 - DNA, 1400 bp, Homo sapiens
ccagatcccatccaacacacggtttaattttcatggggctctgggatcaaaagaacagaaacagcaacaacaaaagcccagccgctgtctgattttaagctggcaaagtgggaaaaataaagtgttgagtaaacagaccaagttggatcatggggaatttcagaggtcatgccctccctggaaccttcttttttattattggtctttggtggtgtacaaagagtattctgaagtatatctgcaaaaagcaaaagcgaacctgctatcttggttccaaaacattattctatcgattggaaattttggagggaattacaatagttggcatggctttaactggcatggctggggagcagtttattcctggagggccccatctgatgttatatgactataaacaaggtcactggaatcaactcctgggctggcatcatttcaccatgtatttcttctttgggctgttgggtgtggcagatatcttatgtttcaccatcagttcacttcctgtgtccttaaccaagttaatgttgtcaaatgccttatttgtggaggcctttatcttctacaaccacactcatggccgggaaatgctggacatctttgtgcaccagctgctggttttggtcgtctttctgacaggcctcgttgccttcctagagttccttgttcggaacaatgtacttctggagctattgcggtcaagtctcattctgcttcaggggagctggttctttcagattggatttgtcctgtatccccccagtggaggtcctgcatgggatctgatggatcatgaaaatattttgtttctcaccatatgcttttgttggcattatgcagtaaccattgtcatcgttggaatgaattatgctttcattacctggttggttaaatctagacttaagaggctctgctcctcagaagttggacttctgaaaaatgctgaacgagaacaagaatcagaagaagaaatgtgactttgatgagcttccagtttttctagataaaccttttcttttttacattgttcttggttttgtttctcgatcttttgtttggagaacagctggctaaggatgactctaagtgtactgtttgcatttccaatttggttaaagtatttgaatttaaatattttctttttagctttgaaaatattttgggtgatactttcattttgcacatcatgcacatcatggtattcaggggctagagtgatttttttccagattatctaaagttggatgcccacactatgaaagaaatatttgttttatttgccttatagatatgctcaaggttactgggcttgctactatttgtaactccttgaccatggaattatacttgtttatcttgttgctgcaatgagaaataaatgaatgtatgtattttggtgc

SEQ ID NO: 7430 - DNA, 1400 bp, Homo sapiens
ccaaggtatatgacctgcgttttctgcagatgctgctgctgtcacaacatgaactgctgacacagtcctttaccttgctccacctctgcagtgatcataagtgctttgtgcccagaggccactgaagatggtaggcaggattctttccaagaacccaaactgcctttgcctcagctttatggttacctaaaattgccactttttttaggttaaaaaaaacttcagtatcctcattaacatttgaagttggtttcttatgaatatttcgtggctaaaatgattttatagggaatctatcttctaggatctaagccactaaataaaaggataaatgaatgatgataagtcagtcactcatgtttgactctgttcttagaatgaagagaaggtgcatatgcatgtctcaatttctacctttttctgtggtatcggctatactagggaaccattttgtagaagaaggaacgatgacaggtcgcatgaagatcagcctctagtactgatgatctttacttatgcatcttcctgagcaactttctaggctaggatttctaaattggtgaaaaaagcagcattagagtgccagaattagcactggggaaaactggccaggggaacacaaagcaggagacagcctgcgttaatttttttttttaataattttcaaaagcagtggtagaaaatttgataagaatgctttatgtttaggacaacaaaaataattttaaaaagttattttttaccctaatacttttctccactgaatattattatttttttcttagctttttctttctagatgtattccccaacatgctcacatacacagatctttccctttccttactagacctctctttagtttaagataagtttagacaggagaaagtgtatgtaaactacctgaaaggatgacaatcaatacaatgacaaatatgccagtttatttaatttgtttaaaaaaaaaaaggcagaaaacccaccatgggaaaataagcattttttaaaatctgaagttgctcttttcctgtgtggtctttgggaggagtctagtacaaaaactgaaaacctttggtcctgggaatttattttcatggctgttgtcatggctgagtagttttttgatgaattcaatcaatgcagagaacgcttttagataaatcagaactctccttaaaatgcatttcaatcagaagcaaagtacacccattatttatgcagacatgtaaaaaatctaaaaattcttgcaatgagtagtataagccacctatttttacttccttctctgaaatattccagttaactcagcttgggttctgtgctcctcctctcttcctatagaacactgtgcataccttgaataaagagcttattatactaaaaaaaaaaaaaaaaaaaaa

SEQ ID NO: 7431 - DNA, 1400 bp, Homo sapiens
atcccgggacaaggagcgcgtgcggaagcgttccaaatctcgggaaagtaaacggaaccggcggcgggagtcgcggtcccgttcgcgctccaccaacacggccgtgtcccggcgcgagcgggaccgggagcgcgcctcgtccccgcccgaccgcatcgacatcttcgggcgcacggtgagcaagcgcagcagcctggacgagaagcagaagcgagaggaggaggagaagaaagcggagttcgagcggcagcgaaaaattcgacagcaagaaatagaagaaaaactcatcgaggaagaaacagcacgaagagtagaagaattggtagcaaaaagggtggaggaagaactggagaaaaggaaggatgaaattgaacgagaagttctccgaagggtggaggaagccaaacgcatcatggaaaagcagttgctcgaagaactcgagcgacagagacaagctgagcttgccgcacaaaaagctagagaggaggaagaacgtgcaaaacgtgaggagctagagcgaatactggaagagaataaccgaaaaattgcagaagcacaagccaaactggccgaagaacagttgagaattgttgaagaacaaagaaagattcatgaggaaaggatgaaactagaacaagaacgacaacgtcaacagaaagaagaacaaaaaattatcctgggcaaggggaagtccaggccaaaactgtccttctcattaaaaacccaggattaaattgcaaactctgaactttttacaaagaaaaatggaaaaactttgtatggtagcttcatgttgaagtggttttttgtttttgtttttgtttttttaatttgtaaaatctggaaagttagcttgttctaataggggctatgctctgcaattcccttttttttttttttttccttccactaagtcaaatccttatcagatcattgttgtattctaaggagtgacgtatttttcacctgtttggattctatattagtggtctgaggaagagcagatcacattgtaaaactatggatggtctgataaggcttttactgaccccactgacttcagagttatactctgcttgctacatcataatgctggttttgctgactttttgtttttttatatatttataaaaaaagaaaaagttggtgattgcattgggaaattcccagggtattactggacctatgtggtgtattgttaaaccagtgtccttgtgatactgtcgctcttgatgttcctgatacaggtaaggaaacagttggtcaactctgatacaaagtatatatacagttcagtattgtctctgttcattttgtttttatttcattgacaaaatcaaaccagcattccccattgtgtaaataaatgattttgctgaataaagtaaagtcttaaattc

SEQ ID NO: 7432 - DNA, 1400 bp, Homo sapiens
gcagcctgtagtgatggggccgtaaggctctttcttttgcaggattctgggcggattctgcagctccttgctgaaaccttccaccataagcgatgtgtcctcaaggtccactcctttacacacgaggcacccaaccagaggcggaggctcctcctgtgcagcgcagctactgatggcagcctggctttctgggatctcaccaccatgctagaccatgactccactgtcctggagcctccagtggatcctgggcttccctaccggcttggcaccccctccctgactctccaggcccacagctgtggtatcaacagcctgcacaccttgcccacccgtgagggccaccatctcgtggccagtggcagtgaagatggatccctccatgtcttcgtgcttgctgtggagatgctacagctagaagaggctgtgggagaggctgggctggtaccccagctgcgtgtgctagaggaatactctgtcccctgtgcacatgctgcccatgtgacaggcctcaagatcctaagcccaagcatcatggtctcagcctccattgatcaacggctgaccttctggcgtctggggcatggtgaacccaccttcatgaatagcactgtgttccatgtgcctgatgtggctgacatggactgctggcctgtgagccctgagtttggccaccgttgtgcccttgggggtcaggggcttgaggtttacaactggtatgactgaggtatcctgcggtggctggcgtgctgggcatggggcctgctcacagacagcatggagcagggaagggctgtctgtgcccatgctcagcatgccttgaggggaggaggtggtggccgtgggttcctgatgtcggtgcaggagctgaaggtgagtggagtgctgccaagaatatgcccgactccccatgacaagacagaactttgtaacaaacagtaccaatttattttggccgtgggtttttgctttttttccagttgatgactttgtgaacattcccaggtattggagcctctgtggccttaaatgtggctcagtggagggagacccagcatagccaggccagtatggagcacctcacgcacagctctcagaagctgcaggcggacgaacatctgaccaaagaggtgtggtcgaggctcctgaaagagaaagggcctgctggtctcatcctctgcttcctttgcctttaccctatacctctctgcacgtcccaccccgttttgctgtgtgctcacccccaggatgtgtacccggttgtagtaggagctgaaatccatgctgagctgtaccaggaacttgcatatctagagacagagactgagtcactggcccatctctttgctcttgtgccccaggccagaataaagaatagagtgtagaggtcaaaaaaaaaa

SEQ ID NO: 7433 - DNA, 1400 bp, Homo sapiens
ggggtgggggccgatggaaggctctgttgggccggcaccaggcgaggctcaaggctgagttggctcggctcaaggttcatcggggtgtgagccggaatgaggacctgttggaagtgggatccaggcctggtccagcctcccagctgcctcgatttgtgcgtgtgaacactctcaagacctgctccgatgatgtagttgattatttcaagagacaaggtttctcctatcagggtcgggcttccagcctcgatgacttacgagccctcaaggggaagcattttctcctggaccccttgatgccggagctgctggtgtttcccgcccagacagatctgcatgaacacccactgtaccgggccggacacctcattctgcaggacagggccagctgtctcccagccatgctgctggaccccccgccaggctcccatgtcatcgatgcctgtgccgccccaggcaataagaccagtcacttggctgctcttctgaagaaccaagggaagatctttgcctttgacctggatgccaagcggctggcatccatggccacgctgctggcccgggctggcgtctcttgctgtgaactggctgaggaggacttcctggcggtctccccctcggatccacgctaccatgaggtccactacatcctgctggatccttcctgcagtggctcgggtatgccgagcagacagctggaggagcccggggcaggcacacctagcccggtgcgtctgcatgccctggcagggttccagcagcgagccctgtgccacgcactcactttcccttccctgcagcggctcgtctactccacgtgctccctctgccaggaggagaatgaagacgtggtgcgagatgcgctgcagcagaacccgggcgccttcaggctagctcccgccctgcctgcctggccccaccgaggcctgagcacgttcccgggtgccgagcactgcctccgggcctcccctgagaccacactcagcagtggcttcttcgttgctgtaattgaacgggtcgaggtgccaaggtgagtgagtgggggcgtgcttgggaggcgcaggatggcaccggcacatctaacatctacacttctctagctcagcctcacaggccaaagcatcagcaccagaacgcacacccagcccagccccaaagagaaagaagagacagcaaagagccgcagccggtgcttgcacaccgccttgcacatagcagaggctccgggctgactccttcctggtgggaaaggaagatgcctgtcctctccgtggaggaccctgggccctcaccgcaggaagcagtttgggttttgaaaggttattgggtcccttccttgggctgtgttcttgctggtgagcaaagtgttgcctgcaaaaataaaatgcagaacgtactct

SEQ ID NO: 7434 - DNA, 600 bp, Homo sapiens
ctccgcctcagcccttctgcttctggaagggctatcctgggggtgaacttgaaactctcatcaggcttctgcaaaagctcttcttcctgaagacagacccagcctttgtgctctcaccctccactctggtaaagctgcacctctgggggaatgaggggctgcaggaatctctggagagcctggtgcttcacgatgctgctctggtgattcttgtacctaatctggtgtgctcaccaatgagtgaaagggatcgtgggtcagggacaccgagagagtgaggtcacttccacttcaaaccttcagtgagggggtgggatggagagaatgctgaatcttttttttgacgggatggggtttttctctttgtaattatttctttagtttaattaaccttttggttgtttgtgcaatattatatattttaaattataatgcatctccccagagtattttgtagctgggaaaagaaaaaaggaaaaaaagaaaaaaagattctaacagctgttagttttataattaaaaaagaaagaaaaaagaactttgtcctgaaccttttacagacttgccgttaacagcattaaagtgattcacccgaagctg

SEQ ID NO: 7435 - DNA, 600 bp, Homo sapiens
cctgcagtaaaaaaacctttgaccatttttatgtccattggatactttcctttttatcatcttaaaaaaagataactagtactaatcattgtagtggcctaagtgtgatttaactcttgaagtcacaccctccgaaagatgagtagaaaccagcaccagcacagcccagatcttctctttcctctccttttcctcatttattcctaaaggaatctgaccattttacgtctctacggcccaaaaaaagacaaaaataaaaattcctttttattcctgtcaactggatggaaacacaaatttcatggagctgtgtaccatcgaagaaacctggtgtctggcatgaaattactgtaaagaacttcctgtaaaacacgttctttaacaaactgaaatgaaaagcattggagcgtctgaatgaaagacgtgacctcctgctgggactctgatggtcttcagcattcaccttcgtgtgtcttcagtgtctcattgtcatccctgcttctgtttggtcttagagtgtttggatataactgaattgtagatggtaaaggaaatttgatgtgttttttgtttttaaataattaaaacgggtcaattttt

SEQ ID NO: 7436 - DNA, 1356 bp, Homo sapiens; identical to SEQ ID NO: 2201

SEQ ID NO: 7437 - DNA, 1400 bp, Homo sapiens
acaacattgcctaccgcagctcctcagccaaccgcctcttccgcgtcatccgtagagagcacggagaccccctcatcgaggagctcaatcccggcgacgccttggagcctgagggccggggcacagggggtgtggtgaccgacttcgacggagacgggatgctggacctcatcttgtcccatggagagtccatggctcagccgctgtccgtcttccggggcaatcagggcttcaacaacaactggctgcgagtggtgccacgcacccgggttggggcctttgccaggggagctaaggtcgtgctctacaccaagaagagtggggcccacctgaggatcatcgacgggggctcaggctacctgtgtgagatggagcccgtggcacactttggcctggggaaggatgaagccagcagtgtggaggtgacgtggccagatggcaagatggtgagccggaacgtggccagcggggagatgaactcagtgctggagatcctctacccccgggatgaggacacacttcaggacccagccccactggagacaccaatgaatgcatccagttcccattcgtgtgccctcgagacaagcccgtatgtgtcaacacctatggaagctacaggtgccggaccaacaagaagtgcagtcggggctacgagcccaacgaggatggcacagcctgcgtggggactctcggccagtcaccgggcccccgccccaccacccccaccgctgctgctgccactgccgctgctgctgccgctgctggagctgccactgctgcaccggtcctcgtagatggagatctcaatctggggtcggtggttaaggagagctgcgagcccagctgctgagcaggggtgggacatgaaccagcggatggagtccagcaggggagtgggaaagtgggcttgtgctgctgcctagacagtagggatgtaaaggcctgggagctagaccctccccaagcccatccatgcacattacttagctaacaattagggagactcgtaaggccaggccctgtgctgggcacatagctgtgatcacagcagacagggtcgctgccctgatggcgcttacattccagtgggtctaatgaccatatcttaggacacagatgtgcccagggaggtggtgtcactgcacaggaagtatgaggactttagtgtcctgagttcaaatcctgattcaggaactcacaaagctatgtgaccttacaccagtcacttaacttgttagccatccattatcgcatctgcaaaatggggattaagaatagaatcttggggttagtgtggagattagattaaatgtatgtaagacacttggcacaaaacctggcacatagtaaaggctcaataaaaacaagtgcctctcactgggctttgtcaacacgtg

SEQ ID NO: 7438 - DNA, 1400 bp, Homo sapiens
tgctgtcttgacctcacccccagcccctgctcccccggtgacccctagcaaaccaatggccggcaccacagaccgagaagaagccactcggctcttggctgagaagcggcgccaggcccgggagcagcgggagcgcgaggagcaggagcggaggctgcaggcagaaagggacaagcgaatgcgagaggagcagctggcacgggaggccgaggcccgggcggagcgggaggcggaggcccggaggcgggaggagcaggaggcacgagagaaggcgcaggccgagcaggaggagcaggagcggctgcagaagcagaaagaggaggccgaagctcggtcgcgggaagaggcggagcggcagcgtctggagcgggaaaagcacttccagcagcaggagcaagagcggcaagagcgcagaaagcgtctggaggagatcatgaagaggactcggaagtcagaagtttctgaaaccaagaagcaggacagcaaggaggccaacgccaacggttccagcccagagcctgtgaaagctgtggaggctcggtccccagggctgcagaaggaggctgtgcagaaagaggagcccatcccacaggagcctcagtggagtctcccaagcaaggagttgccagcgtccctggtgaatggcctgcagcctctcccagcacaccaggagaatggcttctccaccaacggaccctctggggacaagagtctgagccgaacaccagagacactcctgccctttgcagaggcagaagccttcctcaagaaagctgtggtgcagtccccgcaggtcacagaagtcctttaagagggtttgccttggatccgggcacagttgtgagggctcctctgcatcacctaccaggatgtctggaggagaaaaagacagaacaaagatggaagtggcctgggcccctgggggtgggtcctctctgttgtttttaatctgcaccttatagactgatgtctctttggccggagccagatctgcccctcagtgcattcgtgtgctcgcacgcgcagacatcccttctcccccatacacacatatacactcacagcctctctggcctcttcccttggggaggggccacctgtagtatttgccttgatttggtggggtacagtggatgtgaatactgtaaatagcttgtgctcagactcctctgcgtggagagggtgggtgcaggaggcagaccctccccccaaagccccctggggagatcttcctctctctatttaactgtaactgagggggatcccaggtctggggatgggggacaccttgggccacaggatactggttgcttcaggggtacccatgccccctgccctcgcctggaatcagtgttactgcatctgattaaatgtctccagaaataaagaataattctgcc

SEQ ID NO: 7439 - DNA, 1400 bp, Homo sapiens
agcagttggctgtggggggatccctcgtccagccagcagttgctcccagttcaggaggtgctcctgtaccctggccacagcccaatcctgccactgctgacatctggggagactttaccaaatctacaggatcaacttccagccagacccagccaggcacaggctgggtccagttctgacctgagcacggtttttcctcatgtgacttctgggaaggcgctccctcatctgggccaaaggaaggaggacgaagccctcctcagctggcctgtgtttggggcatgaatctctcctctcctccttgtctggctctgttgacaaaccgggcatgtttggcagtaaattggcaccgtgtcacactgtttcctgggattcaagtatgcaaccagaacacaggagaagaaaagctccaggatccctgtccccatctgtcctcttgatgtgagagagactctgagacttcttccatcgcaatgacctgtattaaacacaagccccccaagcaaaagaagaggttgagtttgctgccaggattcagatcagcccttcccagggtctgcaggtgtcacatgatcacagttcagcgggaggctttccgtacccacactggctgtagccacttcagtccatctgccctccagaggaggggtttcttcctgatttttagcaggtttagaggctgcagcttgagctacaatcaggagggaaattggaaggattagcagcttttaaaaatgtttaaatattttgctttgctaatgtgctgatccgcactaactcatctttgcaaaaggaactgctccctcggcgtgccccagctggggcctctgaagggattcctcactgtgggcagctgccctgagcttcaggcagcagtgttcatctctggccagttgtctggtttccatgtattctaggccaggtaggcaacacagagccaaggcgggtgctggaagccagacggaacagtgttggggcaggaaggtggatgctgttgtcatggagctgtgggagttggcactctgtctgctggtggccctctcggctcacatgttcacagtgcagctcctggcagacttgggttttctctttggtggtttctaaagtgccttatctgcaaacaacttcttttctccttcaggaactgtgaatggctagaagaaggagctcagtaaactagaagtccagggttgcttggtttactggtttataagaaatctgaaagcacctctgacattccttttattaactcacctctcagttgaaagatttcttctttgaaaggtcaagaccgtgaactgaaaaaagtgttggcctttttgcgggaccagatttttaagataaaataaatatttttacttctgtcaaaaaaaaaaaaaaaaaaaaaaaaaaaaaaaaaa

SEQ ID NO: 7440 - DNA, 1366 bp, Homo sapiens; identical to SEQ ID NO: 2205

SEQ ID NO: 7441 - DNA, 1366 bp, Homo sapiens; identical to SEQ ID NO: 2205

SEQ ID NO: 7442 - DNA, 600 bp, Homo sapiens
ttttcagtggaagaaacatttttcaataaataaagtaaggcattgtcatcaatgaagtaattaaaactgggacctgatctatgatacgcttttttctttcattacaccctagctgaaggacatccagttccccagctgtagttatgtatctgccttcaagtctctgacaaatgtgctgtgttagtagagtttgatttgtatcatatgataatcttgcacttgactgagttgggacaaggcttcacataaaaaattatttcttcacttttaacacaagttagaaattatatcccatttagttaaatgcgtgatttatattcagaacaacctactatgtagcgtttattttactgaatgtggagatttaaacactgaggtttctgttcaaactgtgagttctgttctttgtgagaaattttacatatattggaagtgaaaatatgttctgagtaaacaaatattgctatgggagttatctttttagatttagaataactgttccaatgataattattacttttatatttcaaagtacactaagatcgttgaagagcaatagaacctttaagacagtattaaaggtgtgaagcaatggcattc

SEQ ID NO: 7443 - DNA, 600 bp, Homo sapiens
ccttttcctgtacctttaacctttagtctgtcaaggaaaacccttaggacctctgaatcaagaggactgagtttgtgggtgaaccttgaaggtgctctttctgctacaagggccctgggagatagcatggacgtgcattgagaagccagcctcagaccttagcttgaagcagcttgaggccagacctactgtagcctcagcatcttgctaggaggcatggaagtgatctatcctgccaggaggcctcagagtgatctgtcctgccaggaggtgtgagagtgatctgtcctgtgaggcatttaggggctttcaggaatttagtaaaaggtggagtatgcctttccagtatcttccatcttcctttgtatacttgtccttcctcccatttcctccctttggcccgaggtaggaggatggagggaggctgctactctaccacttcctgtgtgcctctactgtggcctcaaccctggcaattatagctactcccatcccttacctgggcatgtgtgagcccttctcactggattttatacccttgtgtctgtgtacataaatatatatacatatatatatacataaaaactttgtacaaaaggc

SEQ ID NO: 7444 - DNA, 1400 bp, Homo sapiens
gccacgcccttgaagaacttacctctgctaatgacgggaggacactgtcccctggcatcctaggcagactgtgtctgaaggagctggtggaagaacagggccgcacagctggctatgaccccaacctggacaactgtctggtgactgaggatctcctctctgtgctggctgagctgcaagaggctctatggcattggcccgaggacagccacccaggcctggttagtgactcccagccctgtaggttctcccaaaccaagtatactgtacttccacagttatgattgtcctcccttaggctggggcctcagatactggtacaggcggctgcctggttgtacatgttgttagctgtgaggaggagttccagcaacagaagttggacctgctttggcggaagttggttgacaaggctccactcagacagaagcacctcatctgtggccctgtgaaagtagctggtgcacctggcactctgatgactgcccctgagtactacgagttccggcatacccaggtgtgcaaggcctcagcactgaagcatggtggggatctggcacaagacccagcctggacagagatctttggtgttctctctgtggccaccatcaagtttgagatgctgagcacagccccacagagtcagctcttcctggctctggctgacagcagtatctccacgaagggcacaaagagtggcacctttgtcatgtataattgtgcccgtcttgccacactctttgagagttacaagtgtagtatggaacaaggtctgtaccccacttttcctcctgtgagcagtctggacttctcactgctacatgatgaggtgagtgtccctcctggtagctggcacaaggaggcctggacttcccctcccagcacctttctccccaacagggtgagtggttgttgctcttcaacagtatcctcccctttccggatctgctgagccggacagcagtgctggactgcacagccccggggctccacattgctgtacgcacagagatggtgaggcatagacaaccaggacactctacactctattctttattctggcctggggcacaagagcaaagagatgggccagtgactcagtctctgtctctagatatgcaagttcctggtacagctcagcatggatttcagctcctactacaaccgggtacacatcctgggggagcctcgaccacacctctttggtcaaatgttcgtccgcctgcagcttctgagagctgtgcgtgaggtgctccatactggcctggctatgctgggtctccctccactgagccacatttaaggccacagaggctccaatacctgggaatgttcacaaagtcatcaactggaaaaaaagcaaaaacccacggccaaaataaattggtactgtttgttac

SEQ ID NO: 7445 - DNA, 600 bp, Homo sapiens
ggataaatggaggatggtgctcatcttgaaacttgaaactaaattgggaaggtgctattgctgcttaagagacattgggacttttctgtcttttttttttttttttttttgaggcagagtcttgttctgtcgcccaggctggcgtgcagtggcgcgatctcggctcactgcaagctctgcctcccgggttcacgccattctcctgcctcagcctcctgagtagctgggactacaggcgcccgccaccacgcccggccaattttttttgtatttttagtagagacggggtttcaccgtgttagtcaggatggtctcgatctcctgacctcgtgatccgcccatctcggcctcccaaagtgctgggattacaggcgtgagccaccgtgcccagccttctgttctatttaagaactttgatttccattccattttcatttattactgtttaggccgaattttcgctaaacttctgactttcatataaacatattgcttatagaacatcagaagactcatctttgtgatgcccaaatgaaaaagttggtgaaggtagtaccattgtatgtatgttaatattaaagcaactgagtgtagatttgc

SEQ ID NO: 7446 - DNA, 1400 bp, Homo sapiens
gaccttcctcctgccttactaattttcttctaaatggtcgttctgttttattggaacaaccacgaaagtcaggttctaaagtcattagtcatatgcttagtagccatggaggagagatttttttgcacgtccttagcagttctcgatccattctagaagatccaccttcaattagtgaaggatgtggaggaagagttacagactaccggattacagattttggtgaatttatgagggaaaacagattaactccttttctagaccccagatataaaatcgatggaagtcttgaggtccctttggaacgagcaaaagatcagttagaaaaacatacccgttaccggcctatgatcatttcacaaaccaccatttttaacatgcaagcggtagttccattagccagtgttattgtgaaagaatctctgacagaagaagatgtgttaaactgtcaaaaaacaatatacaacttagttgatatggaaagaaaaaatgatcctctacctatttccacagttggtacaagaggaaagggccctaaaagagatgaacaataccgtatcatgtggaatgaattagaaacccttgtcagagcccatatcaacaactcagagaaacatcaaagagtcttggaatgtctgatggcatgcaggagcaaacccccagaagaggaagaacgaaagaaacgaggaagaaagagggaagacaaagaggacaagtcagagaaagcagtgaaagattatgaacaggaaaagtcttggcaagactcagagagattaaaaggaatcttagagcgtggaaaagaagaattggctgaagctgagattataaaagattcgcctgattccccagaacctccaaacaaaaaaccccttgttgaaatggatgaaactccacaagtggaaaaatcaaaagggccagtgtcgttattatccttgtggagtaatagaatcaatactgccaattccagaaaacatcaggaatttgctggacgtttgaactctgttaataacagagctgaactatatcaacatcttaaagaggaaaatgggatggagacaacagaaaatggaaaagccagccggcagtgaagagtgacttgaagaactaaatttagcatattgcaaaaatattttgtgcggaattcgatataagtacttttacagcaggatggtatagttatgttgcctggactggtttttacatttttaaaatatttcagctgtcatttttgtactaattataaaattggcacataattcaaaaatatacatttgagatgatttgtcctcccaaattatacaagtttattttatggtataaagtgttctctctggaaatgtttttaaaaaaattcttaggcttctctttgcgaaataaaactattgaaatatttgaaatgc

SEQ ID NO: 7447 - DNA, 1400 bp, Homo sapiens; identical to SEQ ID NO: 7446

SEQ ID NO: 7448 - DNA, 1400 bp, Homo sapiens
gttccccctttctgccagcagttctggttcttaagaaaatcaccataaatcagacatgaaaattctggctccaaaaatagcattttcattgtgcaaatgaaaacgtgtgtatcaagtatgacattcccccaacgtggacacacttggttcctcacaaagccaagcccgctgcagctgccacatccctggacacactcgtttcctcacaaagccaagcccgctgcagctgccacatccctggacacactcggttcctcacaaagccaagcccgctgcagctgccacatccctggacacactcgtttcctcacaaagccaagcccgctgcagctgccacatccctggacacactcgtttcctcacaaagccaagcccgctgcagctgccacatccctggacacacttggttcctcacaaagccaagccggctgcagctgccacatccctgggtttatgatgcagcaggtgcttttttcaagacaggaatcaaagtgttaggaacatggcagaaaggtgacacctggagaccaaatgcagggtaaggagtactgcagaggtcacagggaagtcacagaacagtaatacgctagcaggggcatggggcgtgaagaacagaagacaggaagcgtttcagagactccaaagaagaaatcagggccaaccacagcttcccgagtcattcaccaggtggcaccactgccttcatttcagcttccggccactgggaggcgctgctcgaaagggtttgccctgagacaccaagaagaagctgcgggaaggacagcaggggccctggggttttagcctctggcccaggagttatgtgtccataaccaaagggagcacagtctgcacccagctctcatcccatcagagctgctgcgactcccgcaggttcttccagaactggtttagcttgcctgcaggatcaggaaagtttgagaaaagcatctgcaaaatactaaagagcagagcttacttcattgtctgtccccaccccatcccaggtcaccacctggctgaacccaggtccccgacccaaaaacaacccctcccaagtccctaactccctcacttggacttgagacccttcacaacccagcagcgctccgcctccaacttgacatcatgctttctggaaacttccccgtgtgtcccactttcccacacttggtgcgctggagcaccttccggcctctacatgctgtacgttcccctgtgagcaccctcctctcagcctctggccaacacagtcccacccatctgtgggtaacaagggggtgtgggtgttcttttcagccttgctaaactgtctgaatcaaggatcacaaactacagcctgcaggccaaatccagcccacagcctgtgtttgtaaataaagctttattggaacaaagcc

SEQ ID NO: 7449 - DNA, 1400 bp, Homo sapiens
tcatcttcttcaggaaaatttttctgcctgtacactgaagaatttgcctccaaagacatgacgccactgaagccagcagaaatgcaggaagccaacctaacaagcatggtgctttttatgaagaggatagacattgcgggcctaggccactgtgacttcatgaacagaccagcaccagaaagtttgatgcaggcattggaagacttagattatctggcagcactggataatgatggaaatctttctgaatttggaatcatcatgtcagagtttcctcttgatccacaactctcgaagtctatcttagcgtcctgtgaatttgactgtgtagatgaagtgctaacaatcgcagccatggtaacagctccaaattgcttttcacatgtgccacatggagctgaagaggctgccttgacttgttggaagacatttttacatcccgaaggagatcactttaccctcatcagcatttacaaggcttaccaagacacaactctgaattctagcagtgagtactgtgtggaaaagtggtgtcgtgattacttcctcaactgttcagcactcagaatggcagatgttattcgagctgaactcttagaaattatcaagcgaatcgagcttccctatgcagaacctgcttttggctccaaggaaaacactctaaacataaagaaagctcttctgtccggttactttatgcagattgctcgggatgttgatggatcaggtaactacttaatgctgacacataagcaggttgctcagctgcatcccctgtctggttactcaatcaccaagaagatgccagagtgggtcctcttccataaattcagcatttctgagaacaactacatcaggattacctcagaaatctctcctgaactatttatgcagctggtaccacaatactatttcagtaatctgcctcctagtgaaagtaaggacattctacagcaagtagtggatcacctatcccctgtgtcaacaatgaataaggaacagcaaatgtgtgagacgtgccctgaaactgaacagagatgcactctccagtgactccccagcaaacacaaggtgcagcagggtcccaaaggtagctggatggctgaactgctggatatgggagatacatgacgcgaagacggatttcacatccacaggacggtcttgaagaaaataacactgtgtatattattttaaaataaaaaatagaagtttttattgagttctttaaattactactccatgcttttcttcttcttggaaaagtttttaaatcaaccactcataatttgaccaaaattttaaaaaactggtattttgtaaatgtgtcagagacacatgggacagaaccctactttttgtagaggaacttaatctgaataaagtctgagtttttcagt

SEQ ID NO: 7450 - DNA, 1400 bp, Homo sapiens
acagtactgtctaggctgttgcaatatattctctttcaatgtaccttccttcacctcgtcgtatatatcctcgataagtattaaaacagtatttgagtttaaaagagtttgtatatatttaaatgaataactttttatactctttgttacatgtttgtatcagtatttagtggaaaaccatttgagttgttttgggttagaatttttctttttgtactgtttctttaaaacagagttcttagtaacaggggcagttcctgaattcaaataaaccattttgtatgtttggattttgaatgggttaactaattacaggctaaaataatgccttttttagtgtttttaatttttagaattcactacataaattgtaagtaattgtgggtctcaaaaacactaggaacttttaagtgtcttagcacttcctcgatgtgcctgccctgagggagtgagttcacatttgagacaactgcactccagtgtggacgtgcctttgtcttcaggccatgccgaagggtgtttaaagcagtcttgcaggtcgctcctttcccagccgtggataaaaactgaagctaggaatctaataaggaatgctgatttcctcagttccattttgaggaatggggaaggctattctaaagaaaaaaatgggatttgttttctcggcagatctgcaaggctggctttaagagcacaaggagggaaagtaacgaaagggctggactactataaaagttacaaatacgtagttagaccaatagatttatatagtcaggtttttgtcatgtaatttattaactaactattacagaaacacagctaagaatatcaagtatttctctggctcttgacagaaaaaaatcagttgacttaaccctttgctgtcaaaagagttggcgtttcctgttctgggtgctactgccaaacgttatggtacttagagtcgggatgcacaacttcaaccaccgacttatcaatgcagccgcctgtgtattgcaattggccgttaccttaagcactgagccacccgggtttagttcagccatttcaagaagtatatttaacgtcggtagttctgctttattaaaatgcagcagaggtactcttctgtcccttccgtttatagttctctgagagagttctattttttggttttgttttgtgttttcttttgcattttgtatcttgtatttatccctgaacatgttttgtaccttttttttttttttttttaagaaaaggaattcttttgtgtatatatagatacttgcatgatatactgtagtcaatgttcggttcctcaaaaggtcttgctgctgtcaggtgttatgcactccatccatcataactgtatgaaacacatttcatatgtaaataaacgtgggacatttggcccttgt

SEQ ID NO: 7451 - DNA, 1400 bp, Homo sapiens
tttccaaaagcgttcatgaatttagagcattccacccaatataataaaacctgttaagaatgtcagtctttgttcaaacatctgtttgttctatctccagtcattaaatcagtgctgctgcatgacactcttaactcctgactttttatatccagtcataaagttgactttcagcacaaaagatacttataaacaaataaaaaatttttatttttctctcttactgatgtaagctttggcactcttttgactggtgccattagacatcttgattattgtgacaactctagacctgcctgctttatctaatgtaatcatgctcaatgtctacaggttgtttaataatcagtcacacagagaactgaggaactgatgctgtttgtttgcttctatgatacagagatgtctaaaaacttcaaatggacatgttttgtagtttagcgacttccgtatacataaagggacatattaatactggttcatttgtaaattattattcatatagaccactgtagtagataaaactctatggtacacctgcttatgtgttgcctcacactgtgtgtgattttgtttcttttgttaagcagcacttatgtagactgcatttccaaatgtgttgagcactcggagtgtagtcaacagtaagttcttttaatgaatatcagttttaatttatagactgccatggccttaaaaatattctgtacaatatactgcactgtgttgcacagacactacttgcttttctccattcatatttttatgagtagaatctgggcttttaaatttctcttcttattctttgaagcatgttgcatactaccctggtgggatggatggttctgtaaatgaagggatatttaaacttgctactgttgttcaacaccattaatggtcagtgtgaaccattacaaagaatgtggcaacttgcttgtgcctaaaaggaggaattggaactagaatgtgtgactctgtggggactgcataggtttgttaattgacctatagctaaaccttaatgtgtttgtgtgtctatacattgctttccgcatttcaagacatccagacgctattaccaacattttcctgtgcattaacctctgcatgtgaaaacttttaacagttactgaactatgtaaatatgtgaatttttttatttaggtggatgcattttttgtctgtttactgctcttctcagctttattcaataaacttgcattttaagggttgtattggcaattttaacttaaaatgtgcatcatgatggaaggtgcagacttttttggaagtttccgagaggagggtctatagaccatttgtcagaaatcagatcagccctcaaagaatggggtctgtgggctagttaaaatagaaataaacttttaaaatatccacag

SEQ ID NO: 7452 - DNA, 1400 bp, Homo sapiens
gtagaacttgagaactcaagtttaaattgtcccccaccaccttcttctataaatgcaaacttaagaggaaaataatgacatgtatagtatactcttgccttcctaaattatgactgctgaatcatcatatctactatatatgactggaagaagtggttcttcaagtcaaccctcttacaagacttagtgggaatttgctttatctactttaggccaaatccatcacacattggcttatgtgaaactttatcatctttcacttttggttttcctctgtttttaaacatcttaggtataacagcacaatttcaccttgaaaaagcaccaaaattatggtgttcctgaaaagatcctattaaaagacagtagtttatttgaactggttatggaaggtgactttgggatgtaagagtgttcaactgtgagtttcatcatgtgtgtccgttgagcttgcttttaagagcaatgttttgctttgctctctggtccatgaactcatttccatttgagtgagttcccttagtgaattttgtctcctgcttggaaagtctctcttctgaacctggagcctgaatacattttcagagccaaattacaagtgggtgaagacatgctacaactactatttttagcaatgtttttaaatttgtgtctattggggtgggaaggggagtgaggccctaaagataggaattcactgatagctgaaatagatacaagcctaggagccccagcccccttttcttgaccatatcacaagtgattgaagcccagtgaattagtcggttagaattcgttctacaacatgatagaacttttcttactagcttcagaaatgcacattgatttgtgctatgatgggtggtgtttgtaacaatcactgttctataggcttatgatctgagcaaaatgtgaacttcagtatgtttactattgctcttacttgaaaactttttttcaaaaaaagcacaaattaaagtagtaaattcatatccatagatagttcattcattcaacaaatatttaccaagttcctaatataagtgaaggaccacttctcatattagattactaagtcatttgtatgaatatgtgtggcagtgaagagaacaggtctttcaaaaagcatttgattattttttttaaatacactctcttatttttctacttgtttttttgttaatcatagcaggatatgacaactcttatttgaattgattttttcatctaatgtaataatggaagccaaagtattcatatttcttaagatagccctaaatgtactcttgaacttcttactggaacaatgtttgatactctagtatgtaagctgtatttatgtaatatttagaacgacatgttaataaacaaagtaacattaaaatatttaaaaaaaaaaa

SEQ ID NO: 7453 - DNA, 1400 bp, Homo sapiens
ataatcatgttgtctaatggtactctggattcagggcagcaactgccatttaaatgttgtcttgttcatttctaaatctgttcatgaagtttaggttttccctgaaaccaagttgaattatttccaaaatgaaacaggcttctcagggacatatccacttcttcccagtctgcctttggattaaagcaccaagcagagaccacattaattccctttgctatactgtgatccttagtatgttaattcttaagaaaccaacatatcactgaaagaaggctggcagaacgcaagtgcattttttcactgtgggaagaaagatcaagtgacgtattattttttcctggttgtcacttaatgggctgagtaaaaagcttgaaaactcagactttcggtcttggttctgccactcattggttatgaggaggcccagagcaggtaagttcaccttcctggccttactttcctgatgtgtaatacggaattacttcacagtagcatgacagtataagacaccagcagtagatacaactatgatgacattccatgagttggtatttttagttctaactgctaaatttgttctctttacgggacagatttctaataaagtgcttggtcttaaaatacatggttggacagaggtgccctatcccttaactatgagcaggtgctaccttttgggatatttattttaaattttaatactttggtactcaattgtcagtgttccatggtgtgtatttttatttttgggattagtgggggtctaaagggagaagaatagtctctaattactacctcttaacctaaagcaattattttgttcctggagcaagttaaatctttgttggaaggagctttggccatatattttttagcatgcattgtttctgtgccctgaaagtacctgaaaggttttaagcacagactcaggaaaatgtgccagtagaacaggccatctccaggaaattggctctatttgggtcctgaccttcccttcctcccaagttagcaggcttgttcttttgcaaggaatacacatcttgccttttttttttttttttttttgccatgttttccttttcttggtcatgtataagcaataaagctgttttttgttcttcatctttcttaaccccaaattttcttctatgccttaggcttcgatggttcttccaacccccttaatatggcttagggtggtttttcaaaacctacaatcccccatttgcactactggccatggaacatttatttctagtgttcctgccaatcagagatctctatattaaattctaaaatgggattaaaagaagagttggagaattcacacttattgagtaactgatgtcatacaacctggaatttctgaattccaaataaataaatttcactctttg

SEQ ID NO: 7454 - DNA, 600 bp, Homo sapiens
tcattcttctgactctagatgggacacttgacagtgacttgaaacatttgcatattcaggaatgcatgagatttcaagagagcctacagtatgaaatcattttcacaaaataagcagcttgcttctgaaatgctgtctttcccagtagctactcacctgcctctggtggctgggattcagatgccacaaaactgtcagtatctatagaccaggtctgtgccacctcctctctcctctgtgctcagtgaggaggcagtaaatgaagttacaggctagcacaatacctaactcatgtttcccagtacacctgtagatattactgtacttttatgttctcaagaaataagttgttgcctattcagtgttacagatttctttgtttctttttaattaaaatacaagaagcagctgaggaaagggagacaaggtattttatttctgactgattttagaaaaaacttgtgtacatgtgtttggaactgttgaaatgccaagttttctgtataagtgtttttgtaattaaactttcagattttctttgttttttaagaagttgatgtgcttgtttgacatttgtctcattaaaacttttctacgttg

SEQ ID NO: 7455 - DNA, 1400 bp, Homo sapiens
tttcacccactctttgagtactttgactacgagtccagaaagagcatgagttgttatgtgcttagtaatgttctggattataacacagaaattgtctctcaagaccaggtggattccataatgaatttggtatccacgttgattcaagatcagccagatcaacctgtagaagaccctgatccagaagattttgctgatgagcagagccttgtgggccgcttcattcatctgctgcgctctgaggaccctgaccagcagtacttgattttgaacacagcacgaaaacattttggagctggtggaaatcagcggattcgcttcacactgccacctttggtatttgcagcttaccagctggcttttcgatataaagagaattctaaagtggatgacaaatgggaaaagaaatgccagaagattttttcatttgcccaccagactatcagtgctttgatcaaagcagagctggcagaattgcccttaagactttttcttcaaggagcactagctgctggggaaattggttttgaaaatcatgagacagtcgcatatgaattcatgtcccaggcattttctctgtatgaagatgaaatcagcgattccaaagcacagctagctgccatcaccttgatcattggcacttttgaaaggatgaagtgcttcagtgaagagaatcatgaacctctgaggactcagtgtgcccttgctgcatccaaacttctaaagaaacctgatcagggccgagctgtgagcacctgtgcacatctcttctggtctggcagaaacacggacaaaaatggggaggagcttcacggaggcaagagggtaatggagtgcctaaaaaaagctctaaaaatagcaaatcagtgcatggacccctctctacaagtgcagctttttatagaaattctgaacagatatatctatttttatgaaaaggaaaatgatgcggtaacaattcaggttttaaaccagcttatccaaaagattcgagaagacctcccgaatcttgaatccagtgaagaaacagagcagattaacaaacattttcataacacactggagcatttgcgcttgcggcgggaatcaccagaatccgaggggccaatttatgaaggtctcatcctttaaaaaggaaatagctcaccatactcctttccatgtacatccagtgagggttttattacgctaggtttcccttccatagattgtgcctttcagaaatgctgaggtaggtttcccatttcttacctgtgatgtgttttacccagcacctccggacactcaccttcaggaccttaataaaattattcacttggtaagtgttcaagtctttctgatcaccccaagtagcatgactgatctgcaatttaaaattcctgtgatctgtaaaaaaaaaa

SEQ ID NO: 7456 - DNA, 1400 bp, Homo sapiens
gaccaccctcggctcccgagtccacgcctgcctgggcctgtgctgtcagacccgcgtcggtcgtaaccctctgtggctcccctgcatcagcaccgtcccaccaccaagttcaccaggttcaccagacacggcctccacaatagccacacccacacctgagctgtcctcagtgctggaacttgaccatcctggaacaccctggaagaaaaaggagcgcagggtgggccctcggccctgatgcaggagggtgcgatagcggacgtggccaggcaggaggggccgggttcaggagctgagcaggggatgcctgtgcgtggtgcctgggtctagggaagctccagccccaggatggggctgccctgcacaccggtgcccgccacatgccaaccctcacctccccgaggactggatgatgtgctgccacgtgtgactcgtctcccttgtctgccctgtgtgaccctcagtcttggccagccatgcatgcgcccgaagctcgtgcagtttgtacgtgaggtgctctcctccctgccaccatgctcatcactctggccttggccatgctccctggtcaccccacttcccggtcgccgtctgcagcactcctggagcagcctgggcccttcagcccctgtgctcgtcccaccctagggactcagtcacttgcagaacaggatgggaccgagatttcagcgagccctcctggcgcccggtcctccctgtgggcaccagccctcttggtagctggtgtggagggccggtgtccttggctgccacggagggatttgatcaccgaagcagccacctgctgtagttggacctgaggtcagaggcggggcatcagaggctcaaggtgctgagaagccaccgggaaagcagccagcacaaagggcccaggaagccagcccccgagagctgagcgtgggggtctttgagtgtctttctccaagctgagacgtgggcggccgcgtggtatctcccgagggctgcttggaccctggtgggctgagtgctccgaggaggggtggactccaccttggacagtgggatgtggtgttccacatgtgcctgtttccacgccagcaccttgacttggcagcatggagccaaggtctgtccccgcccaggagggtgccttcctcgggggtagggggacggcccactctgccccagggagtcccttttgatgggaagtgcagtcagcagcgtggaggtgtctgggccaccttcagaaggtggatgtggtggccgagaccccgtccacggagggtgatggcctttcccttctgcaggtgcgggcaggtgggcctgggaccggtgctggggcctctccttgctgtgtgtgagggcccaggtggaaggcgcggacctgacagcattccaataaagcatacgggaacatg

SEQ ID NO: 7457 - DNA, 1400 bp, Homo sapiens
acactaatatgtagtggccttttcaaggcctagtcccagggaaaacattttgtagagtataggggagtgggaggaaggggaggaataattttttatttaaagttgatttctgcactatctttttctcagttacctgcatgaataaataatgagaaatattttgtgactttaattggtaaatatgttacaaaaccaagtacttaatcttttacatcatgtcttcagctatttgtattttaaccagtaatttcaatggtctgaaacatgattctgagcttcacataatatcttaactgtggaactcaaaagtttgatcactgaatttggcagttattattacctaggtacccccgctgttacacaggtgtttagatacgtgttcctgaatgaagctgcttttgaattttgttatgttgaaatgcaagaaataacaatgatggcagcaattaaggtcacagaaatcattaggtaaaggaaaaccaatgaggagttctgcagttttcttttaataagtaaagtgagacttgggtggtgggaagaaggaaggtgggaagaaggaattagacactctgcctgccactctgcgtgtgtgtgctctcgcgcacgtgctgtctatatggaagccactcccttttctttcctttgaaactggtaaggttaaaataggggagaaatcctacatgttggaatgatagctttttggaaaatttaagaaactctccaggctctccatcttgatttatgcttgagttgttatgtgccatatttgctttgaactctgattatcagaagttttactaaaactttgaaataattcactttcatctgctttctagattttgtacatctcagtccataaagcaaagcttgttgatagtgtagttttctaaacgctgcaaatttgcagcctttaccactacaaagaagtttggatgagggattttttttttctttgtcaaaatagttcctgtttctgtagaaatttcatttttagattaaactgtgatggatgggctatcataattcaagtatacatttcttttttctatcagatattcattgtcatgcagtagtagtaaaaacatcaaagatgcagcaagcttattaagtattattttctaaaagaaataggaggcattttcatctttattattgtacttttggttatgcaaacactttgataatataaacagttatgtcccctataaatctggtcagcaacctcttttgattttgttgggtaagttaaatagtctgtagtaggtagagtactgggtacaagtggtccaaactaagataagagactaaaataaaatgctaaatcttaaaagaaactgggtttatgcactaaacgttttgtgccttggtctaatattaacatgatgtatgtgtaaactgac

SEQ ID NO: 7458 - DNA, 1400 bp, Homo sapiens
gcttgtggtacttaacacttgtagccatcaactgactgagaccttgggctaaataatcaattgtgctgatattacatctcgttatggaatgttcctaaatatgccaggtagacaccagcccaagtaccctcctccagaagtctgtgactaccttgtcactactttaggcccattccacaaagcccatctctggtttgagaattcattttgatctgtatctacaccacccaaagttaggcctcctataatgtccaaaacattcctttcagcctttttatttcttactgtactgtctcttactgtactgtctatctgcagtaattgaggacccataaaatttagataactacatgtctttgctcttagaattgtcactcagcataatgagcatttaacatacaaaggcaatgtactgttttgtgttgatctatgtaaaagaatacaattcttttttacataattagtgaaattttattttttattaggaaacactaaatagtgtaatatttcttttgcttttaaaaaaattcctggtagcaaatcaagataaataattgcttcattttcttgagcaatactgaagcaggatgaagtaagaggaatgcattcatttaaacatgctttgctttatgaattttgtctcttttttggtctctttttcttatattcaagttacaaatgtacaagtatccttactaagagtgctccttttgtattttacatatatacagtatgaaaatacattggaacactaggaaagtttttaaataacagttctaatttatcagaaaattgtgttttgggattgagttctttgtctcagcccagaatcccaggtcctgggcctggttttctaatgctgtcatctcagttcgatattttactttagaatctggaatctcctacttaatatatgaccatgactttgaaaggcaaaagaggaatcaagaataaataaaacaaacttaatcttcatctttaaaaaaaagaaaaaagaaaccaaaatgagaatcaacacttcataggctcactgggttttcttttcttttctgttaatttaaactcagttatttttaatgcttaatacatacatggtgcaaaatttaaaaagcgcaaataggtatctagtggaaaacctaagcctccctctctctccggcacccattacctctccctggaggcaactgttttgatccatttcttacacacactgccagagatactctaggcatgtaaagcacaaacatacatataaaatctgcgggcttcaaaaaatataagtaggatgtcatctatactgtcatacactttgttttttatcacttacttaatgttatatcttggatattgtattaccctgggtattaaaaagaactcctttcacattttaaaataaaaaa

SEQ ID NO: 7459 - DNA, 600 bp, Homo sapiens
aacatttacacaagatggacattacattattagtgcatcctctgatggcactgtaaagatctggaatatgaagaccacagaatgttcaaatacctttaaatccctgggcagcaccgcagggacagatattaccgtcaacagtgtgattctacttcctaaaaaccctgagcactttgtggtgtgcaacagatcaaacacggtggtcatcatgaacatgcaggggcagattgtcagaagcttcagttctggtaaaagagaaggtggggactttgtttgctgtgccctctctccccgtggtgaatggatctactgtgtaggggaggactttgtgctctactgtttcagtacagtcactggcaaactggagagaactttgacagtgcacgagaaggatgtgattggtattgcacatcaccctcatcagaacccgattgctacctacagtgaagatggactcctaaagctctggaaaccataattcaacttttctttttaaatcagctcgaaagcatgtacttaaatgaagcatattcatgtaatgtgcttttttttttttttgccagcttttctaagcaaatagattgtctgaattagtcacag

SEQ ID NO: 7460 - DNA, 600 bp, Homo sapiens
gcttacccatttttaaatatgcaattcagtggattaagtacattctcattgttgtccagccatcaccatcatccatctccagaagttttccatcttcccaaattctgtgcccattgaacaataactccccacctccccttcccctagcaacagccatactttttgtctctatcatcaacttcactactcatatttctcatgtaagtggaatcatacagtatttgtccttttgtgactggtttcacttagcataaagtctttaagatgcatccatgtttccagtgtttcggtttttttagaaaaactcatacgtgattgcagccgggcatggtggctcacgcctgtaatcccagcacttgggaggccaaggcaggcggatcacctgaggtcaggagttaaacaccagcctgacaaacatggagaaaccccatctctactaaaaatacaaaattagctgggcgtggtggcacatgcctgtaatcccagctactcaggaggctggggcaggagaattggttgaacccaggaggcggaggttgcagtgagccgagattgtgccactgcactccagcctgggcaacaagagtgaaactctgtctc

SEQ ID NO: 7461 - DNA, 1400 bp, Homo sapiens
cccaagggggagagcaagagaaaacactctagggagtaaagctccccgggcgtcagagttgagccctgcctgggctgaaggactgtcttcacgaagtcagtcctgaggaaaaatattggggactccaaatgtcctctggcagaggacccagaaaaccacactggctccaacttcctcctcatggggcattacacttcaaaacagtggggagcaacttttccaccaaagctacaaacctaaaatgctgctgccccaaagcacaagagggaagagcaccgccggggccacaggacgtctgtcctccagtcacaggccatccttgctgctccctactgactctagcttacttcccctgtgaagaaacaggtgttctcggctgagcccccaaccctctgcagaaccaggttgatctgccacagaaaaagcatctttgaagacaaagagggtgaggtcttcatgagtctcctgggcccaaagccatcttctgatggaaggaagagagtagggccagtgaaggctgcccagagagaatgtcacagatgaggctgcccctgccccctccccgccagggaggtttcatgagctcatgtctatgcagcacataagggttcttcagtgaaaagcaggagaagagcccactgcaaggatagctcattaggcacatgaccgatgcagggaaggccatgccggggaagctcttcctgcaggtattttccatctgctgtgccaaggctgagcggcagaaacttgtctcataaattggcactgatggagcatcagctgtggcccacagagagccttgctgagaagggggcaggtaaagcagagattttagcattgccttggcataacaagggcccatcgattccctactaatgagaggcagggagagcatgggcaatggagacccaccaatgatccccaaccccggtgggtactggctgcctgccctgggccagggaatggctccttataccaaagatgctggcacatagcagaacccagtgcacgtcctccccttcccacccacctctggctgaaggtgctcaagagggaagcaattataaggtgggtggcaggagggaacaggtgccacctgctggacaatcacacgaaaggcaggcgggctgtgtactgggccctgactgtgcgtccactgctgtcttccctacctcaccaggctactggcagcagcatcccgagagcacatcatctccacagcctggtaaattccatgtgcctctgggtacaaaagtgcctcaacgacatgctctggaaatcccaaatgccacagtctgaggttgatatctaaaatctatgccttcaaaagagtctctgttttttttttttaacctggtagacggtataaaagcagtgcaaataaacacctaaccttctgc

SEQ ID NO: 7462 - DNA, 600 bp, Homo sapiens
caactgtacttggagaaatcgtgttttaaagcagtagtccacaaagtattctgctcatgtgcccccaaaagtattttgaaaaatcatgtataccctcacccacctaagttgatatctaaaattttatctaagttggtatctaaaatttttcatgggaagttaaatagttgacaaagtatgtatttgctggtgtcgtgtaaatattggtattttaaaataaaaactgttacatcactattttaaacatatccagtacaatttaaatatcacaacaatttgacacccttcattcatttataaaaataaatgagctagttctttagtagttaaacatttcaaattggcttttctccttctgtatttccataccacttttcagccaagaatcctatcataatgtaatctattatgcccgacatcttttaatcattcaccccattacttcttgtcaacaaaaaatataaatggaaattttttttttagctcttgctttaagtgtttgtttgttatctcagtccagaaccaatattatcgtaattaattattggtatataatgaaaacggtattaattcttggatgattaaaagtttttttattag

SEQ ID NO: 7463 - DNA, 1400 bp, Homo sapiens
ttttactatagtatgagaggtcctggggctcaaactttaaacatttcctaactcagcttacactggtttaaaatgtccaggtctctgctgaattctcttgttgaattcatagctctccaacctcctctgtgttgattcctatgcccctaaccctgcggcctctttgttttatttttttccccatctctgttggtcccagggaaagcaaggaaattttcttttgaggacttataggttgattgcccacaggtcaaactgttggcattgaactcctctcatttcttgccattggattgtttcctaaacgttggataggagaattcgaaattgttgctatttttatgagctgtgcccttgatcaaatctgtgctgtgggtctgagtcattttgccaatgtcgtcttcagtttcaacactctgatcagcatgcaggcgaggggcatgtttaatttacttcactaactgctatattctatagctttagacttcatatttcttatccacctttgtctaggctcacgatctttgggcgagggagctttgtcaccgtggttgggctagaacaaatattgagaagtttaccaacacagatgttgagaagtttattgaaaggcactgacattagcagaataagtgatggacattagttgaaccccttcagtgtctatgtgttttattgtattgtctttaactcgttcttgaagcacagatttcagcgagcctttcagctattcagtgccagcggttttccccactcaggaaagatggtgtgagccatacacacagcaggattagacggggagagtttcagctgcagcttctagtttaagaccaaagcccttcctcccgctgctgcatctgtctgagaggggaagctcttgttttccaagctggaaccgtttatgaggaaaactgagcagggtggcaaaatggaaaaggaacaattttctagtttttcctacgcgtgatattgacgcgtgctttttctttgatttgaggtacagcatgtaaataacaaatttccatattcaaaatgatcatattagagtgactgagtgaccttttgattttgaagcagactaaaatctgaccagaccacaatgaaaagtataaaattagaaacttaaattccaagctaaatttcagctttgacccacctaactccagtgaataggtggcagctcagaaacaaggacagcactgctgctgccagagcaagctcacatccagctggcacttcgtgagagctccttcctgccgggcacgtgtgagttcagcgtgggcaagagacttttatgcacattctgtcattcaaaagggaaatgatgccaaccccagatgcagcatgtcctgaatgaatgatctgtaaaatacaataataaaagcttatagtttgagtag

SEQ ID NO: 7464 - DNA, 1400 bp, Homo sapiens
ttcctaagacatactttaaaaagatgttctataaatttcctagttaaattatggggattttggagtatgtacatgataaattataatacgtatatggttgaagttattttattttttactaatgaattattttaatattccttattgaataaatgctgtaacttgtttgctatggaacttattcttaaagttctagttaaaaataatttttccacatgcatgaaaatatgtattaatcagaggtggcttaattacattgaaattgcttttttgttgttgtttttttactgaaataactcatgtttgtgtagaagaatgcctgtttactcagagtttatattttccttcagttatattttaaatcaaaaggtctgggtaatgtatacttttgattaatatatactttttttaaaaaacaaaaaacaatgtaatggttaatagtagaaatgtgccacacttttcaagttttatataacatatgaaattcagttaaaagaatgtgtgtttcataatgacttttaactggtaaaaatattacttgcacgaagtacttgatgtatggttatcctgaaatttcggagtatttggtgtgttctttgtctaaaaatagtctgttttgtcagtccttcagaatattatttattctgaagattgtccctcttgcacttggcagtttattttcggggatacattgttgggggagaggggtttctgccactctttccagattgagtctgtgctgtttaaggaggactaccatcctgcaactctttttctaattggggcacagaggatgtcgctaaagaaaagttgaagagccctttcagcactttctcatctgtggagaagatggaatcttaaaatacatttggagttttatctgttttacaagtccattgatggcctaagttcctcctgttttctgctgtttgatctctaaggaactcctgttgctaaatatgaagagtatggaacattcatatagtctctgtgaagcatggggggagggaagacatttctttttcttataggctttatgctcaaatgtcatagtctcctttcaaagaattgtgttgcattttaaatgcacccagcttaagtagaagacattgaaggatgcattaattttcaggaactattttgaattatgaaaagattcccaattgaaaaaattattcaacaagtaaaagctaagaaatttcattgaaatcataaggcagtttaagcataaattgataaaaatagctgtgtactactaattaatagaaaatcattcaaccaagagaagagtcaagtgaatatcgtttgtttatttgctagtgagtttctttgtaacgttgattttattaaatgataatatttggttagtatgtcctatgttaataaaaatgaacaaaatt

SEQ ID NO: 7465 - DNA, 600 bp, Homo sapiens
gagtatatgttcagcaatgttgatctcataaaaggaaaaacaaaagatttaagtattctatataccaagtttttgttttgtttttactgtatttattttattgaggttctttatattcctgcctcttcatagtcaaggctcttagtacaggaatattgacttaggaattgtgaaaactccttaagtttcttaagttaaggatgtttggcttttttctttaattttttaaaaaccattttcctatgttaggagtgcaagaatagccagcatttccgattttgacatatgttcattttatgcatatttaagaaattatagctgcatatcccttctttcaaaaaatgttgctttttttttaaaggaattttaatatattcctttaaaagaaagcaatttaatcaattgcaaagcaattatataaaaccacaaagaatgtactgaacctactaaccctttaacatacagtttagggtcctagcgcagagtccttgtttaaaggtcattgactcatcatctgtcagtaatgagaggattggaagaataattttgcatacaaatgaggacttaatttgttgaaatataatctctttaagttccttg

SEQ ID NO: 7466 - DNA, 1400 bp, Homo sapiens
aaaaagatttgttagttttgtaatttttttgtaagaccaaatgtatgtattttagtagctccattgcatgagaagagtgtaactcacactgacttgtgatatcagccttctctgggccttgtgtgtggagagctttctatcttaccaagtggtagggctaaaagaacaacagcctttttggtagtcacatagcagaatgatcagagttacattgcttattccaaaacattggttctttttaaaacatttttttttacccaaagaaaagaataatagaaattactaacaataaatataaattcagagtgttgatataggattcagtatccagagtttatttttaatcttaatcctcagcttcttgggagttgctgggcttcagtgtctctgtggtttcaccagcttagcttgagctctggttattttggatcttttctgctttttttaagtaactgagtcatttttaccacacagtccagtttgcatgtatagctaggaaacatgtattgctctagattgggcagtttaagtcattttaaagaaagttagttcatagttgttgccttttaactcatagtcaagcttcagtctttcaaagagaaatgtgtgattttcatttacttgctgatattttgtagtttggagatccttgtgggcattattctaactgatacgtagacacttacttggaaatttttggacattatattaaatgagtgctatctgtgaaattggttatattaggtggcttgactaatgttttttctataattgtatatggactgcatttttaaaaaaaccgcatttgcctttatgctagattgtaaaaaattatattagaatgcataagacatgtttttccttcatatgctagacttttcctagcatttcgtatttctgtgttgtcagtgtgtgatttttaaaccggaatttggtttaaaaaaaatctggtggtaatatatgtgagaaatactttggtgtttaccttatgaaaataaaggattgtaagtaaagtttcctgcgcaccttataccagaattcagtataatacactactttctgttttcaaacagataaatcataatatagtctgtattatctgtaagatctgtcttgtaaaccacattcttgacaactatttgcttttgagtagtttgtattttaatatgtgacttttgtcttgaaaagtagtaaagccatagacttgtgcaaaacaagtttcaagtttatagatattaagtttgtaatgtgagcatcaaatgtgtatgtaaaaatactttttaccagtctggaacttgggaaaatccagggaatttgaaacatagattttaatgagctggtaaacacaaatcatgtcaataaaggtagtcaggatattttatccttagcattgcttctgc

SEQ ID NO: 7467 - DNA, 1400 bp, Homo sapiens
cactaagctgctacttcaagctttggccatcaatagctctgagcctctgacctttttgagcctgggaaatgcttaccttgctctgaagaatatcagtggggcacttgaggcctttagacaggccttgaaattaaccaccaaatgtccagagtgtgaaaacagcctgaagttgatccgctgtatgcagttttatccttttctgtacaacatcacttcttctgtttgcagtggtaattgtcatgagaaaaccctggacaacagccgtgacaaacagaaatattttgacaactcacagtcactggatgctgctgaagaagagccctctgagagaggaacagaggaggaccctgtattctctgttgagaattcagggagggactcagatgcccttagacttgaaagtacggtggttgaggagagcaatggttctgatgagatggagaattcagatgaaaccaaaatgtcagaagaaatactggctttggtggatgaatttcaacaggcatggcctttggaaggctttgggggtgcactagagatgaaagggcggcgtctagacttacaaggaatacgggtgctgaagaaaggtccccaggatggagtggccagaagctcttgctatggagactgcagaagtgaagatgatgaagcaacagaatggattacattccaggtcaaacgtgtaaagaaacccaaaggagatcataagaaaactcctggaaaaaaagtagaaacaggtcagatagaaaatggacatcgttaccaagcaaacctagagatcactggccccaaggtggcatctcctgggccacaagggctactagactggaagaccaggaaagtgccatagacataatgtaactggatttcagcaaggcatttaacagagcctcttatgatatccttgtgaaccagatggagagatgtgggcttgaagccttcccattgcctacaggataaaattcaaacttcctagtgtggtgtacaagaccctttacagcccgcctctgtgtacccttcaacaccattctctgaaccaaccatgctcatgtttttacctcagtgcctttgcacatgctattccctctgcctggaatgccctgtgccccctctgccctctgccgtgctaaaatatcactcatccttaaacttcaaaatcaagtgccatctcttccttgttaccttcaggcagaattagttactctttcctctgtgcaattgttctatatcttcgctctagctcttttcctgttgtattgtaatgatttgtttatgtttaccttccttactagactgtgagctcaagagcaggccgtcttaattattcctttctgtacccctagtgtcttttatggttctcagccccttataacaggtgctcaataaatatttttcaaatg

SEQ ID NO: 7468 - DNA, 600 bp, Homo sapiens
tttctaagatacggactcagctggtctattttaccctgtgacatttaaatatacttttgaataagctactatcctgaggctgagggttttgctgccacttttcctgtgtttccacttctgcttccaaagattttcctcttagttgtttgaaataatactttgccagacaggaagtctttagactgcccacattcatgaagaagatgatgtgtggctggatcagtaggagaagctgagtgcaaatgccatgtgggctagagtatgggaaggttgaaaattccaagtaactgggagagtgggcaagtcctcagctgaacaatcttggatgtagtctagcagcaacccacctacaatggcgttatgtttggagttatgaggggaagtgaaagataagaattacctacagctttgtactcagataatttatatccaaaatttgtgttttaaatttcatactccagaactttcatgtttatgagtattagccttttaagttatgggaggtgatatacttagtccattgatgttgtcacttgtcatctaaacttatgagaccttgtcttagagaatctaaaatatattgtcatatgttttctgtgc

SEQ ID NO: 7469 - DNA, 600 bp, Homo sapiens
gtctattaaattaaaagactttctcattacagagtttagtcaacgtagcaaaaccatgggaaattaaatggaaagataattaaatatgtaaattcataaggaacaaaagacgagaagttaattatacaataggctggtgacaccagagttcattgttatgtgccacaagaaaattaaattttttaaaaaactagaacgctcttcttttagtgttttgctgaaatcctgttttgtatttgtttctttacaacaggtgtaggtataggaggtcaagaaaaggagttcggtaaagggcatagctaataacaaccacacattgggccaggcgcagtggcttacgcctgtaatcccagcactttgggaggctgagacgggcagatcacctgagatcaggagtttgagaacagcctggccaacatggtgaaactccatctctactaaaaatacaaaaattagccaggcatgctggtgcacacctgtaatcccagctactcgggaggctgaggcaggagatcgctggaactcaggaggcagaggttgcagtgagccaagatcatgccactgcactccagcctgggcaacagagcaagactctgtctc

SEQ ID NO: 7470 - DNA, 1400 bp, Homo sapiens
aagaacctcgtttcgaaatttgaaaaacaaacgcgattatcataaacataggcacaatgtgtcttggctttatttatctcgtctctctgccatgaaggaatttgcctatatgaaggcattgtatgagaggaaatttccagttccaaagccaattgattacaatcgtcatgcagtggtcatggaactcataaatggttatccactatgtcagatacaccatgttgaagatcctgcatcagtatatgatgaagctatggaactaattgtcaaacttgcaaatcatgggctgattcatggagattttaatgaatttaatctcattttggatgaaagtgaccatatcaccatgattgattttccacagatggtttcaacttctcatcccaatgctgagtggtattttgacagagatgttaaatgcattaaagatttctttatgaaacgtttcagctacgaaagtgagctttttccaacttttaaggatatcaggagagaagacactcttgatgtggaggtttctgccagtggctacacaaaggaaatgcaggcagatgatgaactgcttcatccattaggtccagatgataaaaatattgaaacaaaagagggatctgaattctcattttcagatggagaagtggcagaaaaagcagaggtttacaggtcagaaaatgaaagtgaacggaactgtctagaagaatcagagggctgctattgcagatcatctggagaccctgaacaaataaaggaagacagtttatcagaagagagtgctgatgcacggagttttgaaatgactgaattcaatcaagctttagaagaaataaaagggcaggttgttgaaaacaactctgtaactgaattttctgaggagaaaaacagaactgaaaattacaacaggcaagatggtcagagagttcaaggaggagtccctgctggctctgacgagtatgaagatgaatgccctcatctaattgccttgtcgtcattaaatagagaattcaggcctttcagagatgaagaaaatgtgggagctatgaatcagtatagaacaagaactctgagtatcacttcttcaggcagtgctgtaagctgttcaacaattcctccagaactggtgaaacagaaggtgaaacgtcagttgacaaaacagcaaaaatcagctgtcagacgtcgattgcagaaaggagaagcaaatatatttaccaagcaacgtagggaaaacatgcaaaatatcaaatcaagtttggaagcagctagcttttggggagaataatatatttaggatcttggatatgtttaatatattttttaaagttactgtaattcctttttgagccctcatttgtcttttttgagccaaggctatcatatattaataaataaaccctctttcatct

SEQ ID NO: 7471 - DNA, 600 bp, Homo sapiens
ctttctctgaagagtattttcgaagaggagcaactgaacactggaggaaaagaaaatgacactttctgctttacagaaaaggaaactcattcagactggtgatatcgtgatgtacctaaaagtcagaaaccacattttctcctcagaagtagggaccgctttcttacctgtttaaataaaccaaagtataccgtgtgaaccaaacaatctcttttcaaaacagggtgctcctcctggcttctggcttccataagaagaaatggagaaaaatatatatatatatatatatattgtgaaagatcaatccatctgccagaatctagtgggatggaagtttttgctacatgttatccaccccaggccaggtggaagtaactgaattattttttaaattaagcagttctactcgatcaccaagatgcttctgaaaattgcattttattaccatttcaaactattttttaaaaataaatacagttaacatagagtggtttcttcattcatgtgaaaattattagccagcaccagatgcatgagctaattatctctttgagtccttgcttctgtttgctcacagtaagctcattgtttaaaagcttc

SEQ ID NO: 7472 - DNA, 600 bp, Homo sapiens
tattttactaggacttttgatagaaattcagctacaacccaaagagagaaagattgagtcttcctgtcaccataggcaataccttttttcttagctggcatgccataaaggccagctatgtgatattagaggaagaaaggatttttctttttaatgatcttccttgggaaattattgtggcctttatttaatttctaactacgtacctgggtgcctatatcgacaaagagtgagaagagcatttttacctttttaaaaaagcaaatacatatatacacatacgtatgcaaatattatagtataatagtgatccctatggagaattaaaggtgagaaagctactttgtggtgtctaggtttctgataaaagggatgatcttaactgaagaatttaaagagatacttaaacagagcaaatgtagtaggaacaagggagtgagccttataagaggacgttcagtctcatttattaaaataataactgagactgggagaggtggctcatgcctgtaaatcccagcactttggtagcctgaagtgggagattgcttgagtccaggagaccagcctgggcaacatagcaaaacctcatctctattt

SEQ ID NO: 7473 - DNA, 1400 bp, Homo sapiens
ggtgtgttcatcttttgctacgggccctagacaatacgatggaacgttctatgaatttcgtacttattaccttaaaccttcaaatatgaatgcgttcatggaaaatcttaagaaaaacattcatcttcggacctcttactctgaattggttggattctggagtgtagaatttggaggcagaacgaataaagtgtttcatatttggaagtatgataattttcctcatcgagctgaagttcggaaagccttagccaactgtaaggaatggcaagaacaatctatcattccaaatttggctcgcattgataaacaagagacggaaattacttacctgataccatggtccaaattagaaaagcctccaaaagaaggagtctatgaactagctgtttttcagatgaaacctggtgggccaggtctgtggggtgatgcatttgaaagagcaattaatgcccatgtcaatttaggctacacaaaagtagttggtgttttccacacagaatatggaggactcaacagagttcatgttctttggtggaatgagagtgcagatagtcgtgcagctgggagacataagtcccatgaggatcccagagttgtggcggctgttcgggaaagtgtcaactacctagtttctcagcagaatatgcttctgattcctgcatcattttcaccattgaaatagttttctactgaaatacaaaacatttcattaactgctctaagatgtgtctgctaatggtgcttaaattctcccaagaggttctcgcttttatttgaaggaggtggtaagttaattagttaatttgctgtgcttcttgcatttttgaaagttacatattctccactgctttaagaaataattcagttcactttcaccttggcatttcagtatctgttacacattagaagtagttgtcactatttcatcatcttggtttttcatttgttttagaatacctcttctgtattttgataactcattgctttatagcattttcttttactcaaataaggattttacatttcctttcctgagattttaaaaaaatttgcttagtaaaggttattttgtgatataaaatgggatttataaaaatattagattgtttatttctttactgtggaaaagtagaatgtcatctgtattaattattgcttttacattcattgattattagtcattctaacttggaaaataatgcaattgggtcacagtgttaaaaatctagaaaagacttgttggtttatatgctgaaattgttcatttataattaattttactaatttctccttagtttggatcactaacagagatcttgggacatttatttgttttaaagaaatatttatggttatggaaacgcttgccctaataaaaatcctgcatattcattgtt

SEQ ID NO: 7474 - DNA, 1400 bp, Homo sapiens
tgcagagaaggcttattgtgtcagcagcagagggacctgcgtgaatacactcaagccaccatctatgtccataaagttgtggataataaaaaggtgatgaaggattcggctccggaactgaatgtgagtagttctgaaacagaggaggacaaggaagaagctaaaccagatggagaaaaagatccagattttaatcaaagcaatggtggaacaaagcggcaaaagatatcccatcaaaattatatagcctatcaaaagcaagttattcgccgaagtatgcgacatagaaaagttcgtggtgagaaagcacttctcgtttctgctaatcagacgttaaaagaattgaaaattcagatcatgcatgcattttcagttgctccttttgaccagaatttgtcaattgatggaaagattttaagtgatgactgtgccaccctaggcacccttggcgtcattcctgaatctgtcattttattgaaggctgatgaaccaattgcagattatgctgcaatggatgatgtcatgcaagtttgtatgccagaagaagggtttaaaggtactggtcttcttggacattaatctttgaatacttgctgactgctaagaaatgacagaggggaagaggagtttgacatgttagggcattaaagcaaaggtggatttaagaattaaaccattacatgccccttccaaaaggcagaaatccattcaaacgtgactgtcccaaatgccttatgtcaaataaagcagattgcactgatggacatcagacttgaaggaaatgtttccaattttatatttaaggggggtggtgggtgggagggggcaagtaaagacggaacaagtttagtagcagtaatagtaaatcatgtttacatatgagatttatagtcgtgggaggggaataaagttctgttatatttccttgctcgagtttcataccagatgcgttggtccataaaggattgtatcaagtagatgggacaacattctgctctgaacgaaaagtaattttagagacataacctgcttaccaatgcctgtctttgattcatattctactttcaataaagcatgaaagtgaagaacttgtcctaagtgtggaaaagtgtcttcagatttagactcttctccatgtcagctgcagcgccacccgccttacacctgcccggccgtctgtctcttggtattgggtaaaggagggggcacctgcatgtctcctgcaatgagcaaggaattatgtctcatgttttgacttcagaggctttttgctttggtgcatttcagaaaggatggagaacatttattatgtgtgaaagcatcctcttccggttttgctgttattcaaaagtgggaaatgtacctggcacgtttgaaaataaaaaatctgactacctatc

SEQ ID NO: 7475 - DNA, 600 bp, Homo sapiens
gaagcaatagcatatgcattctttcatcttgcacactggaagagagtggaaggggctttgaatcttttgcattgtacgtgggaaggcacttttcggatgatcccttatcccttggaaaaggggcacctattttatccttacccaatctgtacagaaacagcagaccgagagctgcttccatctttccatgaagtctcagtttacccaaagaaggagcttcccttctttattctctttactgctggattatgttccttcacagccatgctggccctcctgacacatcagttcccggaacttatgggggtcttcgcaaaagctttcctcagcactttgtttgcccccttaaactttgtcatggagaaagtggagagcatcctcccatccagtctgtggcaccagctaacacggatctgagagaagccctgtcctccactcacctcacccgccgctgccaccatctcctctgtgccaactccttgtggaccgcaagaaagcatgactttgaaaaagggaagccattccgagattttaaaatgttcatggactattccatattaaaagctgtttttgttgttgtacaaaaaaaaaaaaaaaaaa

SEQ ID NO: 7476 - DNA, 1400 bp, Homo sapiens
atggatgctccccactccaaagcagccctggacagcattaacgagctgcccgagaacatcctgctggagctgttcacgcacgtgcccgcccgccagctgctgctgaactgccgcctggtctgcagcctctggcgggacctcatcgacctcatgaccctctggaaacgcaagtgcctgcgagagggcttcatcaccaaggactgggaccagcccgtggccgactggaaaatcttctacttcctacggagcctgcataggaacctcctgcgcaacccgtgtgctgaagaggatatgtttgcatggcaaattgatttcaatggtggggaccgctggaaggtggagagcctccctggagcccacgggacagattttcctgaccccaaagtcaagaagtattttgtcacatcctacgaaatgtgcctcaagtcccagctggtggaccttgtagccgagggctactgggaggagctactagacacattccggccggacatcgtggttaaggactggtttgctgccagagccgactgtggctgcacctaccaactcaaagtgcagctggcctcggctgactacttcgtgttggcctccttcgagcccccacctgtgaccatccaacagtggaacaatgccacatggacagaggtctcctacaccttctcagactacccccggggtgtccgctacatcctcttccagcatgggggcagggacacccagtactgggcaggctggtatgggccccgagtcaccaacagcagcattgtcgtcagccccaagatgaccaggaaccaggcctcctccgaggctcagcctgggcagaagcatggacaggaggaggctgcccaatcgccctaccgagctgttgtccagattttctgacagctgtccatcctgtgtctgggtcagccagaggttcctccaggcaggagctgagcatggggtgggcagtgaggtccctgtaccagcgactcctgccccggttcaaccctaccagcttgtggtaacttactgtcacatagctctgacgttttgttgtaataaatgttttcaggccgggcactgtggctcacgcctgtaatcccagcactttgggagaccgaggcaggtggatcacgaggtcaggagacagagaccatcctggccaacacggtgaaaccctgtctctactaaaaatacaaaaaattagccgggcgtggtggcgggcgcctgtagtcccagctactcgggaggctgatgcagaagaatggcgtgaacccggaaggcagagcttgcagtgagccgagatcacgccactgcactccagcctgggtgacagagcgagactctggctcataaaataataataataataaataaataaaaaataaatggttttcagtaaaaaaaaaaaaaaaaaa

SEQ ID NO: 7477 - DNA, 600 bp, Homo sapiens
gtagaggccggacgcagtggctcacgcctgtaattccagcactttgggaggccgaggtgggcgggtcagttgaggtcaggagttcaagaccaggctggccaacatggtaaaaccctgtctctactgaaaaacaacaaaaacaaaaacacaaattagtcgggtgtggtggcacacacctgtagtcccaggtacttgggaggctgaggcaggaggatcgcttgaacccaggaagcagaggttgcagtgagctgagatcgtgctactgcagtccagcctgggctacagagtgagactgcatctcaaaaaaaacccmaaaaaacaaaaacaaacaacaacaacaaaattataaaggtagaaaataaatctaaattgtgtcgtaattaagattattaaaatgagaattatacaatgacttatttttggtggcaaatactttaggagcaataatgccttatggtaattattgatgtatagttttttttgtttatgaagtcaaatttgtataaatttttttaattcaaaggaaaagttttatgtgattttaaaaaaaaaaaaaaaaaaaaaaaaaaaaaaaaaaaaaaaaaaaaaaaaaaaaaaaaa

SEQ ID NO: 7478 - DNA, 1400 bp, Homo sapiens
ttaaggaatgaggttacagattcaggaattgtagggcctcaacctatagactttgtcccaaatgctctccgacatgcagtagatgggagacaagaggagattcctgtggtcatcgctgcatctgaagacaggcttgggggggccattgcagctataaacagcattcagcacaacactcgctccaatgtgattttctacattgttactctcaacaatacagcagaccatctccggtcctggctcaacagtgattccctgaaaagcatcagatacaaaattgtcaattttgaccctaaacttttggaaggaaaagtaaaggaggatcctgaccagggggaatccatgaaacctttaacctttgcaaggttctacttgccaattctggttcccagcgcaaagaaggccatatacatggatgatgatgtaattgtgcaaggtgatattcttgccctttacaatacagcactgaagccaggacatgcagctgcattttcagaagattgtgattcagcctctactaaagttgtcatccgtggagcaggaaaccagtacaattacattggctatcttgactataaaaaggaaagaattcgtaagctttccatgaaagccagcacttgctcatttaatcctggagtttttgttgcaaacctgacggaatggaaacgacagaatataactaaccaactggaaaaatggatgaaactcaatgtagaagagggactgtatagcagaaccctggctggtagcatcacaacacctcctctgcttatcgtattttatcaacagcactctaccatcgatcctatgtggaatgtccgccaccttggttccagtgctggaaaacgatattcacctcagtttgtaaaggctgccaagttactccattggaatggacatttgaagccatggggaaggactgcttcatatactgatgtttgggaaaaatggtatattccagacccaacaggcaaattcaacctaatccgaagatataccgagatctcaaacataaagtgaaacagaatttgaactgtaagcaagcatttctcaggaagtcctggaagatagcatgcgtgggaagtaacagttgctaggcttcaatgcctatcggtagcaagccatggaaaaagatgtgtcagctaggtaaagatgacaaactgccctgtctggcagtcagcttcccagacagactatagactataaatatgtctccatctgccttaccaagtgttttcttactacaatgctgaatgactggaaagaagaactgatatggctagttcagctagctggtacagataattcaaaactgctgttggttttaattttgtaacctgtggcctgatctgtaaataaaacttacatttttcaataaaaaaaaaaaaaaaaaaaaaaaa

SEQ ID NO: 7479 - DNA, 1109 bp, Homo sapiens; identical to SEQ ID NO: 2244

SEQ ID NO: 7480 - DNA, 1400 bp, Homo sapiens
tttagctaaacttcgcattgaacgagaaagtgccttggaaaaactcaggaaagaaattgcagacttcgaacaacagaaagcaaaagaattagctcgaatagaagagtttaaaaaggaggagatgaggaagctacaaaaggaacgtaaagtttttgaaaagtatactacagctgcaagaacttttccagataaaaaggaacgtgaagaaatacagactttaaaacagcaaatagcagatttacgggaagatttgaaaagaaaggagaccaaatggtcaagtacacacagccgtctcagaagccagatacaaatgttagtcagagagaacacagacctccgggaagaaataaaagtgatggaaagattccgactggatgcctggaagagagcagaagccatagagagcagcctcgaggtggagaagaaggacaagcttgcgaacacatctgttcgatttcaaaacagtcagatttcttcaggaacccaggtagaaaaatacaagaaaaattatcttccaatgcaaggcaatccacctcgaagatccaagtctgcacctcctcgtgatttaggcaatttggataagggacaagctgcctctcccagggagccacttgaaccactgaacttcccagatcctgaatataaagaggaggaggaagaccaagacatacagggagaaatcagtcatcctgatggaaaggtggaaaaggtttataagaatgggtgccgtgttatactgtttcccaatggaactcgaaaggaagtgagtgcagatgggaagaccatcactgtcactttctttaatggtgacgtgaagcaggtcatgccagaccaaagagtgatttactactatgcagctgcccagaccactcacacgacatacccggagggactggaagttttacatttttcaagtggacaaatagaaaaacattacccagatggaaggaaagaaatcacgtttcctgaccagactgttaaaaacttatttcctgatggacaagaagaaagcattttcccagatggtacaattgtcagagtacaacgtgatggcaacaaactcatagagtttaataatggccaaagagaactacatactgcccagttcaagagacgggaatacccagatggcactgttaaaaccgtatatgcaaacggtcatcaagaaacgaagtacagatccggtcggataagagttaaggacaaggagggtaatgtgtcaatggacacggagctgtgacgatcctcatgtgatcatgaagtaacagtaactgactttttatgttaaaaaatgtacatttactgtggattctgtttaatttattgtgtatgtgtggggaaaagattggattttaaaataaaagtttaccctgtggcattttcaaaaaaaaaaaaaaaaa

SEQ ID NO: 7481 - DNA, 600 bp, Homo sapiens
cttgattgccaaaggcatgaatcatacaaaaactcaatatagagcaatgtttgtaatgaattgttctattaacaaagaggaggttctaagatataaagcctcagagaacaaggaagaaaaggcgggtccataagaagatgaggtctaaccgggaagatgctgccgagaaggcagagacagatgtggaagaaatctatcacccagtcatgtgcactgaatgttccactgaagtggcagtctacgacaaggatgaagtctttcattttttcaatgttttagcaagccattcctaaacagcccaactggcatttaattacccaatactgtatataaggcaaatatggacagttactttcctcttgcctgttcatatccttcagtgacattgaggaagcagtgtttctctttttaaaggagaatagttgtcaaccttcattcatctcttacatctctcaccctctccttttttttttctttgattttcccccttattgatgggactgatattcattctgtttttgatgaacatttggaaactgtcgggctttttattaaagctctgtagaattaaaatgttctggaattataagcaaaaaaaaa

SEQ ID NO: 7482 - DNA, 600 bp, Homo sapiens
gcagccatgacaaggaaagaaaagacaaaggaaggccagagagccgcgcagttctctgcaggtgcagatgcaggcagtggaggtggcctgagcaggcagaaggacaccaagcgccctatgttgcttgtcattcatgacgtggtcttggagcttctgactagttcagactgccacgccaaccccagaaaataccccacatgccagaaaagtgaagtcctaggtgtttccatctatgtttcaatctgtccatctaccaggcctcgcgataaaaacaaaacaaaaaaacgctgccaggttttagaagcagttctggtctcaaaaccatcaggatcctgccaccagggttcttttgaaatagtaccacatgtaaaagggaatttggctttcacttcatctaatcactgaattgtcaggctttgattgataattgtagaaataagtagccttctgttgtgggaataagttataatcagtattcatctctttgttttttgtcactcttttctctctaattgtgtcatttgtactgtttgaaaaatatttcttctataaaattaaactaacctgccttaagaacagaaaaaaaaaaaaaaaaaaaaa

SEQ ID NO: 7483 - DNA, 600 bp, Homo sapiens
aaaacgatttccaccagcaacagaaaacttcctttatcatctagcagcagccgaacaaaatgctgaaaatctgactgtgtgacagaaccgtatcactgatgactgatagaaagccctctttactctgattacccactcactacatgaagtcctgaaaataacagagaaactgttatatctttttaatgatttatttgcaagtattgagatttgacctgaaaaacaatgaaacacatgaacacacttccgattttctcctcgctgattagcttcctgcctgctgtcagtgctggacgaagtgctataactactttatgtaacattacagaacagctagaggtcctggggtaagagaaaaaaagcacatcacaacaaatgtgaaagccttcattattacacgttccagtttgtctcgctgtgtaggcataagctaatggtttattttcagaaagctgcctgaaacgttgctttgtattcttctaggaagaactttaattcctcctgaggaactctactttctgagccaaactgctaattttctgcggaactgtctagaagatcattcaagagaccctgcagttgcactttctcgtaaaagtt

SEQ ID NO: 7484 - DNA, 1400 bp, Homo sapiens
atgcctaagcctgtcagagttgttcagtataatatcaatacagaagaattatattcctacctaaaggaattcatccacatactatatttcaggcatctattggtgaatcccagagaccgccgagttgtgattatcgaatcggtattatgtccttctcacttcagagagacactcactcgtgttcttttcaaatattttgaggttccatctgtcttgcttgctccaagtcatctaatggctcttctgacgcttggaattaattctgccatggtcctagattgtggatatagggaaagcctggtgttacccatatatgaaggaatcccagttctaaattgttggggagcactacccctaggaggaaaagctcttcacaaagagttggaaactcaactattggaacaatgtactgttgacacaagtgttgctaaagaacagagccttccctcagtgatgggttcagttccggaaggtgtcttagaggacattaaagcgcgtacttgctttgtaagtgatctgaagcgaggactaaaaatccaagcagcaaaatttaatattgatgggaataatgagcgtccctccccacccccaaatgttgactatccattagatggagagaagattttacatatccttggatcaatcagagattcagttgtggaaattctttttgaacaagataatgaagagcaatcagttgccactttaatattggattcccttatacagtgtccgatagacaccaggaagcaactagcagagaatttggtagtcataggtggcacttctatgttgccaggatttctccacagattgcttgcagaaataaggtatttggtagaaaaaccaaaatataaaaaagcacttggcactaagacatttcgaattcatactccacctgcaaaagctaattgtgtggcctggttgggaggggctatttttggagcattacaagatatacttgggagccgttctgtttcaaaggaatattataatcagacgggccgtatacctgattggtgttctctcaataacccacctttggaaatgatgtttgatgtcgggaaaactcaaccacctctgatgaagagagcattttccactgagaaatagaagtttgattaaaaatcaaccttgcttcatatcaaatatttaaccaattataagcaaattgtacaaagtatgtaggatgttttgttatagaggactatagtggaagtgaaagcattctgtgtttactctttgcattaatatataattcttttgactttgtttctcttgtgtagtggtaaaatggtagctggtgcttattgagatttgctgtatttatatcaataaagtatagtaaagcaagcagtttgattttggaaaaaaaaaaaaaaaaaaaaaaaaaaaaaaaa

SEQ ID NO: 7485 - DNA, 1400 bp, Homo sapiens
cccgccgcgggtctgcgcggggcgggggcgcagcaagtgcatccgagcgagcggagactagcgcaccggcgtcggtggcgagggtggtgcagaggagtccggctgggcggagggaggaaggatgggtgcgggtaactttttgaccgccttggaagtaccagtagccgcgctcgcaggggctgcctccgaccgccgggcgagctgcgagcgagtgagcccgccaccgcccctcccccacttccgcctcggcacgaggcctcttcctcgttcccggctcccagggcccgtgtccaggccggagccaggggccccactgttgggatgctggctgcagtggggcgccccaagcccaggtcccctctgtcttctctttcgactttgcagctgtacttgttttgctcctctacccgcaggagctgacatggacccaaatcctcgggccgccctggagcgccagcagctccgccttcgggagcggcaaaaattcttcgaggacattttacagccagagacagagtttgtctttcctctgtcccatctgcatctcgagtcgcagagaccccccataggtagtatctcatccatggaagtgaatgtggacacactggagcaagtagaacttattgaccttggggacccggatgcagcagatgtgttcttgccttgcgaagatcctccaccaaccccccagtcgtctggggtggacaaccatttggaggagctgagcctgccggtggctacatcagacaggaccacatctaggacctcctcctcctcctcctccgactcctccaccaacctgcatagcccaaatccaagtgatgatggagcagatacgcccttggcacagtcggatgaagaggaggaaaggggtgatggaggggcagagcctggagcctgcagctagcagtgggcccctgcctacagactgaccacgctggctattctccacatgagaccacaggcccagccagagcctgtcgggagaagaccagactctttacttgcagtaggcaccagaggtgggaaggatggtgggattgtgtacctttctaagaattaaccctctcctgctttactgctaattttttcctgctgcaaccctcccaccagtttttggcttactcctgagatatgatttgcaaatgaggagagagaagatgaggttggacaagatgccactgcttttcttagcactcttccctcccctaaaccatcccgtagtcttctaatacagtctctcagacaagtgtctctagatggatgtgaactccttaactcatcaagtaaggtggtactcaagccatgctgcctccttacatcctttttggaacagagcacggtataaataataaactaataataatatgccaacaaaaaaaaaaaaaaaaaaaaaaaaa

SEQ ID NO: 7486 - DNA, 1400 bp, Homo sapiens
gtcattttaaatgaatttggggaaggaagtgcgctggagaaatccttagctgtcagccaaggtggagagctctatgaagagtggctggaacttagaaacggttgcctctgctgttcagtgaaggacaatggccttagagctattgagaatttgatgcaaaagaaggggaaatttgattacatactgttagagaccactggattggcagacccaggtgcagtggcttctatgttttgggttgatgctgaattagggagtgatatttaccttgatggtatcataactattgtggattcaaaatatggattaaaacatttaacagaagagaaacctgatggccttatcaatgaagctactaggcaagttgctttggcagatgccattctcattaataaaacagacctggttccagaagaagatgtaaagaaattaagaacgacaattagatccataaatggactaggacaaatcttagaaacacaaagatcaagagttgatctctctaatgtattagatcttcatgcctttgatagtctctctggaataagtttgcagaaaaaacttcagcatgtgccaggaacacaacctcaccttgatcagagtattgttacaatcacatttgaagtaccaggaaatgcaaaggaagaacatcttaatatgtttattcagaatctcctgtgggaaaagaatgtgagaaacaaggacaatcactgcatggaggtcataaggctgaagggattggtgtcaatcaaagacaaatcacaacaagtgattgtccagggtgtccatgagctctatgatctggaggagactccagtgagctggaaggatgacactgagagaacaaatcgattggtcctccttggcagaaatttagataaggatatccttaaacagctgtttatagctactgtgacagaaacagaaaagcagtggacaacacgtttccaagaagatcaagtttgtacataacactagaggcatttcttatcaaaaggattggataataaaaataagtttctactgggtatatttcaagcatttatttattactttagttacgaattccaatatactttaaaatggtatttgttttacagcatacataaaatgtagcaaatcagtactgtaaaacatttaacattcatacagttatatataatatccttttttttaaagaatggtatttcacaaaaatatcttttgaaattggctttggagtttacatatactgaacatgaaagtttataataatgatgatacaactttcaacattgtcattttttcttagaacttcagctgattgcagagatataatgattacattgttattaaatttttttaacacaagtaagtgtcaccattttatgacatgaaataaaaggttatgactgttatcg

SEQ ID NO: 7487 - DNA, 1400 bp, Homo sapiens
gcccaggtttgtttgaatgcctctaaagcccatgctttttcctttgtacctccccacatgctccatctactttggttaggtagctccagcctctgccctgtgccaaggggctgaaagtctctgaagacctgatgacccagcttccagtcagatccttaccctgtctacttccagtccccccatgtggctgtgctggaagctctcggatatgccttgtcccagcttctacaggctgaggaagctccagagaagatcattccccctgcttctgccagcagctccatcttggcctccactctccctcagcacatgctacaaatgttgcaacctggcccaaagctcaaccctggggtcgctgtggagtttgcctggtgccttcattacatcatctgcagccaggtcagcaatcctctgctcattggccatggggctctgtctactctggggttgctgctgttggacttggctggggctgtccagaaaaccgaggatgcaggactggagctgctggcatgccccgtgcttcgatgtctaagcaacctgctaactgaggcagcagtggagactgtgggagggcaaatgcagctcagagatgagcgtgttgtggcagccttatttatccttctgcagttctttttccagaaacagcccagtctgctccctgagggcctttggctcctcaacaacctcactgcaaacagtcctagtttctgtacctccttgctctccctggatctgattgagcctctcttacagctgttgccagtatctaacgtggtgagcgtaatggtgctcacagttctgtgcaatgttgcagaaaagggtcctgcttactgccagcggctgtggccagggcccctgcttcccgccttgctgcacacactagccttttctgacactgaagtagtaggccggagtttggagctgctgcatctgctgttcctgtatcagccagaggctgttcaggtcttcctgcagcagtcagggctgcaagccctggaaaggcatcaggaagaggcccagctccaggatcgtgtgtatgctctccagcagacagctcttcaagggtgatcttgtttctcaatgtcactcattcccctctctcttaacatcaagcttgtttgtccagtagagcctttggagatttaggaccataatgaggtctcatgttctctgctcccacacctaagccaagacctttgggtcccagctcctccccttccactcagcactatccaggcaggaggaccaaaagggactcagtgtggtctacttactctggggccctagaatccctgcccccccgccacccttcatgtttgcttcagcagctggtagcttttgatgagacagaataaagttttatttttatattaaaaaaaaaaaaaaaaaaaaaagcg

SEQ ID NO: 7488 - DNA, 600 bp, Homo sapiens
ttaactgtccctgtccctatttatccatcatccaagaccatccattattctagagcactctgatcaataaaaggggtccaagcatcaggagcaggcaaggagaaccaaaagacatcaagaaaccgatttgcttgagaaaagcagcgattcttcctttcagagttctccatggctgagaaaatgcccaagacatcatgtatgtgacttagatactgctttttgggaggttaagagtagcatgaagaacttaagatgatgataagagtctaaatttttagtttcaaggtttcaatagaatgtggatatattcaaaactttcaaaaaggacagtgtttagaaagggtaaaactaggacacagaaaacactgggaattaccacgacccccaagtgcttccggctccaggaaataaccattcatgtgtttgctggaggtcacacaattttcccctattacctggtgcaaaatgactcatcacttcccaaaagcttcttttcaaaccacgattttcccatttattttggtccaatgcagtcccattctttatggcctatagtctcactcccaactacccccctggggggttaaaaaaaaaaaaaaa

SEQ ID NO: 7489 - DNA, 600 bp, Homo sapiens
ctttgcttcatcttttcacaacagctggatagagggatcagaaatgactgtgtcatggtgctcattcactgcaaactcccagttgcaagctccttggctcccccggagggagcaagaatctcatagttcagagacacagagggccttttagccctaatgaccttttggatgggactgcaactcatgactatcctgatattggaagaaaggactttgttaatcttctcccccatagctctgctgcgtaggtctacatcttactcagaatcactacacattcctttagtcttcctccaagctccagagccattggtacaaatgctttattgaaactaaatacataatacacacaatgagatgaagacaatatagaagtccgcatagtcatcataatcccgttccttggccggttgaggcagctcagtggctgagcccagtcaagccaacccgcagcttcactcacgacttcaagatttgatgctaattcttttggatttctacagttattaaataagtgtctgagtggacaaaaaaaaaaaaaaaaaaaaaaaaaaaaaaaaaaaaaaaaaaaaaaaaaaaaaaaaaaaaaaaaaaaaaaaa

SEQ ID NO: 7490 - DNA, 600 bp, Homo sapiens
tgacatttgatctctggccttgaccgcagatttcggaaacttctggcagcccagtgtctactggaaggcccaagccgcttgccagaaagctgcgccccgcccaaaagcactgggttctgcagtccaggcccttcctcagctcccaggtccaggagaactgcaaggtcacctacttccacaggaagcactgggtccgcatccggcccctccgcaccactcctcccagctgggactacacccgcatctgcatccagagagagatggtccccgcccgcatccgcgtcctgagagagatggtccccgaggcctggaggtgctttcccaacaggctgccgctgctgagcaacatcaggcctgatttctccaaggctcccctggcctacgtgaagcggtggctttggaccgcccgccacccccacagcctgtccgcagcctggtgaccgtgaaaatcgccccgccagagagcagaggaagcccgacgcccaggccatctgccttcaggtctgtgatgagaaacggagtggcctgctccgttgtgcccaggtctaggccgctgagcagagccctcactcccaggcagagttgtctgaatccttcctg

SEQ ID NO: 7491 - DNA, 600 bp, Homo sapiens
atagacttgttaggcaataatagaaaatcagaacattgcccaagggatgaaaaggagctttaggacgggcgcagtggctcatgcctgtaatcccagcactttgggagggccaaggcgggcagatcacaaagtcaggagatcgagaccatcctggccaacacggtgaaaccccatctctactaaaaatacataaaaattagctgggcgtggtgttgggagcctgcagtcccagccactcaagaggctgaggcaggagaatggcatgaacccaagaggcagggcttgcagtgagccaagattacgacaccgcactccagcctgggcacagcgcagagcgcacagcaagactccgtctcaaaaaaaaagaaaaagaaaaggagctttaaaccttggtctttcttgaatccaaaattccatcttcttttcattataccatgctgattgaaaataactatgcttttaggccaggcacagtggctcagcctataatctcagcaccctggaaggccacggagggaggatcacttgaggccaggagttcgagcctggcccaacatggcaaaaccccgtctctaccaaaaatacaaaaattaaaaaaaa

SEQ ID NO: 7492 - DNA, 600 bp, Homo sapiens
ttcatggttcctgagctctttctcctgtttcatttgagcctccaaactacatatttggtcatattgcctgcctaccccatgcctgctgcagaaatattcatccaggttaaccttgatatacacagagatggtcttggagaattgtgaatgtatgtactgtattgtcatcaaggatactgtcccttatttgaaggcatctaaagagaaactgttttcagatccaagtgctcagatctaaagcctctgcaacaagtcaggtggtggtcatgtttcccttctagttttggctgacaggaagctcagttcagtaccataactacagaacctgtcatctgtattttttgttctcaccccgtttttgttattttgtttctggttttttatattgaggtatgttttagatatagtttacaaaaataaaacgcacagatcttaaaaaaaaaaaaaaaaaaaaaaaaaaaaaaaaaaaaaaaaaaaaaaaaaaaaaaaaaaaaaaaaaaaaaaaaaaaaaaaaaaaaaaaaaaaaaaaaaaaaaaaaaaaaaaaaaaaaaaaaaaaaaaaaaaaaaaaaaaaaaaaaaaaaaaaaaaaaaaaaaaaaaa

SEQ ID NO: 7493 - DNA, 600 bp, Homo sapiens
atgagtcaacagttccctggaatacctgttttcttctttaaaaagagaaagagctgtgatactgagagctacctattggcataaaagaatatgaaggacatacaggtaaaatgaggtagactggatcaatgtgggtcagctacataagcccccatagccaaggagggaacatgtatgtaaaattctcaggcttatgagaatcacaactgtatgtctataggacatcctaatgcaataatgggaaaatgtgataactgaattttatctacatgtatagaaaacatattttgggccgggcatggtggctcaagcttgtaatcccagcactttgggaggccgaggctggcggatcacaaggtcaggaaatcgagaccatcctggctaacacggtgaaaccctgtctctactaaaaatacaaaaaattagccgggcgtagtggtgggcgcctgtagtcccagctactcgggaggctgaggcaggagaatggcgtgaacccggcaggcggagcttgcagtgagccgagattgcgccactgcactccagcctggatgacagagccagactccatctcaaaaaaaaaaaaaaaaaaaaaaaaaaaaa

SEQ ID NO: 7494 - DNA, 1400 bp, Homo sapiens
atgtcaacccttccatttcaatcccagttagaaatgaaaataattactttgaaacttggctttaagagcacatttatcgtacgtcacagtgtatggtgaatatattattaaataatgtggtacttcgctcatcaggcataatgtctaaaatctaatatacataattccattaagtggttgaaggaagcaaataatggaattgtcaattggtcatctggctgtaaggtttgcccttgaactaaaaatgttgtttggggcaagggccagaaatgtggagacatggtttttgttacgcattcttgtattatatgtgactaaatttacaaacaagatacatgtgtaattaaagacccttatggaactggaagacgtcttgtagtgctacattgggtgaaaccgttggtccatttttgtctgtttctatgaagataaaataattgggggccatctagaaatagaaaggcagtgggaagacagattctacggcactgctttcatttaattgggctttaggcactccattcgaatgcagaacctcacctctagttgagaccaagaattggcaaatttgcatgagctcctggaaagagttgctgactttgtatctaagacctgccagggaataccaagagttgtttctacagactttttttttttttttgtatgggagaagatactgtggcaaccaggaaggaatggaaaaaaaattcttttctctacagcaaattaatgtgaggaagctcctccaatcctctggctatttaaggttcaaaatcaagtgcctagggaaaattccaatggatgattttctgggagctatcttgtctaccttgaggttcctgaacaatgaattcccattaatgagcagtcttcagtattaaaaccactgtcttgtcacctcattttgcattactgtcttccgtggatgtttcagttacaactgtaatgttatttatagaacaacattaatccattaaagctaacctatttttcaatatttatgataatctatgtacatatattgtctgtccatatgtatttgtaaataggttgtatataatgtcaggtttgggtcttgggttcaagtgtatatattcctgtaagtttcttaactgcattttgatgaattcacattatgtaactataagaattgtcccaaaagtacctgtacagaaaattgaatattgaaaaattgacaaattgtgtacaaacactaaaaaaaacttgtttaaattgtatttgcaataaacaacatcaaattttttcatgaaatcttggtacaaattcagatctcttatttaaaatttaaataaggaatacattttcaaaatgcagtaatcaaaatgtgatctagtgtaatgaaataaaatgtgatctagtgtaatggaagacctttgaga

SEQ ID NO: 7495 - DNA, 600 bp, Homo sapiens
catttcacatccaagtgcacagaaccatttttgcaagattaaataatgtaaacattgggaacagccaaatcagcgaagaatgccaacacctcaaaacacctggtgttgccgcttcattaagtggttcaaaatccagatctataattgcgcaatattcaccgtatataaaaagaaatggatattaattttgacaaatagctgcaactgagacttctttttatttctttatatgtgtatatagtgaatttttattatttttaaaattttatttatttttttatttttatttttgcagaggagcccagagccttctcctcctcctcctcctcctctcgcctcatctgtctcccggcctgataccagatacaggttgttgatttcatcgtgggtagcaagctagtaataaatttcaaagtgctttctcttttcatgctttttgccaataactgttaccgccgttcttattctctcccttaactcattgtctttgggggagttagacaccaggaggtgccttgtcggtcatatttttcagcacgtcatcaatcctatcatcttcaataacaacccgcttgctccggccgatctggcccagcttgg

SEQ ID NO: 7496 - DNA, 1400 bp, Homo sapiens
tgtttctggagtttcatgaggatttacacatggcattcagtgttctgtatagatctgcctacctttgtgaattcatctgttaacccctcttcctttgagagagcaccggcgatggtggttaactccttgtgttttctctctctcctactggttattcttgaattaagcacagactcgtcagctcggttgctttatcatgaataatgtgtgtgaccttgcagttcttccacagttcagcaaacaagtgctagcttcactgaccaaaaattaaggaaggaaaacacagtttttaaaacgatccatcttttaacagccgaaaccgatgtgtctatggtgctgcaccttgctgttgtacttctgaaatcagacgtgtgtgaacgatcatttctgacttaaccgtgagatgctcacgagtacccttcctgttgttttgttagcattgaaatcgagactatttatttggaatatatacaacagtgtttttccactgtatttcatttgcaaaagttgagaactgctttctctaccttttgcaaaataattgatattccatattggattctcaaagacttcgatatggtgaacctattaaacctagaaattgtattcatcctttcatgactgtggcctgagttccccagcccctctcctccttttttttagatgagatttagcacactctcagttatttaaacatgcaacatttcttgagtatgtatgttgaggccatctgagctcatagctgattcagtaaccagtttcatgctgtgtcattcacactcactacttaatactgccatggtgaaaatgtggaggaaaaatgtatccatgtgtgtctgggaagcatatacacttgtacattttttaatactctgattctgtaacatttctgagttttgttttgttttacagaaaaaaaaaaaaaagtgataaagcaatcagaagaccaagaggtttactattgatgcttagggtcgtctgaccttggctggccaatagacctacacggccaaattaatttacgagagtaataatttttcaaaagccaattttttttctgtattttctgtatgaaactgccaatatcatgaatagaaagggagaaccataaaggagaaagaacgtgatgttctgttatgttcatgtaaacctaaagaaacagtgtggaggcaggcgcgatcagccgaactctagggacttggtgttgcttggaaggcatccatacctgcattttgcattcttcgtatgtaatcatattgccaaagacaaactatttcatcatttattgtaaataacacttttccccagacctaccataaagtttctgtgatgtattgtcttccagttgcaataaaaattactgagttgcatcaaaaaaaaaaaaaaaaaaaaaaaaaaaa

SEQ ID NO: 7497 - DNA, 600 bp, Homo sapiens
tgaaaattcactgaagaaaaatcattactctttttctcagtaaatcatatcatctgaaatattacaaatttcaaatttctaggtgctatattaattcaatattacaataactcttacctaattattcttacaagttttaagttgtggtagtttagtgatttttttaaaagatgtgtgaaatgttctctgcaaaataattcaggccactgtctccttttatatattattataattatttattatgaagaccagtgaattacgatatttaaagtgagagaacttaattatttgcaaaggtaagttacagcttgttttttgagagaatcaaatgagtttacttttgttcctgttgtttttaactagctttaagtttaaagatggaagctaagcaatggaaatgctatacgtttttgacatttattaaatggtaccaataaagtattttattaccaaaaaaaaaaaaaaaaaaaaaaaaaaaaaaaaaaaaaaaaaaaaaaaaaaaaaaaaaaaaaaaaaaaaaaaaaaaaaaaaaaaaaaaaaaaaaaaaaaaaaaaaaaaaaaaaaaaaaaaaaaaaaaaaaaaaaaaaaaaaaaaaaaaaa

SEQ ID NO: 7498 - DNA, 600 bp, Homo sapiens
  misc_feature (117)..(117): n is a, c, g, or t
atgaatccaaagaagatgggagagagatttaacttttttgccttgctacctcatcagagacttcaaggtggaagatatcagaggaatgcacgtcagtcaaaaccctttgcatccgtngtagctgggtttagtgaacttgcttggcagtgatatttcagcttggacattttacccttcagtcggcccaagaaatcaaaataaaggaaacacatttcatatactgcaggtaacaaaagtcaaagtattttatcttttcacagcaagaacagtccatgttgtatataatacaaccaacattatagaacttttagggttgtgactggctttggtgcaaatgtgtgctcaagctaataagttattgtgaaactgagtttcctttaacttacaaagctagttgccatatttctattttattttaaaaagtaaacatgcggctgggtgtggtggctcatgcctgtaatcccagcactttggaggctgaggtgggcatatcacctgaggtcagcagttaaagaccagcctgaccaaaatggagaaaccccatctctactaaaaatacaaaactagccgggtatggtggtacatgcctgtaatcccagc

SEQ ID NO: 7499 - DNA, 556 bp, Homo sapiens; identical to SEQ ID NO: 2264

SEQ ID NO: 7500 - DNA, 999 bp, Homo sapiens; identical to SEQ ID NO: 2265

SEQ ID NO: 7501 - DNA, 1400 bp, Homo sapiens
ccttcaagccagccaggaccttttctgggtcatgaatagcacaatgaagcaagtgtctcctttccttgtccccaaggtgtgcagactttggcagccgtgcacctgaccagagctgaagctcccgctgggctgtggggttgccagaagctggggttgccatcccggggtacatgtcaccagtcctcttggggttttgtaccatctgatgctggaagttttgattagtgatattttctactactacatatttagagttcactggttcagtcttaaatgcctgcatggtgcctttttaggataaggtataaccatacatttttggtggaagtgtttctgggttagggaagttaaagtctgtttatccgtaagtggggaggagggtcagctaagagaagtgggagggccagagctttttggttctgatttacaaattaatgaagtagtttcaaacaacgcggtcatgtttacctctccatttgggagcctgcctacattcttgttctagaagcacaaaaaatcctcagatgaattagaagaaagaggtttggggactcagcggatactagttcttttaccttctgcttggtaacttagattaaactgagcattgtttttctgtcacaaatgttttccttatgacactggtttcgacatgtaaaatgtgtttgaaaacctgctttgtagatgcagagagaagctataggaaacccagtaccacccctggtctgttctgacgagacatcgttcataaggcacagcacatcgcaagatgaacagttgttaataaaagctgttgctggaaacttgctttaggaacagctcaagaaccttggagttcatatttcacaaatattaataaatataagtccaagagctgtcagcctaatctgtaggagcagaacctctgattgaccaaaaggcatatgggtttaggttggttttttgatgtcatatgtctctgatggggctgcaagtgctacctcgcgcttgtacactgctgctgtggggctccgcgcctgccggtgaagagctgcagatgccgagaagccagcaaacacagggcccactggaaaaaaatagttttttcattagtatttctcgggaggacccaaaagttaaggtcagcttgttcactgtaatttctggaagaagttcactcagaccttcctgaattcagatcatctcagaagtctggagggaaatctggcgaaaccttcgtttgagggactgatgtgagtgtatgtccacctcactggtggcaccgagaaacttacttccttgtattaagtgcacttcttgtatttctaataagatgactttccagaaagtgagatttgttatgttctggcttttaaaaggtaaaatataaataaatttcataacttaaaaaaaaaaaaaaa

SEQ ID NO: 7502 - DNA, 600 bp, Homo sapiens
ttggcctattgcagagcaaagagtattaagatatggctattttggcaaagagaagcttaaggaaataaaacttttggtttgcaatattgatggatgtctcaccaatggccacatttatgtatcaggagaccaaaaagaaataatatcttatgatgtaaaagatgctattgggataagtttattaaagaaaagtggtattgaggtgaggctaatctcagaaagggcctgttcaaagcagacgctgtcttctttaaaactggattgcaaaatggaagtcagtgtatcagacaagctagcagttgtagatgaatggagaaaagaaatgggcctgtgctggaaagaagtggcatatcttggaaatgaagtgtctgatgaagagtgcttgaagagagtgggcctaagtggcgctcctgctgatgcctgttctactgcccagaaggctgttggatacatttgcaaatgtaatggtggccgtggtgccatccgagaatttgcagagcacatttgcctactaatggaaaaggttaataattcatgccaaaaatagaaattagcgtaatattgagaaaaaaatgatacagccttcttcagccagtttgc

SEQ ID NO: 7503 - DNA, 1400 bp, Homo sapiens
acagtgcctcctacatccaggacgcctttcagctactcttacctgtgctagagatctctctcattgagaacaagattgaatcacacagacatgagctgcagggccagaaacctttgttagaacattgaagaatggagacgttttgacctgggacttgtgacgcccaaggaatgccaccttattctggctactcctgcagaaatgaaggagtggggttattttagtatataaaaattcaggcaggagagatggtttaaagaggaagattgttgccttcagtgtttgattgaagtattcaggttctcacagtattctttccagttgttgtaattcataaattatttgaaaagaaacttttgtagaaagtccaagaataataactctagataaagattagtgggacactcaggcaaaaatgttggtctttctttgacatgttgcaaaatgttatcaattttgtcatggatataatttgcagcccatggatataactggttgataagccagagaaaaataatttagtgttctaaaattcatggcatgtgtggtttattaatgccatgtactttctcctttctggaataaaatctatggctttaagaaaactgagcatatgtaaactctgtcatcattaccctttatcacatgaattcttggaaatagaaagtttcatctgcttttttaaattcttagtagatatttggcattgaggagaaacttgtagactattatagccatgtgaattaactgtagcaaagtgcctttttcttcaaattgctccccctccccaggatgacacacttcatgtcatagctgaaccctactctactggattcaaggccagtaaatgcaatttagagaagcagttttatgtttgcagatattctgagtctcttcaggatgtgtttcgtgtctaccatatatgcaggataaattctttaacagcaaactccaaaggaatgttgaagctgttttagcaatgaggatttttttgtttgagtgttgaagtgggccatagtcctttagaaatgatgttcatttatgataggatttaacttctaaggcatagtttattttttcctctttcctttttgtttgttttaatgtattctttagcatgtttttgatataacttttatcctccagatcttaagctttcttttgctctcttcagcaatttaagagactattaagctgtcgtcttcctaaaagctattttggtatccactctttttaaaaaaattctccaactttgtggttttttaatgattaaggtaatttgttagctctgcccctcatcttctaaaacctttgtaataaaatgtattaatcatgttatttgatcctttcatttacttttgtaaacacgagccctaatatcttacttagaccaaaaaaaa

SEQ ID NO: 7504 - DNA, 1400 bp, Homo sapiens
aacgaagcagcgttggaaaatggaattaaaaatgaggaaaacacagaaccaggtgctgaatcttctgagaacgctgatgatcccaacaaagatacaagtgaaaacgcagatggtcaaagtgatgagaacaaggacgactatacaatcccagatgagtatagaattggaccatatcagcccaatgttcctgttggtatagactatgtgatacctaaaacagggttttactgtaagctgtgttcactcttttatacaaatgaagaagttgcaaagaatactcattgcagcagccttcctcattatcagaaattaaagaaatttctgaataaattggcagaagaacgcagacagaagaaggaaacttaagatgtgcaaggagatttaatgatttcaaagaaaataatggttctttgtttttaatgttaaccttttttaaatacaatactgatagttagaagaaaactattgtactcttttgttttagtggagaaataatagatgtctgttcatgtgttaagtgttatagcaaaaaaaatacacatatggttaagttaatgaatagtttttgttttatcagaatggcaacagacagaagtactttgtagagattgacttcctaagctacttaagacaacttgcaccactaagaaaaaaatgtagaaccatttggaaaaatgaaatttagtagttccaagtttcaaagaaatgtcaacattttattccattcaataaagaacaaaaccaatagtgtttttattactttcatctgaaacattccatgttttaatctgagccttgcagactttcatttggagtttgaacccgttttggttgcatttcatttttggagaacttaattaacgtgagattggcaattgaaatgcaggtgcagttttctgttaatgtcatgctgttgtttaggtaataagaaatattaagtaattggctttagattttgtaatttttttccctgagttcctgctagatttcgtattctagtagtcaatgtattttcagtgaaatgcaaaaatattcccattatctttgaccagtattaatttttgagatcttactgcttgtcacttgaatcccgtgattgtcatacatctctggtataagcaacatttgatttttgaagtgtgtagaccatctcttcatattttcaagatgtaattttacatttctgcatttttaaaacagtttggccataatcctagatgcacgcttctaattcatgtacctgcacatgtgacctttgtgaacagaaatttgcatgtataatttgtgtttacttgtaactttctggttatatactgcttatatctgtggattcaagttactgaagtgaataccaataaaaagaaaaccctaggccatgttaaaaaaaaaaaaaaaaaaaa

SEQ ID NO: 7505 - DNA, 923 bp, Homo sapiens; identical to SEQ ID NO: 2270

SEQ ID NO: 7506 - DNA, 1400 bp, Homo sapiens
gtgttgaagtaccaagtaacctacaagcctcctagttctgaaaagttggaagggcatcatgacctcttggcctctcctttgattctcaatcttcccccaaagcatggtttggtgccagccccttcacctccttccagagcccaagatcaatgctcaagttttggaggacatgatcaccatccccatggtactgatgcttgctggatttagggagggcattttgctaccaagcctcttcccaacgccctggggaccagtcttctgttttgtttttcattgtttgacgtttccactgcatgccttgacttcccccacctcctcctcaaacaagagactccactgcatgttccaagacagtatggggtggtaagataaggaagggaagtgtgtggatgtggatggtgggggcatggacaaagcttgacacatcaagttatcaaggccttggaggaggctctgtatgtcctcaggggactgacaacatcctccagattccagccataaaccaataactaggctggacccttcccactacataatagggctcagcccaggcagccagctttgggctgagctaacaggaccaatggattaaactggcatttcagtccaaggaagctcgaagcaggtttaggaccaggtccccttgagaggtcagaggggcctctgtgggtgctgggtactccagaggtgccactggtggaagggtcagcggagccccagcaggaagggtgggccagccaggccattcttagtccctgggttggggaggcagggagctagggcagggaccaaatgaacagaaagtctcagcccaggatggggcttcttcaacagggcccctgccctcctgaagcctcagtccttcaccttgccaggtgccgtttctcttccgtgaaggccactgcccaggtccccagtgcgccccctagtggccatagcctggttaaagttccccagtgcctccttgtgcatagaccttcttctcccacccccttctgcccctgggtccccggccatccagcggggctgccagagaaccccagacctgcccttacagtagtgtagcgccccctccctctttcggctggtgtagaatagccagtagtgtagtgcggtgtgcttttacgtgatggcgggtgggcagcgggcggcgggctccgcgcagccgtctgtccttgatctgcccgcggcggcccgtgttgtgttttgtgctgtgtccacgcgctaaggcgaccccctcccccgtactgacttctcctataagcgcttctcttcgcatagtcacgtagctcccaccccaccctcttcctgtgtctcacgcaagttttatactctaatatttatatggctttttttcttcgacaaaaaaataataaaacgtttcttctgaaaagctg

SEQ ID NO: 7507 - DNA, 600 bp, Homo sapiens
atatccaactgttgtatacacagagcttctcctaactccgatgaagacaaacctgaggttccccccagagttcccatacctcctagaccagtaaagccagattatagaagatggtcagcagaagttacttcgagcacctatagtgatgaagacaggcctcccaaagtaccgccaagagaacctttgtcaccgagtaactcgcgcacaccgagtcccaaaagccttccgtcttacctcaatggggtcatgcccccgacacagagctttgcccctgatcccaagtatgtcagcagcaaagcactgcaaagacagaacagcgaaggatctgccagtaaggttccttgcattctgcccattattgaaaatgggaagaaggttagttcaacacattattacctactacctgaacgaccaccatacctggacaaatatgaaaaattttttagggaagcagaagaaacaaatggaggcgcccaaatccagccattacctgctgactgcggtatatcttcagccacagaaaagccagactcaaaaacaaaaatggatctgggtggccacgtgaagcgtaaacatttatcctatgtggtttctccttag

SEQ ID NO: 7508 - DNA, 1188 bp, Homo sapiens; identical to SEQ ID NO: 2273

SEQ ID NO: 7509 - DNA, 927 bp, Homo sapiens; identical to SEQ ID NO: 2274

SEQ ID NO: 7510 - DNA, 1400 bp, Homo sapiens
aagcggaaggcggaggaggacccggaggccgcggatagcggggaaccacagaataagagaactccagatttgcctgaagaagagtatgtgaaggaagaaatccaggagaatgaagaagcagtcaaaaagatgcttgtggaagccacccgggagtttgaggaggttgtggtggatgagagccctcctgattttgaaatacatataactatgtgtgatgatgatccacccacacctgaggaagactcagaaacacagcctgatgaggagtaagaagaagaagaagaaaaagtttctcaaccagaggtgggagctgccattaagatcattcggcagttaatggagaagtttaacttggatctatcaacagttacacaggccttcctaaaaaatagtggtgagctggaggctacttccgccttcttagcgtctggtcagagagctgatggatatcccatttggtcccgacaagatgacatagatttgcaaaaagatgatgaggataccagagaggcattggtcaaaaaatttggtgctcagaatgtagctcggaggattgaatttcgaaagaaataattggcaagataatgagaaaagaaaaaagtcatggtaggtgaggtggttaaaaaaaattgtgaccaatgaactttagagagttcttgcattggaactggcacttattttctgaccatcgctgctgttgctctgtaagtcctagatttttgtagccaagcagagttgtagagggggataaaaagaaaagaaattggatgtatttacagctgtccttgaacaagtatcaatgtgtttatgaaaggaagatctaaatcagacaggagttggtctacatagtagtgatccattgttggaatggaacccttgctatagtagtgacaaagtgaaaggaaatttaggaggcataggccatttcaggcagcataagtaatctcctgtcctttggcagaagctcctttagattgggatagattccaaataaagaatctagaaataggagaagatttaattatgaggccttgaacacggattatccccaaacccttgtcatttcccccagtgagctctgatttctagactgctttgaaaatgctgtattcattttgctaacttagtatttgggtaccctgctctttggctgttctttttttggagcccttctcagtcaagtctgccggatgtctttctttacctacccctcagttttccttaaaacgcgcacacaactctagagagtgttaagaataatgttacttggttaatgtgttatttattgagtattgtttgtgctaagcattgtgttagatttaaaaaattagtggattgactccactttgttgtgttgttttcattgttgaaaataaatataactttgtattcgaaaaaaa

SEQ ID NO: 7511 - DNA, 1400 bp, Homo sapiens
gtgaaggaagcgttcttggtgctacacacagtctggaaaagcagcctgggcttcactggcaggaagcggccgcagccgcgtcagtgtccagcacgtcgtggcctctggtccgaccaccaggccctagtctcggtcagggagtctgctctgcctcccaggcgggatcgctggtttctctcgacctcgcagagctcctgacaaaggcggcttctgcgtcgtcactgcttcccggcgccattccgaggccgggccttcttctgacacgggctccaaccccacctgaccaagcccgggacagtcaaggcttctcaatttgtactttccaggcaagagaactttgtaccccttctctgtgtggatagactccccagcgtttttcctctggaaatgcccacagggcttgccgcgtggagactgatctgttccatccgttagcgcgaggtagcagtgtcgcctcgcccctcccactgcgggctcacggggagctggcgtctgtcagtgccttgtcacgcctggcatagaggttgggctggaggcctgtccactggcttctggagctgaaggtctgcgtcacggtgaaaattcgggatgtttacagagcatcacaaatgcctctctctcgccgctctctcattttctttgtataactatgcagccttccctctctttctgggatgtttgggacttcactcgacctgcacgggctctgcccgacatgccgtgggagctgctgggattcctttagaaaccgctgcccgcatgctttgaaaacagacctttctcagctggctgtggggacctgtcagagtctggggactcggcgtgcagggcgggctccaagcgctttgcttccggaactccggcttcccaaggggtactgtgcagactgaccaccggcctcccgcctgcaggtcagaggctctgacactgtctggtttccaatgcttctggagacttcctgcctaggcctcatcctcctctttgccagtcacctgattaaccaattctccagcattaggacttacctccttctttttgtaaggtctcttgtatgttgttaaatgtttggcttaaacaattataaaagcctttctagaaggcagacttagccccagcagagcctgggaggaaggcggccgctggggctcctgggcatcctctctggggagctgctggccgcttagcgttgtttgatttttgaccttgacatagtagataggcttgtggtttttttaatttaaagatattaagacttaattcactaaaatttattctaaggggatatttatacttttatacttttttaggtatcgtattttatcagcttacagtttaatgcctaagtttcccctggaaatagcaaataaaattgtgtatttatgaaaaaaaaaaaaaaaaaa

SEQ ID NO: 7512 - DNA, 600 bp, Homo sapiens
tttaacaaaggactaaagagctgaaaccaacctagttttgtttttgtgatataaactttaagtgtcgagggaccatgccagcaactaccaaaaatctcttaaatcttcaggtacagctggcattttggcagatgcatagagacatctgagaccctcagaaaggaaggataatccaagaatataggaaatctgtgttctcttcctttcattttatcccttatatttctaaagactaattataagtaatctgacattttaatgtagctactcttatttattttttctttctgaggtattaaaatatctggactgagttttgccaaatgttaaagggagaagagttactgaagactttgaacacttgctttttgtgattgcttatgtcattagtgcctcatgactgtgtttgatgtcctttattgatacaaagtgagcctgtgccttcattatcttgcccattttaatacaaatggaaacctggtgtttgaaaatctctgaactgtgtgggttttggaggaatatacctgaattttattcaataacagtttctggacaggaagaaaaatacagttacatatttataaaaaaaaaaaaaaaaaa

SEQ ID NO: 7513 - DNA, 1400 bp, Homo sapiens
gaaggggaacttgggtgtgcaactgaggaacatggctcaagaaactaatcacagccaagtgcctatgctttgttccactggctgtggattttatggaaaccctcgtacaaatggcatgtgttcagtatgctataaagaacatcttcaaagacagaatagtagtaatggtagaataagcccacctgttcaatgcacagatggcagtgtgccagaagcccagtcagcattagactctacatcttcatctatgcagcccagccctgtatcaaatcagtcacttttatcagaatctgtagcatcttctcaattggacagtacatctgtggacaaagcagtacctgaaacagaagatgtgcaggcttcagtatcagacacagcacagcagccatctgaagagcaaagcaagtctcttgataaccgaaacaaaaaaagaatcgctgtttcatgtgcaggaagaaagtgggacttactgggtttgaatgccggtgtggaaatgtttactgtggtgtacaccgttactcagatgtacacaattgctcttacaattacaaagccgatgctgctgagaaaatcagaaaagaaaatccagtagttgttggtgaaaagatccaaaagatttgaactcctgctggaatacaaaattcttgagcatctgcaaactaaaaattgacttgaggttttttttttcctagtcattgggaatgtagagcagtgtatcttgcatgtcatcggaagaatagatttttgttttggttttgttttgaaaatgactctgaacatttatttccattgcaatttctgtggctgaggagacttaaactttacaagtattatccttttaagatcattttaattttagttgagtgcagagggcttttataacaaacgtgcagaaattttggagggctgtgatttttccagtattaaacatgcatgcattaatcttgcagtttattttctcattgtgtatgtatatatcgcttttctctgcagcacgatttctcttttgataatgccctttagggcacaactagttatcagtaactgaatgtatcttaatcattatggctgcttctgttttttcattaacaaaggttattcatatgttagcatatagtttctttgcacccactatttatgtctgaatcatttgtcacaagagagtgtgtgcctgatgagattgtaagtttgtgtgtttaaacttttttttgagcgagggaagaaaaagctgtatgcatttcattgctgtctacaggtttctttcagattatgttcatgggtttgtgtgtatacaatatgaagaatgatctgaagtaattgtgctgtatttatgtttattcaccagtctttgattaaataaaaaggaaaaccagaaaaaaaaaaaaaaaaaaaaaaaaaaa

SEQ ID NO: 7514 - DNA, 600 bp, Homo sapiens
cagaggggaggaggtgggcatttcctacattcctccttgtttgccgctgctgagattgcagtatttattgcaatgtaaatgtatcctgaaggtggggaggaatgtttaatctaccatgtccgcgtgtcatcttggtttgtgtttttccctgtttgtagcaagactctgatgataattctgtttctcatctgcccattcagtattttgttttccttccgtcaagttgtcttattttttcaatgactacctctccatcattgaggttctggtgaagctctctgcagctgtctcattccttcccaacgatagtaacaggaaatgactctttagcatcgatacctcaacatcaatttagggtagagattcctgcccctcctttgtcacagattaggaaattgagaactagggttaaccttgactatatttagaggtctttttgcctcttttccccttaacaaggatttcttatggtggtttcagtttcatttgcataaaggtattgagagggaacaaaaaacataaagctgagaatcttgagagagctcatctaccctgtctgttggtcagactcaaatgagagttaaaaaaaaaaaaaaaaaa

SEQ ID NO: 7515 - DNA, 600 bp, Homo sapiens
ggcatcactctggcccattgacagatgagaggtctgaagccttcctggccacaggcatcactttctcctcctcctcatgccctgccttgtccttgtcgtgttgccatggggttctgagaggctgggagttcacagacctcagacacagctgagtccgacaaccattggggtggggctgcatcagtctccggagtggcccgccacctcctgaagcagggcctggcccacccaaggtgcctggggcaggcgggcaccgtcattcgctgccattggcttctcagatgtatttcaaggactaaagtgggctctaagatctaagatggcccggcgcggtggctcccgcctgtaatcccagcactttgggaggccgaggcgggcggatgagttgaggtcgggagtttgagtccccgtctctactaaaaatacaaaattagccggacaaggtggcgcatgcctataatcccaggtactcaggaggctgaggcaggagaatcacttgaacctgggaggcagaggttgcagtgagccaagattgtgccactgcactccagcctgagcaacaaaagcaaaactctatctttaaaaaaaaaaaaaaaaaaa

SEQ ID NO: 7516 - DNA, 600 bp, Homo sapiens
cggggcggatgtggagaagctggccaagcccctgccgtacacagagagctcaaagacagcgcccatgcaggtgctgttttccggtgaggccacccaccgcaagtactattccaccacccacggtgctctgctgtccggccagcgtgaggctgcccgcctcattgagatgtaccgagacctcttccagcaggggacctgagggctgtcctcgctgctgagaagagccactaactcgtgacctccagcctgccccttgctgccgtgtgctcctgccttcctgatcctctgtagaaaggatttttatcttctgtagagctagccgccctgactgccttcagacctggccctgtagcttttctttttctccaggctgggccgtgagcaggtgggccgttgagttacctctgtgctggatcccgtgcccccacttgcctaccctctgtcctgccttgttattgtaagtgccttcaatactttgcattttgggataataaaaaaggctccctcccctgccaaaaaaaaaaaaaaaaaaaaaaaaaaaaaaaaaaaaaaaaaaaaaaaaaaaaaaaaaaaaaaaaaacaaaaaaaaaaaaaaaaagc

SEQ ID NO: 7517 - DNA, 1400 bp, Homo sapiens
gttcctgacggtcccacacagttgcgtgcactgaacttgaccgagggattcgccgtgctgcactggaagcccccccagaatcctgtggacacctatgacgtccaggtcacagcccctggggccccgcctctgcaggcggagaccccaggcagcgcggtggactaccccctgcatgaccttgtcctccacaccaactacaccgccacagtgcgtggcctgcggggccccaacctcacttccccagccagcatcaccttcaccacagggctagaggcccctcgggacttggaggccaaggaagtgaccccccgcaccgccctgctcacttggactgagcccccagtccggcccgcaggctacctgctcagcttccacacccctggtggacagaaccaggagatcctgctcccaggagggatcacatctcaccagctccttggcctctttccctccacctcctacaatgcacggctccaggccatgtggggccagagcctcctgccgcccgtgtccacctctttcaccacgggtgggctgcggatccccttccccagggactgcggggaggagatgcagaacggagccggtgcctccaggaccagcaccatcttcctcaacggcaaccgcgagcggcccctgaacgtgttttgcgacatggagactgatgggggcggctggctggtgttccagcgccgcatggatggacagacagacttctggagggactgggaggactatgcccatggttttgggaacatctctggagagttctggctgggcaatgaggccctgcacagcctgacacaggcaggtgactactccatgcgcgtggacctgcgggctggggacgaggctgtgttcgcccagtacgactccttccacgtagactcggctgcggagtactaccgcctccacttggagggctaccacggcaccgcaggggactccatgagctaccacagcggcagtgtcttctctgcccgtgatcgggaccccaacagcttgctcatctcctgcgctgtctcctaccgaggggcctggtggtacaggaactgccactacgccaacctcaacgggctctacgggagcacagtggaccatcagggagtgagctggtaccactggaagggcttcgagttctcggtgcccttcacggaaatgaagctgagaccaagaaactttcgctccccagcggggggaggctgagctgctgcccacctctctcgcaccccagtatgactgccgagcactgaggggtcgccccgagagaagagccagggtccttcaccacccagccgctggaggaagccttctctgccagcgatctcgcagcactgtgtttacaggggggaggggaggggttcgtacaggagcaataaaggagaaactgaggtacccgg

SEQ ID NO: 7518 - DNA, 600 bp, Homo sapiens
gaactggcagctcagctgcagatgcttttctcaaactttcctgatcctgcgggcaagctaaaccagttccggaagaacctgcgggagtcgcagcagctccgatgggatgagagctgggtgcagactgtgctccctttggttatggacacataactcctgggccagaggctaaaaccccaggacccctgctgtccttcccgcagcttcttcttggagtctcagggcaaaccctttcgagcagcacctcccagtggccagaagctgaaatgacagcagtggtactgcctggtaaaagaattggttctgtgacccgggaagctttggttggccttgatttcttctctggaggcttggaaacgcttcctctcttcttctgttcttcacgccccatgcccctgctagcgtattactgttctgtgacttccctgtgacctctgcagaactcctcatcctgcgtttggtctccaggtgtcccctttctgccgtgttcctaacattttgattcctgtcttgaaaaaagcacctgctgcaccgtaagcccagggatgtggcagctgcagtgggcttggctttgtgaggaactgagtgtgtccacgttgg

SEQ ID NO: 7519 - DNA, 1237 bp, Homo sapiens; identical to SEQ ID NO: 2284

SEQ ID NO: 7520 - DNA, 1400 bp, Homo sapiens
gctataatgatggatatggctttgggtctgatagatttggaagagacctcaattactgtttttcaggaatgtctgatcatagatacggagatggtgggtccagtttccagagcaccacagggcactgtgtacacatgagggggttaccttacagagccactgagaatgatatttataatttcttctcacctcttaatcccatgagagtacatattgaaattggacccgatggcagagttaccggtgaggcagatgttgaatttgctactcatgaagatgctgtggcagctatggcaaaagacaaagctaatatgcaacacagatatgtggagctcttcttaaattctactgcaggaacaagtgggggtgcttacgatcacagctatgtagaactttttttgaattctacagcaggggcaagtggtggcgcttatggtagccaaatgatgggagggatgggcttatccaaccagtctagttatggaggtcctgctagccagcagctgagtggtggttatggaggtggttatggtggtcagagcagtatgagtggatatgaccaagttctgcaggaaaactccagtgactatcagtcaaaccttgcttaggtagagaaggagcactaaatagctactccagatataaaagctgtacatttgtgggagttgaatagaatgggagggatgtttagtatatccagtatgattggtaaatgggaaatataattgattctgatcactcttggtcagcttctctttctttatctttctttctccttttttaagaaaacgagttaagtttaacagttttgcattacaggcttgtgattcatgcttactgtaaagtggaagttgagattattttaaaacttcaagctcagtaattttgaacactgaaacattcatctaggacataataacaaagttcagtattgaccataactgttaaaacaatttttagctttcctcaagttagttatgttgtaggagtgtacctaagcagtaagcgtatttaggttaatgcagtttcacttatgttaaatgttgctcttataccacaaatacattgaaaacttcggatgcatgttgagaaacatgcctttctgtaaaactcaaatataggagctgtgtctacgattcaaagtgaaaacatttggcatgtttgttaattctagctttttggtttaatatcctgtaaggcacgtgagtgtacactttttttttttttaaggatacgggacaattttaagatgtaataccaatactttagaagtttggtcgtgtcgtttgtatgaaaatctgaggctttggtttaaatctttccttgtattgtgatttccatttagatgtattgtactaagtgaaacttgttaaataaatcttccttttaaaaactggaaa

SEQ ID NO: 7521 - DNA, 600 bp, Homo sapiens
aaatgtggtgatttttaccaaggaaactattgacttaatgcttaaaagtatatcatagttttcttacggaaaagatcagtagatgagattgggggacaatgtgcccttgcaatatttccattgccccccaaggagcctgtcactagctaagaaatttctacatgtttgccagttaattagggagttatttggtaagcaaatcaatataaccagcaaagatacctgcttcttctatatgatacaatattttttttaaataaaagactaaagacagggagctagatgaaatggcttaatggtgctgttaagtatttgtacctaacagtcttgtgtgacagatgaaaataggatgtaacataatgaaacacacctgtctaggggcggcaatcaacagtcttacacagagagggtattccctgcaagtttctggcttgcctgtgatgggtgatgaggcttttagagaggtgttatacagggcgatttttggtgccttacttttatcttaatttttgccaatgtgaaaattaaggataaatcagagttacagcagggatttaacaaacaggacaaaaaaaaaaaaaaaaaaaaaaaaaaaaaaaa

SEQ ID NO: 7522 - DNA, 600 bp, Homo sapiens
tatgctggcagtaatctggccatgcaggacaccagccgccgaccctgccacagccaggacttctccgtgcacggcaacatcatcaacggggctgactggcacacggtccccgggagcatgaatgacttcagctacctacacaccaactgctttgaggtcactgtggagctgtcctgtgacaagttccctcacgagaatgaattgccccaggagtgggagaacaacaaagacgccctcctcacctacctggagcaggtgcgcatgggcattgcaggagtggtgagggacaaggacacggagcttgggattgctgacgctgtcattgccgtggatgggattaaccatgacgtgaccacggcgtggggcggggattattggcgtctgctgaccccaggggactacatggtgactgccagtgccgagggctaccattcagtgacacggaactgtcgggtcacctttgaagagggccccttcccctgcaatttcgtgctcaccaagactcccaaacagaggctgcgcgagctgctggcagctggggccaaggtgcccccggaccttcgcaggcgcctggagcggctaaggggacagaaggattga

SEQ ID NO: 7523 - DNA, 600 bp, Homo sapiens
gagggaccgcgtatgccagctgtgccacccgtcgccggtccacgccgccgcccacctgagcctggagactctgaccgctttcgtgcttcctttcgggctgatgctcggctgctacagcgtgacgctggcacggctgcggggcgcccgctggggctccgggcggcacggggcgcgggtgggccggctggtgagcgccatcgtgcttgccttcggcttgctctgggccccctaccacgcagtcaaccttctgcaggcggtcgcagcgctggctccaccggaaggggccttggcgaagctgggcggagccggccaggcggcgcgagcgggaactacggccttggccttcttcagttctagcgtcaacccggtgctctacgtcttcaccgctggagatctgctgccccgggcaggtccccgtttcctcacgcggctcttcgaaggctctggggaggcccgagggggcggccgctctagggaagggaccatggagctccgaactacccctcagctgaaagtggtggggcagggccgcggcaatggagacccggggggtgggatggagaaggacggtccggaatgggacctttgacagcagaccct

SEQ ID NO: 7524 - DNA, 600 bp, Homo sapiens
aagcaaacttagaattcttaaataatggtgaacattttgtaccttctgctggaacagatagtaaaacatgtaatttggacatgcaagacaatgctgctgccaactaacattgcattgattcattaagatgttatttttgaggtgttcctggtctttcactgacaattccaacattctttacttacagtggaccaatggataagtctatgcatctataataaactataaaaaatgggagtacccatggttaggatatagctatgcctttatggttaagattagaatatatgatccataaaatttaaagtgagaggcatggttagtgtgtgatacaataaaaagtaattgtttggtagttgtaactgctaataaaaccagtgactagaatataagggaggtaaaaaggacaagatagattaatagcctaaataaagagaaaagcctgatgcctttaaaaaatgaaacactttggatgtattacttaggccaaaatctggcctggatttatgctataatatatattttcatgttaagttgtatatttttcagaaattataaatattattaatttaaaattcgaaaaaaaaaaaaaaaaaaaaa

SEQ ID NO: 7525 - DNA, 600 bp, Homo sapiens
ctgtttatgatctaggatttagaacgtcgtatgagatcctacaatggaagaataaaatcacctcattcttcatttcagatctgaacattagcagtgatctagatttttttttttttaaacaaaattaagtgtgcttagagtcatccctctacatgggctgtggctgtcagcccataggtttgtcagtttcacatcaaaactgtgggtataaactgttgaaaccaatcacattaaaatatttagctgggcacagtggtgtgcatctgtagtcccagctacttgggaggctgaggcaggaggatcgcttaagcacaggagttggaatccagcctgagcaacagagcaaaaccccgtctctaaaatacaaataaaatatttgtgtagtttttgattaaaattgactacagcggtcagtataaaatacatgtcgcttttaaggaagtgctctttatgtatctaacagatggaagtttttgcattggtaagagcatttatatatgctttgtttcagggtttatggatttgtattcatatattgtcaaataggtttcatactctaattttactttaagtaaagcttaaacacttggcatacaactg

SEQ ID NO: 7526 - DNA, 1400 bp, Homo sapiens
tttcctgaggacagtgagggcatcatcgtgatctccagccagtacccaggccaggccaacaggacggcgcctggccccatgctcagggtcacctccctggacacagaggtgctgaccatcaagaacgtgagtgctataacctggggaggcgggggtggctttgtggtgagcatccactcaggcctggctgggctggccccactccacatccagctcgtggacgcccatgaggccccgcccacactgattgaggagcggagagacttctgcatcaaggtctcacctgctgaagacacgcctgccaccctcagcgccgacctggcccacttctcggaaaacccaatcctctacctgctcctgcctcttatctttgtcaacaagtgttcgtttgggtgcaaagtggaactcgaggttctgaaggggctcatgcagagcccccagcccatgctgctgggcctcctgggccagtttctggtcatgcccttgtacgctttcctcatggccaaggtcttcatgctgcccaaggccctggctctgggcctcatcatcacctgctcgtcgcctggcggcggggggagctacctcttcagcctccttcttggaggggacgtcaccctggccatctccatgactttcctctctacggtggctgccactggcttcttgcctctgtcttcggccatctacagccgcctgctcagcatccatgagacgctccacgtgcccatctccaagatcctggggaccctgctgttcattgccatccccatagccgtgggcgtgctgatcaagtccaagctccccaagttctcccagctgctgctgcaggtcgtcaagcccttcagctttgtgctcctcctgggcggcctcttcctggcctatcgcatgggggtcttcatcctggcaggcatccggctacccatcgtactggtgggtatcacggtgcccctggttggcctgttggtgggctactgcctagccacgtgtctgaagctgccagtggcccagcggcggacggtcagcattgaggtaggggtgcagaacagcctgctggccttggccatgctgcagctatccctccgccgccttcaagctgactatgcctcccaggcccccttcattgtggcgctgagcggcacctccgagatgctggccttggtcattggccacttcatctacagcagcctgttcccagttccctgaggcctctgggtcaagctttcatcagccccagcccccacactccaccaaagttctcatgcactatgcactcagaaaaatccaggcttatttttttactgattttttattctccagctttcagtgccaaagaggccatgctgagttaggtaggtgggcgctgcccagaaaatatatttcaataaaagagagaagcaagc

SEQ ID NO: 7527 - DNA, 600 bp, Homo sapiens
tatctcaactggatctacaatgtctggaaggctgagctgtaatgctgctgcccctttgcagtgctgggagccgcttccttcctgccctgcccacctggggatcccccaaagtcagacacagagcaagagtccccttgggtacacccctctgcccacagcctcagcatttcttggagcagcaaagggcctcaattcctgtaagagaccctcgcagcccagaggcgcccagaggaagtcagcagccctagctcggccacacttggtgctcccagcatcccagggagagacacagcccactgaacaaggtctcaggggtattgctaagccaagaaggaactttcccacactactgaatggaagcaggctgtcttgtaaaagcccagatcactgtgggctggagaggagaaggaaagggtctgcgccagccctgtccgtcttcacccatccccaagcctactagagcaagaaaccagttgtaatataaaatgcactgccctactgttggtatgactaccgttacctactgttgtcattgttattacagctatggccactattattaaagagctgtgtaacatcaaaaaaaaaaaaaaaaaaaaa

SEQ ID NO: 7528 - DNA, 600 bp, Homo sapiens
gtcaccacgtgcctgcgcttcccaggccagctgaatgctgacctgcggaagctggccgtgaacatggtcccgtttccccggctgcatttcttcatgcccggctttgccccactgaccagccagggcagccagcagtaccgggccttgactgtggctgagctcacccagcagatgtttgatgctaagaacatgatggctgcccgtgacccccgtcacggctgctacctaacggcggctgccattttcaggggtcgcatgcccatgagggaggtggatgaacagatgttcaacattcaagataagaacagcagctactttgctgactggctccccaacaacataaaaacagccgtctgtgacatcccaccctgggggctaaaaatgtcagtcaccttcactgggaacaacacagccgtccaggaactcaagcgggtctcagagcagtttacagcaacgttcaggcgcaaggccttcctccactggtacacgggcgagggcatggatgagatggaattcactgaggccgagagcaacatgaacgacttggtgtctgaatatcagcaatatcaggatgccacggccgagggagaaggagtatga

SEQ ID NO: 7529 - DNA, 600 bp, Homo sapiens
gagttctacgtggacctggagacgaaagagactgtctggcagttgcctatgtttagcaaatttataagttttgacccgcagagtgcactgagaaatatggctgtgggaaaacacaccttggaattcatgatgagacagtccaactctaccgctgccaccaatgaggttcctgaggtcacagtgttttccaagtttcctgtgacgctgggtcagcccaacaccctcatctgtcttgtggacaacatctttcctcctgtggtcaacatcacctggctgagcaatgggcactcagtcacagaaggtgtttctgagaccagcttcctctccaagagtgatcattccttcttcaagatcagttacctcaccttcctcccttctgctgatgagatttatgactgcaaggtggagcactggggcctggacgagcctcttctgaaacactgggagcctgagattccagcccctatgtcagagctcacagagactttggtctgcgccctggggttgtctgtgggcctcatgggcattgtggtgggcactgtcttcatcatccaaggcctgcgttcagttggtgcttccagacaccaagggctcttatga

SEQ ID NO: 7530 - DNA, 600 bp, Homo sapiens
ccgctggaagaaagcctgccagcggttcctggactaagtccggctcgttcaagaacataagctaccaccttctccctccccaccccctccaggcccggggctgaaacagcccgaggacagccccaggggctggctttcaccagctgcagggtctgcttttacttggggtgggggggcggggctgaccctgaaccctcccccccgccaggtcggggaggggtcccaccactcaaagtgcctctaaagaaaccagctttttgcactaaagccaaaccacaccgctgtccccttagccccaagggccctgggggcagccaccctcccgcctgtcggcccgtagatttatcaagggtgttatgggcccagctttggggggccagtcccgatgcactttgaggggtgttggagaggggactcccccactcgcacttaactcaacggctctcgggccctggggctgtttttaccatgtttgtttttgaagctcaggtgtctcacgtctgggctgcaccaggcgaagagagaaattaaagatttgaggtttttccagaaaaaaaaaaaaaaaaaaaaaaaaaaaaaaaaaaaaaaaaaaaaaaaaaa

SEQ ID NO: 7531 - DNA, 1400 bp, Homo sapiens
ctgaccacccaatgcagtgcatattaacaagggtagattttgatttatactatggtggggaagctttctctgtagagcagccacagtcttttacttgtccctattgtggaaaaatgggctatacggagacatctcttcaagaacatgttacttctgaacatgcagaaacatcaacagaagtgatttgtccaatatgtgcagcgttacctggaggcgatcctaatcatgtcacggatgactttgcagctcatcttacacttgaacacagagcccctagagatttagatgaatcgagtggtgttcgacatgtacgtagaatgtttcaccctggccggggattaggaggtcctcgtgctcgtagatcaaacatgcactttactagcagttctactggtggactttcttcttctcagagttcatattctccaagcaatagggaagccatggatcctatagctgagcttttatctcagttatcaggagtgagacgttctgcaggaggacagcttaattcctctggcccttccgcttctcagttacaacaactgcagatgcagctgcagctagaacggcagcatgccagggcagcacggcaacaactggagaccgcacgcaacgcaacccggcgtactaacacaagcagtgtcaccactacaatcacacaatccacagcaacaaccaacatagctaatacagaaagcagtcagcagactctacagaattcccagtttcttttaacaaggttgaatgatcctaaaatgtctgaaacggagcgccagtccatggaaagcgagcgtgcagaccgcagcctgtttgtccaagagctccttctgtccactttagtgcgtgaagagagctcatcctcagatgaggatgatcggggggagatggcagattttggtgctatgggctgtgtagatattatgcctttagatgttgctttagaaaacctaaatttaaaagagagtaataaaggaaatgagcctccaccacctcctctttgatgacatcccaattcgcagacaatgtcctctgtgctgtatttgccaatgaaagtggacaacaactatcttgggtttgtttggtgattgtaatttcaggtctgtcactcttgttacattgtgtacattcaaaaggaagagagaaaatatatatgataatcatttccacttaactaatttttacttctagcaggtaaatgtaggtagcagtgcaggggtgatctctgcttcctgtaccttgacatgcaaaaggctctcctaatactccacattcaaactgaagaggaaaattgaaatctctaatgaagctgctgtgtgtatttatgaatattaatgaataaaaactgcttggatggtttaccttaaaaaaaaaaaaaaaaaaaaacaacaaaaaaaaaa

SEQ ID NO: 7532 - DNA, 1400 bp, Homo sapiens
gcttggattttatgcagtaggcattactacagtacatggctaatcttcccaaaaactagctcattaaagatgaaatagaccagctctcttcagtgaagaggacaaatagtttatttaaagcatttgttccaataaaataaatagagggaaacttggatgctaaaattacatgaataggaatcttcctggcacttagtgtttctatgttattgaaaaatgatgttccagaaagattacttttttcctcttatttttactgccattgtcgacctattgtgggacatttttatatattgaatctgggttcttttttgactttttttttttcccaatccaacagcatccttttttttaaaagagagaattagaaaatattaaatcctgcatgtaatatatctgctgtcatcttagttggaccaacttcccatttatttatcttaaaactatacagttacatcttaattccatccaaagaagatacagtttgaagacagaagtgtactctctacaatgcaatttactgtacagttagaaagcaaagtgttaaatggagaagatacttgtttttattaaacattttgagatttagataaactacattttaactgaatgtctaaagtgattatcttttttccccccaagttagtcttaaatcttttgggtttgaatgaaggttttacataagaaattattaaaaacaaggggggtgggtaataaatgtatataacattaaataatgtaacgtaggtgtagattcccaaatgcatttggatgtacagatcgactacagagtacttttttcttatgatgattggtgtagaaatgtgtgatttgggtgggcttttacatcttgcctaccattgcatgaaacattggggtttcttcaaaatgtgtgtgtcatacttcttttgggaggggggttgttttcttctgtttattttctgagactcctacaggagccaaatttgtaatttagagacacttaattttgttaatcctgtctgggacacttaagtaacatctaaagcattattgctttagaatgttcaaataaaatttcctgaccaaattgttttgtggaaatagatgtgtttgcaatttgaagatatctttctgtccagaaggcaaaattaccgaatgccatttttaaaagtatgctataaactatgctactctcatacaggggacccgtattttaaaatctccagacttgcttacatctagattatccagcacaatcataaagtgaatgacaaaccctttgaatgaaattgtggcacaaaatctgttcaggttggtgtaccgtgtaaagtggggatggggtaaaagtggttaacgtactgttggatcaacaaataaaggttacagttttgtaagagaaaaaaaaaaaaaaaaaaaaa

SEQ ID NO: 7533 - DNA, 600 bp, Homo sapiens
tgctccacccctactctcctcccttgctcccagcagcggaagcgcctctgacccttggcttgagtcccacgtgggggaggaggaggcaggcagcaccagcaggggtccaccaagagcccagaccagcccctctgccctcctacccgggcctcgaagggtgtggcacaggctacgtgttgagcgtggcctacgtgagccaacaagaagcaggggcctctgagtgccaagcgacgtggcgggctccacgttagcccaggctctgagagccagcccaggggcggcgctgctcagcttgggctggtccagggcctgcccaggctggggcacctttgcctcctgaggcgcagcgcactcctcccctgcccaagcctactgcctcccgctgccgccagtaccccctccagccccacacctgggcctccccctgccactcccctcccttgctcccctctgtccccagggatcaaacagaagcagccgtgggcaaaatacaatttcatttaacaaattgaaaaaaaaaaaaaaaaaaaaaaaaaaaaaaaaaaaaaaaaaaaaaaaaaaaaaaaaaaaaaaaaaaaaaaaaaaaaaaaaaaaaaaaaa

SEQ ID NO: 7534 - DNA, 600 bp, Homo sapiens
acagatgcaatcagtgaagaaaaactccgtgagatatttgggctttatggacagaccacaggaaaggggaatgtgaccctgaaggagctgaatgctcgccccatggaagtgttcatgtgcagtgtgctcaagaggcaaggttacggcgagggtttccgctggctctcccagtatattgactgatgtttggacggtgaaaataaaagagttttacttctctggactgatcctattcacagcttcctcatgaacttttctaatagaacaaggaaagctctccaaccatgtctggcgttgagaagccaagagtctctgtcaactctctcattgcccagtggtgacatgtgctcttctccacactgttgggaggtaatgctgccccacgtgctggtgcaggtcagtatcctgggacttggaagctggcaggatttgccgggtaaagctgtatgccatcatggggcacctgaaaagaaaaacacgtctcaccactgtggttgattcaaaagaaagtgattctattttttaaagaaagcgttgttaatgtaaaaaaaaaaaaaaaaaaaaaaaaaaaaaaaaaaaaaaaaaaaaaaaaaaaaaaaa

SEQ ID NO: 7535 - DNA, 600 bp, Homo sapiens
attgacatgatctgtgccattctagacatccctgtctacaagagtcggatccagtccctccatctgctcttttccctctactcagaattcaagaactcacagcattttaaagctctcgctgaaggcaagaaagcattcactccttcatccaattccacctcccaagctggagacatggagacattaaccttcagctgagacacttcccaagctgctgtttcaaggctgagctggcccctctgccccagctgagatggacagatcgttgtcagctacttgatgtccttgcccatgccacagcttggctcaggggcagtgcatgtcctgctgccctctctgccagagggcacagaacatgtttgtttaatgaacctgcctgcctcagattgctgtccccggggagttaatgcatctacaccactgtggggatttgagttataagaattggaatttctgagatcccatggaggttagattgggaggaaagcttaaaagatgtcctttttgtgagagggatggaattgttttctttcattcgtaaagttagtgagtaaagattttataaatcaaaaaaaaaaaaaaaaaaaaaaaaaaaaaaaa

SEQ ID NO: 7536 - DNA, 1072 bp, Homo sapiens; identical to SEQ ID NO: 2301

SEQ ID NO: 7537 - DNA, 600 bp, Homo sapiens
tgtatctgcacgagcacttagcttgttcagatctctgcattttataaatgcttcttaccaagaaagcatttttaggtcattgcttgtaccaggtaatttttgccggggatgggtaagggttgggttttctggtgggagtggggtggtgggtattttttgttgatgctttagtgcaggcctgttctgaggcaataacaagttgctgtgaaaacagcatgtgctgctgcctttgtaactgcatggaaacttttcacatgggtttttctccaagttaatacagaaatatgtaaactgagagatgcaaatgtaatatttttaacagttcatgaagttgttattaaaataactaacataaaacttaattactttaatattatataattatagtagtggccttgttttacaaacctttaaattacattttagaaatcaaagttgatagtcttagttatcttttgagtaagaaaagctttcctaaagtcccatacatttggaccatggcagctaattttgtaacttaagcattcatatgaactacctatggacatctattaaagtgattgacaaaatctcaaaaaaaaaaaaaaaaaaaaaaaaaaa

SEQ ID NO: 7538 - DNA, 1400 bp, Homo sapiens
tccatgagatctcccacagttggtttgggaacctggtcaccaacgccaactggggtgaattctggctcaatgaaggtttcaccatgtacgcccagaggaggatctccaccatcctctttggcgctgcgtacacctgcttggaggctgcaacggggcgggctctgctgcgtcaacacatggacatcactggagaggaaaacccactcaacaagctccgcgtgaagattgaaccaggcgttgacccggacgacacctataatgagaccccctacgagaaaggtttctgctttgtctcatacctggcccacttggtgggtgatcaggatcagtttgacagttttctcaaggcctatgtgcatgaattcaaattccgaagcatcttagccgatgactttctggacttctacttggaatatttccctgagcttaagaaaaagagagtggatatcattccaggttttgagtttgatcgatggctgaatacccccggctggcccccgtacctccctgatctctcccctggggactcactcatgaagcctgctgaagagctagcccaactgtgggcagccgaggagctggacatgaaggccattgaagccgtggccatctctccctggaagacctaccagctggtctacttcctggataagatcctccagaaatcccctctccctcctgggaatgtgaaaaaacttggagacacatacccaagtatctcaaatgcccggaatgcagagctccggctgcgatggggccaaatcgtccttaagaacgaccaccaggaagatttctggaaagtgaaggagttcctgcataaccaggggaagcagaagtatacacttccgctgtaccacgcaatgatgggtggcagtgaggtggcccagaccctcgccaaggagacttttgcatccaccgcctcccagctccacagcaatgttgtcaactatgtccagcagatcgtggcacccaagggcagttagaggctcgtgtgcatggcccctgcctcttcaggctctccaggctttcagaataattgtttgttcccaaattcctgttccctgatcaacttcctggagtttatatcccctcaggataatctattctctagcttaggtatctgtgactcttgggcctctgctctggtgggaacttacttctctatagcccactgagccccgagacagagaacctgcccacagctctccccgctacaggctgcaggcacgcagggcagcgggtattctcctcccacctaagtctctgggaagaagtggagaggactgatgctcttcttttttctctttctgtcctttttcttgctgatttatgcaaagggctggcattctgatgcttttcaggtttaatccttattttaataaagttttcaagcaaaaaaa

SEQ ID NO: 7539 - DNA, 1400 bp, Homo sapiens
tatccagccaaactaagctttataagtgagggagaaataaaatactttacagacaagcaaatgctgagagattttgtcaccacgaggcctgccctaaaagtgctcctgaaggaagtgccaaacatggaaaggaacaactgataccagccgctgcaaaatcatgccaaaatgtaaagaccatcgagactaggaagaaactgcatgaactaatgagcaaaataaccagctaacatcataatgacaggatcaaattcacacataacaatattacctttaaatgtaactggactaaatgctccaattaaaagacacagactggcaaattggataaagagtcatgacccatcagtgtgctgtattcaggaaacccatctcacatgcagagacacacgtaggctcaaaataaaaggatagaggaagatctacgaagcaaatggaaaacaaaaaaaggcaggggttgcaatcctagtctctgataaaacagactttaaaccaacaaagatcaaaagagacaaagaaggccattacataatgggaaagggatcaattcaacaagaagagctaactatcctaaatatatatgcacccaaaataggagcacccagattcataaggcaagtcctgagcgacctacaaagagacttagactcccacacaataataatgggagactttaacaccccactgtcaacattagacagatcaacgagacagaaagttagcaaggatatccaggagttggactcagctctgcaccaagcggacctaatagacatctacagaactctccaccccatatcaacagaatatacatttttttcagcaccacaccacacctattccaaaattgaccacatacttggaagtaaagctctcctcagcaaatgtaaaagaacagaaattataacaaactgtctctcagaccacagtgcaatcaaactagaactcaggatgaagaaactcactcaaaaccgctcaactacatggaaactgaacaacctgctcctgaatgactactgggtatataacgaaatgaaggcagaaataaagatgttctttgaaaccaacgagaacaaagacacaacataccagaatctctgggatgcattcaaagcagtgtgtagagggaaatttatagcactaaatgcccacaagaggaagcaggaaagatccaaaattgacaccctaacatcacaattaaaagaaccagaaaagcaagagcaaacacattcaaaagctagcagaaggcaagaaataactaaaatcagagcagaactgaaggaaatagagacacaaaaaacccttcaaaaaattaatgaatccaggagctggttttttgaaaggatcaacaaaattgatagaccgctagcaagactaataaagaaaaaaaaaaaaaaaaa

SEQ ID NO: 7540 - DNA, 600 bp, Homo sapiens
caaatacctggttttccttatcatgctgcacccagagcaactcttgagaaagatttaaaatgtgtctaatacactgatatgaagcagttcaactttttggatgaataaggaccagaaatcgtgagatgtggattttgaacccaactctacctttcattttcttaagaccaatcacagcttgtgcctcagatcatccacctgtgtgagtccatcactgtgaaattgactgtgtccatgtgatgatgccctttgtcccattatttggagcagaaaattcgtcatttggaagtagtacaactcattgctggaattgtgaaattattcaaggcgtgatctctgtcactttattttaatgtaggaaaccctatggggtttatgaaaaatacttggggatcattctctgaatggtctaaggaagcggtagccatgccatgcaatgatgtaggagttctcttttgtaaaaccataaactctgttactcaggaggtttctataatgccacatagaaagaggccaattgcatgagtaattattgcaattggatttcaggttccctttttgtgccttcatgccctacttcttaatgcctctctaaagcca

SEQ ID NO: 7541 - DNA, 1062 bp, Homo sapiens; identical to SEQ ID NO: 2306

SEQ ID NO: 7542 - DNA, 600 bp, Homo sapiens
ccgaggtcggggagacgcggagcagtactccagaaatgcctgccgtgtctgcgttctttagcctcgctgcgctggctgaagtggcagccatggaaaatgtgcacagaggtcagaggtcaactccgctcacccatgatggacagccaaaagaaatgccgcaggctcctgtacttatttcctgcgctgaccagtgaagcgccctttcattgtaaaacattgtgctttacctactaccctagccttgtctttaccgagggatgctagtgagtccaagtggtggaaaatatagactgcaaacaagtgcttgttgccccacacggcccagattcacttgaagcagaagttagcatcctgggccagtttgttctctcagaacccagaatctttgagggtaaggttatctgtctgatactgagcagaaacagaatgatcctggagctttgctttctattgaaggcttttgacggtaataggtggtaacttggtaaaaggctgcctttactgtagctcacccagcatctcttttaccaaccagagagtgtgaaactagtttcatatattacctagttattctttcaaaacaaaacaaaaaaaacaaaa

SEQ ID NO: 7543 - DNA, 600 bp, Homo sapiens
ggctatttgtgtcaatacccgaaatgatgtactggatgacagcaaatgcacacatcaagagaaagttaccattcagaggtgcagtgagttcccttgtccacagtggaaatctggagactggtcagaggtaagatgggagggctgttatttcccctaggtcatctcttacattctagttctggtgctctctatctgtttaagacaaacccttgtgcacctttctcccacctctccctttctcccttgtctcccttgagaaaacaactccagttctctgcctgcaccatgactgtcgtactggatgtaactagtctaccagtgacctcagggcactttgggcttggctagatcactcactgttgtagcttctgttgtgattttgaagttgcagtccatcaccttccctcctctttgagccctagctaagtcactgaaaggaaatcatggatttattaatcataaagctatactagctcacatctgaagtcaacatgaagtttcctacttccttgtctttgaaataagagaattagaccccagggagtgacctctctgacttacccatccaactgcccaaaaaaaaaaaaaaaaaaaaaaaaa

SEQ ID NO: 7544 - DNA, 1400 bp, Homo sapiens
cgttcgaaagcagggactaaaagccccacttcgtcttacgttccgaaaggaaggcgtctgttgagcctttctctcagtcgtgagggaggcgtcgacggcgtgcggaagtcctgagttgaggcttgcgggatcctttccggagaaagcgcaggctaaagccgcaggtgaagatgtccaactacgtgaacgacatgtggccgggctcgccgcaggagaaggattcgccctcgacctcgcggtcgggcgggtccagccggctgtcgtcgcggtctaggagccgctctttttccagaagctctcggtcccattcccgcgtctcgagccggttttcgtccaggagtcggaggagcaagtccaggtcccgttcccgaaggcgccaccagcggaagtacaggcgctactcgcggtcatactcgcggagccggtcgcgatcccgcagccgccgttaccgagagaggcgctacgggttcaccaggagatactaccggtctccttcgcggtaccggtcccggtcccgtagcaggtcgcgctctcggggaaggtcgtactgcggaagggcgtacgcgatcgcgcggggacagcgctactacggctttggtcgcacagtgtacccggaggagcacagcagatggagggacagatccaggacgaggtcgcggagcagaaccccctttcgcttaagtgaaaaagatcgaatggagctgttagaaatagcaaaaaccaatgcagcgaaagctctaggaacaaccaacattgacttgccagctagtctcagaactgttccttcagccaaagaaacaagccgtggaataggtgtatcaagtaatggtgcaaagcctgaactgtcggaaaaggtaacagaagatggaactcgaaatcccaatggaaaacctacccagcaaagaagcatagcttttagctctaataattctgtagcaaagccaatacaaaaatcagctaaagctgccacagaagaggcatcttcaagatcaccaaaaatagatcagaaaaaaagtccatatggactgtggatacctatctaaaagaagaaaactgatggctaagtttgcatgaaaactgcactttattgcaagttagtgtttctagcattatcccatccctttgagccattcaggggtacttgtgcatttaaaaaccaacacaaaaagatgtaaatacttaacactcaaatattaacattttaggtttctcttgcagatatgagagatagcacagatggaccaaaggttatgcacaggtgggagtcttttgtatatagttgtaaatattgtcttggttatgtaaaaatgaaattttttagacacagtaattgaactgtattcctgttttgtatatttaataaatttcttgttttcattcttaaaaaaaaaaaaaaaaaa

SEQ ID NO: 7545 - DNA, 600 bp, Homo sapiens
aatctcatgtgctggggcacaggctatcatctatccatgaaacccatgggaatacctgacctaggtatgataaatgatggcacctcctgtggagaaggccgggtatgttttaaaaaaaattgcgtcaatagctcagtcctgcagtttgactgtttgcctgagaaatgcaatacccggggtgtttgcaacaacagaaaaaactgccactgcatgtatgggtgggcacctccattctgtgaggaagtggggtatggaggaagcattgacagtgggcctccaggactgctcagaggggcgattccctcgtcaatttgggttgtgtccatcataatgtttcgccttattttattaatcctttcagtggtttttgtgtttttccggcaagtgataggaaaccacttaaaacccaaacaggaaaaaatgccactatccaaagcaaaaactgaacaggaagaatctaaaacaaaaactgtacaggaagaatctaaaacaaaaactggacaggaagaatctgaagcaaaaactggacaggaagaatctaaagcaaacattgaaagtaaacgacccaaagcaaagagtgtcaagaaacaaaaaaagtaa

SEQ ID NO: 7546 - DNA, 480 bp, Homo sapiens; identical to SEQ ID NO: 2311

SEQ ID NO: 7547 - DNA, 1400 bp, Homo sapiens
gatgagcaccatatgtgcattatttcactaaagctttcagagcttgagaaaaatagcctgaagaataagattgtttctttctgagccaaggttgcaatcttccaagtccaagatgtgcttgaaaatactcattaggtaattgtcaaagcctaggaagaccagtttaagaatatgaaataatattactactgacttctctttttgtgttcaatccagatggaagctggacacatgagaagtgacgtttgtataatagcaaagaaaagaacagagaacaagaaagcaaaacccttcacacctatgttctctttataggatctcattactgtttgctctctataatccccagaaaatagaaaaagtatatctatccaataagttgtggaaagtctccctctgtccttctataatagagtttccagtcattgttagacaactgcatttcattcaccaatagtggcctattgaaatcatcaacaggagaaacagttgttaatatcaaataaagagtcttgcaatggaagtcaaaatactttactctttcactaacttggtgtatgatcttgagcaagtcatttaacctctctaagtttgcttgcctcatctgtcaaacaagagagatgagataaattatctccacaggcattttcagaactattctagtctttttggaaattggtttatatttgtagaaaaggttcaatctgtttctggcatggcagtgaccaagtcagaatttctatttgggagatgagaaaaacacattaacaagattaattactgtagctgaaagatacataaatatggattggggtgtatttttaataccacaaaaacttccattcctgagttacttcattagcaactgttacttcaaccatctaggttgaggttttccagtaattctaggtcagcaattatggaccctacttattttcttttttttattatactttaagttctagggtacatgtgcacaatgtgcaggtctgttacatatgtatacatgtgccatgttggtgtgctgcacccattaactcatcatttacattaggtatatctcctaatgctatccctcccacctcccccaaccccatgacaggccccggtgtgtgacgttccccttcctgtgtccaagtgttctcattgttcaattcccacctatgagtgagaacaggcggtgtttggttttctgtctttgcgatagtttgctcagaatgatggtttccagcttcatctatgtccctacaaaggacatgaactcattcttttttatggctgcatagtattccatggtgtatatgtgccacattttcttaatccagtctaccattgatggacatttgggttggttccaagtctttgctattgtgaatagtgccgcaataaacatacatgtg

SEQ ID NO: 7548 - DNA, 1400 bp, Homo sapiens
cacaactattagcacattaagagggaagcaaagttactgtctatttaaaactgcaagcagttaactctcttaactcccttattacctaaacttgtctggctcccaggaacagccttatagagagagggagtattgtattgggaagaaaatgttactgaactattgactgaaagtaaatttagataaaatacagcttttttccttatgggcatttgttttgtttcaagtcatcataaactaggtattgcattgctatccgtggatacagacgcttagctcttaaaagattttttttttatgtaaactgttgaatatttgaaatagtccacttcaccttaatgggtcttgtctatcttcattagtcttcaaagaaaaaccatttgctaccaaagtaaatcagtattttgaatgtgcttctcttgttttttgtttattagctagttcctgtaagcatttccaccagaacttgaggcaaatcgtaaggaagctgtttcttttaaaacacaaaccaccaccaaaaatttaaatgtacatattgcttaagtatttggctgtttttattttttaaaaggtataaacaccaaaaaaaaaattaacattgtatgaagatggaaaataagaagatgcactttctgtaactttgtctaaggatttaaattactaacttatgaactccaatttgaattgaacttaactatcggctttcttactggtaaaattatatggtttattttaaatgcgtacatattgaccaatggcctctgaaaaagcacattttagatactgaaattgaaggaaagaaaatgcatcttcaaacattttttggaatctcaccacatatactttgttagatttgtgtattgtagggtgtttgttttgtatttttgtattgtatatgaactttttttaaatgtgacagttaaacacatctttaaaagcatagtcacagacaaaagcatacagtataaaaatttccttgaaaactcctacaatattatatttggaggcagcttcagactgttttattggtggtagctgcttgctgaggtcttttagttggtaataactccagagaagcagcctgtgtatattcctaacactttgttcactagcatttaagtttagaataagcccaagtaagacaatggaaatgtatatagaactcttagttcttacatgatttaattatatcgatacatgaatttaacttactttaatgtaggcaaactatcaattttttgtccattttcctgtttgttaaaataacatacctctcctacgtattattttcttgacccaaatgaaatattaacctaaggtcaagctgggagagagaaatgactgagatgaatgtctttactaaagtaccaataaatttgtcaaactcaaaaaaaaaaaaa

SEQ ID NO: 7549 - DNA, 1400 bp, Homo sapiens; identical to SEQ ID NO: 7548

SEQ ID NO: 7550 - DNA, 600 bp, Homo sapiens
gagaagggaagcagcttgcacacccagagaaaccgaagatccctctctggatataattatgaagtttatcactccttagaagaaattcaaaattggatgcatcatctgaataaaactcactcaggcctcattcacatgttctctattggaagatcatatgagggaagatgtctttttattttaaagctgggcagacgatcacgactcaaaagagctgtttggatagactgtggtattcatgcaagagaatggattggtcctgccttttgtcagtggtttgtaaaagaagctcttctaacatataagagtgacccagccatgagaaaaatgctgaatcatctatatttctatatcatgcctgtgtttaacgtcgatggataccattttagttggaccaatgatcgattttggagaaaaacaaggtcaaggaactcaaggtttcgctgccgtggagtggatgccaatagaaactggaaagtgaagtggtgtggtaagtttgggaccaactgggatccagatccaaaggtttctgcaggttttactctgcaaaatatgagtccagaggactctcatgggagactcatgtttttctgtatgtga

SEQ ID NO: 7551 - DNA, 600 bp, Homo sapiens
tgccgctgcgccgccgaacgggaggagccgcccgagcagcgcggcctggcctacggcctgtacctgcgcatcgacctggagcggctgcaatgccttaacgagagccgcgagggcagcggccgcgtcttcaagccgtgggaggagcggaccgaccgctccaagtttgttgaaagtgatgcagatgaagagcttctgtttaatattccatttacgggcaatgtcaagctcaaaggcatcattataatgggagaggatgatgactcacacccctctgagatgagactgtacaagaatattccacagatgtcctttgatgatacagaaagggagccagatcagacctttagtctgaaccgggatcttacaggagaattagagtatgctacaaaaatttctcgtttttcaaatgtctatcatctctcaattcatatttcaaaaaacttcggagcagatacgacaaaggtcttttatattggcctgagaggagagtggactgagcttcgccgacacgaggtgaccatctgcaattacgaagcatctgccaacccagcagaccatagggtccatcaggttaccccacagacacactttatttcctaa

SEQ ID NO: 7552 - DNA, 600 bp, Homo sapiens
attacctagttcgctcaaacactacatgaagttattttagttaaagccctcccccaaaagttataaaaccatttttatcagggcccaacatgtggcatgcaatgaagagaaaatgtaaagctacagaggttaatgtattgtattataaaatattttaagtgtactcaaaatatcataattgtacagtttatgccaccataatttgaggcctatagatttagcttaagagaacactgttctgtttgaaatgctttctgtcactgaaattggcttaattagtaaccatggataagatgctttagatcagactaggttttaatcattaacttccacaaagaagtcatactttgcgttaggtgtgctggttggatgtgcaggaacttcagcaagcagtaggttttactaagcagatggtcgggcactgcagggcaccaggcaggatcctagggcgcctcttattctgcgttagcatctggtttgctgtatgaccttgcacaagtcacttccttctgagcctcaattttctcatctgtacaatgagattcaaaagttgacctgaaagtcaagtgtgaaaaaaaaaaagagattaaacaagataat

SEQ ID NO: 7553 - DNA, 1400 bp, Homo sapiens
gaatctttggctcggggcattgattccagttaccgtccatctcaaaaggatgtggagccacccaaaatttcaagcacaaaaaacatttccattaagcaagagcccaaaatatcatccagtcttccttctggtaataataatggcaaggtcctcacaactgaaaaggtaaagaaggaagctgaaaagagacctgctgataaaatgaaatcagacatcactgaaggagttgatattccaaagaaacctagattggagaaaccagaaacacagtcatctcccattactgtccaaagtagcaaggatttacctatggctgacctttccagttttgaggagaccagtgctgatgattttgccatggagatgggattggcctgcgttgtttgtaggcaaatgatggtggcatctggcaatcaattagtagaatgtcaggagtgccataatctctaccaccgagattgtcataaaccccaggtgacagacaaggaagcgaatgaccctcgcctggtgtggtattgtgcccgatgtaccagacaaatgaaaagaatggctcaaaaaactcagaaaccaccgcagaaaccagcccctgcagttgtttctgtaactccagctgtcaaagatccattggttaagaaaccagaaactaaactgaaacaagagacaacttttctagcgtttaagagaacagaagtcaagacatccacagttatttcaggaaattcttctagtgccagcgtttcctcgtcagtaactagtggcttaactggatgggcagcttttgcagccaaaacttcctctgctggtccttcaacagcaaaattgagttcaacaacacaaaacaatactgggaaacctgctacttcgtcagctaaccagaaacctgtgggtttgactggtctggcaacatcatccaaaggtggaataggttccaaaataggttccaataacagcactacgcccactgtacctttaaaaccacctccacctctaaccttgggtaaaactggccttagtcgctcagttagttgtgacaatgtcagcaaagtaggtcttcctagtccaagtagtttagttccaggaagcagcagccaactaagtgggaatggaaatagtggaacatcaggacctagtggaagtactaccagcaaaactacttcagaatccagcagctctccctcagcatcccttaaaggcccaacttcacaagatcacagctcaatgctatgaagcgattacagatggtcaagaagaaagctgcccaaaagaaactcaagaagtaatgtggccaagtaggtttttgtatcatattagcctaaagatgaaaggcttattattatgatataatctgtaatacactgtaatttaataaaagtcttcataatcaaaaaaaaaaaaaaaaa

SEQ ID NO: 7554 - DNA, 600 bp, Homo sapiens
attgttcatctcccacttgcaagtgagaacatgtggtatttacttttgttcctgcgttactttgctgaggataacggcttccagcttcatccatgtccctgcaaaggacgtgatctcatttctttttatggctgcatagtattccatggcatatatgtaccacattttctttatccagcctatcgttgatggatatttggtttgattccatgtttttgctattgtaaatagtgctgcagtgaacatacacatgcatgtatctttataaaagaatgatttatattcctttgagtgtatacccagtaatgggattgctgggtcaaatggtatttctggttctagatctttcaggaattggcacactctcttccacaatggttgaaccaatttacattcccaacagtgtaaaagcattcatgtttctccacagctttaccagcatctgttgtttctggactttttaataatcaccattctgactggcatgagatggtatctcattgtggttttgatttgcatttctctgatgatcactggtgttgagctttttttcatatgtttgttggccgcataaatgtcttcttttgagaaaaaaaaaaa

SEQ ID NO: 7555 - DNA, 600 bp, Homo sapiens
acgacgctcaccactccccagaaccaagtggatatgctgctccaggaaatggcagatgaggcgggcctcgacctcaacatggagctgccgcagggccagaccggctccgtgggcacgagcgtggcttcggcggagcaggatgaactgtctcagagactggcccgccttcgggatcaagtgtgacggcagaacccgctctgaggtttcctggccatagccaccctttgaaatgctctctgtgtgttagagagatactataccctagaaactctgaacacgccagaatgctgaaatgcccttctacctttgggtttacagccccctccacataaattaagaaattcagtatttctgcactcttagctggattctaaagttctgtatagctcgtaatgatggtatttttatagcagccttttaacagaactagttaatttcgtgtatatgaatctttctcgaagatctggtcaaaactgtattcagtttcctgcccagaatgatcagattgaaggtggttggtttttattattatttagtgtgattgatagtatctagaatggcaggtggtgcataaaagttaaagagaggggaaagattact

SEQ ID NO: 7556 - DNA, 600 bp, Homo sapiens
gctgccctggagattgagctggaagaagacatgtataagggaggaaaagctgaccagcaagaagaacgtcggagacaaaagcagatgaaggttctgaagaaggagctgcgccacctgctgtcccagccactgtttacggagagccagaaaaccaagtatcccactcagtctggcaagccgcccctgcttgtgtctgccccaagtaagagcgagtctgctttgagctgtctctccaagcagaagaagaagaagacaaagaagccgaaggagccacagccggaacagccacagccaagtacaagtgcaaattaactggtcaagtgtgtcagtgactgcacattggtttctgttctctggctatttgcaaaacctctcccacccttgtgtttcactccaccaccaaccccaggtaaaaaagtctccctctcttccactcacacccatagcgggagagacctcatgcagatttgcattgttttggagtaagaattcaatgcagcagcttaatttttctgtattgcagtgtttataggcttcttgtgtgttaaacttgatttcataaattaaaaacaatggtcagaaaaaaaaaaaaaaaaaaaa

SEQ ID NO: 7557 - DNA, 600 bp, Homo sapiens
  misc_feature (3)..(3): n is a, c, g, or t
ggngcgctcatcctggccattgtgcagatcatccgtgtgatactcgagtacctggatcagcggctgaaaggtgcagagaacaagtttgccaagtgcctcatgacctgtctcaaatgctgcttctggtgcctggagaagttcatcaaattccttaataggaatgcctacatcatgattgccatctacggcaccaatttctgcacctcggccaggaatgccttcttcctgctcatgagaaacatcatcagagtggctgtcctggataaagttactgacttcctcttcctgttgggcaaacttctgatcgttggtagtgtggggatcctggctttcttcttcttcacccaccgtatcaggatcgtgcaggatacagcaccacccctcaattattactgggttcctatactgacggtgatcgttggctcctacttgattgcacacggtttcttcagcgtctatggcatgtgtgtggacacgctgttcctctgcttcttggaggacctggagaggaatgacggctcggccgagaggccttacttcatgtcttccaccctcaagaaactcttgaacaagaccaacaagaaggcagcggagtcctga

SEQ ID NO: 7558 - DNA, 600 bp, Homo sapiens
ccaaccttcaggcaacactttaagggttcggcaatcactgtcacccccggacagcagaacgctggcatcagctatcttagctcctcctctcccctctcctctttcagagcactggctctccagccccaggaggagaacaggagggaggaggagatgaaagaggagggacaggttcttggtgctgtacctttgagaacttcctaggaaggaatggtggggtggcgtttgggaacttgtgccccctaaacacatttactggcctcctctaatgactttggggaaaagatgattctgggtctttcccttgacttcttgtttcaattacaaactcctgggctttctggggaggggttcagaaaacatcaaaacactgcagcagttcctaaatgattctcacaagcaaccctgagagagacagtcttgtgagggagatctgggggaggcaggaagctcctcagattttctcacagacccttcccaattccatcaccactgccaacaactcctcccccagagatctggctggagcccagaaaaagaagcatgtggtttaaaaaatgtttaaatcaatctgtaaaaggtaaaaaaaaaaaaaaaaaa

SEQ ID NO: 7559 - DNA, 600 bp, Homo sapiens
tacagtcgtgatgctcctctgcccccccggcaagacctcaacgcccctgacctctatatccccacgaaggccttcattacttacgtgctcctggctgggatggcactgggcattcagaaaaggttctccccggaggtgctgggcctgtgtgcaagcacagcgctggtgtgggtggtgatggaggtgctggccctgctcctgggcctctacctggccaccgtgcgcagtgacctgagcacctttcacctgctggcctacagtggctacaaatacgtgggaatgatcctcagtgtgctcacggggctgctgttcggcagcgatggctactacgtggcgctggcctggacctcatcggcgctcatgtacttcattgtgcgctctttgcggacagcagccctgggccccgacagcatggggggccccgtcccccggcagcgtctccagctctacctgactctgggagctgcagccttccagcccctcatcatatactggctgactttccacctggtccggtgaccccctggccccagatggcactgagtttttcattcattgaagatttgatttccttgaaaaaaaaaaaaaaaaaaaaaaaaa

SEQ ID NO: 7560 - DNA, 600 bp, Homo sapiens
ttggcaaaaatgcatatattttctttcatatttgtaaaattatatttaatggaattcttttctttgattatcaaggactttcactgcaggcagtgctatttcttgtgcctaagaatgtttccaaaagtcgcatcgctaatgatatttgccaagttgagtgtacacaaagtttctcatatcctgttcaagttaatcaacatcaaacacatggggatgctttagggtgagtctataatacaaaatgcataaaccatgtccccaggaaatttgaaaggaagcaagtgctgaatggaatttttttccttttccatgagctgtgttaattctatctccagtaggcctaatgcttgaaataagcaagatgtctaatcaataaattattttcatgctcagaatttcaggtttttgtactccagcatagcttggtcttatttcttactgtatgaaagcttaacagcaatgtgatttaaggttttgttttaaatgggagatgtaagtgatttaattcatgggtacttttagaacctgatagataatcccattgcctttatttttctaattaaagaatcctaaatactttgaaaatacaaaatattcctg

SEQ ID NO: 7561 - DNA, 1400 bp, Homo sapiens
ccagggctgctcaggtgtggacgagtgtgcccggcaggagggcctgactttctttggcacagagctagccccagtgcggcaacaggagctggcctctctgctaagaacatacttggcacggctgccctgggctgggcagctgaccaaggagctacccctctcacctgctttctttggtgaggatggcatcttccgtcatgaccgcctccgcttccgggattttgtggatgccctggaggacagcttggaggaggtggctgtgcaacagacaggtgatgatgatgaagtagatgactttgaggacttcatcttcagccacttctttggagacaaagcactgaagaagaggtcagggaagaaggacaagcactcacagagcccaagagctgcggggcccagggaggggcacagccatagccaccaccaccaccaccggggctgacaccctgccccacagggaatggccttggcctggcccagcccaagatcccagcgttatctaactcctggagggtggactctgtcctggcttgtttggtgtcctcagatatctttcacacagtagagcaaaatcaccagccctgcactgatgtcactttatgtagaaaaaggccttagctggacctgcgttgccgtctatgcaaatgcatgcaaatactccaggccctgggatgtgggcttgtgttttgtcactgtgaagggggagatgggagaggagcctgttttggggtggggtctggggaaggcaatctgattctgaagctaaagagctttcatcctcttgagtgtatgtccccatagtgggccccttgacccacatgctgaccggtgccttgggatttgactagagttgctggctcgaggcccagcacgaggacttaccctggggttttgttaggtttggaagcagctgtccctagggggtgaagtcccccccctttttttttttacccctgcttctcccacggcttcacctccctatgtgaactgtagactcagatcccaataaagtgctgttgcagctatgatgctaggtggtttctaagcacaggggacaccccacaccccctgcctgaatggatgggtccatcccaggcactggtacttgcccccttgttctgtatccccctttgcccttgccttgcccttccaacaaaccctaggcccttgagaagctgatacttctccttttgctcacagctgccttggccccacccctgggagatgtagcaaattgagtgtgggttttggagtctgagcctcaggctcaaatccaggccaagtgatcttgggcaagttaatctctgggaactttgggtttcttatcctcaaaaaaggcgatggaagggctggggaagtgattaaataaaagcaacgcaagaaaaaaaaaaaaaaaaaaa

SEQ ID NO: 7562 - DNA, 600 bp, Homo sapiens
aggagagctatgacacagagtcagagttcacggagttcacagaggacgagctgccctatgatgactgtgtgtttggaggccagcgtctgacgttatgagtgcaaaggggctgaaagaacatggacttgtatatttgtacaaaaaaaaagttttatttttctaaaaaaagaaaaaagaagaaaaaatttaaagggtgtacttatatccacactgcacactgcctagcccaaaacgtcttattgtggtaggatcagccctcattttgttgcttttgtgaactttttgtaggggacgagaaagatcattgaaattctgagaaaacttcttttaaacctcacctttgtggggtttttggagaaggttatcaaaaatttcatggaaggaccacattttatatttattgtgcttcgagtgactgaccccagtggtatcctgtgacatgtaacagccaggagtgttaagcgttcagtgatgtggggtgaaaagttactacctgtcaaggtttgtgttaccctcctgtaaatggtgtacataatgtattgttggtaattattttggtacttttatgatgtatatttattaaagagatttttacaaatg

SEQ ID NO: 7563 - DNA, 600 bp, Homo sapiens
atgattatattgtattttctcagataagaaaaatgttttttaacaatattattttaatctgttttaagcatctcttagatttacattataactacataaagcagtgaagcaaaggcaaattaagataaagctagaaagtctgaacattttatttcaaaatcatacgaatcggggtcagttaagcctcagtattcttagcttttgttgattttggcactatctttatattattaaatatatttgttgtttggatatttcatataaagatggctataattacatatttcattcccaatttgtgtgtgttggggggtacttttaaaggtgactattgttttgtacatctaattttgggaaaccaagtctataagacatcttgtgatttcttaatgtttttgtttgtatgtttttcaaagatatcactgtcctttatcatgttttgaagattgtttaaaattcattttcctaaattaatgtgcaagtaatgttttgaggatatcggtgttttatattaaacatatttccaattcaaaaaaaaaaaaaaaaaaacttatcgataccgtcgacctcgatgatgatgatgatgatgatgatgtcgac

SEQ ID NO: 7564 - DNA, 600 bp, Homo sapiens
tccatcgggctggcctatgctcacctactgctattccatcgacctctcagagcgagtggcgctgaagctcgatcagaccttccccttcagcctgatgaggaggatatccgtgttcaagtacgtctcagggtcttcagccgagaggagggcagcccagagccggaaactgaacccggtgcctggctcctaccccacacagagctgccaccctcacctgtccccaagccaccctgtgtcccagacgcagcacgccagtggtcagaagctggcctcctggcctcctgcacccccgggcacatgcccaccttgcctccgtaccagcctgcctccggcctgtgctatgtgcagaaccactttggtccaaaccccacctcctccagtgtctacccagcttctgcgggcacctccctgggcatccagccccccacgcctgtgaacagccctggcacggtgtattctggggccttgggacaccaggggctgcaggctccaaggagtcctccagggtccccatgccctgagagaatttctagggaagtcatctcacttggccttctgaaggtcctccctaagagtctcctgacaaaagttacttattga

SEQ ID NO: 7565 - DNA, 600 bp, Homo sapiens
agtatcacaaagattaatgttacttcaacaaatggagaataaattgggtgatcaacacacagaaaaggcatctcaactccaaactgttgagactgcttttaaaaggaaccttagtcttttaaaggatatagaagcagcagaaaagtcactacagaccaggattcacccacttccacggcctgaggtggtttctcttgagactcgttactgggcatcagtagaagaatatattcccaaatgggaacagtttcttttaggaagagcaccatatccttttgctgttgaaaatcaaaatgaagcagaaaataccattcaaaatgaggcacagcgataacttcttcacatgctatttcaaaaagcctgtttaataaagctgaatgttaaggtgtatgtaggttattgcaggaactttaggaattaaatatgttcatattcttcgattatctcctaagtgacagtgaagatatgagaatttactggcaagtcacatgttatcacctactactatttcaaggtcatgaatttgctttctaccaaacccatagatgtgttaaacacgaatattaaaaggtggactctttattaattaaaaaaaaaaaa

SEQ ID NO: 7566 - DNA, 600 bp, Homo sapiens
agaaaccattggtgctcttaccttgggcaagatattgcagaaaatctgcagctgtgcctaggggagtttctacccagacttctagatccttctgcagaaatcatcgtcttgaaagagcctccaactattcgacccaattctccctatgacctatgtagccgatttgcagctgtcatggagtcaattcagggagtttcaactgtgacagtgaaataagctcccacatgttcaaggcccattctggttcctggctgcctgcctcttgcacagaagttcgttgtcatagtgctcaccttgggaaaaggattaggtgggcacataagattccgatcagaccccaaccatgctgcatgtgtaaagaaggattgaaaataaaattgcactttttaggtacaaaatcataaaagctgtttcactagaaaaggcagaaagcagtgtattaaggtgttgaattacgccagaagacctgaaatgccttgtacctacaacaatgcttaggcttttctaagcctcttgccacttttaaaattatccttcaggcataaatatttttgacagcagaatagaagaatgattcatgagaacctgaaccagatgaac

SEQ ID NO: 7567 - DNA, 600 bp, Homo sapiens
caatgggatttttgaggagctgttaagaaaagcagagaactctcggctacctagcacacaggcaggggtgatccctcagggggaatacgaaggtgactctttgtacagacctgcttgacagactcactcggcctcacttcatccttgcaaagagaatcctgtacttcatccttgcaaagagaatcctgtacttcactcagaatgaaggaacaagtatctcaggatgaaatctcaatgaaaaacacttattttgggggaatatctattttaactgcttcagacacctagatcccagaactcaggcgcatatgcatattttccctgcaagattagaatggtgctcttcacgttttgacggtggttttcaaaatgttgttcttcaaccagcaacagcaacagctagggactgattagaaatgcaaattcttgggtcactctctagaccaactgatgcagaaacaggaggtgtgagccagcaatcagatggagattctagtgctcatgaaagtttgaagaacactggtaatgtgtggagtatcttggtgtattttgctactgttgatatggattgcttatgttatataaacgattttcattaaa

SEQ ID NO: 7568 - DNA, 1400 bp, Homo sapiens
ctccagaagtgaggtaagagtaaagtctccaccagaagctggtacccagttaccaaagatcatcttcagcagggatgagaaagtccttggtcagagccaggagcctaatgttaaccctgcttcagcaggcaaccagacccagaagacacaagatggtggaaagtctaaaagaagtacagtggattcaaaggccatgggagagaaatccttttctgttcataataatggtggggcagtgtcatttcagtttttctttaacatcagcactgatgaccaagaaggcctttacagtctttattttcataaatgccttggaaaagaattgccaagtgacaagtttacattcagccttgatattgagatcacagagaaggatcctgacagctacctctcagcaggagaaattcctctccccaaattatacatctcaatggcctttttcttctttctttctgggaccatctggattcatatccttcgaaaacgacggaatgatgtatttaaaatccactggctgggctttcattaagcacatcctttctgataaagacaaaaagatcttcatgattgtcattccactccaggtcctggcaaatgtagcctacatcatcatagagtccaccgaggagggcacgactgaatatggcttgtggaaggactctctatttctggtcgacctgttgtgttgtggtgccatcctcttcccagtggtgtggtcaatcagacatttacaagaagcatcagcagccaggggtagtttggagaaggaggtgttgagtcagttgtataaggaggaggttgggggtgactgctgcttattaagatgattcatttcatttccactcgtggttgtgattttcaccttctcaaaactgagtcagcaagagaaaatcttgtcttagaagggccagataacacttcgctgtgagaacaggagggataatggattggagatggctatgtgtaaagcagccctgcctgctgatttaacacactttcaaaatagatgtgtcagtattcatttaaagcaagactctgatgacagaaggaaccttgaaaactacctgatattgaaatggttgtgccctttatagcccttttgcatctccttgactttccagtcatgcctcctaaatcagaagaaaagctgcaaagaaaatgttttgtgtggttctgggcttatttgaataatgttcatgaccacaggctgccatagcacaagtgagaatttcagaccacaagggtttaaggagcagtgctctcttctctcaaagctcagaacggtctctggatccatggtatcgtacacccagtgtggatattaacattctttaatgcaggttatgaataataaataaaacaggtttttgttaaaaaaaaaaaaaaaaaaaaaaaaaaaa

SEQ ID NO: 7569 - DNA, 600 bp, Homo sapiens
cattcagaaaatgcaacagcgaaagacattgcccctactttaacactctatgtggggaaaaagcagcttgtagagattgagaaggtggttctacaccctaactaccaccaggtagatattgggatcatcaaactcaaacagaaggtgcttgttaatgagagagtgatgcccatctgcctaccttcaaagaattatgcagaagtagggcgtgtgggttacgtgtctggctggggacaaagtgacaactttaaacttactgaccatctgaagtatgtcatgctgcctgtggctgaccaatacgattgcataacgcattatgaaggcagcacatgccccaaatggaaggcaccgaagagccctgtaggggtgcagcccatactgaacgaacacaccttctgtgtcggcatgtctaagtaccaggaagacacctgctatggcgatgcgggcagtgcctttgccgttcacgacctggaggaggacacctggtacgcggctgggatcctaagctttgataagagctgtgctgtggctgagtatggtgtgtatgtgaaggtgacttccatccaggactgggttcagaagaccatagctgagaactaa

SEQ ID NO: 7570 - DNA, 600 bp, Homo sapiens
ggttgggcaccctgttccagaacccacagcatggagagccaagcctacagcgggtcccagtagccaagatggtgtgtgggccctcaggctcccagcttgtcctgctcaagctggagagatctgtgaccctgaaccagcgtgtggccctgatctgcctgccccctgaatggtatgtggtgcctccagggaccaagtgtgagattgcaggctggggtgagaccaaaggtacgggtaatgacacagtcctaaatgtggcctttctgaatgttatctccaaccaggagtgtaacatcaagcaccgaggacgtgtgcgggagagtgagatgtgcactgagggactgttggcccctgtgggggcctgtgagggtgactacgggggcccacttgcctgctttacccacaactgctgggtcctggaaggaattataatccccaaccgagtatgcgcaaggtcccgctggccagctgtcttcacgcgtgtctctgtgtttgtggactggattcacaaggtcatgagactgggttaggcccagccttgatgccatatgccttggggaggacaaaacttcttgtcagacataaagccatgtttcctcttta

SEQ ID NO: 7571 - DNA, 1400 bp, Homo sapiens
cggtgccggaacatcagcggcactctgtacaagaacaggctcggctcaggcggccggggacggtgcatcaagcagggggagaactggtacagtcccaccgagtttgaggccatggcaggaagagccagcagtaaggactggaaaagaagcattcgctacgcgggccgacccttgcagtgcctcatccaggatgggatcttaaaccctcacgctgcctcttgcacctgtgctgcctgctgcgacgacatgaccttaagtggcccagtcaggctttttgtgccttacaaaaggcgcaagaaggagaatgaactgcccacaactcccgtgaagaaggactcccccaagaacatcacattgcttccagccaccgcggctaccaccttcaccgtgaccccctcgggacagatcacgacctcgggggcactgacctttgaccgagcgtccacggtagaggccactgctgtcatatcagagagtccggcccagggcgacgtcttcgcaggggccacagtccaagaggccagcgtgcagcccccatgcagggccagccaccctgagcctcactaccccggctatcaggacagctgccagatcgcaccgtttccagaagctgcgttgccaacgtcacatcccaaaatagtgttgacatccctgcctgcgctggcggtcccacccccgactcccaccaaagcggcacctcccgcgttggtcaatgggctggagctgtcagagccgcggagctggctgtacctagaagagatggtcaactccttgctcaacacagcgcagcagctgaagacgctgtttgagcaagccaagcatgccagcacctaccgagaagctgccacaaaccaggccaagatccacgctgacgcagagcggaaggagcagtcctgcgttaactgcggccgggaggctatgagcgagtgcaccggctgccacaaggtcaactactgctccaccttctgccaacgcaaggactggaaggatcaccagcacatatgcggccagtcagcagctgtcaccgtccaggcagacgaagtccacgtggctgaaagcgtgatggagaaggtgaccgtgtgaggctccatcggccgccctgggagctggggcccctcgcactcctgtgaggcttttgcaggtcgaaggcccccctgaggactctggggggacgttgagaagaggggtgtgggaaggtaaagaaacttgctggacaagtcattaacacactttaagcgaatggtgccctgggaagcgcactccccctgcccgggccccctgcccgctcgcggacagattttttatccctgggatcatgagcgtccggtctggcccacagggcctgtgctgcgacgcacatacatacgtgttgtgtctgtcaataaagtgtaaataaggtc

SEQ ID NO: 7572 - DNA, 704 bp, Homo sapiens; identical to SEQ ID NO: 2337

SEQ ID NO: 7573 - DNA, 1269 bp, Homo sapiens; identical to SEQ ID NO: 2338

SEQ ID NO: 7574 - DNA, 425 bp, Homo sapiens; identical to SEQ ID NO: 2339

SEQ ID NO: 7575 - DNA, 808 bp, Homo sapiens; identical to SEQ ID NO: 2340

SEQ ID NO: 7576 - DNA, 1400 bp, Homo sapiens
gtctagttttcattaaaagaacaaagatcttttatatggatatcttataaatatataatcattgctaagtaagaagttaagttgttgctatcgcaacaatcctggcagacaattgagtaatattttgatgatttattttgtttgtaattagttattataagaagatctagatcctagatattagaataaaatttattttctactgtatccatttcaaatgttaaaatattgtttaatatttttgaaatccctgagtatcaggccttgttataaataagctgcataatcaataaatagaacaagggactttttgttgataatccaaatactcaaagtttacgtaatgaaaattatagcgtgtgtgcaaactcttgagggttgattatgctgcaatttagcatgttggaacgtctagggagaaggttgactttttgcacttctgtatatagtcaaaagagagaaacctgtataatagtaagatcttattttgaataaaaacgtctataattacaaggagttttgttaaggctaatacaatgacagactgagcaaaattgcttgcaaaagtggcacagagttagcactccataccccttcaaacatgttgctttgctttcttgtggacagcttgtagtttgccaggattttttcagctggaaagatacgccatcctttcaaaccctcatgactgacaaaaactccatggggccaaatctgcctgaagatcattaccaaaaatagcaggtacttctaccattaaggtgaaatcatggatcagatattccttacatttttcaaaactactgcatgtttaaaacttcaacaaaaaaagagagaaagaactatactaagaacatatattattcagatcagtttctgccaatttcagtggtttattgttcacaaaaaaatcttcaaaacaagtattgactttcacaaaatttaaatcataaacaggcaaaccaaacagcacactgtagctatagttgttatgtgattgttttttaattgctgtaggatcctgttctttcagcaggtgaaaaataaaacgcagttcaaatttcatggttttaattttcaactcagaagcactcaaaaatgcaaaatgtgataatgggcacttgtttaaaagaattagtgtatccagccttcactccagctggttaaaaatgttgcacttatcagcaaccctaccactttcatctgctgaaaggacaaatgtgcttggttttactattatgtaatcacaacttactttctgcttgtagttgcttaaaattatgtattttgtcttgggctgcaatttgttttatgcttattttattattactgcagtagttgactttgctgtatggaaaaataaagtgaaattgccctaataaaacttctctttcttaagt

SEQ ID NO: 7577 - DNA, 600 bp, Homo sapiens
gctgttggggaagcccccaagagatgaggacagttcagaggaggattcagacgagtgtcgctgcgtgagtggccgctgcgtgccgcggccgggcggcgccgtgtgcgagtgtcccggcggcttccagctcgacgcctcccgcgcccgctgcgtggatatcgacgagtgccgagagctgaaccagcgcgggctgctgtgcaagagcgagcgctgcgtgaacaccagcggctccttccgctgcgtctgcaaagccggcttcgcgcgcagccgcccgcacggggcctgcgttccccagcgccgccgctgacgccgccgacgccgccctcggcccagacctcggtgatcactgagggatttccgcgagctcggcctcacttctgccccgacttgtggctcggacccagggaccttcagggcccgcagaccctcccggcgccttgagacccgaggcgcccctaccggcccccctccccggttagcgggcggttgtaaggtctccggcgggcgctgcctgccttcctcccagagggtgtttcctagaaactgataaatcagatcgtgcctctttacccttggctttcgaaaaaaaaaaaaaaaaaa

SEQ ID NO: 7578 - DNA, 1400 bp, Homo sapiens
  misc_feature (1214)..(1214): n is a, c, g, or t
acttccgggggctttggcacctggcggaccctcccggagcgtcggcacctgaacgcgaggcgctccattgcgcgtgcgcgttgaggggcttcccgcacctgatcgcgagaccccaacggctggtggcgtcgcctgcgcgtctcggctgagctggccatggcgcagctgtgcgggctgaggcggagccgggcgtttctcgccctgctgggatcgctgctcctctctggggtcctggcggccgaccgagaacgcagcatccacgacttctgcctggtgtcgaaggtggtgggcagatgccgggcctccatgcctaggtggtggtacaatgtcactgacggatcctgccagctgtttgtgtatgggggctgtgacggaaacagcaataattacctgaccaaggaggagtgcctcaagaaatgtgccactgtcacagagaatgccacgggtgacctggccaccagcaggaatgcagcggattcctctgtcccaagtgctcccagaaggcaggattctgaagaccactccagcgatatgttcaactatgaagaatactgcaccgccaacgcagtcactgggccttgccgtgcatccttcccacgctggtactttgacgtggagaggaactcctgcaataacttcatctatggaggctgccggggcaataagaacagctaccgctctgaggaggcctgcatgctccgctgcttccgccagcaggagaatcctcccctgccccttggctcaaaggtggtggttctggcggggctgttcgtgatggtgttgatcctcttcctgggagcctccatggtctacctgatccgggtggcacggaggaaccaggagcgtgccctgcgcaccgtctggagctccggagatgacaaggagcagctggtgaagaacacatatgtcctgtgaccgccctgtcgccaagaggactggggaagggaggggagactatgtgtgagctttttttaaatagagggattgactcggatttgagtgatcattagggctgaggtctgtttctctgggaggtaggacggctgcttcctggtctggcagggatgggtttgctttggaaatcctctaggaggctcctcctcgcatggcctgcagtctggcagcagccccgagttgtttcctcgctgatcgatttctttcctccaggtagagttttctttgcttatgttgaattccattgcctccttttctcnatcacagaagtgatgttggaatcgtttcttttgtttgtctgatttatggtttttttaagtataaacaaaagttttttattagcattctgaaagaaggaaagtaaaatgtacaagtttaataaaaaggggccttcccctttagaataaatttccagcatgttgctttcaaaaaaaaaaaaaaaaaaa

SEQ ID NO: 7579 - DNA, 478 bp, Homo sapiens; identical to SEQ ID NO: 2344

SEQ ID NO: 7580 - DNA, 1400 bp, Homo sapiens
tccctcttcttcacaggacacaggaagatgagcggggctgacaccgttggggatgatgacgaagcctcccggaagagaaagagcaaaaacctagccaaggacatgaagaacaagctggggatcttcagacggcggaatgagtcccctggagcccctcccgcgggcaaggcagacaaaatgatgaagtcattcaagcccacctcagaggaagccctcaagtggggcgagtccttggagaagctgctggttcacaaatacgggttagcagtgttccaagccttccttcgcactgagttcagtgaggagaatctggagttctggttggcttgtgaggacttcaagaaggtcaagtcacagtccaagatggcatccaaggccaagaagatctttgctgaatacatcgcgatccaggcatgcaaggaggtcaacctggactcctacacgcgggagcacaccaaggacaacctgcagagcgtcacgcggggctgcttcgacctggcacagaagcgcatcttcgggctcatggaaaaggactcgtaccctcgctttctccgttctgacctctacctggaccttattaaccagaagaagatgagtcccccgctttaggggccactggagtcgagctcagcgttcacaccaggcgggctgggtcccctgcccacctgcctccctgccccctgtgacggagggggcaagcaagcccccagaggccgtgtctctggacagacggatagacatacggaagcgaggcctggaccaagagaggcccaggctactggaggagtagaaggatgggccccgtggggtccccactgccccggtacgagggggcccaagaccctggcaggtcaggggccctggccaagccagatctggagctgctgctccctgctgcggagaccgcggaggcttcgcgttgaccaagttccttaaagaactggctgatggggcaggaggtccaggcctgggctctcgggccctcctagagggccattggagcttgcagctcagacccccactttgagttttatttatttaaatagtagttggatgcttggcacgtcgtcctgtaataggaaacccttgcctcatcagttttcctgatttacaagtgcaatattttagccaatgccttgggagaagctgccatgcaaaggtggacaccattctccagcttcaggggatatgctcgtcccgggcaccggtggcaggcagctggccttctggactaaggcagcctggggggacactgcagtctggctacacacagagatctggcaccccctgggtggagtgtccctcgggggctttgggaaagcatggcaccctcagaccacacagtagccaagttctggagcaaataaaaggcctgtgttatttcttgttcttgaaaaaaa

SEQ ID NO: 7581 - DNA, 556 bp, Homo sapiens; identical to SEQ ID NO: 2346

SEQ ID NO: 7582 - DNA, 1400 bp, Homo sapiens
acggaaagtgcagaatgctcctccacctcactctcctgccttgaaaaagacattcaggactgctggtttgtagttgaatattggccaaggaaaggcacatgtcacctctattcgccacacagtatttttttttttaatccgccaatattagtaggatttttgttttgtttttacaaatgttaaaatgtgttgttccaaatactaatgaaaacagaatgtctcttcctggtagaccactgccatatgatttacatttcctcaccataagggtcccccactctaaagcaaatttatcgctgggaaatgagatgaccactttttagaaagataattcactgtactatcaggttcacaaacttcatttcagagttctttttgaagtatttaaggttcccgttgcatttgttttgtttacagataattacctactctggctagaagctaggggtcccagtgaagagccactgccattaaagaatatgaaacatagataaaacatctttgaaattatgtaaattatgtaaattatcaggcaaatttgcattaaattacagaaatttaattcagaaccccaactactgtgttatgcaaaagcaagctgattaaatgacactcatataattatatgttgtaagcaacaggctcactggtcacggatttgtgtctgtgacttttgtgaaagggagaagtgacattgcatcaaagcatcttgcattatgcaatttttatattaaccagatatatattcatcggtattcatccaagttaaatgtagagtttttaaacatcaatctttaaaccaattgctgctacttatataattgccaaaaagtgaaataatgtgtagttcatgtaaataatacattatatttctattttattatgaagaaggtgaatagccatatttgtaaaatgacaatcatgtgtgttaacccagtgctttccattcgtgaaaacacatttgctttttgtgatatgcacaatgtagataagtgttctgtctgactttcttttttgatatagaagtataaagaattgtggtttatatatttaaaagtgtcaagctgagtattaaaatgtatgcatgttgtctaagaaattgaatacttgaatgtgtctcacagtttgaaataagctatttgatgtaatacttcttgtgtgtatgcacatgaaacttagattttacatgaagtattttttcagtattatatgtaccctctgaaatacatagggatatgcgtattataccaaaatgttgctgaaaaatgggcacttaaagctttcagaatatgtcagtgctgatgtagcatgcttgttgcaattgccttttttctgtataaatgtctttaatgcaatatactggaaagcttttctattttaataaaaataatttttatatg

SEQ ID NO: 7583 - DNA, 594 bp, Homo sapiens; identical to SEQ ID NO: 2348

SEQ ID NO: 7584 - DNA, 753 bp, Homo sapiens; identical to SEQ ID NO: 2349

SEQ ID NO: 7585 - DNA, 600 bp, Homo sapiens
cttcctcccaacaagcagctgggttaggaaaaccatgggtaaggacggactcacttctctttttagttgaggccttctagttaccacattactctgcctctgtatataggtggttttctttaagtggggtgggaaggggagcacaatttcccttcatactccttttaagcagtgagttatggtggtggtctcatgaagaaaagaccttttggcccaatctctgccatatcagtgaacctttagaaactcaaaaactgagaaatttacttcagtagttagaattatatcacttcactgttctctacttgcaagcctcaaagagagaaagtttcgttatattaaaacacttaggtaacttttcggtctttcccatttctacctaagtcagctttcatctttgtggatggtgtctcctttactaaataagaaaataacaaagcccttattctctttttttcttgtcctcattcttgccttgagttccagttcctctttggtgtacagacttcttggtacccagtcacctctgtcttcagcaccctcataagtcgtcactaatacacagttttgtacatgtaacattaaaggcataaatgactc

SEQ ID NO: 7586 - DNA, 1400 bp, Homo sapiens
tcgttccttcaccacatggctttatccaggcatctgatgttatagatactgaatctgtcttgcctttgacaacactaacagatcccatactccaacatcatcaggaagaatcaaatatcattggatcatccttgggcagtcctgtttcagaagattcaaaggatgtcgaagatttggtaaactgtcattagaataattcttagaaataggcagttcaagcaaagaaggcacactgttaattacaacctcttcaaagaaataggagcaaacccccaagaggcttaatttaccaatttaaatagccacagtccttaagccacacacattgttgctgctatgactttttacctcctttaaacacatcatctgaggttgagttttatgacagtatgtagttgagtggaggctgggagttttaagcataaatccctgtttagtgttacatgggaataaggaatttcattcacttcagccactaagaaaagtttagaatcacgaaagcttaactgctgtggtttaaagtacagtttctctaaagatcagacatggcactgtctcctctcaagcctggttgtagttcagatgagtcttttcaacatggtcttcaacatggtctagagcttaccagtgatcttctgatcttcaagaagactaagtttgagacttgaccagcatacaagtatagagacctaggaggtggtcttgtggtggtacatttggttaacccattgctggcagtgggagctgatttaggcagggtaaacaggaaagcattaaaagttaaaattcactacaggttttttgttacttttaaagggaatatggataagcatagtaacaaaacccaccagaatctaagcagttttcaccccctcagaaaccactgtcattagtttacaaagttagcactttgaagtaaaactaaatgaggaaggaagtaatgttacctatccttgataccatgaccatttattagatgttttgctatataaattaccgagagaatagtttgtcatccacttagtgtgttagctggtggggtacaatataacctctcatctcaggctattttaaaaaaacaatatttgcttctataacaaaaggaaacaaatctaagaatcattcctgtactacagaagggttaaggcaaaggtagccttttgggctttttaatgaatatgacccctatagaaaagtcaagaaaaaaaaacccttgtataaattattttatttattattgtaattagatcttcacaaagttgtcttttcactgtgttttgtcaacgtgaaattaaattgtagttataagcaaaagttggttgcctagggaacaattgtatattcagtttaacagaaataaaagaatatttgtcttaaaaaaaaaaaaaaaaaaactcgag

SEQ ID NO: 7587 - DNA, 1400 bp, Homo sapiens
acgaacacatccaccggctctccagacagccaacccggctgcgtgtagagatggaggactgggagggcaacctgcgctacgctgagtatagccactttgttttgggcaatgaactcaacagctatcgcctcttcctggggaactacactggcaatgtggggaacgacgccctccagtatcataacaacacagccttcagcaccaaggacaaggacaatgacaactgcttggacaagtgtgcacagctccgcaaaggtggctactggtacaactgctgcacagactccaacctcaatggagtgtactaccgcctgggtgagcacaataagcacctggatggcatcacctggtatggctggcatggatctacctactccctcaaacgggtggagatgaaaatccgcccagaagacttcaagccttaaaaggaggctgccgtggagcacggatacagaaactgagacacgtggagactggatgagggcagatgaggacaggaagagagtgttagaaagggtaggactgagaaacagcctataatctccaaagaaagaataagtctccaaggagcacaaaaaaatcatatgtaccaaggatgttacagtaaacaggatgaactatttaaacccactgggtcctgccacatccttctcaaggtggtagactgagtggggtctctctgcccaagatccctgacatagcagtagcttgtcttttccacatgatttgtctgtgaaagaaaataattttgagatcgttttatctattttctctacggcttaggctatgtgagggcaaaacacaaatccctttgctaaaaagaaccatattattttgattctcaaaggataggcctttgagtgttagagaaaggagtgaaggaggcaggtgggaaatggtatttctatttttaaatccagtgaaattatcttgagtctacacattatttttaaaacacaaaaattgttcggctggaactgacccaggctggacttgcggggaggaaactccagggcactgcatctggcgatcagactctgagcactgcccctgctcgccttggtcatgtacagcactgaaaggaatgaagcaccagcaggaggtggacagagtctctcatggatgccggcacaaaactgccttaaaatattcatagttaatacaggtatatctatttttatttactttgtaagaaacaagctcaaggagcttccttttaaattttgtctgtaggaaatggttgaaaactgaaggtagatggtgttatagttaataataaatgctgtaaataagcatctcactttgtaaaaataaaatattgtggttttgttttaaacattcaacgtttcttttccttctacaataaacactttcaaaatgtgaaaaaaaaaaaaaaaaaa

SEQ ID NO: 7588 - DNA, 1224 bp, Homo sapiens; identical to SEQ ID NO: 2353

SEQ ID NO: 7589 - DNA, 600 bp, Homo sapiens
ttttattcacaaacttctgtttggtacaaatacagtgtcattgttttgtgcattctcctttttcccagtatttcagaacaaattgattcaagtttctagcagatattttttgatcaattaacttaatgtcctcgctccatttcttgctggaacagtttaggtacctaccacttcttcacatgacacaggggaatcctgattagtcaaaataataatgatttcattctctttgccagtaacttgttttatagtggtcatatgacctgatactgggtaaacaaaacaaagatggacttgttctgggaaaaggtaaaatggtaatcaaatagattgtgttccaggaatgcaaaggtggcttaatattcacaagtcagttgctattatacaccacctgtagaaaagtaatctggcatgcagaacattcttgtggtacaattaatgttcgtttatgatcttagcaaatgatggattgaaagggacttacttaactgcataaagagacttaaactacaacaaacaatatgcttaatgatgaaatagtgaacatttctcctaagattataaaaataagacaaggatatctgctgtcaatgattttat

SEQ ID NO: 7590 - DNA, 1396 bp, Homo sapiens; identical to SEQ ID NO: 2355

SEQ ID NO: 7591 - DNA, 600 bp, Homo sapiens
gagaatatggccatcacctgaaaagttttcttatcttctgtgcttttggtccctggaaacaaatccgcctatgtatgaagctagttgatttccagttgcactatttccagttgcctctgaagttcacaggcaatacattgtctagtcctttgcgaatttctctgatttgtgggcacagttatgaagtttccccacatgtgaagacaggtacaaaatagcagagccaagcagacagtgggtctattcttcattagctcagtgacttgtccacactcgtcttagcacttacgtttcaaaagcttgtcacaaacccttggagtcattcccagataatagaactggaaatgataaatcccctaatgccaagggtctagtgtgttcttagtggttatactgggaagtgtgtggagatttaggtgctgctctgctgctctggatggctgaaggctcctgggccatcttcatgtgctgcttgaagagctcctattttgtactcctggctagaatgctgtggaacaaatacaaagtgaaaaaagttctctgtagatttctgaagtgcatattcattgatgccaagaaaaaaaaaaagttgcctttttg

SEQ ID NO: 7592 - DNA, 1400 bp, Homo sapiens
gttgcagggtcgggcttgcggtgggtgacccagagccaccaaagtcacatccacaactaatgagggaaatctgtaaagccagttagatagaagaattttatttttctgtgggttttgtgttgtcttttttatgttaaaaagaaatccagtttgtgtttttctatagaaaaagtaaaagatcaggttatactttaggttaggggttctatttattcctgttagtaaataaaattaacaaatttctttgtttaacaaaagattaatctttaaaccactaaaatacatagactgattgattattcaacacattggaattgatgtcggtcatagtttcctgaagcatttagttacaacctgaaggaataaaatgatttgtggaaatgcttaaaatagacctaactgaatacagtctcatcttgccgcgcctggcttacctatctgtggaaagctaggcttcccaggctgggctctgcctgtctggtgcctggaggtgtgggagggaagatgagttatttaactggtaagcgatttgaaacactatttttatattaaagtaaatggcatggagtatagtgcaaattcatttttaagatagaacacaaaacttgaaagaagttttatgcgtgtgacagtgtatggggctgcagttggtctccctggaggggacttccacacctcctgcctttaggcatgggtggaaagtgctcagtgaagtacacctgtgtggcccagttctgaaagctttatacagttgaattttaagtggggttgataacaccttggactgttagtgttaaaaatctagtgggttgacctttaaatgcaacagtttttaaaatatattgctgcattttatagaatagtaaaggtacgattatacttgagattttcctccatttttatttcttcgtgaacatagagtttggggccgaaaatgtttttaaagtatgtgtttgagttaaatataaagttggttcacttcaaagctaaaaaattgttaaacttgcagcttggtattgcagagaagattttataagaattttgctttagagaatgccactttggctgaactacaagtgtaggccaccattataatttataaatacagcatacttcaaaactgtttgttatctcttgttaccatgtatgtataaatggaccttttataaccttgttctctgcttgacagactcaagagaaactacccaggtattacacaagccaaaatgggagcaaggccttctctccagactatcgtaacctggtgccttaccaagttgtgcttttctgttttcaagtgtaaatgatgttgagcagaatgttgtacttgaaaatgctataagtgagatggtatgaaataaattctgacttatgaataaaaaaaaaaaaaaaaaaaaaaa

SEQ ID NO: 7593 - DNA, 1400 bp, Homo sapiens
aatttgaagctttctttcaaggtaaaagcttatatatcaactcagggaacatccccgattacttatttgacttctttgaacatttgcccaattgtgcaagtgccctggacttcattaaactggacttttatgggggagctatggcttcatgggaaaaggctgcagaagacacaggtggaatccacatggaagaggccccagaaacctacattcccagcagggctgtatctttgttcttcaactggaagcaggaattcaggactctggaggtcacactccgggatttcagcaagttgaataagcaagatatcagatatctggggaaaatattcagctctgccacaagcctcaggctgcaaataaagagatgtgctggtgtggctggaagcctcagtttggtcctcagcacctgtaagaacatttattctctcatggtggaagccagtcccctcaccatagaagatgagaggcacatcacatctgtaacaaacctgaaaaccttgagtattcatgacctacagaatcaacggctgccgggtggtctgactgacagcttgggtaacttgaagaaccttacaaagctcataatggataacataaagatgaatgaagaagatgctataaaactagctgaaggcctgaaaaacctgaagaagatgtgtttatttcatttgacccacttgtctgacattggagagggaatggattacatagtcaagtctctgtcaagtgaaccctgtgaccttgaagaaattcaattagtctcctgctgcttgtctgcaaatgcagtgaaaatcctagctcagaatcttcacaatttggtcaaactgagcattcttgatttatcagaaaattacctggaaaaagatggaaatgaagctcttcatgaactgatcgacaggatgaacgtgctagaacagctcaccgcactgatgctgccctggggctgtgacgtgcaaggcagcctgagcagcctgttgaaacatttggaggaggtcccacaactcgtcaagcttgggttgaaaaactggagactcacagatacagagattagaattttaggtgcattttttggaaagaaccctctgaaaaacttccagcagttgaatttggcgggaaatcgtgtgagcagtgatggatggcttgccttcatgggtgtatttgagaatcttaagcaattagtgttttttgactttagtactaaagaatttctacctgatccagcattagtcagaaaacttagccaagtgttatccaagttaacttttctgcaagaagctaggcttgttgggtggcaatttgatgatgatgatctcagtgttattacaggtgcttttaaactagtaactgcttaaataaagtgtactcgaagccaaaaaaaaaaaaaaaaaaaaaaaaaa

SEQ ID NO: 7594 - DNA, 600 bp, Homo sapiens
cgttgtgacaggtgcatggtgggatactggggcttcggagactatggctgtcgaccatgtgactgtgcggggagctgtgaccctatcaccggagactgcatcagcagccacacagacatagactggtgtcatgaagttcctgacttccgtcccgtgcacaataagagcgaaccagcctgggagtgggaggatgcgcaggggttttctgcacttctacactcaggtaaatgcgaatgtaaggaacagacattaggaaatgccaaggcattctgtggaatgaaatattcatatgtgctaaaaataaagattttatcagctcatgataaaggtactcatgttgaggtcaatgtgaagattaaaaaggtcttaaaatctaccaaactgaagattttccgaggaaagcgaacattatatccagaatcatggacggacagaggatgcacttgtccaatcctcaatcctggtttggaataccttgtagcaggacatgaggatataagaacaggcaaactaattgtgaatatgaaaagctttgtccagcactggaaaccttctcttggaagaaaagtcatggatattttaaaaagagagtgcaagtag

SEQ ID NO: 7595 - DNA, 600 bp, Homo sapiens
catggtcattgagtacatcgggactatcattcgaaacgaagtagccaacaggaaagagaagctttatgagtctcagaaccgtggtgtgtacatgttccgcatggataacgaccatgtgattgacgcgacgctcacaggagggcccgcaaggtatatcaaccattcgtgtgcacctaattgtgtggctgaagtggtgacttttgagagaggacacaaaattatcatcagctccagtcggagaatccagaaaggagaagagctctgctatgactataagtttgactttgaagatgaccagcacaagattccgtgtcactgtggagctgtgaactgccggaagtggatgaactgaaatgcattccttgctagctcagcgggcggcttgtccctaggaagaggcgattcaacacaccattggaattttgcagacagaaagagatttttgttttctgttttatgactttttgaaaaagcttctgggagttctgatttcctcagtcctttaggttaaagcagcgccaggaggaagctgacagaagcagcgttcctgaagtggccgaggttaaacggaatcacagaatggtccagcacttttgcttt

SEQ ID NO: 7596 - DNA, 1017 bp, Homo sapiens; identical to SEQ ID NO: 2361

SEQ ID NO: 7597 - DNA, 600 bp, Homo sapiens
acactgtctttctacaatgtcacagaccgctctcatatctacaccttcactgatacttttactgagaaactttggcccctcttctacccaggcatccgggctggacggaagaatgctgcaccacttaccatcaggcccccaacagattgggagtgacaggttgggatgtgggaatgactggggtgaggcagggtcaagtgctacgggcctccttcccgtgtcctgctggaacgtcttcgtgtccacctgggtccagtcctgaatcatcttggagaaacaccttggtttctaggatggttttgtgtggagggggaggtaggactgggctggatgagagagcacagctgtgacttcctcctaactgtcagggtggggagctggttcccagaggattgtctaccctgaagtccatcaggttttctgtgcacaaggacgggtcaggaaggaaggagaggcttttccagaaacaaaaaatctgtgagggtctgacttgctcaaaccagaggaggaaacagaaacccctgcacatctttttagggggttctttgacccaggatagtcttgcttcttgaggtagatcacaggggtctgtgtacctct

SEQ ID NO: 7598 - DNA, 1400 bp, Homo sapiens
gagaggatccaaaggagcattgaggaggcccaagaggaaaaggatgtggctcaggctgggagggacttcagttagcatggtgggggagaaccagtaccacatacccagtaggtaataaggtgtccagcagaggatgaaggtcagcaagataagcagggccagtctcagggcccggagacgaacacggggacaattgtcaaaggagcgggggagggcaaattcaccagcaggggctaggaatttagaaaatatactgtaattcagacactcagcttctgatctgagtatagggtgaattgatggaggggcatagctagtgagacagagctcgcctcctacaaggaggagaatgttgcaaaccgttttccccttcccaacctgggactatatgatttcttacccccagggattatgatagaaatatgaagccaccaagtctagacttgatggtgttcaagaataaataatactgattgcctccctagtccttgtccagctaactcagctgtttataattgaagggattcaacaaaattatctctagcatcaggtgctagacatggttagaatctcaccatggtttagtgactggtagatagctattaggtaggtagataaataaatgatgctagaggcaacaggtctagggttaaggattaaggcctgggaattggagtctcaccatggctccccttccttgtctggggcctggacacactgaggacaatgcggctatagcagatggccatggcagtcagtggcagcagaaagaggcagcagaaggtgaagaggttataggtggtctcttgccattgagccttgaagctgcctttggtgacacactgagtgaaagggactgggccagctcagtggaccgtgtggaacaggaacagctggagtggagttgaggactattagaactggttcccctcaccacccaacctacccacctatgtcatactgtctcctcccaattcatccttaattccaagtgaagcagcacagtgctgagaaacagtttcatccatggtgccatgttaaagaagttggaaatatatcttgaaaatcctatcttccttttaggcttgaatatgatgctgaacagtaagtttgttaaatcttggaacttaaaacaatcctgctttctcaagtactattctaacattgcgctttataagggatgatatttctaccacctcactcatatttttagctgaaatgattttcctggtatgtctgttattttgtggaaaaagaaatattgtgtaaaatgggtgctgccaaaattccaggccattttgcagggactctgaagtgacctttagtagtaatagtcttatgtgcagtaactataatggtaaagaatgttaaataataaaatttaacattttccaaatgct

SEQ ID NO: 7599 - DNA, 600 bp, Homo sapiens
agcgacataatgatgagggacaacctctttgaaattgtaacaacgtctcgaactttctatgtgcaggctgatagccctgaagagatgcacagttggattaaagcagtctctggcgccattgtagcacagcggggtcccggcagatctgcgtcttctgagcatccccccggtccttcagaatccaaacacgctttccgtcctaccaacgcagccgccgccacctcacattccacagcctctcgcagcaactctttggtctcaacctttaccatggagaagcgaggattttacgagtctcttgccaaggtcaagccagggaacttcaaggtccagactgtctctccaagagaaccagcttccaaagtgactgaacaagctctgttaagacctcaaagtaaaaatggccctcaggaaaaagattgtgacctagtagacttggacgatgcgagccttccggtcagtgacgtgtgaggcagaagcgcacggagcctgcctgcctctgccgtcctcagttacctttcatgaggcttctagccaaagatgataaagggggaaatggtttttagtgcgtatattatactgcctcttaggtgtactctt

SEQ ID NO: 7600 - DNA, 600 bp, Homo sapiens
ccccgtattcctgaggaaggccttccgctctggggagatggtcaccgtgggcaagagctcggacggcactcctgaccgcaggtggtgcttcagggtgaatgaggtgaactggtctcactggaaccagaacttgggcatcatcaacgaggacccgggcaagaatgagacctaccagtattatggcttctcgcataccgtgggccgcctccgcagggatcgctggtcctcggtggtaccccgcgtggtggaactgaacaagaactcgaacccggacgaggtggtggtgcctctggacagcatggggaacccccgctgcgatggccaccagcagggttacccccgcaagtggaggactgatgacgccccgctctagggactgcagcccagccccagcttctctgcccactcatttctagtccagccgcatttcagcagtgccttctggggtgtccccccacaccctgctttggccccagaggcgagggaccagtggaggtgccagggaggccccaggaccctgtggtcccctggctctgcctccccaccctggggtgggggctcccggccacctgtcttgctcctatggagtcacataagcca

SEQ ID NO: 7601 - DNA, 1400 bp, Homo sapiens
ttctcagagtcctatggaggaaaaatggcagctggcattggtctagagctttataaggccattcagcgagggaccatcaagtgcaactttgcgggggttgccttgggtgattcctggatctcccccgtggattcggtgctctcctggggaccttacctgtacagcatgtctcttctcgaagacaaaggtctggcagaggtgtctaaggttgcagagcaagtactgaatgccgtaaataaggggctctacagagaggccacagagctgtgggggaaagcagaaatgatcattgaacagaacacagatggggtgaacttctataacatcttaactaaaagcactcccacgtctacaatggagtcgagtctagaattcacacagagccacctagtttgtctttgtcagcgccacgtgagacacctacaacgagatgccttaagccagctcatgaatggccccatcagaaagaagctcaaaattattcctgaggatcaatcctggggaggccaggctaccaacgtctttgtgaacatggaggaggacttcatgaagccagtcattagcattgtggacgagttgctggaggcagggatcaacgtgacggtgtataatggacagctggatctcatcgtagataccatgggtcaggaggcctgggtgcggaaactgaagtggccagaactgcctaaattcagtcagctgaagtggaaggccctgtacagtgaccctaaatctttggaaacatctgcttttgtcaagtcctacaagaaccttgctttctactggattctgaaagctggtcatatggttccttctgaccaaggggacatggctctgaagatgatgagactggtgactcagcaagaataggatggatggggctggagatgagctggtttggccttggggcacagagctgagctgaggccgctgaagctgtaggaagcgccattcttccctgtatctaactggggctgtgatcaagaaggttctgaccagcttctgcagaggataaaatcattgtctctggaggcaatttggaaattatttctgcttcttaaaaaaacctaagattttttaaaaaattgatttgttttgatcaaaataaaggatgataatagatattattttttcttatgacagaagcaaatgatgtgatttatagaaaaactgggaaatacaggtacccaaagagtaaatcaacatctgtatacccccttcccaggggtaagcactgttaccaatttagcatatgtccttgcagaatttttttttctatatatacatatatattttttaccaaaatgaatcattactctatgttgttttactatttgtttgacatatcagtatatctgaaacaccttttcatgtcaataaatgttcttctctaacattaa

SEQ ID NO: 7602 - DNA, 600 bp, Homo sapiens
tccggaagaagatggtgtgggaaatccttcatcagcagttgctgtgagaaaactttgcctggtccctctagctgctggtggttctttcacagacatttccatatacctcatgcattgtgggttaaaaagtccctgcatcacttctgttctcacaggtactgagctgtcaaaagtgcatgaaggcctctcactgtactctagtcctgacttggggtgcagagggctgcttgcaatcctgtttgtaaggctgtgcctgctcagagctttggactgttcaacccacacaagaacaaacgctaactaatattttttttaagagattcttttccctatgaatgtgggaaatgcaggatttattctgtgaattgttgtttctgtgtgttgtccagcgtattcattcactcactcgttttgcaaacataatgggcagtgggcatttactgctgctctttaacagttagctctaaattacttgttttgaactatttatttctgaaaggacatgttactcaagctgcatccctgtgagaagcaggaggggaattctcactggggcgaaggagtggactggagcgtaactgccacttaagcggcggttgg

SEQ ID NO: 7603 - DNA, 600 bp, Homo sapiens
gtgagaagtgcagtaccagcatcgcgaaccaggctgtgcgcatccaggagggccggtaccgccaccccggctgctacacctgtgccgactgtgggctgaacctgaagatgcgcgggcacttctgggtgggtgacgagctgtactgtgagaagcatgcccgccagcgctactccgcacctgccaccctcagctctcgggcctgagcccgccatgccctcagcctgcctcactgctgggccagggtcatgcctatataagttggcatggcagggacaatggtgggcagttgctcttacatgagctaagtttggagacctgaggcccctttgtcctcgctgggtgggccaaggtctgggacctgtcttggactgtgggagactcaccctcaccttgccaggcctctcccctgcaggactggcattgcactagtctgaggtggccactgcctttgatcaacctttgtgtgcgagggtctaagtagggtcgaacacagaagtgggaaggagaggggtgggccaggggctaatggtgtcactgtgtaaagtttttgacatactagctctataaatatatgaatatggacaaaaaaaaaaaaaaaaa

SEQ ID NO: 7604 - DNA, 600 bp, Homo sapiens
agacctgctcagtgccatgttcgacttcagcgagaagctcaactccctggcgcttaccgaggaggagctgggcctcttcaccgcggtggtgcttgtctctgcagaccgctcgggcatggagaattccgcttcggtggagcagctccaggagacgctgctgcgggctcttcgggctctggtgctgaagaaccggcccttggagacttcccgcttcaccaagctgctgctcaagctgccggacctgcggaccctgaacaacatgcattccgagaagctgctgtccttccgggtggacgcccagtgacccgcccggccggccttctgccgctgcccccttgtacagaatcgaactctgcacttctctctcctttacgagacgaaaaggaaaagcaaaccagaatcttatttatattgttataaaatattccaagatgagcctctggccccctgagccttcttgtaaatacctgcctccctcccccatcaccgaacttcccctcctcccctatttaaaccactctgtctcccccacaaccctcccctggccctctgatttgttctgttcctgtctcaaatccaatagttcacagctgagctggg

SEQ ID NO: 7605 - DNA, 1009 bp, Homo sapiens; identical to SEQ ID NO: 2370

SEQ ID NO: 7606 - DNA, 1400 bp, Homo sapiens
tggaacgacaatgaaatgtacctgttccgatcatctgttgcatatgctatgaggcagtactttttaaaagtaaaaaatcagatgattctttttggggaggaggatgtgcgagtggctaatttgaaaccaagaatctcctttaatttctttgtcactgcacctaaaaatgtgtctgatatcattcctagaactgaagttgaaaaggccatcaggatgtcccggagccgtatcaatgatgctttccgtctgaatgacaacagcctagagtttctggggatacagccaacacttggacctcctaaccagccccctgtttccatatggctgattgtttttggagttgtgatgggagtgatagtggttggcattgtcatcctgatcttcactgggatcagagatcggaagaagaaaaataaagcaagaagtggagaaaatccttatgcctccatcgatattagcaaaggagaaaataatccaggattccaaaacactgatgatgttcagacctccttttagaaaaatctatgtttttcctcttgaggtgattttgttgtatgtaaatgttaatttcatggtatagaaaatataagatgataaagatatcattaaatgtcaaaactatgactctgttcagaaaaaaaattgtccaaagacaacatggccaaggagagagcatcttcattgacattgctttcagtatttatttctgtctctggatttgacttctgttctgtttcttaataaggattttgtattagagtatattagggaaagtgtgtatttggtctcacaggctgttcagggataatctaaatgtaaatgtctgttgaatttctgaagttgaaaacaaggatatatcattggagcaagtgttggatcttgtatggaatatggatggatcacttgtaaggacagtgcctgggaactggtgtagctgcaaggattgagaatggcatgcattagctcactttcatttaatccattgtcaaggatgacatgctttcttcacagtaactcagttcaagtactatggtgatttgcctacagtgatgtttggaatcgatcatgctttcttcaaggtgacaggtctaaagagagaagaatccagggaacaggtagaggacattgctttttcacttccaaggtgcttgatcaacatctccctgacaacacaaaactagagccaggggcctccgtgaactcccagagcatgcctgatagaaactcatttctactgttctctaactgtggagtgaatggaaattccaactgtatgttcaccctctgaagtgggtacccagtctcttaaatcttttgtatttgctcacagtgtttgagcagtgctgagcacaaagcagacactcaataaatgctagatttacacactcaaaaaaaaaaaa

SEQ ID NO: 7607 - DNA, 600 bp, Homo sapiens
atacttagcctgtattgggaaggtgcgtgaaactcaaagttgctaacatcatcttccttattttcagccagtgctgttactgcatttagcatggctctgacgaggcagtggagagttcctgacagcatagcatactgccttctgacagactgggttaagctaccaaaaatgacaaccagggattcaaaaaaaatttttggtcattaaatcgaatgtatattattactttttaattttctaagtatttatcacaggactttaacaccatatatttccctcccagtttttctccccttttggtttaatagttaaaacatttttcataattagtgctgtacatttgattgcaaacaaattggtgatacttctaaactataactataaatctctagaattctgtgaatttcaacattatttgaagtagttcttcagttatatttacatgtgttgtaaatatgtaaatatacttttagcttaggaagtcttccagaatacaaactactcccagttagatatcagtgagtttgaataactgaagaaatgttgacaatgttaagtgtttgattttatataacaagcttattaaatatatttttgtgg

SEQ ID NO: 7608 - DNA, 1400 bp, Homo sapiens
tggccattgcagccctggacatggcggaatgtaatccgtggccccgaattgtactgtcagagcacagcagccttactaatctacgggcctggatgctgaaacatgtacgcaacagccgaggcctaagcagcactctgaatgtgggtgtcaacaagaagaggggccttcgaactccacccaaaagtcacaatgggttgcctgtctcctgctccgaaaacaccttgagtcgggcacgaagttttagcaccggcacaagtgccggtggtagcagcagcagccaacaaaattctccacagatgaagaattcccccagctttccttttcatggcagtcggcctgcagggctgccaggcctgggctctagtacccaaaaggtcacccaccgggtgctgggccccgtcagagagccccgaagccaggacaggagacggcagcagcagcccctgaaccatcgtcctgcaggcagcctcgctccatccccagctcctactagttctggcccagcctcctcacacaagctgggctcctgtctactgcctgattcattcaacataccagggagcagttgctcactcttgtcctctggagacaaaccagaggctgtcatggtaatcgggaaaggtctgctagggactggagctcggatgccctgcatcaagactcgattgcagacctgtccgaggagagtttccgccaggaggggtcccggattccccaggctaggcccaggttgggccggggctcaccgccgactcgcagagggatgaaaggctcttcaggccccacatcccctaccccccggaccagggagagcagtgagctggagctgggatcctgctctgctacaccagggctgcctcaggccaggcccccacggccccgctctgcccctgccttttctcctatatcctgtagtctatctgactccccatcctggaattgttacagcaggggtcccttgggccaacctgaggtttgttttgtccctaaatctcccccactgactgtttctccccgggtctgataatgcctttatgttcaatcccaggatatagccccaagatggggtaacagtgggaaatatgctagttcccctccaggccgctgattccatgtgacagccgttaagtccttggaatgccagccacgctgtccaaggcattacagagtatcaccttgagacagaacaaaacagggacctgccaccccttccctccctccgcagcacaagattttgggaccacaaaaaaaagtctatatttttatattggggggagggagtagaaaagcaagcccctatactgggccctattcagtggcagcttcttgttccataggattaaggaagactctgaggaaataaaagttgtttggaaaaatccaaaaaaaaaaaaaaaaaa

SEQ ID NO: 7609 - DNA, 600 bp, Homo sapiens
acgtgtgccgtgaggctcatagttgatgagggactttccctgctccaccgtcactcccccaactctgcccgcctctgtccccgcctcagtccccgcctccatccccgcctctgtcccctggccttggcggctatttttgccacctgccttgggtgcccaggagtcccctactgctgtgggctggggttgggggcacagcagccccaagcctgagaggctggagcccatggctagtggctcatccccactgcattctccccctgacacagagaaggggccttggtatttatatttaagaaatgaagataatattaataatgatggaaggaagactgggttgcagggactgtggtctctcctggggcccgggacccgcctggtctttcagccatgctgatgaccacaccccgtccaggccagacaccaccccccaccccactgtcgtggtggccccagatctctgtaattttatgtagagtttgagctgaagccccgtatatttaatttattttgttaaacatgaaagtgcatcctttccctccaaaaaaaaaaaaaaaaaaaaaaaaaaaaaaaaaaaaaaaaaaaaaaaaaaaaaaaaaa

SEQ ID NO: 7610 - DNA, 1400 bp, Homo sapiens
agctcccgtgctgagcgtgctgactgaatgtgcccggatgcaccgcccagccaggaagttcctgaaggcccaggtgctgccccctctgcgggatgtgaggacacggcctgaggttggggagatgctgcggaacaagcttgtccgcctcatgacacacctggacacagatgtgaagagggtggctgccgagttcttgtttgtcctgtgctctgagagtgtgccccgattcatcaagtacacaggctatgggaatgctgctggccttctggctgccaggggcctcatggcaggaggccggcccgagggccagtactcagaggatgaggacacagacacagatgagtacaaggaagccaaagccagcataaaccctgtgaccgggagggtggaggagaagccgcctaaccctatggagggcatgacagaggagcagaaggagcacgaggccatgaagctggtgaccatgtttgacaagctctccaggaacagagtcatccagccaatggggatgagtccccggggtcatcttacgtccctgcaggatgccatgtgcgagactatggagcagcagctctcctcggaccctgactcggaccctgactgaggatggcagctcttctgctcccccatcaggactggtgctgcttccagagacttccttggggttgcaacctcgggaagccacatcccactggatccacacccgcccccacttctccatcttagaaaccccttctcttgactcccgttctgttcatgatttgcctctggtccagtttctcatctctggactgcaacggtcttcttgtgctagaactcaggctcagcctcgaattccacagacgaagtactttcttttgtctgcgccaagaggaatgtgttcagaagctgctgcctgagggcagggcctacctgggcacacagaagagcatatgggagggcaggggtttgggtgtgggtgcacacaaagcaagcaccatctgggattggcacactggcagagccagtgtgttggggtatgtgctgcacttcccagggagaaaacctgtcagaactttccatacgagtatatcagaacacacccttccaaggtatgtatgctctgttgttcctgtcctgtcttcactgagcgcagggctggaggcctcttagacattctccttggtcctcgttcagctgcccactgtagtatccacagtgcccgagttctcgctggttttggcaattaaacctccttcctactggtttagactacacttacaacaaggaaaatgcccctcgtgtgaccatagattgagatttataccacataccacacatagccacagaaacatcatcttgaaataaagaagagttttggacaaaaaaaaaaaaaaaaaaaaaaaaaaaaaaaaaaaaaa

SEQ ID NO: 7611 - DNA, 600 bp, Homo sapiens
gtgattcacagcactcatttcccttttcaggtgatgagacaaaccatgcttctgccacatcaacacaggactttctggatcaagtcacttctcagaagaaagctgaggcccagcctgtccaccaagcttaccaaatgagctcctttgaacagcccttccgtgctccctatcatggatcaagagctggaatagctactcaatttagcactgccaatggacaggtgaaccttcggggaccagggacaagtgctgaattttcagaatttcccttggtgaatgtaaatgataatagagctgggatgacatcttcacctgatgccacaactggccagacttttggctaaaaaaaaaaaaaaagtgaaataatactggcactttagaacagattaatcaagagtggggttactatgtgtaaatggagtgctgtacagatttaagagcaatgcgtaataacaagttaagctgatatacgatgataataactgcatttcgtttggttagtcagcattctttgaactgccttacatgttgtcacctttatagaagcaatgcattacttgttttagatcagaaacttgctattccacccacaccaagtaa

SEQ ID NO: 7612 - DNA, 600 bp, Homo sapiens
tacacaaggctccctctgtttcgggactggatcaaagagaacactggggtataggggccggggccacccaaatgtgtacacctgcggggccacccatcgtccaccccagtgtgcacgcctgcaggctggagactggaccgctgactgcaccagcgcccccagaacatacactgtgaactcaatctccagggctccaaatctgcctagaaaacctctcgcttcctcagcctccaaagtggagctgggaggtagaaggggaggacactggtggttctactgacccaactgggggcaaaggtttgaagacacagcctcccccgccagccccaagctgggccgaggcgcgtttgtgtatatctgcctcccctgtctgtaaggagcagcgggaacggagcttcggagcctcctcagtgaaggtggtggggctgccggatctgggctgtggggcccttgggccacgctcttgaggaagcccaggctcggaggaccctggaaaacagacgggtctgagactgaaaatggtttaccagctcccaggtgacttcagtgtgtgtattgtgtaaatgagtaaaacattttatttctttttaaaaaaaaaaa

SEQ ID NO: 7613 - DNA, 600 bp, Homo sapiens
caagtgactctgaccagcaggcttaccttgttcaaagaggagctgaggacagggactggcggcaacagcggaatattccgattcattcctgccccaagtgtggagaggttctgcctgacatagacacgttacagattcacgtgatggattgcatcatttaagtgttgatgtatcacctccccaaaactgttggtaaatgtcagattttttcctccaagagttgtgcttttgtgttatttgttttcactcaaatattttgcctcattattcttgttttaaaagaaagaaaacaggccgggcacagtggctcatgcctgtaatcccagcactttgggaggtcgaggtgggtggatcacttggggtcagggtttgagaccagcctggccaacatggcggaaccctgtctctaccaaaattacaaaaattagccgagcatggtggcgcatgcctgtagtcgcagctactcgcgaggttgaggcaggagaattgcttgaacccaggaagtggcagttgcagtgagccgagacgacaccactgcactccagcctgggtgacagagggagactctgtctcgaaagaaaaaaaaaaaaaaaaaaaaaa

SEQ ID NO: 7614 - DNA, 600 bp, Homo sapiens
gtgtccacaggcctgatccagaatggagactggaccttccagaccctggtgatgctggaaacagttcctcggagtggagaggtttacacctgccaagtggagcatccaagcatgatgagccctctcacggtgcaatggagtgcacggtctgaatctgcacagagcaagatgctgagtggagtcgggggctttgtgctgggcctgctcttccttgggacagggctgttcatctacttcaggaatcagaaaggacactctggacttcagccaacaggactcttgagctgaagtgcagatgaccacattcaaggaagaaccttctgccccagctttgcaagatgaaaagctttcccacttggctcttattcttccacaagagctttgtcaggaccaggttgttactggttcagcaactctgcagaaaatgtcctcccttgtggcttccttagctcctgttcttggcctgaagcctcacagctttgatggcagtgcctcatcttcaacttttgtgcttccctttacctaaactgtcctgcctcccatgcatctgtaccccccttgtgccacacattgcattattaaatgtttctcaaacatgga

SEQ ID NO: 7615 - DNA, 1400 bp, Homo sapiens
aagtacatcaaagatgatgtcatcttaaatgagccctctgcagatgccccagctgctctctaccagacaattgaagaaaatattaaaatctttgaagaagaagaagttgaatttatcagtgtgcctgtcccagagtttgcagatagtgatcctgccaacattgttcatgactttaacaagaaacttacagcctatttagatcttaacctggataagtgctatgtgatccctctgaacacttccattgttatgccacccagaaacctactggagttacttattaacatcaaggctggaacctatttgcctcagtcctatctgattcatgagcacatggttattactgatcgcattgaaaacattgatcacctgggtttctttatttatcgactgtgtcatgacaaggaaacttacaaactgcaacgcagagaaactattaaaggtattcagaaacgtgaagccagcaattgtttcgcaattcggcattttgaaaacaaatttgccgtggaaactttaatttgttcttgaacagtcaagaaaaacattattgaggaaaattaatatcacagcataaccccaccctttacattttgtgcagtgattattttttaaagtcttctttcatgtaagtagcaaacagggctttactatcttttcatctcattaattcaattaaaaccattaccttaaaatttttttctttcgaagtgtggtgtcttttatatttgaattagtaactgtatgaagtcatagataatagtacatgtcaccttaggtagtaggaagaattacaatttctttaaatcatttatctggatttttatgttttattagcattttcaagaagacggattatctagagaataatcatatatatgcatacgtaaaaatggaccacagtgacttatttgtagttgttagttgccctgctacctagtttgttagtgcatttgagcacacattttaattttcctctaattaaaatgtgcagtattttcagtgtcaaatatatttaactatttagagaatgatttccacctttatgttttaatatcctaggcatctgctgtaataatattttagaaaatgtttggaatttaagaaataacttgtgttactaatttgtataacccatatctgtgcaatggaatataaatatcacaaagttgtttaactagactgcgtgttgtttttcccgtataataaaaccaaagaatagtttggttcttcaaatcttaagagaatccacataaaagaagaaactattttttaaaaattcacttctatatatacaatgagtaaaatcacagattttttctttaaataaaaataagtcattttaataactaaaccagattctttgtggatactattaaagtaacatttaagcctcaaccttg

SEQ ID NO: 7616 - DNA, 1400 bp, Homo sapiens
ccccaggagatgaggaagcccaggtggagaacctcatcaccgccaatgcaacagagccccagaaagcagagaactgaagtgcagccatcaggtggaagcctctggaacctgaggcggctgcttgaacctttggatgcaaatgtcgatgcttaagaaaaccggccacttcagcaacagccctttccccaggagaagccaagaacttgtgtgtcccccaccctatcccctctaacaccattcctccacctgatgatgcaactaacacttgcctccccactgcagcctgcggtcctgcccacctcccgtgatgtgtgtgtgtgtgtgtgtgtgtgtgactgtgtgtgtttgctaactgtggtctttgtggctacttgtttgtggatggtattgtgtttgttagtgaactgtggactcgctttcccaggcaggggctgagccacatggccatctgctcctccctgcccccgtggccctccatcaccttctgctcctaggaggctgcttgttgcccgagaccagccccctcccctgatttagggatgcgtagggtaagagcacgggcagtggtcttcagtcgtcttgggacctgggaaggtttgcagcactttgtcatcattcttcatggactcctttcactcctttaacaaaaaccttgcttccttatcccacctgatcccagtctgaaggtctcttagcaactggagatacaaagcaaggagctggtgagcccagcgtttgacgtcaggcaggctatgcccttccgtggttaatttcttcccaggggcttccacgaggagtccccatctgccccgccccttcacagagcgcccggggattccaggcccagggcttctactctgcccctggggaatgtgtcccctgcatatcttctcagcaataactccatgggctctgggaccctaccccttccaaccttccctgcttctgagacttcaatctacagcccagctcatccagatgcagactacagtccctgcaattgggtctctggcaggcaatagttgaaggactcctgttccgttggggccagcacaccgggatggatggagggagagcagaggcctttgcttctctgcctacgtccccttagatgggcagcagaggcaactcccgcatcctttgctctgcctgtcggtggtcagagcggtgagcgaggtgggttggagactcagcaggctccgtgcagcccttgggaacagtgagaggttgaaggtcataacgagagtgggaactcaacccagatcccgcccctcctgtcctctgtgttcccgcggaaaccaaccaaaccgtgcgctgtgacccattgctgttctctgtatcgtgatctatcctcaacaacaacagaaaaaaggaataaaatatcctttgtttcctagtga

SEQ ID NO: 7617 - DNA, 1400 bp, Homo sapiens
acctgtgcctctcggcgcttcctctttggggttctgttcgccatctgcttctcttgtctggcggctcacgtctttgccctcaacttcctggcccggaagaaccacgggccccggggctgggtgatcttcactgtggctctgctgctgaccctggtagaggtcatcatcaatacagagtggctgatcatcaccctggttcggggcagtggcgagggcggccctcagggcaacagcagcgcaggctgggccgtggcctccccctgtgccgtcgccaacatggactttgtcatggcactcatctacgtcatgctgctgctgctgggtgccttcctgggggcctggcccgccctgtgtggccgctacaagcgctggcgtaagcatggggtctttgtgctcctcaccacagccacctccgttgccatatgggtggtgtggatcgtcatgtatacttacggcaacaagcagcacaacagtcccacctgggatgaccccacgctggccatcgccctcgccgccaatgcctgggccttcgtcctcttctacgtcatccccgaggtctcccaggtgaccaagtccagcccagagcaaagctaccagggggacatgtaccccacccggggcgtgggctatgagaccatcctgaaagagcagaagggtcagagcatgttcgtggagaacaaggccttttccatggatgagccggttgcagctaagaggccggtgtcaccatacagcgggtacaatgggcagctgctgaccagtgtgtaccagcccactgagatggccctgatgcacaaagttccgtccgaaggagcttacgacatcatcctcccacgggccaccgccaacagccaggtgatgggcagtgccaactcgaccctgcgggctgaagacatgtactcggcccagagccaccaggcggccacaccgccgaaagacggcaagaactctcaggtctttagaaacccctacgtgtgggactgagtcagcggtggcgaggagaggcgggcggatttggggagggccctgaggacctggccccgggcaagggactctccaggctcctcctccccctggcaggccagcaacatgtgccccagatctggaagggcctccctctctgccagtgtttgggtgggtgtcatgggtgtccccacccactcctcagtgtttgtggagtcgaggagccaaccccagcctcctgccaggatcacctcggcggtcacactccagccaaatagtgttctcggggtggtggctgggcagcgcctatgtttctctggagattcctgcaacctcaagagacttcccaggcgctcaggcctggatcttgctcctctgtgaggaacaagggtgcctaataaatacatttctgctttattaaaaaaaaaaaaaaaaaa

SEQ ID NO: 7618 - DNA, 1283 bp, Homo sapiens; identical to SEQ ID NO: 2383

SEQ ID NO: 7619 - DNA, 600 bp, Homo sapiens
gaagagcaggggtggccaggagatagtgagcagctcccaggaggcatggagggatccagaacctggactgaagaaccacctagaaataactcagcagaattctgaaaatgaggtcacgctgggtaagaatgcctttttttttttttcatagtcaaagttagctatggagtttctgtagtattcactactccagacctttttcaagttgaattttttttctttttccctatgtctgttcttacgtattttttttaaacttttatttcagtagtgtttggggaacaagtagtgtttggttgcatggaaaagttcttcagtggtgatttctgagattttggtgcacccatcacccaagggtagtcttttttatccatcaagtctgtacccaatgtgtagtctttgtttttttctttttttttttttttgagactgagtctcattctatcacccaggctggagtggagtggtatgatcttgactcactgcaacatctgcctcccgggttcaagtgattctcctgcctcagcctcctgagtcgctgggattactgagattgtgccactgcactccagcctgggcgacagagtgagactccgtctc

SEQ ID NO: 7620 - DNA, 600 bp, Homo sapiens
caactttttgtgttgcatcaaacagaagattttgactgctgtgactttgtactgcatgatcaacttcaaatctgtgattgcttacaggaggaagataagctactaattgaaaatggtttttacatctggatatgaaataagtgccctgtgtagaatttttttcattcttatattttgccagatctgttatctagctgagttcatttcatctctcccttttttatatcaagtttgaatttgggataatttttctatattaggtacaatttatctaaactgaattgagaaaaaattacagtattattcctcaaaataacatcaatctatttttgtaaacctgttcatactattaaattttgccctaaaagacctcttaataatgattgttgccagtgactgatgattaattttattttacttaaaataagaaaaggagcactttaattacaactgaaaaatcagattgttttgcagtccttccttacactaatttgaactcttaaagattgctgctttttttttgacattgtcaataacgaaacctaattgtaaaacagtcaccatttactaccaataacttttagttaatgttttacaagg

SEQ ID NO: 7621 - DNA, 600 bp, Homo sapiens
ggaaatcgttttcattagatgtacatttcctggttctgacaggaaaggggctccggaaaatcataaaacaagcaggtgaacaagaccaggtgtgtcggcacctccctgctcagtgcccagcggaggtaaagaaccactcagcatggtttttgtcagttcacctcttctgtcgttgtcagaggtttcctacctgtctgatataaactttctctgggttgataatataaattcagaaacatgtaaaatgaatcatgattatattactgttatttttagacttaaaatagtaacaaaattttatttatggtggcacatttaatggctttttttttctgtgttctggaataagagaatacctagctactatttaagcatccaaaaatcatatcttgctttcatttagttgagaaaagccagcatagagaaagcaaagttttagaatattatgtgtcatactaattcagtatccagaccaaatgttggaaagtcttattttatgatttaatatcccttgttccattttacagatatgatcatgtaaaacttacctacaatattcatttcaaactgctaaattaggtaaatacagacttttagtat

SEQ ID NO: 7622 - DNA, 1400 bp, Homo sapiens
cttgcactttatgtatacttcctgatttgaaaggaggaggtttgaaaagaaaaaaatggaggtggtagatgccacagagaggcatcacggaagccttaacagcaggaaacagagaaatttgtgtcatctgaacaatttccagatgttcttaatccagggctgttggggtttctggagaattatcacaacctaatgacattaatacctctagaaagggctgctgtcatagtgaacaatttataagtgtcccatggggcagacactccttttttcccagtcctgcaacctggattttctgcctcagctccattttgctgaaaataatgactttctgaataaagatggcaacacaattttttctccattttcagttcttacctgggaacctaattccccagaagctaaaaaactagacattagttgttttggttgctttgttggaatggaatttaaatttaaatgaaaggaaaaatatatccctggtagttttgtgttaaccactgataactgtggaaagagctaggtctactgatatacaataaacatgtgtgcatcttgaacaatttgagaggggaggtggagttggaaatgtgggtgttcctgtttttttttttttttttttttttttttagttttcctttttaatgagctcaccctttaacacaaaaaaagcagggtgatgtattttaaaaaaggaagtggaaataaaaaaatctcaaagctatttgagttctcgtctgtccctagcagtctttcttcagctcacttggctctctagatccactgtggttggcagtatgaccagaatcatggaacttgctagaactgtggaagcttctactcctgcagtaagcacagatcgcactgcctcaataacttggtattgagcacgtattttgcaaaagctacttttcctagttttcagtattactttcatgttttaaaaatccctttaatttcttgcttgaaaatcccatgaacattaaagagccagaaatattttcctttgttatgtacggatatatatatatatatagtcttccaagatagaagtttactttttcctcttctggttttggaaaatttccagataagacatgtcaccattaattctcaacgactgctctattttgttgtacggtaatagttatcaccttctaaattactatgtaatttactcacttattatgtttattgtcttgtatcctttctctggagtgtaagcacaatgaagacaggaattttgtatatttttaaccaatgcaacatactctcagcacctaaaatagtgccgggaacatagtaagggctcagtaaatacttgttgaataaactcagtctcctacattagcattctaaaaaaaaaaaaaaaaaaaaaaaaaaaaaaaaaaaaaaaaaag

SEQ ID NO: 7623 - DNA, 1332 bp, Homo sapiens; identical to SEQ ID NO: 2388

SEQ ID NO: 7624 - DNA, 600 bp, Homo sapiens
gacccttgtgtataaagacgggagtcctgcaattgtactgcggactccacgagttcttttctggtgggaggactatattgccccatgccattagttgtcaaaattgataagtcacttggctctcggccttgtccagggaggttgggctaaggagagatggaaactgccctgggagaggaagggagtccagatcccatgaatagcccacacaggtaccggctctcagagggtccgtgcattcctgctctccggacccccaaagggcccagcattggtgggtgcaccagtatcttagtgaccctcggagcaaattatccacaaaggatttgcattacgtcactcgaaacgttttcatccatgcttagcatctactctgtataacgcatgagaggggaggcaaagaagaaaaggacacacggaagggcctttaaaaaagtagatatttaatatctaagcaggggaggggacaggacagaaagcctgcactgaggggtgcggtgccaacagggaaactcttcacctccctgcaaacctaccagtgaggctcccagagacgcagctgtctcagtgcccaggggcagattgggtgtgacctctcca

SEQ ID NO: 7625 - DNA, 1400 bp, Homo sapiens
atcagccccgaggactacatcactggcgccctgcagatttacacagacatcatctacatcttcacctttgtgctgcagctgatgggggatcgcaattaaggagcaagcccccattttcacccgatcctgggctctcccttccaagctagagggctgggccctatgactgtggtctgggctttaggcccctttccttccccttgagtaacatgcccagtttcctttctgtcctggagacaggtggcctctctggctatggatgtgtgggtacttggtggggacggaggagctagggactaactgttgctcttggtgggcttggcagggactaggctgaagatgtgtcttctccccgccacctactgtatgacaccacattcttcctaacagctggggttgtgaggaatatgaaaagagcctattcgatagctagaagggaatatgaaaggtagaagtgacttcaaggtcacgaggttcccctcccacctctgtcacaggcttcttgactacgtagttggagctatttcttcccccagcaaagccagagagctttgtccccggcctcctggacacataggccattatcctgtattcctttggcttggcatcttttagctcaggaaggtagaagagatctgtgcccatgggtctccttgcttcaatcccttcttgtttcagtgacatatgtattgtttatctgggttagggatgggggacagataatagaacgagcaaagtaacctatacaggccagcatggaacagcatctcccctgggcttgctcctggcttgtgacgctataagacagagcaggccacatgtggccatctgctccccattcttgaaagctgctggggcctccttgcaggcttctggatctctggtcagagtgaactcttgcttcctgtattcaggcagctcagagcagaaagtaaggggcagagtcatacgtgtggccaggaagtagccagggtgaagagagactcggtgcgggcagggagaatgcctgggggtccctcacctggctagggagataccgaagcctactgtggtactgaagacttctgggttctttccttctgctaacccagggagggtcctaagaggaaggtgacttctctctgtttgtcttaagttgcactgggggatttctgacttgaggcccatctctccagccagccactgccttctttgtaatattaagtgccttgagctggaatggggaagggggacaagggtcagtctgtcgggtgggggcagaaatcaaatcagcccaaggatatagttaggattaattacttaatagagaaatcctaactatatcacacaaagggatacaactataaatgtaataaaatttatgtctagaagttaaaacccaaaaaaaaaaaaaaaaaaaa

SEQ ID NO: 7626 - DNA, 600 bp, Homo sapiens
gcaccatgtgtttgctttgtgaaggtgaagaatatgttggtttagagaaagaaattggatgtaattttatgcaatttacttttaaagacaaacataactatttagcagagaatattttaataaatgcaaaacaacagctggactgctgtacatcaaggacagattaactggaaaacatatgttccttatgtgtgattgagagccattcagaaaagacttcctttgtgttcagcctatacttttccatatggtataccttgaaaaaaattagcacaccatggttatttttctaccttttataaaagacagagcctgtttactcatttagaagatagagaaaattggtctaaaattgaacatcctagattcacactcccaagtcacttaaggtgatttgatggtgaggaaaatgattgacaaagcccaacaatgatctcaggaattacattttccaacagaccaaaaaatgttttcatgtagcagcaatgcagatttggtgaatatttaatatatattttagtatgtatttcactttatgactgacaattaaaaaatattgtttggccaaatagtaaacacccttttgaaaccatgaaaaaa

SEQ ID NO: 7627 - DNA, 1400 bp, Homo sapiens
ctcaatccattctctgggacacatgacgcctgtcctgtcgccccagaacctgctgtcttgtgacacccaccagcagcagggctgccgcggtgggcgtctcgatggtgcctggtggttcctgcgtcgccgaggggtggtgtctgaccactgctaccccttctcgggccgtgaacgagacgaggctggccctgcgcccccctgtatgatgcacagccgagccatgggtcggggcaagcgccaggccactgcccactgccccaacagctatgttaataacaatgacatctaccaggtcactcctgtctaccgcctcggctccaacgacaaggagatcatgaaggagctgatggagaatggccctgtccaagccctcatggaggtgcatgaggacttcttcctatacaagggaggcatctacagccacacgccagtgagccttgggaggccagagagataccgccggcatgggacccactcagtcaagatcacaggatggggagaggagacgctgccagatggaaggacgctcaaatactggactgcggccaactcctggggcccagcctggggcgagaggggccacttccgcatcgtgcgcggcgtcaatgagtgcgacatcgagagcttcgtgctgggcgtctggggccgcgtgggcatggaggacatgggtcatcactgaggctgcgggcaccacgcggggtccggcctgggatccaggctaagggccggcggaagaggccccaatggggcggtgaccccagcctcgcccgacagagcccggggcgcaggcgggcgccagggcgctaatcccggcgcgggttccgctgacgcagcgccccgcctgggagccgcgggcaggcgagactggcggagcccccagacctcccagtggggacggggcagggcctggcctgggaagagcacagctgcagatcccaggcctctggcgcccccactcaagactaccaaagccaggacacctcaagtctccagccccactaccccaccccactcctgtattctttttttttttttttagacagggtcttgctccgttgcccaggttggagtgcagtggcccatcagggctcactgtaacctccgactcctgggttcaagtgaccctcccacctcagcctctcaagtagctgggactacaggtgcaccaccacacctggctaatttttgtattttttgtaaagaggggggtctcactgtgttgcccaggctggtctcgaactcctgggctcaagcggtccacctgcctccgcctcccaaagtgctgggattgcaggcatgagccactgcacccagccctgtattcttattcttcagatatttatttttcttttcactgttttaaaataaaaccaaagtattgataaaaaaaaaaaaaaaaa

SEQ ID NO: 7628 - DNA, 1400 bp, Homo sapiens
actccaggcgtttcctttcattccctcagtgcttctcttctgacctgcatgttgagttctgtattgctggggcttccaacaaaaaccagagtcactgacagagggaacagcagagaccttgttggtattcagctgtgatggatatagagaatcagaggcaccttgttttcacaactaggataaaaatatctgcagggtcctttccattcctatttagagggagtcctggctccatgaccccctcccgagtggactgtccaagcagataggctcacacgagaaacagtgaggctgaaagggggggctatggaagagcggtagggagtccacggagaagatgcagtgaatgcttgcatgcattcacacgtgtgtgtgtcccagctagttcactcctttcgccgtgcgtggtggaggctggcctctctggctgggtgcagtgaatggccagcgggtttcttttctgctgggccaaggcgctttgggggtggagggggtggtgctggtgctgcactgggctgactgcggcgctgacgcagcgtttccccccatccctgttgcctgtgtgttgtgtggatctgttcctagtataggcaacataatgagatactgtgcttcccacctccccttcagttcagagccaaaatgggtctagaatctggcactttactcatttcctttgataaattgtactatgcagagctgtcaggaaccttcagatagcagtagaggactgcagctgtctaggtctgcggccacatcttggggacacactggactgttcccatgtgcagggttcagcagttatgtgggagtgctaggggttaggcttttgagcttgaacgcctgcgtgtgaacagatgaaaaatccttcagtacccaagtcccagtctgtcctatggggagcagtttgggggcggccggcagcaggagcctgggaaagaggccctcgccaggtgatggcagggccagggtggcctggggcacccagcggaatgtgcttagtatttggtcaccagccgtcatcctgggcttttcctactgtgtcttgttacaaggcctcagcaatccacagaactctctctccttccttccacctgtcagcttctctgcttctgagataagaaccatttgtgtaacaccaacacttaacttcagaaagacatgcattatgtggtgtaatcaaacccgatgctttcagatgacctacttacatcttcaatgtggataagataaagaacaaaacacatgcatctaaactgctgggcaatccagttgacttttaaatgtaagaatggaattccaaacacttaacacattcagctatatgacagaaagtaaatctatggatatggtattttgtgaatgatcttttaaataaaagaaaaccttacgtaatattt

SEQ ID NO: 7629 - DNA, 600 bp, Homo sapiens
ccaggtactgattccactgggccaacacccaggagctcagggggcactaagatgccagccacggactcgtgccagcccagcacccaaggccagtacatggtggtcaccactgagcccctcacccaggccgtggtagacaaaactctccttctggtggtgctgttactcggggtgacccttttcatcacagtcttggttttgtttgccctgcaggcctatgagagctacaagaagaaggactacacccaggtggactacttaatcaacgggatgtatgcggactcagaaatgtgaggggggcgggggcctggcgggaggcctggccccttcctcgtcctttccttttgcctttgagaccaaaccaagtgcttccaaattcttttggtgcaattgaggagatatgccagatgcttaaacacatttaattgctgtcagattaattccatgatcactaaagagttgctgcttttttcatatttatttttgtaaatgattctgtgcccaggagcagctgggggttccacctcagggtggggcgggcaggaccccgtctccccaggtgtcggagcctgacctgaattaaagtactgactgctcgcc

SEQ ID NO: 7630 - DNA, 600 bp, Homo sapiens
ccgagccctagatgttcctggaagttggccccctttatgaaaaccacttcccacagccagtgggaactgccagaggaagatctggcgtcacatggctcccaggaaagtgctgtgccctatccccactgataccatctgattccccgatgcctgtgcctgttccacctggacggtggccccctcagcctggcagcctctggacagagaggaaggaaggattggaaaagtccccgcagcacagcgacggtgggaagatgccttacgtctgatcttgatgggggcactggcctggagcctgggcccacctgcttctggggggttggggagcaggccagatggaggtggtggtgccaggaagaaatggagcgatgactgactgtggggtgggcccaggatttccacatcttggtgaagttgcccctgggaagggcagctgggggcagtggcgccagttcccttccatggtctcccggctggcaatgtggtgaagctgagtttctgtccaatgagcaggaagattctgagacatttcgcctgagatataagttgtactgcgtatgcagtttttcctccaaaaattaaattgcttttgacaatctg

SEQ ID NO: 7631 - DNA, 1400 bp, Homo sapiens
gtctggagtagtgagcaggaccttgcaaatgacactgtgcagctccttgtcactttggtggaaagaagagaaagggcaaacttagtaattcaatgtgagaactggtggaatttagctaagcagtttgcaagccgaagcccacctcttaatttcttgtcaagtcctgtgcagaggacattgatgaaggctctagtcttaggaggttttgcacatatggacacagaaaccaaacagcagtattggacagaggttcttcagccacttcagcagcgattcttaagagtgataaaccaagaaaacttccagcagatgtgtcagcaagaggaagtcaagcaggaaatcactgccacactagaggccctgtgtggcattgctgaggctacccagattgacaacgtagcaatcctgtttaattttttaatggacttccttaccaattgcattggattgatggaagtttacaagaataccccagagactgtcaatctcattatagaagtttttgttgaagttgcacataaacagatatgctatcttggagagtccaaagctatgaacttatatgaagcctgccttactttgttgcaagtgtattctaagaataatttagggcggcaaagaatagatgttacagcagaagaagagcaataccaagacctgcttctcattatggaacttcttactaacctgctgtcaaaagaattcatagatttcagtgatacagatgaagtgtttagaggacatgagccaggtcaagcagcaaacagatctgtgtcagcagcggatgttgtgttgtatggagtaaacctaattctgcccttgatgtcacaggatctcttgaagtttccaaccctttgtaatcagtactacaaattaatcacatttatctgtgagatttttcctgaaaaaataccacagcttcctgaggatctgtttaaaagtctgatgtactccctagaattaggaatgacatcaatgagttcggaggtttgccagctttgcctggaggccttgacaccgttagctgaacagtgtgcaaaagcacaagaaacagactcaccactttttctagcaacacggcactttcttaagctggtttttgatatgctggttttgcaaaagcacaacacagagatgaccactgcggctggcgaagctttctacacgttggtgtgtttgcaccaggctgaatattctgaactggtcgaaacattactatcaagtcagcaagacccagttatttaccagagattagcagatgccttcaacaagctcactgcaagcagcactcctcctacgctggatcggaagcagaagatggccttcttaaagagtttagaagaatttatggcaaatgttggtggtctcctttgtgtaaaataaacaacagaactttaaag

SEQ ID NO: 7632 - DNA, 600 bp, Homo sapiens
  misc_feature (508)..(512): n is a, c, g, or t
  misc_feature (525)..(527): n is a, c, g, or t
  misc_feature (530)..(530): n is a, c, g, or t
  misc_feature (532)..(533): n is a, c, g, or t
  misc_feature (541)..(541): n is a, c, g, or t
  misc_feature (550)..(550): n is a, c, g, or t
  misc_feature (563)..(564): n is a, c, g, or t
  misc_feature (566)..(566): n is a, c, g, or t
  misc_feature (579)..(581): n is a, c, g, or t
tctacgacctggtcacggagaagatgttcgccgaggaggaggctgagctgacccaggagatgtccccagagaagctgcagcagtatcgccaggtacacctcctgccaggcctgtgggaacagggctggtgcgagatcacggcccacctcctggcgctgcccgagcatgatgcccgtgagaaggtgctgcagacactgggcgtcctcctgaccacctgccgggaccgctaccgtcaggacccccagctcggcaggacactggccagcctgcaggctgagtaccaggtgctggccagcctggagctgcaggatggtgaggacgagggctacttccaggagctgctgggctctgtcaacagcttgctgaaggagctgagatgaggccccacaccaggactggactgggatgccgctagtgaggctgaggggtgccagcgtgggtgggcttctcaggcaggaggacatcttggcagtgctggcttggccattaaatggaaacctgaaggccnnnnnaaaaaaaaaaaannnaanannaaaaaaanaaaaaaaanaaaaaaaaaaaannanaaaaaaaaaaaannnaaaaaaaaaaaaaaaaaaa

SEQ ID NO: 7633 - DNA, 1400 bp, Homo sapiens
gaacccgccttcaggggcgcacgcgcgctgggaccatgcgtcggtcgtcgcccccgtcgttccctcccggctgccgccagggggcggtcggaccccgcctcccgagcccggggaggggcggggaggacaaggggcgggcccgcggcctcacccggagggacggcagccccggtcgcgcgctggccccgcaggaccttccttttccaggaagagccagcttttctcggagcgcagtcctgggactctccgcagccccgccccgcctggccactgcgtctggcattcctgggtcgttagaggacaggcctgactgcgaagctgtgccttgcccctctcccacccgcagtttctcaccccgttctgctcccacaaggcccccctacagtcactgccacactggtggggacctgggacccagacccggaaccagcccagatatcacccctgaggacccatgcgccacgtcctgggtggtggaatcagtggctggagggacgacccttgctctccaggctgttaaccttttccgttgctcccccgccacccacctcctcctccccaggccacccaacttgggcacctccctgggcccagaactgccttccattcaatggggaacccttctatccccaagaaccccttccctgcttgcaccctggagagaacagcttgactcccatcaactcaacgctggtggaaagacagggaccgaaccctggctcaggcctggtcattgcctcctcagcactccctcctgggaggccttagctctagagtgaggggtgggtggaacctgggggcacctcgttcaccctgtccccactccccacagttttaggatctaaatgattgcctctggaactattcttctagactatcccacatcagaatcactgggaaatttaagtttgcagatcccacactcaccctgaatcctcactcagggtggggtcaggaatctgcattttaactagtcgcggggattgtggggggcagtagctggctgtttcgtggcatttctgtggctctgcagtgttcctccaccccaggaccaatatgttcaggccacaccgatggcctgaaccccatgggtagagtcacttaggggccacttcctaagttgctgtccagcctcagtgaccccctagtgcttcctggagctgaggctgtgggcggctgtcccagcaaccawgcgaggggttgccccagttgctcatacaaacagatcagcatgaggacagaaggcaggagactttggtcagttacctgggaattctgggctgccaggaaacgatttgggcctctgtcagtttcttttccatgtatgaggagggggaaatttgtatattagatacttattcatcccactctggacaataaaaacgaatgtacaaaaaaaa

SEQ ID NO: 7634 - DNA, 1400 bp, Homo sapiens
ctttaacttcacttcaattcaagaatcaatgaatgaaattctatttgaagaataccagtttcaagcagtattaagagtaaatgctggggctctcagtgcacataggtatttccgagataatccttccgaattatgctgtatcattgttgatagtggatattcctttacacatatagttccttattgtagaagtaaaaagaaaaaagaagcaattattcggataaatgtgggaggaaaactcttaaccaatcatctaaaggagatcatatcttacaggcagctacatgttatggatgaaacacatgtgattaatcaagtgaaagaagatgtatgctatgtgtctcaggatttttatagagacatggatattgcaaagttgaaaggagaagaaaatacagtaatgatagactatgtcttgcctgacttcagtacaattaaaaagggcttttgtaagccaagggaagagatggtgttgagtggaaaatacaaatctggggaacaaattcttcgtttggccaatgagagatttgctgttccggaaatactctttaatccttctgatataggcattcaagaaatgggaattccagaagctattgtctattcaattcaaaatctacctgaagaaatgcagccgcatttttttaagaacattgtcttgacaggaggaaattcccttttcccaggatttagggatcgggtttactcagaagttcgatgtcttactccaacagattatgatgtttctgttgtgctgcctgaaaaccctattacttatgcctgggaaggtggaaaattgatatcagagaatgatgattttgaagatatggtggtaacaagagaagattacgaagaaaatggacatagcgtctgtgaagagaaatttgatatttaagcaacatttttgaatgaaagttgtgaccataaggtttaatttcaaagttccttttaaaagaggttaaggaactgtgttaccttttgtcctaagaaaaaggcttgaatttatgtaaatactttgatcgattgctaattttcaaaggcttcttaggtaggttactacagtaaactgtaactcagtccacattttcatttaggagctagactaccataacaatgcttatgctgtttccaagggtaggttatttttcattaaaagaagaatgaatgcattttaagtttaattcttcatagctgaaagcacaaatttaacggcttcactggacagttttccttagaaggtagttttgtgtgactgtgactaaactattttattttaaaatgtcattcttatttatacattctaaagttggaaagactgatcttatatgtgtataatgtttattttgtacctagagtacatttaaaagggtggagactaagctaataaagtttttttggcc

SEQ ID NO: 7635 - DNA, 549 bp, Homo sapiens; identical to SEQ ID NO: 2400

SEQ ID NO: 7636 - DNA, 1400 bp, Homo sapiens
cctatagccaatataagcagctcaccatccaggtgctgctggacaggctcgtgttgcggagactttaccccctggccatccagatatgcgagtacttgcgccttcctgaagtacagggcgtcagcaggatcctggcccactgggcctgctacaaggtgcaacagaaggatgtctcagatgaggatgtggctcgagccattaaccagaagctgggggacacgcctggtgtctcttactccgacattgctgcacgagcctatggttgtggccgcacggagctggccatcaagctgctggagtatgagccacgctcaggggagcaggtaccccttctcctaaagatgaagaggagcaaactggcactaagcaaggccatcgagagcggggacactgacctggtgttcacggtgttgctgcacctgaagaacgagctgaaccgaggagattttttcatgacccttcggaatcagcccatggccctcagtttgtaccgacagttctgtaagcatcaggagctagagacgctgaaggacctttacaatcaggatgacaatcaccaggaattgggcagcttccacatccgagccagctatgctgcagaagagcgtattgaggggcgagtagcagctctgcagacagccgccgatgccttctacaaggccaagaatgagtttgcagccaaggctacagaggatcaaatgcggctcctacggctgcagcggcgcctagaagacgagctggggggccagttcctagacctgtctctacatgacacagttaccaccctcattcttggcggtcacaacaagcgtgcagagcagctggcacgtgacttccgcatccctgacaagaggctctggtggctgaagctgactgccctggcagatttggaagattgggaagagctagagaagttttccaagagcaagaaatcacccattggctacctgccttttgtggagatctgcatgaaacaacataacaaatacgaagccaagaagtatgcttcccgcgtgggtcccgagcagaaggtcaaggctttgcttcttgttggcgatgtggctcaggctgcagatgtggccatcgaacaccggaatgaggctgagctgagcctcgtattgtcccactgcacgggagccacagatggggccacagctgacaagattcaacgggccagggcacaagcccagaagaagtgaggagtccatcctgtacatctcaagcaaggggttcctcccctagcacctgggcttggcagaagggccatagttcatccagctcctcccctagagcaatgctgaggagcgggggcatggtagcagggctgtctggttttaaataaagttggaacacttcaaaaaaaaaaaaaaaaaaaaaaaaaaaaaaaaaaaaaaaaaaaa

SEQ ID NO: 7637 - DNA, 1400 bp, Homo sapiens
tgtcggctcggcaagtacaagggcgggacgtgtgctgtggcagccccgtttgacaccgtgcacatccccgaagccaccaagcaggtggtgaaggccttccaggagttcatccggtccactccatactcggcatacgacccagagacgtacacaggccactggaagcagctgactgtgcgcaccagccgccgccaccaggccatggccattgcctacttccacccccagaagctgagccctgaggagctggcagagctgaagacctccctagcgcagcacttcacagcagggccaggcagggccagtggagtgacctgcctctacttcgtggaggagggacagcgaaagactcctagccaggagggcctgcccctggagcatgtggctggggaccggtgcatccacgaggacctgctagggctgaccttccggatctctccacacgccttcttccaggtgaacacacccgcagccgaggtgctctacacagtcatccaggactgggcccaattggatgcggggagcatggtgctggacgtgtgctgtggcaccggcaccattggcctggccctggcccggaaggtaaagagggtcattggggtcgagctatgcccagaggctgtggaggacgcccgggtgaacgcccaggacaatgagttgagtaatgtggagttccactgcgggagggccgaggacctggtgcccaccctggtgagcagactggcctcccagcacctcgtggccatcctggacccaccccgtgctggcttgcattccaaggtgatcctggccatccggagagctaagaacctcaggcggctgctgtacgtctcatgcaacccccgggcagccatgggcaactttgtggacctctgcagagccccatctaaccgggtgaagggcattcccttccggccggtcaaggctgtggcagtggacctgttcccgcagaccccgcactgtgagatgctcatcctgtttgagagggtggagcaccccaatggcacaggggtcttggggccccacagccctccagctcaacccacaccaggacccccagataacaccctacaagaaactgggaccttcccctcatcctaggcccaggacccattatggggacaggagctgaagggctcccagggccccaggggcggggaaggcatggcttgctggccaggatattcagaggtaggcagccaaagggcacagaaccctgtgccccaccaggattggcctgctgctaggggccaggggccctgaccaggaagacaggtgggttcctgtagcctgttgcccatccccagggcctttgtggactagccaaggctgtgagggccagaataaacaactgctcaacaaaaaaaaaaaaaaaaaaaaaaaaaaaaaaaaaaaaaaaa

SEQ ID NO: 7638 - DNA, 600 bp, Homo sapiens
aagatgcgctgctttccctctcctgcctcattccttgttggcagctccagttcaggccgtggagggacgtgatgctgggctgtgtttactaaacccacgggttttcagcctcttaagcccagctccgatctccaattagttgagagcgctgggttgactaacctctggtatctgagcacagacagagggtgctgtgggtctgctgggtggcagaaatggttccttccggcttggcgttctctcctggccactcttcctgctgcctctgactactcagccttgttttcggtgtgtaggccccagctgcccactggaactgccggctaatgcttgctctcccaagatctttaactcctcctggctgcacctgggtagggatggtggcatcgatgcccctctgtctgctgaaggacctgttgctgcttctgtcttttcacccctccttggctgatgacccagagccctctgatgatggcattctcctggcaagagaaaaagacttaactagacttctgaacttgaacagtttcaggttatattttaatttttttttttttgtacaggttctgattctaatacatttcaacatgcttttgtccc

SEQ ID NO: 7639 - DNA, 1400 bp, Homo sapiens
gaacaagaagaggaggatgaggcaccattccaggagaaagattccggcagcgatgaagatttcctaatggaagatgatgacgatagtgactatggcagttcgaaaaagaaaaacaaaaagatggttaagaagtccaaacctgaatgaaaagaaaagaaaatgcccaaacccagactaaaggctacagtgacgccaagtccagtgaaaggcaaagggaaagtgggtcgccccacagcttcaaaggcatcaaaggaaaagactccttctcccaaagaagaagatgaggaaccggaaagcctgccagaaaagaaaacatctacaagccccccacccgagaaatctggggatgaagggtctgaagatgaagccccttctggggaggattaaaagtgatgatggtctggggagagattttattaaaaaaaaaaagaaaaaaaaagaaaaaagagggaggaaaaaaaaagaacctacttaagatagaacatggttttggctatggcttgactcatgggctttcagtgcttttttccatttgtcgaaagtaacatttctctctctctctcttttttttttttttttttttaaagcaaaccattgtatgtgtaagtgtttaagttacctttttgtctattggtctctttgccagccctcccctttcccaatgaaagccatgtcaaattaatcactggattgactgcttcatctttttatttttaatgaaaggtgtaccacggttgtaaagcaataagatttgagatgaacactattgaaacttcgctttttgctaaaaaatagcaagttgaatagtaatcaaaaaacatagaaagattttagttcaaaatgattgctcctttctctacctggacttttaaaaaatcaattgtcatctaatatgagtttatttgtctatagacacaagtatcaatgtctaaaaaaaatcatgactttaaacttccaccgatgaggcaggtaggagataaagatgaattctgaactgttactaaaagtactcattttttaccttgtagggagggtgggcaatggggttacccgaccttatttgagggtatgggctttcttttttatttcatcacttgttatctcaaagagactcggagccagtgatccttttatcctgctacagtctttagggagctaaaaaaaaaaaaaaagcaggggctgccaaaactcttgatttcatatttccttctctaaatatatatgtatcctgttttttggataaaattttaccaagaatccaaaaaaaaaaaaaccctagaatttaatcaacaagatcagtctacaggtcacagtggatttcttttcaaactgacaatgtttaggttttaagcaaataaagttccagttaatgtgaaactcagaaaaaaaaaaaaaaaaaa

SEQ ID NO: 7640 - DNA, 1400 bp, Homo sapiens
tagaggtgggtgagtggagggccacatggcttctgtctcccgaaaagaaggtcttgtgagcagcccagacggaggcccaagcccagggcaggaacctggagcaaggacactttggccacagcaggacaggggaaaggcagctttatttttccttagggcaactgcagcgggtgggccaggccctcatgggaagtgactgccaatcagatgcagtgggccccaggcagaggaaggccgggagaaggggagccaggaccttctcaccccactgccccttccccttttctggggagcaccgcaggctcctcacccccacttcctgtgaggctgtggcttatggtgtccaacgcagttggtcttaggcatagaagccccagaggaacacggccactgccatcatgagcagggcattgaggttgaccacacgggcccagctcgggtcctcgctgatgtcctccagccgcctggctgctgccgctgcctcctcctgggtaaggggcggaggactgcccaccccacctctgctcattccacaaaaccagagcaggcactggcggaagaggcttggtgccggggcctggggctctgagggaaattgaggccctgcagttagtttgcgggaactcagctcctccagccccacctcccagcatggtgccctaccattcatctccatggcactctctgggcacccattctgtacagggagtgaggagccttgctgctcatcagcatccaggtcctcccgttcctccttgctatgccggagactgaagaccaggcggtggagctggggagggtgggagcacgaacgaggtgggagttctgtccccccatgcctggccctaaagtctcttgcacaccagctcgtcactgcctgccctacccacctctgtccagtctacacacccagcccaggcttaactcatgccaactccaccctacatggctgccctgtgccctcgggataaaccccaagcccctgagcttgtgtttaaagccgttggccttgctcccccagctttgtcagctcaggtctgtctacacccagatggtagcgcttgtgacactggcctggcagtcctgctcacagtgttctgtgcctgtgtgctcccaccctttcctcctgctgctgcagaaacccggccatccttccacacccagatctcttgtcctgtcctcaccccaccctgccaccatcagccctgcctggagccacctgccctttggcaacaaaaccaaacctttttgtgggcgttcaagatggtattgtgcccaccagtcagatcctgtgttttgagtcccaaaggccatgccaaggattggctttgggaggctttaatcaccaacccatcaacatcaagcctcccccaggccggttcaaataaatgtatttaaat

SEQ ID NO: 7641 - DNA, 1400 bp, Homo sapiens
tcttaggccacactggtgtcacaagctcctgtcagggagctggggtttgggaatgtgctttgtgaactctgctttaaagtgaggggccgaggaaaacttagaaacaggcagagttggaagcagccaaatcacagtgggtgttgtgtgtgtgtgcgtgtgtgcatgcgtgcgtgtatgcgtgtgtgaaagcaggtggaccattccactttttagctcctattgatgcaccaaaccaagtgcctcatttctgtgccaaatgtttgccttggtcgttgtggacctccttctctaacttgcggtggcatgactgtcaggaggtgctggcattttcagcagatcctcatgtgttgaccctgatgtctttagcagaggcctctagcatctcggtttttcatccactgcaggaatgtggccacagggagcagaggtttgtactttccccaagaggtcctcatcctgagacggtctctacccatgtttaacccaaagagtgcaggccaggttccttatccttctgatgaaggatgagagagctcatttagaagtcagagcaaactagggtctcagtattgagaaacgcagcctgccagggaatcacagagacatcggggtgcccgcgatggccctcatgaagccatgcctcgacggcattcaggaagccctgcaaacgtgctttttgaactcattggccaggtgtgatttttacacaaggtaaacgtggtcaagggcatcggggaatttgctccaagcagatagctccctctgaggaaccaaaggaagcaagtttccacgatttctgaagagctggtataggaagtttctttcttccttttgtgttacatgtgcattaaacagaacaagctgtgtgtcatcacagattgtactgtgggctcagaaaccgtgagagagcccccaccgtggacaccggctctagggccacaggaaaaggaacgtttccaggcattttgtctccagggctcccgctggacaggcacgtactgccctggggagtaaatgcggagagttcacgaactgtgcccaacgcatgttatagccagggtcctactaactactcagtaaaagaacgtattgttgtattcctccagtgttaagctatagccatgttaaaagtcactgtgcatttattctcagcatcaaataccttgtaacgtcttctctgccttgttagtgcatatttttacttttctgatactgtaaagaatatatccagtatgtaaatgaatgttctataaatcttttgtatagtcattttctctgctccttaaatatcatctctattcagagtataataaaattatgaacttggtaaaaaaaaaaaaaaaaaaaaaaaaaaaaaaaaaaaaaaaaaaaaaaaaaaaaaaaaaaaaaaaaaaaaaaaa

SEQ ID NO: 7642 - DNA, 600 bp, Homo sapiens
acgccgttctcctgcctcagcctctctgagaagctgggactacaggcgcccgccaccacgcccggctaatttttttgtatttttagtagagacggggtttcactgtggtctcgatctcctgacctcgtgatccgcccgccttggcctcccaaggtgctgggattacaagcgtgagccaccgcacccggcctgaaaatattttctaaaaagataaaaaatatacataacgatgaaaaataatacaaatttaaaaaccaatacagtataacaactatttacatagtgcttacattgtattaggtgttataagcaatctagagatgatttagcaagtatacaggaggatgtgcctaggttatatgcaaatactgtgccattttatatcaggaacttgagcatctgcagatattggtatcggagggcggtcctggaaccaagcatccacggatactgaggggtgacatttcatgaagtgtagatcattgtattcagagattgtaaatgaaaaaaatatagaaactatttagttttggtagattttttttctgacaatgtgaccagactgaatttcctcataaagaaaaaatggcgtgccttgtg

SEQ ID NO: 7643 - DNA, 600 bp, Homo sapiens
ctggttttgttttatgctgaaagtagaacacaagtcacatttcagatggaggctgtaaatatctggcattttcttatattgttttatgttttcttgtttttctcttgttgtttttatcttattttctttggggtttttttgtaatgcctttgtacagctcatactttcctgctgacatatctgatcatctctttcatgcagttgccaatattcataactgaaaataatctggtttatcataagtaaaatgggaaacttgcctctgttttttgcaaggggaggtaaagagtgtttagtaattacctatcttaaatctttctgagttggtagtagattcatgttcaaggaacaggaaaaatggaaaaacataagtttaaatcagttctttttaaataactttttattcttttgtataaataaaatttcacaggcttcaaattctcatgctttacttttaaacccgagattgttttttcacttatttattcatatcatgccttatggaaatttctttttctgtattttctctctttgctggtattcacctgattaaatattgctctaaaaaacaaaaaaaaaaaaaaaaaaaaaaaaaaaaaa

SEQ ID NO: 7644 - DNA, 1400 bp, Homo sapiens
cagccggcgggcgagcaggcctgtcgttgctggtggcggcatggtcttctgtctgtcgagcgaggagccgcgccgcccgctgcgaagcgacatggtccacttccaggcctcggaagtccagcagctgctacacaacaagttcgtggtcatcttgggggactccattcagagggctgtgtacaaggacctggtgctcttgctccagaaagactcactgctcacagctgcccagctgaaagccaagtaccttgaggatgttctggaagagctgacatatggacctgccccggacctggtgatcatcaactcctgcctctgggatctctccagatatggtcgctgctcaatggagagctaccgggagaacctggagcgggtgtttgtgcgcatggaccaagtattgccagactcctgcctgctggtgtggaacatggcgatgcccctcggggaacgtatcactgggggtttcctcctgccagagctccagcccctggcaggctccctgcggcgggatgtggttgaagggaacttctacagtgctacgctggccggggaccactgctttgatgtcctagacctccactttcacttccggcatgcagtacagcaccgtcatcgggatggtgtccactgggaccagcatgcacaccgccacctctcacacctgcttctgacccatgtggctgacgcctggggcgtggagctgcccaagcgtggctatccccctgacccgtggattgaggactgggcagagatgaatcatccattccagggaagccataggcagaccccagacttcggggagcacctggccttgctcccacccccaccttcttctttgcctcctcccatgccttttccctacccgcttcctcagccctcgccacctcccctcttcccacccctgccccaggataccccttttttcccaggccagcccttcccaccccatgaattcttcaactataatccagtggaggacttctcgatgccaccccacttaggatgtggccctggagtgaactttgtgcctggccctctgccacctccaatccctggccctaatccccatggtcagcactggggcccagtggtccaccgggggatgccacgctatgttcctaacagcccctaccatgtgcggagaatgggggggccctgcaggcagcggctcagacactcagagagactgatccacacatacaaactggacagacggcctcctgcccattcggggacatggcctgggtagactggatcttgggctgggactggatgtgccaatggcccttcagggcctgcctggcacctcaggtactgggctagggtgtctgctatgcctggtattgttcttgtccattgctgtcaccaataaaggcatggaagaacagagtgacaaa

SEQ ID NO: 7645 - DNA, 600 bp, Homo sapiens
ctacattctgcaggtattggttggaagagaatctgagtacaaacaggtgtacaagggagaagaagccacattccaaatctcaggcctccagaccaacacagactacaggttccgcgtatgtgcgtgtcgtcgctgtttagacacctctcaggagctaagcggagccttcagcccctctgcggcttttgtattacaacgaagtgaggtcatgcttacaggggacatggggagcttagatgatcccaaaatgaagagcatgatgcctactgatgaacagtttgcagccatcattgtgcttggctttgcaactttgtccattttatttgcctttatattacagtacttcttaatgaagtaaacccaacaaaactagaggtatgaattaatgctacacattttaatacacacatttattcagatactcccctttttaaagcccttttgttttttgatttatatactctgttttacagatttagctagaaaaaaaatgtcagtgttttggtgcacctttttgaaatgcaaaactaggaaaaggttaaactggatttttttttttaaaaaaaaaaaaaaaaaaaaaaaaaaaaaaaaaaaaaaaaa

SEQ ID NO: 7646 - DNA, 600 bp, Homo sapiens
caccaagactaatctcagccaaacctgctgcttggtggtgccagccccttgtccaccttctcttgaggccacagaactccctggggctggggcctctttctctggcctcccctgtgcacctggggggtcctggcccctgtgatgctcccccatccccacccacttctacatccatccacaccccagggtgagctggagctccaggctggccaggctgaacctcgcacacacgcagagttctgctccctgaggggggcccgggaggggctccagcaggaggccgtgggtgccattcgggggaaagtgggggaacgacacacacttcacctgcaagggccgacaacgcaggggacaccgtgccggcttcagacactcccagcgcccactcttacaggcccaggactggagctttctctggccaagtttcaggccaatgatccccgcatggtgttgggggtgctggtgtgtcttggtgcctggacttgagtctcaccctacagatgagaggtggctgaggcaccagggctaagcaattaaaccagttaagtctcccaggaaaaaaaaaaaaaaaaaaaaaaaaaaaaaaaaaaaaaaaaaaaa

SEQ ID NO: 7647 - DNA, 600 bp, Homo sapiens
tcagtttctgataagtcatccctatttttatcttgatcaaggctttctacagttacataataaaatgaaatgctgtccaggacagttgaactgatggttttttcataactgcagtccttcaaagatgaccaccatatatagttgtgtacgtgttattccaagcctttaaatatatacataaacatattttggaatcagaatgagcagaccaaaacataaacaataaatattctcaaagagacaagggaagatgaagtagaaacaggaagtcataaatattagatacgaaaaacataatacatggctgggtgcggtggcacatgcctgtaatcccagcactttgggaagctgagatgggtggatcacctgagctcaggagttcaagagcaacctgaccaatacggtgaaagcccgtctctactaaaaatacaaaaattagcctggggtggtggcgtgcgcctgtagtcccagctacttgggaggctgagagaggagaatagcttgaacctgagaggcagaggttacagtgagctgagatcatgccactgcactccagcctgggcaacagagtgagactctgtcttaaaaaaaaaaaaaaaa

SEQ ID NO: 7648 - DNA, 600 bp, Homo sapiens
gcctggcgacagagcaagactctgtctcaaaaaaaaaaaaaaaatttagtaaaaatcaatggtaagctaaaataagtttttgtttgtttatttgtttttgagatggagtctctactaaaaatacaaaaaattagccaggcatggtgccgcataactataatcccagctacttgggaggctgaggcaggagaatcgcttgaacccgggaggcacaggttccagtgggccaaggttgtgccactgcactccagcctgggcaaaaaagcaaaactccatctcaaagagaaaaaaaaaaaagaccgggtgtggtggctcacacctgtaatcccagcactttgggaggcctaagtgggtggatcacgtgaggtcaagagttcaagaccagcctggccaatatggtgaaaccccatctctactaagaatacaaaaaattagctgagcatggtggtgggctcctgtagtcccagctacttgggaggctgaggcaggagaatcgcttgaacctgggaggcagaggttgcagtaagccaagatcgtgccattgcactccagcctgggtgacagagcgagactccatctcaaaaaaaaaaaaaaaaaaaa

SEQ ID NO: 7649 - DNA, 1400 bp, Homo sapiens
cacacagctagcagccacgtggggcacttctccagcatatgtaagtggaactcagaaggcaacattccctgaacatactcttccaccagaatctcctctacagatttttgctgccccttttaccagtggctgaatctactttctcctatggatcgcttacacctgagacgaactacagaacagcacgtaccagaggtggaagtccaagtcaaacgcagaaggactgcctcactgagcaaccaagagtgtcagttgtacccgaggcgttctcagcagcagcaagtacctgtggtggatttccaggctgaactgaggcaggcattcttagctgagacaccaagaggtggttaaagccatattggagtagcgaggaatctgattccaagcaaaaaccaggctccatctactctttgaagcttctgcccagcttgcattgtttctaggagaacccgcgtcatacctttatctatagccttcccctaggtcttcagaagcatcaagttttaactgtggacattggatttggtggaacagcaatcatgactgttggcaagagtagcaagatgctgcagcacattgactatagaatgagatgtatcctgcaagatggccgaatcttcattggcacctttaaggcttttgacaagcatatgaatttgatcctctgtgattgtgatgagttcagaaagatcaagccaaagaatgcgaagcaaccagagcgtgaagaaaagcgggttttgggtctggtgttgctgcgtggggagaacttggtatccatgactgtggaggggccaccccccaaagatactggcattgctcgggtaccacttgctggagctgctggaggccctggggttggtagggcagctggtagaggagtaccagctggtgtgccaattccccaggcccctgctggattggcaggccctgtccgaggagttgggggaccatcccagcaggtaatgactccacagggaagaggcactgtagcagctgctgctgttgctgcgactgccagtattgctggagccccaacacagtacccaccaggacggggcactccgcccccacccgtcggcagagcaaccccacctccaggcattatggctcctccacctggtatgagaccacccatgggcccaccaattgggcttccccctgctcgagggacgccaataggcatgccgcctccgggaatgagaccccctccaccaggcattagaggtccacctcccccaggaatgcgtccaccaagaccttagcatactgttgatccatctcagtcactttttcccctgcaatgcgtcttgtgaaattgtgtagagtgtttgtgagctttttgttccctcattctgcattaataatagctaataataaatgcatagagcaattaaactgtg

SEQ ID NO: 7650 - DNA, 1400 bp, Homo sapiens
caagttattttaatgctcttttctcactaataggaacttgtaattccagcagtaatttaaaggctttcagagagaccctgagtcttctcttcaggttcacagaacccgccgcctttttgggtagaagttttctactcagctagagagatctccctaagaggatctttaggcctgagttgtgaagcgcaacccccgcaaaacgcatttgccatcacagttggcacaaacgcagggtaaacgggctgtgtgagaaaacggccctgactgtaaactgctgaaggtccctgactcctaagagaaccacacccaaagtcctcactcttgcaggggtagacatttctggtttggtttgttctctagatagttacacacataaagacaccactcaaaaggaaacttgaataatttataattttgatcgagtttcttaaaagaccctggagaaagagtggcatttcttctgtttcaggttttgtctgagttcaaactagtgcctgtgttgttacggaaagcagcagtgtaccagtgtcactctggagtacagcgggagaaacacaaaatagtataactgaaaacattaacattcagacacactcccttctgccttccggcttaaagctgtggatgatccacgtttttgtttttttaatgttaaatgtgtaactcagtattactgaaaaggtacccacattttgaatagtagttatcactcttaggtcagacagccatcagaattctcccacaccaagtgcatgtcagttgtggagaaaacatagcaaaaagagccgtacgctctttacagatactaatgtcaagagttaaacctcctcaggttcaacctgtgataaaagactagtgcttcccagtacttgcatggggttcactatttatagttttcttgggagtatcacaggaaaatcacaattacaccactttagaccctatgtgtagcaggtcacaacttacccttgtgtgtttagatgtgtatgaaatacctgtatacgttagtgaaagctgtttactgtaacggggaaaaccagattctttgcatctgggccctctactgattgttaaaggagttcctgtcacctgctccccccacccccgcatgcgtctgtccacttggctaacttttaatatgtgtatttttacattatgtatattcttaactggactgtctcgtttagactgtatacatcatatctgacattattgtaactaccgtgtgatcagtaagattcctgtaagaaatactgctttttaagaaaaaaaataacatgctgaggggtgacctatatcccatgtgagtggtcactttatttataggatctttaaaacatttttaatgaactaagttgaataaaggcacaattaaaaactgtcaaaaaaaaaaaaaaaaa

SEQ ID NO: 7651 - DNA, 1400 bp, Homo sapiens
atgatgaacctggaacttctgtgaattttaccactcagtagaaaccatcatagctctgtgtagcatattcacccttcaacaggcaggaagcaagccgtacccagaccagtaggccggacggagtccaatgcaaagctgtaccacagaattcagagtccagcacatcacactgacgtataggactccttgggatacaggtttattgtagattttgaaacatgtttttacttttctattaattgtgcaattaatagtctattttctaatttaccactactcctaccctgcttcctggaacaatactgttgtgggtaggatgtgctcatcttcagacttaatacagcaataagaatgtgctagagtttacacatctgttcacttttgctccaatatgctcttttgacttaacgtcaagctttgggttgatgtgggtagggtagtgtcaaactgctttgagaggaatgggaccagttctgctgcctaagaaggtctgtctggatgtttataggcagcacctctgaagtggcctaaattcaccctgatctgatagttttcctgcttagaaagtgtgccttggccagatcagtatcccacatgggagtgttccctaggttgtagctgtgattgtttccagatgaccagattgtttttctgaaaatgagcatatttttagtcatgtcgattagctgttcttctacatcacattgttactctttctgatgatgattctagggttaacattggaaccatctcaaaataattacaaagttttagatgggtttacaatgtcttctaaacaatgtaatctaaaaataattgagtcagatgctaacgagatactgcaggcataactgctgtttttctgacaactgattgtgaaaccttaaaacctgcatacctcttcttacagtgaggagtatgcaaaatctggaaagatattctattttttttatataggtagataggatcgccatttatttcctatttagatatactgacattcatccatatgaaaatatgcaggtcattagcttactataatttacttttgacttaatggggcataaataaaactttcatagtacacatgaggtggatatttgatacacagaacatttgcggtgggctttctgtgggttagatgtaaagcccacatattttaatattcactattttaaatgagcaatgcatgaggggaatgcagtgtcagtacctggcctatttttaaactagtgtaatcaccctagtcataccattcagtatgtttgctttttaaaataagtaaccacaattaagttgttgtagcccttgcacttcaagagatctagtctttactttcagttgtctgttaggtccattctgtttactagacggatgttaataaaaactatgcgagcctg

SEQ ID NO: 7652 - DNA, 600 bp, Homo sapiens
ggaagcggaaggggaatcgcgggaagctggcccaggtcaggtccgcaaaggcttctgaagaagaggaagggcgagtaggggcacctggacgctgatggtggccaggatgctcagctggccaggagggcagcacctgctggggacggtggccctgccttcatgcccaggacaccagctgggtccagctagcagccactgggaatcagaggaatggggcagagctgggcattcaggaccttgaggacacgtgaccccacccgcccaccgccactatcaggccccgggaccgcactgacaggaaaccttccgtcgtgagggagcacttcccaggggccgcagggacgacactctccagggaggccccagcaaccacaccatcttcttgctgtgagaggtctcaccccgggctacctcctgtcactactcactgccctggggtccgtgggcaagttgcccagggtgggggtgcctagccaggtgcagtccccgccccgcctagtcctcggcgtcacgcaatgctcacctcgcctcttccccactaacatcccagactttaaaattcagtaaatcagatgtacaccgaaaaaaaaaaaaaaaaaa

SEQ ID NO: 7653 - DNA, 1400 bp, Homo sapiens
ttttgttaatagctgctatattaaaagtgaggaggccaaacgccaacaacttgggatagagaaagaagctgttcttctgaatcttaaaagtaatcaagaactatccgaacaagggacatctttttcacagacttgccttacacagtttcttgaagacgagtacccagacatgcccactgaaggcataaaaaatcttgttgactttctcactggtgaggaagtcgtgtgtcacgtggctagaaacttggctgtggagcagttaacactgagtgaagaattcccagtgcccccagctgtgttacagcagactttctttgcagttattggagccctgttacagagcagtggacctgagaggactgcacttttcatcagggacttcttaattactcaaatgactggaaaagagctctttgagatgtggaagataataaatcccatggggctattggtagaagaactgaagaaaaggaatgtttcagctcctgaatcaagacttactaggcagtctggtggcaccacagctttgcctttgtattttgttggcttatactgtgataaaaagttgattgcagaaggacctggggaaacagtattggttgcagaagaagaggctgctcgagtggcccttagaaaactttatggattcacagaaaatagacggccgtggaactattccaagcccaaagaaaccttgagagcagaaaagagcatcactgccagctagccgccatggatgcagcagcctgaaacttgagagcgaaagtgagataaatgtcaaaggtgtttcaagccagacattttcacaattgtgaagaaatagatgttttgtttctgttttttactgtgttcccaaaattaaataaatgttaaccaagtcacagtgtttttggttttgtttttctgaaatcttggtttgatcaaatctttttttttttctcttgagatggagtcttactctgtcgcccaggctggactgcagtggtgcgatctcggctcactgcaacctccacctcacaggttcaagcgattctcgtggctcagcctccctagtagctgggattacaggcacacaccaccatacctggctaatttttgtatttttggtagagatggggtttcaccaagttggctagactagtcttgaactcctgacctcaggtgatccacccgccttggcctcccaaagtgctgggattacaggtgtgagccactatacccgaccagatcaaatctttttttgacatttttgcaaaaaaattttcctaatgttcttgatttaattgtatagaatttgtataattaggtgtattttatttgcctctagctttgaggtatcttaatttatgtatcttatgtgaattttttgctgtaataccaataaagttttttttctccac

SEQ ID NO: 7654 - DNA, 1400 bp, Homo sapiens
gagtaaataattggaaaagtaatcagcatatgtgtaaagatttatacagttgaaaacttgtaatcttccccaggaggagaagaaggtttctggagcagtggactgccacaagccaccatgtaacccctctcacctgccgtgcgtactggctgtggaccagtaggactcaaggtggacgtgcgttctgccttccttgttaattttgtaataattggagaagatttatgtcagcacacacttacagagcacaaatgcagtatataggtgctggatgtatgtaaatatattcaaattatgtataaatatatattatatatttacaaggagttattttttgtattgattttaaatggatgtcccaatgcacctagaaaattggtctctctttttttaatagctatttgctaaatgctgttcttacacataatttcttaattttcaccgagcagaggtggaaaaatacttttgctttcagggaaaatggtataacgttaatttattaataaattggtaatatacaaaacaattaatcatttatagttttttttgtaatttaagtggcatttctatgcaggcagcacagcagactagttaatctattgcttggacttaactagttatcagatcctttgaaaagagaatatttacaatatatgactaatttggggaaaatgaagttttgatttatttgtgtttaaatgctgctgtcagacgattgttcttagacctcctaaatgccccatattaaaagaactcattcataggaaggtgtttcattttggtgtgcaaccctgtcattacgtcaacgcaacgtctaactggacttcccaagataaatggtaccagcgtcctcttaaaagatgccttaatccattccttgaggacagaccttagttgaaatgatagcagaatgtgcttctctctggcagctggccttctgcttctgagttgcacattaatcagattagcctgattctcttcagtgaattttgataatggcttccagactctttgcgttggagacgcctgttaggatcttcaagtcccatcatagaaaattgaaacacagagttgttctgctgatagttttggggatacgtccatctttttaagggattgctttcatctaattctggcaggacctcaccaaaagatccagcctcatacctacatcagacaaaatatcgccgttgttccttctgtactaaagtattgtgttttgctttggaaacacccactcactttgcaatagccgtgcaagatgaatgcagattacactgatcttatgtgttacaaaattggagaaagtatttaataaaacctgttaatttttatactgacaataaaaatgtttctacagatattaatgttaacaagacaaaataaatgtcacgcaactt

SEQ ID NO: 7655 - DNA, 1400 bp, Homo sapiens
agtagaagcagggagcggaagaagtctcgatccaggagtagggagcggaagaaatcgagatccagaagcagagagaggaagaaatcgagatccagaagcagggaaagaaaacggcggatcaggtctcgttcccgctcaagatcaagacacaggcataggactagaagcaggagtaggacaaggagtaggagtcgagatagaaagaagagaattgaaaagccgagaagatttagcagaagtttaagccggactccaagtccacctcccttcagaggcagaaacacagcaatggatgcacaggaagctttagctagaaggttggaaagggcaaagaaattacaagaacagcgagaaaaggaaatggttgaaaaacaaaaacaacaagaaatagctgcagctgcagctactggaggttctgttctcaatgttgctgccctgttggcatcaggaacacaagtaacacctcagatagccatggcagctcagatggcagccctgcaagctaaagctttggcagagacaggaatagctgttcctagctactataacccagccgctgttaatccaatgaaatttgctgaacaagagaaaaaaaggaaaatgctttggcagggcaagaaagaaggggacaaatcccaatctgctgaaatatgggaaaaattgaattttggaaacaaggaccaaaatgtcaaatttaggaaattgatgggtattaagagtgaagatgaagctggatgtagctcagttgatgaagaaagttacaagactctgaagcagcaggaagaagtatttcgaaatttagatgctcagtatgaaatggcaagatcacaaacccacacacaaagaggaatgggtttgggtttcacatcttcaatgcgaggaatggatgcagtttgaaaatgatcacacttgtaaagtttgggacttatagacttcttgttctgatgtcacgtccttgttcaccaaacagctagcactctagcttgcatgggtgttgcattgactttaatttattgaaaaatacaaatttttgtaaatatcagatcagtgatactggtgttagtgttgtaatcaggttaaacccacttccattaaacttgacaggactatagaaggataatattttttagttcatgaattctacttttcaaatatataaaagctgcaggtggggataaaatctcatacatggattttttcgtgtccgctgtcttgtgtacttttgtacttaaccttgtacagttattttcatctcttgaaacatgaaagaaatgttatgtagatgttctttagaagatctggccatttggtacataatccagcacagataagctgggtggtaatgataataaaaatggttttctcaaaaaaaaaaaaaaaaaaaaaaaaaaaaaaaaaaa

SEQ ID NO: 7656 - DNA, 1400 bp, Homo sapiens
tatttttccgcaaatcagtcggttgaaattcagaggagtcagaatgactcgacctgtccttcaatgttgataataaatgtctcagccaaaaaccttccttgagctgccatgcttttccccttgacctgcacctcttcccctaaaatttctgcagggaagcccctggcggaggcgccattgaaagcatggtcttgccagtggctggcaaggcggttttgttctgctcagtttctggagagggttggatgcgtcccctgccatccagccctccccgcttgaggccagcactgagtctgggacactcagcgggaagggggctggcatcgccacggacccacacattcctcacgtagcttctgctcccaggaaggtagtttaaatcctgtatatactttttagagactcttttaaactttctgaagtgctgatgtacatactttctcgtacacacttttgtgaagatttcaaggggaagggagttgtctgccattcaatgtttacatttatgttctgcaagacgctgtcctcagggaccattaggggaccattctgttcagtgcgatcctgatggtccgggagatgagggtttccggggctagtgatcgtgatcccttttatttgcaactgtaatgagaatttttcacactaacacagcgagggactcaacacgctgattctcctcctgcctctcccgtgagtctccagcctgcccagcaccagcagctgtggagcacgtggatgctgcctaccccggcgcccgcgtcttccacgggcacaggtgtgtggaggccgtggtcggaccctggtgtcctggttactgctgcccgggtgtcttttttttgagtaactgctctctgagttttgcacacgaagttgccctcatctgctggagatcgataaggaaggcacaagacgttctcctctgcccgtgaggagcttcccgcagccgcctggcccagcctgggcacgttctccgaggcatgtgtctccctgctcaccctcgtctgggcacctcagcatctgtggacttgagcgtccaaaaaccctgagtgtgattctgggcagccggcctggcttgaagtccgccatgaccctgggcacaggggaagcccagccgtgggcttaggagagagggaccagcgcccagcgttagggctggaagacggcagtgttcagaattccagccgctcatctgaacacagaaggtgtgaactgacctctaaagcagcgtgagatgggaatgatctagaaaactttggatttttgaagtaaattttaatgtttcatattaatttcttgaaaatgtattaaatgtcattgaaagccttattacgcttttcagatcctttcaataaacaagacttgtagaaaataaaaaaaaaaaaaaaaaaaaaaaaaaa

SEQ ID NO: 7657 - DNA, 600 bp, Homo sapiens
cctcagcagtcccggcctctggcagcacttgccccaaaggtgagtccacgggaagccctcaaggtgaaagctggtaccagagggctccaggggggcaggtgtagagttgagaaaacaaagcaattcatgcttcttgtggtctggactgaacttccagaacaaaagccaagggcaaaacattcatgtttcttggtgcccgcttgactgtggagttttggcttcatgtgaaaggtgattcttagaatcctgagctgtggtggcttcagtcctgcccctgcacctgacctggggagggaccctgagcaagtccctcttgagtctgtttcctcatttgtacagaggctatgatgagcagtagtaccagccccatcaggttgttgtgaagagcaaggaagtgcattagtagaagccacctggcctgcgggaggctgtgtacacttggcccctcctcgtacttcttctgtgtggctgacagtctcagtttgccagtcttgcaatcaggtcagaaagggatgagtgaagaagctggcttgacatgctgtattccacgaggcattgagaaaactatggactgtgctgctgccttaacagggaagggaa

SEQ ID NO: 7658 - DNA, 1400 bp, Homo sapiens
gatacatcaacaaatctggatattggagcccagcttatcgtggaagagtgtcccagcacttatagcctaactggcatgccagacattaaaatagaacatccactggacccaaattcagaagaagggtcagctcagggtgttgccatgggaatgaaattcatattgcctaaccgatttgatatgaatgtgtgttctcgatttgtgaagtccttaaatgaagaagatagtaaaaatattcaagatcaggttaactctgacctggaggtggcatctgtcctatttaaagctgaatgcaatatccatacatctccttctccgggaattcaagtaaggcatgtctacaccccctctacaacaaagcatttctcacccataaaacagtcaaccactttaaccaacaaacacagaggaaatgaggtctctaccacacctctgttagcaaattctttgtctgttcaccagttggctgctcagggagagatgctctatctggctactcgtatcgaacaagaaaatgttatcaatcacacggatgaagaaggatttactcctctgatgtgggctgcagcacacgggcaaatagctgtggtagagttcctacttcagaatggtgctgatccccaacttttaggaaaaggtcgagaaagtgcactgtcgttggcctgtagtaaaggctacacagatattgtcaaaatgctgcttgattgtggagttgatgtaaatgaatatgattggaatggaggaacacctctgctttatgctgtacatggaaatcatgtgaaatgtgtaaagatgctcttagaaagtggggctgatccaacaattgaaactgactctggatataattctatggatctagctgtagccctaggctatagaagtgttcaacaggttattgagtcacatttgttgaagctgcttcaaaatatcaaggagtagacacagtcatcagaaaatgtctgcccttttgtttacttcttggtccttataaatgatagttttgtttacttataaatttttacctcagttgcaatatttactggtttttagtaggttttaataaatatttctctgagtaattcactggtttataataaatgtaatactctttttataactatgttttactgtatatttaaaattataaattaatgttttcgtggcatgtaaatttttatggtacagatagttatcatcagtctttgtatcaagtgctgtaatttgacattttcagaaattattctaccctagtcatcttcactcgtgtattaagtcattcactttatatagggtttgctataaatccctagaaaaaaattgttcttattgttgaataaaaaagtgcacagtgtgattgtttacaaaatgatattataaataaataaaatacttcttctgtc

SEQ ID NO: 7659 - DNA, 1400 bp, Homo sapiens
agaccacacgtgagcctgtgctcaaagccatgtttttggctgacacccatttgcttggggaattcctaggccactggctggacaaattacgaagggaatggcagatggagagagcgttccagacagctctgtggttgctgcagccggaagtcgtcttcatcctgggggatatctttgatgaagggaagtggagcacccctgaggcctgggcggatgatgtggagcggtttcagaaaatgttcagacacccaagtcatgtacagctgaaggtagttgctggaaaccatgacattggcttccattatgagatgaacacatacaaagtagaacgctttgagaaagtgttcagctctgaaagactgttttcttggaaaggcattaactttgtgatggtcaacagcgtggcgctgaacggggatggctgtggcatctgctctgaaacagaagcagagctcattgaagtttctcacagactgaactgctcccgagaggcacgtggctccagccggtgtggacctgggcctctgctgcccacgtctgcccctgtcctcctgcagcattatcctctgtatcggagaagtgatgctaactgttctggggaagacgctgctcctgcagaggaaagggacatcccatttaaggagaactatgacgtgctttcacgggaggcatcacaaaagctgctgtggtggctccagccgcgcctggttctcagtggccacacgcacagcgcctgcgaggtgcaccacgggggccgagtccccgagctcagcgtcccatctttcagttggaggaacagaaacaaccccagtttcatcatgggtagcatcacgcccacagactacaccctctccaagtgctacctcccacgtgaggatgtggttttgatcatctactgtggagaggtgggcttccttgtggtcctcacactcactcactttgggcttctagcctcaccttttctttctggtttgaacttgctcggaaagcgtaagacaagatgaagagcaggcgccattataaatatcaaagcccaagaaatggaactttgggcagagatcatgttagaatcaagtggatgatgagaccaattacaggccgtctctctgcacagcacagaaattctcaatcactgaaatgagtaactgcaaaataaatagttgattgtactgttctcatgctataaaagtggacaggtactctacaacaaatctgttttctcatttttatcaaatatatgtatcatcaaaggttgcatctgtacagtatgtaaatgctattaatgtcgtcactcacatgcacgagagtccttgttcccccaggaagggcctggtggccccagcacacacttgggattatgtgtatacataaataaatattgggctgtttccctcttcctg

SEQ ID NO: 7660 - DNA, 1400 bp, Homo sapiens
gagaaggaacagtggtggagtctaggctgctgatcagtaagctttacctagcacctgagcacctttctcccctcccctctttcctcacccttttctagatgtaagacagaaggtaaatgtgactgggacttaaccaaggtcttggtaaagcctgcatggcaccgtaagaagctgaaaatactgtttgttcccgcaatcactgatttgaaaagttcccaacacaggcagctgctgtgtatatgggattagagccactacatagaatagtctcttacagattttcataaatactagtcacaataagggtatttttcttgggggtggagtaagggggagactgatgctagtccttgttgtattttgttgggctgtccttgtgtattttcaccccagcctgtagtcctcctcacttcaaccccagggatttgtggggagcaagggtagccaatggcagagggggttggggctgggactctggaggctcctccccttctttctcttccttctgcctcccccgtgcccccagctgctcttgtcactgtctctgatgggtatttgcctggctttgttgcttctctatctgtatttagctgcagtgatcctttagctggttggctcagaaaaaaaaaaatgtgctttaggtgccctgtaatcctgggcatcaagggaatccatccttcccctttttgatatgttctccccgtacttccagatttattgttatggctcccagtgggtattggcgattcttgtgatgcagggcctcagtcagtgtccagccatgcataagggagaggatagtgtgtacctgccctgccctctgctatgaaggtctctgccttgtggatcatgggactccccttggaggatctgtgcaaaggggggctgggcacaaaggagaatgtcctatttgggagggcaggaagcaaaggaactggacagggattggtgggcttggggaacggaagtttatcttggatacccttgaagaggctgggtctcttcacatgaagatcgaaaagggaccctgcttccaatttccctcttccattcctcgagctactccagggcttagaagaatgctcttggtctgtgggtccagtgttgtctgtcatccatttaagtgttcccactttcaagtgacaatcctctccttggccctgccatagggcagagcatgtctggcatagcagcctgacttttatgccctaatcttgagttgaggaaatatatgcacaggagtcaaagagatgtctttatatctgactgtatataaatgaagtttttttgttttttttgttttcctttttggtgcaataaagtttgttttggcagaaaaaaaaaaaaaaaaaaaaaaaaaaaaaaaaaaaaaaaaaaaaaaaaaaaaaaaaaaaaaaaaa

SEQ ID NO: 7661 - DNA, 600 bp, Homo sapiens
ggaccaacacccctccctgccaccaggcactgcctggagggcagggagtgggagccaatgaacaggcatgcaagtgagagcttcctgagctttctcctgtcggtttggtctgttttgccttcacccataagcccctcgcactctggtggcaggtgccttgtcctcagggctacagcagtagggaggtcagtgcttcgtgcctcgattgaaggtgacctctgccccagataggtggtgccagtggcttattaattccgatactagtttgctttgctgaccaaatgcctggtaccagaggatggtgaggcgaaggccaggttgggggcagtgttgtggccctggggcccagccccaaactgggggctctgtatatagctatgaagaaaacacaaagtgtataaatctgagtatatatttacatgtctttttaaaagggtcgttaccagagatttacccatcgggtaagatgctcctggtggctgggaggcatcagttgctatatattaaaaacaaaaaagaaaaaaaaggaaaatgtttttaaaaaggtcatatattttttgctacttttgctgttttatttttttaaattatgttctaaac

SEQ ID NO: 7662 - DNA, 600 bp, Homo sapiens
tgtaggctctaaattccagccatcaaatccaattcctggtggggaaaaccttctggagacccccaaccttctgataaaagagtctctacctccagggaaagccttcttaccacactggcatatcagatgaaagcattgcactgtacctctcgtaacacagcaatacagtcctcttgaggcactcaagcctgagaggaagctcaggatctgacatgttcttccttttcctcacaagtcatcatgattttttattttaaaataatctggaagtaatgggaacttagtttttcctgaactccaaccagaatccaaattggttagatgaggccaggcgcggtggctcacgcctgtaatcccagcactttgggaggccgaggtgggtggatcacctgaggtcaggagttcaagaccagcctggccaacatggtgaaaccccatctctactaaaaatacaaaaattagccaggtgtggtggcgcctggttgaggcatgagaatcgcttgaacccaggaggtggaggttgcagtgagccaagatcatgcctactgcactccagcctgggcaacaaagtgggactctgtcttaaaaaaaaaaaaaaaa

SEQ ID NO: 7663 - DNA, 417 bp, Homo sapiens; identical to SEQ ID NO: 2428

SEQ ID NO: 7664 - DNA, 1020 bp, Homo sapiens; identical to SEQ ID NO: 2429

SEQ ID NO: 7665 - DNA, 600 bp, Homo sapiens
agtttgagcagctggcccccgtgctggatggtttcagcctcatgacctacgactactctacagcgcatcagcctggccctaatgcacccctgtcctgggttcgagcctgcgtccaggtcctggacccgaagtccaagtggcgaagcaaaatcctcctggggctcaacttctatggtatggactacgcgacctccaaggatgcccgtgagcctgttgtcggggccaggtacatccagacactgaaggaccacaggccccggatggtgtgggacagccaggcctcagagcacttcttcgagtacaagaagagccgcagtgggaggcacgtcgtcttctacccaaccctgaagtccctgcaggtgcggctggagctggcccgggagctgggcgttggggtctctatctgggagctgggccagggcctggactacttctacgacctgctctaggtgggcattgcggcctccgcggtggacgtgttcttttctaagccatggagtgagtgagcaggtgtgaaatacaggcctccactccgtttgctgtgaaaaaaaaaaaaaaaaaaaaaaaaaaaaaaaaaaaaaaaaaaaaaaaaaaaaaaaa

SEQ ID NO: 7666 - DNA, 600 bp, Homo sapiens
gcttccccagtagctgggaccacaggtgcccgccaccacacccaactaatttttgtatttttagtagagacagggtttcaccatgttggccaggctgctctcaaacccctgacctcaaatgatgtgcctgcttcagcctcccacagtgctgggattacaggcatgggccaccacgcctagcctcacgctcctttctgatcttcactaagaacaaaagaagcagcaacttgcaagggcggcctttcccactggtccatctggttttctctccaggggtcttgcaaaattcctgacgagataagcagttatgtgacctcacgtgcaaagccaccaacagccactcagaaaagacgcaccagcccagaagtgcagaactgcagtcactgcacgttttcatctctagggaccagaaccaaacccaccctttctacttccaagacttattttcacatgtggggaggttaatctaggaatgactcgtttaaggcctattttcatgatttctttgtagcatttggtgcttgacgtattattgtcctttgattccaaataatatgtttccttccctcaaaaaaaaaaaaaaaaaaaaaaaaaaaaaaa

SEQ ID NO: 7667 - DNA, 1400 bp, Homo sapiens
cgagagaacgagatttaccttcctgaattaaaaaacaggtcattaagcttgggccctgacttttctttgtgagaaggtacagagatggaaaccttacaatccgagactaaaacgagggtccttccctcatggctgacagcccaggtggctacaaagaatgtggcaccaatgaaggcccccaagaggatgagaatggcagcagtgccagtggcagcagcaagactccctgcgacaaggactgtgtactgcatgaatgaggctgagatagttgatgttgctctgggaatcctgattgagagccgcaaacaggaaaaggcctgcgagcagccggccctggcgggggctgataacccagagcactcccctccctgctccgtgtcgcctcacacaagttctgggagcagcagtgaggaagaggacagtgggaaacaggcactggctccaggcctcagcccttcccagaggccggggggttccagctctgcctgtagcaggagccctgaggaggaggaggaagaggatgtgctgaaatacgtccgggagatctttttcagctagggcataaactgtgcactgaactgtctgccgagagcagctggaggacagctgagcttccactggtgctgctgggccgcccgcctgtgggaatggggctctctgtgctcctacctttgtgccttcttgggcctggcagattcacctcaggccagaagcccctggacactccgggccttggggctgccgttctgagtgtgcggaaggcaggactcaaaatgagatcccatttgactccctctgtatgtactgtgccctctcctggctcttgaggctctggagtcccaattgtctgtgttagtcagtgaccaggttccagggaaaatgatgtcatgtggtggtccaacttactggaaccaaagagacagtactttgcaaagaaaaggatcactgccaggtgcactggaattgctacagtttagtccgcatgatctctcctgaaggaggaagcctgtttcaaaaatagtttccatcatgagtctatcaatgagctcccacctctccagccagcctagaaagcaaacgagctgcccacagttctctgccctgtctgggaggttgaggccacagtgtatagactggtaagccagacaggcctcctcccgcaagctgctaccttgctttcacctgtaccttggtccccgggcagctagctataaagcaagagggacaggagcccagaagagacactgaggacaagagatcacaccagagtacatgtctctgcctctgttttcagtgtggctttggacaggaatatatgaataaatcactgccatacaggttttccaatacacaagtgctagaaaatacacacaattccccaatgaaaaaaaaaaaaaaaa

SEQ ID NO: 7668 - DNA, 1195 bp, Homo sapiens; identical to SEQ ID NO: 2433

SEQ ID NO: 7669 - DNA, 1400 bp, Homo sapiens
gctgctcgcccctcctcctgcaggcgaaagcaagaagatgacagggacggtttgctggctgaacgagagcaggaagaagccattgctcagttcccatatgtggaattcaccgggagagatagcatcacctgtctcacgtgccaggggacaggctacattccaacagagcaagtaaatgagttggtggctttgatcccacacagtgatcagagattgcgccctcagcgaactaagcaatatgtcctcctgtccatcctgctttgtctcctggcatctggtttggtggttttcttcctgtttccgcattcagtccttgtggatgatgacggcatcaaagtggtgaaagtcacatttaataagcaagactcccttgtaattctcaccatcatggccaccctgaaaatcaggaactccaacttctacacggtggcagtgaccagcctgtccagccagattcagtacatgaacacagtggtcagtacatatgtgactactaacgtctcccttattccacctcggagtgagcaactggtgaattttaccgggaaggccgagatgggaggaccgttttcctatgtgtacttcttctgcacggtacctgagatcctggtgcacaacatagtgatcttcatgcgaacttcagtgaagatttcatacattggcctcatgacccagagctccttggagacacatcactatgtggattgtggaggaaattccacagctatttaacaactgctattggttcttccacacagcgcctgtagaagagagcacagcatatgttcccaaggcctgagttctggacctacccccacgtggtgtaagcagaggaggaattggttcacttaactcccagcaaacatcctcctgccacttaggaggaaacacctccctatggtaccatttatgtttctcagaaccagcagaatcagtgcctagcctgtgcccagcaaatagttggcactcaataaagatttgcagaatttaatacagatcttttcagctgttcttagggcattataaatggaaatcataacgtggttctaggttatcaaaccatggagtgatgtggagctaggattgtgagtgacctgcaggccattatcagtgcctcatctgtgcagaagtggcagcagagagggaccatccaaatacctaagagaaaacagacctagtcaggatatgaatttgtttcagctgttcccaaaggcctgggagctttttgaaaagaaagaaaaaagtgtgttggcttttttttttttttagaaagttagaattgtttttaccaagagtctatgtggggcttgattcacccttcatccattggctggaacatggattggggatttgatagaaaaataaaccctgcttttgattcaaaaaaaaaaaaaaaaaaa

SEQ ID NO: 7670 - DNA, 1048 bp, Homo sapiens; identical to SEQ ID NO: 2435

SEQ ID NO: 7671 - DNA, 600 bp, Homo sapiens
gtaacggcaaagaaacccggaggagcagcaagagatagcatgacattctttcttcctgccaccaaccacatcccaagtgtcccctggagagcaagatagccttccactgattggctggtgtagcagtattttagccactgaacttcagtggagggtggtgagcagtgtccttatccaccctaatctcatactccctcattgtccagctgaactacctgtcccctgggagtcaggaccctctgcctgctctctttcctctttagaaatggcagttactggctgggcgcagtggctcacgcttgtaatcccagcactttgggaagccgaggtgggcggatcacctgaggtcgggagttcaagaccagcctgaccaacatggagaaaccccgtgtctactaaaaatacagaattagccaggcatggtggcgtatgcctgtaatcccagctacttaggaggctgaggcaggagaatctcttgaaaccgggaggcggaggttgaggtgagccgaaattgcaccattgcactccagcctgggcaataagagcgaaactccatctcaaaaaaaaaaaaaaaaaaaaaaaaaaaaaaaaaaaaaaaaa

SEQ ID NO: 7672 - DNA, 1400 bp, Homo sapiens
gtttgagtatatcctgtcacatgttgccaaatattttgatcaagaaatgctgaatgtccataatttgaattactccagctcaaggaccttacttttccagagattttccgtcatctttatggatgtactctttgtgtatgctgtccgtgagtgctgtaaatgcattgatggaaaaaaagtgggtaaagaacttacagaaaagccaaaatttattctgtcggtattacttctgtggaacttcgggttattaattgtggaccatattcattttcagtacaatggctttttatttggattaatgctactctccattgcacgattatttcagaaaaggcatatggaaggagcatttctctttgctgttctcctacatttcaagcatatctacctctatgtagcaccagcttatggtgtatatctgctgcgatcctactgtttcactgcaaataaaccagatgggtctattcgatggaagagtttcagctttgttcgtgttatttccctgggactggttgttttcttagtttctgctctttcattgggtcctttcctggccttgaatcagctgcctcaagtcttttcccgactctttcctttcaagaggggcctctgtcatgcatattgggctccaaacttctgggctttgtacaatgctttggacaaagtgctgtctgtcatcggtttgaaattgaaatttcttgatcccaacaatattcccaaggcctcaatgacaagtggtttggttcagcagttccaacacacagtccttccctcagtgactcccttggcaaccctcatctgcacactgattgccatattgccctctattttctgtctttggtttaaaccccaagggcccagaggctttctccgatgtctaactctttgtgccttgagctcctttatgtttgggtggcatgttcatgaaaaagccatacttctagcaattctcccaatgagccttttgtctgtgggaaaagcaggagacgcttcgatttttctgattctgaccacaacaggacattattccctctttcctctgctcttcactgcaccagaacttcccattaaaatcttactcatgttactattcaccatatatagtatttcgtcactgaagactttattcagaaaagaaaaacctctttttaattggatggaaactttctacctgcttggcctggggcctctggaagtctgctgtgaatttgtattccctttcacctcctggaaggtgaagtaccccttcatccctttgttactaacctcagtgtattgtgcagtaggcgtcacatatgcttggttcaaactgtatgtttcagtattgattgactctgctattggcaagacaaagaaacaatgaataaaggaactgcttagaaaaaaaaaaaaaaaaaaaa

SEQ ID NO: 7673 - DNA, 1400 bp, Homo sapiens
ggcgcccgggccccccagtctatccctcgctctgctagctatccctgtgcagcaccccggcctggagctcctgagaccaccgccctgcatgggggcttccagaggcgctacggtggcatcacagatcctggcacagtgcccagggttccctctcatttctctcggctgcctcttggagggtgggcagaagatgggcagtcggcatcaaggcaccctgagcccgtgcccgaagagggctcggaggatgagctaccccctcaggtgcacaaggtatagacaaggctgagcagggttcctgtggcccaggatggaggccaccgctgccctgccatcccgtctgcctgccatgggacggctcctctgagtgttccctggccccacgtgtgtggtgtttgtgtgtctgtgcctggccaagggaggtgccaacactgggcttgccacagccccaggagaggaatttggggcctaggaaccgagggcacacgggactctagcctcatccccaggacccccttggctcagagtgtggtgctagaaactggtccccagcccagccccagtactgccacctttacacctacccctgcaagtccccagagggctgcccacgatagaagctgccaagcagggagaacctgtgccaactgtggagtggggaggttgggcctggaccctcaacccctgcaaccttccctagccccctcaatagatgagcaggtcaggctgtggcccttacctcacccgcagttctcgcccagtgctgcagccggctcacctctctccgcttcttgcacatcactggcctgtgtgtgctgcttgctcctgttctgttcgcttgctcccgttccgttcggcttttgctttgcgttagggtgaagaccctagcgtccagctcccctcaacgctatattttgacactaaaaaagaaggtttctaaattgtaggagcaggatggaaatactttgctgcccttgccatcttttaggatgggcccccaggagactgaggtcttcctgggccctcattgctgcttatcgtaccccccatcacctgcacatgggacagaccgggctggagggtgaccttggctgtgtacgtcccagcaaaagagctctggcccgcatctcgctgtgccctgaagggggatgaagggcgatgcctcgcccgaggctttgggctgctgcactgcatgctgggactgctcctactctctgtcccacccctcacccagctgtggtccggctttgggagagtggtgaattgcgctgcccgaactcggagcggagcagggtagggaccgtgtacagcttgataacccttaataaaaagggagtttgaccagaaaaaaaaaaaaaaaaaaaaaaaaaaaaaaaaaaaaaaaaaaaaaaaaaaaaaaaaaa

SEQ ID NO: 7674 - DNA, 1400 bp, Homo sapiens
gggcccaactcgaggccaaggtgcgagggctggaacgccaggtggaggagctgcgctggcgccagaggcgagcggccaagggggcccgcagtgtggaggaggagtgagccggatgccccacacaccgccagtgtcataccaaagagctgagctgcttcggggccatgcagccctcctgccagccccctgcccttttcttgccctgtctctgaaccttcagaacattgatccttgccgcagccccactagccaagagaaacagagaaagaccattccccctgcctgtccttgcggccctgtcttctgaggttctctgtctggggttggctctcttaaccctttctctgctcccagcctgcctcaccagggaaggttggaggggcctccctctggcttctgcatctgcgccagcaaacatcactgccgttggtctctcatgacttaactggcttccctctgctgctgccttggcttcctcctaatgctcgtgctctcctgtccttctgaagttgctccttggccaaatctccagctcccttcttgttttcctcatcctcctaccctgtactcccaccaaaccatggtcctttaaggcacgctcctgtcctcctcattgcccagcagtagggaggggcaggggtaaggggacctgaggataaagggtggggaaacagggtcccctgaggcctgtgggggctgcaggggaggaggatgtaccttgtgtctctttcaagtgccttaatccgagccagcagggccttctgcttgcctgctgccatactgtatgtaggaaagtgttctgtggctgctttgtgtcaaaagagcagtcactctcagaatcttgattccccatcagccaaagcaaaagatggctgctgctttgtaggcatgtgcctgcaagtgggaccttgctgggcattatatgccctgtgggggtttcagagaccctgaaagaggagggaggacccgcctccttgtctgcacaactgcatgcacttctctccccatcgctccacaacctgaaaccgagaaggagttgctgaccagtgcccaccccggcagcccgggaggaacacaggcagctcctttcccttcacgtggtctgcagagagcagggtgagctgccagctgcccctctccaccagggtaccctgtcttggtggttaggggccacttttcctttgaggctctagtggaggtggatgtccttctctgccaggcttggcacatgatgtgaagaataaatgcccaattcttactgttcaggtttgatgtggaatcacagctgcagtgatatatattttttatcagtgcttggttggttttaaataaagtgcacgctattttattatcttgttctgaataaaatgtatttactccaaaaaaaaaaaaaaaaaaaa

SEQ ID NO: 7675 - DNA, 1400 bp, Homo sapiens
tcagctaccgccggtcccaggatcaccagagccttaccccggtcagcaagctcccggtccggagccctctcagccactactggagctgacacccagggcacctggctccccccggggtcagcatgagccgagcaagccacctccagctggggagacggtgacaggcggcttcggggcaaagaagcgaaaaggttcttcatcccaggccccagcgtccaagaagttgaataaagaggagcttcctgtaatcccgaaggggaagcccaaatcggggcgagtgtggaaggaccgctccaagaaaagattctcccagatgcttcaggacaagcccctgcgcacatcgtggcagcggaagatgaaggaacgacaggagaggaagctggccaaggactttgcccgtcacctggaggaggagaaggagaggcgccgccaggagaagaaacagcgccgggctgagaacctgaaacgccgcctggagaatgagcggaaggcagaggtcgtccaagtgatccgaaaccccgccaagctcaagcgggcaaagaagaagcagctgcgctccattgagaagcgggacaccctggccctgctgcagaagcagccgccccagcagccggcagccaagatctgagctcaggacggcccgaggccttccatggccaacgaccatgtcagacacagcacctcaggccgctgctcagatgcctctgctggagctggcactccaaacccatggctccagaacggggacccccaccccgaccggggctcctcggcctttgaaggcttccaggcaggtctgtgtgggacagaagcccagagggggcctgggacctggcagagatgggggcgggaagagattcagctcccatccctccttcctctccttctccaagtgccttcaaaccaagaactgtacattcttctggttcctcagtgagctggtgactggcaggtgactccctcagcagtgtatgccctttctcagcatcctaggtccatcccaggcctggaggctgacagttgggaatccagcttcccccacaccttcccaaaggctgctctgagcacctccacaccccactgcctctgtccccagcaaactgaatccggttcctctccacttttcaatactgaaagattaaaatggggaggttgcagggagcagagcttttccctagcacccactttcccaaaccagtctctgcagaagccccagagaatctaactcatgcctgtccagtctacagcaaaaatatttattgagtgcctgttgcatacaggcacaatcctaggcaccggcaaatacagacaatagaccaaagtccctgccctcgaggagctttcattctgatggagagaaaacataataaacaagcaaaatgcaaaaaaaaaaaaaaaaa

SEQ ID NO: 7676 - DNA, 600 bp, Homo sapiens
ggagtacagtggctcgatttcagatcactgcaacctctgccttccaggttcaagcgattctcctgcctcagcctccagagtagctggtattacaggatttcatcatgttgcccaggctcatctcgaactcgtggggtcaaggaattcgccagccttcagcctcccaacgtgctgggattacagccggtggtcatgccatgagcagccttatggagaggaccatgtggtaaggaactcagccaatagccatgtaactgagcttggaagaggatcttgctgtcctggccaacatctcactgcaattctatcagttgaattccctggatagtccaagctttgtggatccctccaccagaacaactggatcccagtacctgaatcctgaatcttagactcttatacttcaaacactgatcacgggaacagccggctcagcagctcctgagttcctaatgctcagaacatggatgagatgataaatgtttgttgtgttaagctgccaacctttggcgggggggtaattcgtcacatggcaacagctggctaatacatatatacctacatgtaaaaaaaaaaaaaaaaaaaaaaaaaaaaaaaaaa

SEQ ID NO: 7677 - DNA, 1171 bp, Homo sapiens; identical to SEQ ID NO: 2442

SEQ ID NO: 7678 - DNA, 1400 bp, Homo sapiens
ccagctcctgggcgctattgtgtcagcaggcgacacatccgtcctccacctggggcatgtggaccacctggtggcaggccaaggcaaccccgagccaactgaactcccccatccatcagaggcaaatacttccctggacaagaaagccagatgaaactgatctaccagggccgcctgctacaagacccagcccgcacactgcgttctctgaacattaccgacaactgtgtgattcactgccaccgctcacccccagggtcagctgttccaggcccctcagcctccttggccccctcggccactgagccacccagccttggtgtcaatgtgggcagcctcatggtgcctgtctttgtggtgctgttgggtgtggtctggtacttccgaatcaattaccgccaattcttcacagcacctgccactgtctccctggtgggagtcaccgtcttcttcagcttcctagtatttgggatgtatggacgataaggacataggaagaaaatgaaaggcatggtctttctcctttatggcctccccacttttcctggccagagctgggcccaagggccggggagggaggggtggaaaggatgtgatggaaatctcctccataggacacaggaggcaagtatgcggcctccccttctcatccacaggagtacagatgtccctcccgtgcgagcacaactcaggtagaaatgaggatgtcatcttccttcacttttagggtcctctgaaggagttcaaagctgctggccaagctcagtggggagcctgggctctgagattccctcccacctgtggttctgactcttcccagtgtcctgcatgtctgcccccagcacccagggctgcctgcaagggcagctcagcatggccccagcacaactccgtagggagcctggagtatccttccatttctcagccaaatactcatcttttgagactgaaatcacactggcgggaatgaagattgtgccagccttctcttatgggcacctagccgccttcaccttcttcctctaccccttagcaggaatagggtgtcctcccttctttcaaagcactttgcttgcattttattttatttttttaagagtccttcatagagctcagtcaggaaggggatggggcaccaagccaagcccccagcattgggagcggccaggccacagctgctgctcccgtagtcctcaggctgtaagcaagagacagcactggcccttggccagcgtcctaccctgcccaactccaaggactgggtatggatcgctgggccctaggctcttgcttctggggctattggagggtcagtgtctgtgactgaataaagttccattttgtggtcctgcaaaaaaaaaaataaaaaaaaaaaaaaaaaaaaaaaaaaaaaaaaaaaa

SEQ ID NO: 7679 - DNA, 600 bp, Homo sapiens
ccataatggaaaaccacatttgtgacgcaaaataccaccttggcgcctacacgggagacgacgtccgcatcgtccgtgacgacatgctgtgtgccgggaacacccggagggactcatgccagggcgactccggagggcccctggtgtgcaaggtgaatggcacctggctgcaggcgggcgtggtcagctggggcgagggctgtgcccagcccaaccggcctggcatctacacccgtgtcacctactacttggactggatccaccactatgtccccaaaaagccgtgagtcaggcctgggttggccacctgggtcactggaggaccaacccctgctgtccaaaacaccactgcttcctacccaggtggcgactgccccccacaccttccctgccccgtcctgagtgccccttcctgtcctaagccccctgctctcttctgagccccttcccctgtcctgaggacccttccccatcctgagcccccttccctgtcctaagcctgacgcctgcaccgggccctccggccctcccctgcccaggcagctggtggtgggcgctaatcctcctgagtgctggacctcattaaagtgcatggaaatc

SEQ ID NO: 7680 - DNA, 413 bp, Homo sapiens; identical to SEQ ID NO: 2445

SEQ ID NO: 7681 - DNA, 1400 bp, Homo sapiens
ggcatctcctttgtcccccacatccctgacacatacctcccggccccctgctgctcttacccccgtgcccctttcccagggggacctctcccatcctcctcgaaagaaggaccgaaagaaccgaaagttggggccaggagctggggctggctttggggtgcttcggaggcctcggccaactcctggggatggggaaaagagatctcgaatcaagaagagcaagaagcggaagttaaaaaaggcagaacggggggatagactcccacctcctgggcctccccaggcacccccagtgatacagactctgaagaggaggaggaagaggaggaagaggaagaagaagaagagatggcaacagtggtagggggtgaagccccagtccctgtgctgccaacaccccctgaggctcctaggccccctgccacagtgcaccctgaaggagtccctcctgctgacagtgaaagcaaggaggtgggcagcactgaaacaagccaagatggagatgccagctccagtgaaggcgagatgcgggtcatggacgaggacatcatggtagaatcaggtgatgactcatgggatctgatcacatgttactgtcgaaagccctttgcagggcggcccatgattgagtgcagcctgtgtgggacgtggatccacctctcctgtgctaagattaagaagaccaacgtccccgacttcttttattgccagaaatgcaaggaactgaggccagatgcccggcggttaggggggccccccaaatctggagagccctgatggcaccaactttagcctggaacttccaaatgacaacatgatttgggaactgagcctcagggtcctcagcctatcccctggagcttggatactgtctgcacttcaaggcaggaattctcaagggagacttgtttgaaaatgagtgtctcactttcccaccctatccttcctccccactctgtggacttgaaattgaatccattacggttggggatgggaggctgtctgtgtcccgacacataatctctgtctcttggacctgccaccatcactttctgggtcaggattggaattgggatggaatgggacagttgtctataaaactctagtgtaaatattagcactcccctccctcatcttttcttctatttcactccccatttattttcttctacaccggttgtatttttaattttggacttcccctattgggcatggcagctcaaaggtggagtactagagcctggccaagtgaggaaggaaagcagaaaggtgacgattctcactcacctcttttgtttttaataatatcggccgctgtttgtacagacagcctgcgtgttgtaaataaagcagggtgggctctttaaaaaaaaaaaaaaaaaaaaaaaaaaaaaaaaaaa

SEQ ID NO: 7682 - DNA, 1400 bp, Homo sapiens
ttccttgtgtctttcgctccacttttagctcatcgcaccaatattgcagacttggaaggaagcataagcttcccatttcacaaaggggaaactgaggtgcgggtgcgcgggcctggggacggccgtcccatggcttccatctgagccacctcgggaccccagcactcctggcgccctcttctcatcgcttggcctatgacaggtcaccgtgtgtaaatctttcccaataaagtgttgcacaaagaaaaaaaaaaaaaaaaaacggcagccctgggcggctgggagcacggacggggcgcccgcgcagctgcctctcgtgctcaccgcgctgtgggccgcggccgtgggcctggagctggcttacgtgctggtgctcggtcccgggccgccgccgctgggacccctggcccgggccttgcagctggcgctggccgccttccagctgctcaacctgctgggcaacgtggggctcttcctgcgctcggatcccagcatccgtggcgtgatgctggccggccgcggtctgggccggggctgggcttactgctaccaatgccaaagccaggtgccgccacgcagcggacactgctctgcctgccgcgtctgcatcctgcgtcgggaccaccactgccgcctgctgggccgctgcgtgggcttcggcaactaccggcccttcctgtgcctgctgcttcatgccgccggcgtcctgctccacgtctctgtgctgctgggccctgcactgtcggccctgctgcgagcccacacgcccctccacatggctgccctcctcctgcttccctggctcatgttgctcacaggcagagtgtctctggcacagtttgccttggccttcgtgacggacacgtgcgtggcgggtgcgctgctgtgcggggctgggctgctcttccatgggatgctgctgctgcggggccagaccacatgggagtgggctcggggccagcactcctatgacctgggtccctgccacaacctgcaggcagccctggggccccgctgggccctcgtctggctctggcccttcctggcctccccattgcctggggatgggatcaccttccagaccacagcagatgtgggacacacagcctcctgactccaggaagagccagagctgtgcagggaggaaggggtgagaggggggcccccacacctagactcagtaaggaagtcgggttggaccttaacatctgcattggacaactccaccccttccttggccttgcccctgcccgcctacactcctacgtgtccagggcttgggccgtgacttaggcagaggagtgcagaggagggtctggcaggggctgctcaggccgcctagctgcccctttgccaggttaataaagcactgacttgttaaaaaaaaaaaaaaaaaaaaa

SEQ ID NO: 7683 - DNA, 1400 bp, Homo sapiens
gctgctcagctgggacgacgtgctggccgtgcagagcctgtatgggaagcccctagggggctcagtggccgtccagctcccaggaaagctgttcactgactttgagacctgggactcctacagcccccaaggaaggcgccctgaaacgcagggccctaaatactgccactcttccttcgatgccatcactgtagacaggcaacagcaactgtacatttttaaagggagccatttctgggaggtggcagctgatggcaacgtctcagagccccgtccactgcaggaaagatgggtcgggctgccccccaacattgaggctgcggcagtgtcattgaatgatggagatttctacttcttcaaagggggtcgatgctggaggttccggggccccaagccagtgtggggtctcccacagctgtgccgggcagggggcctgccccgccatcctgacgccgccctcttcttccctcctctgcgccgcctcatcctcttcaagggtgcccgctactacgtgctggcccgagggggactgcaagtggagccctactacccccgaagtctgcaggactggggaggcatccctgaggaggtcagcggcgccctgccgaggcccgatggctccatcatcttcttccgagatgaccgctactggcgcctcgaccaggccaaactgcaggcaaccacctcgggccgctgggccaccgagctgccctggatgggctgctggcatgccaactcggggagcgccctgttctgaaggcacctcctcacctcagaaactggtggtgctctcagggcaaaatcatgttccccacccccggggcagaacccctcttagaagcctctgagtccctctgcagaagaccgggcagcaaagcctccatctggaagtctgtctgcctttgttccttgaagaatgcagcattgtctttgtctgtccccaccacatggaggtgggggtgggatcaatcttaggaaaagcaaaaaagggtcccagatcccttggccctttcctccgaggacttctatcctccccaggcctttgtttcttcggctaaaggtacagttcctttcaagaggtaacagcactgggatccaagcagggggatgaaaaactcagcagagaaattcgagaccattttgcaagactgtgcccttctcctcaggaccccctggctcagttcttgaaaaacggtgtcatatttagtcagaggccccacccccaggaagcatggatggggatgaaggcacaggcgtctccaacctcagaggccctttgtggggtcaggacacagagtgggagggagactgatgcaggcctaccagtccctggctttttgtctggggctggaataaagaggtgccttcagctggtgggccgagaggcaggaagcagcctt

SEQ ID NO: 7684 - DNA, 1400 bp, Homo sapiens
cggagacgctgcaggccaagaaccgctggatgatcaagacggccaagaagtcctttgtggtgtcggccgcctccgctacggagcgccaggaatggattagccacatcgaggagtgcgtgcggcggcaactgagggccacgggccgcccgcccagcacggagcacgcggcaccctggatccccgacaaggccacggacatctgcatgcgctgcacgcagacgcgcttctctgccctcacgaggcgccaccactgccgcaagtgcggcttcgtggtctgcgctgagtgctcgcgccagcgcttcctgctcccgcgcctgtcccccaagcccgtgcgcgtctgcagcctctgctaccgcgaactggccgcccagcagcggcaggaggaggcggaggagcagggcgcggggtccccagggcagccagcccacctggcccggcccatctgcggagcgtccagtggagatgacgatgactccgacgaggacaaggagggcagcagggacggcgactggcccagcagcgtggagttctacgcctcgggggtggcctggtctgccttccacagctgacccccggcctgcagaacatctgtccccaagccagctccactgcccaggcccccaagagggcagctccagaagctgcccagggctccgggaccccatcccatggtggcaggtgcagcggtggggagtggctctttctggactcccagtgcctttttgctggacactgtgtccttatggcttcactgcaggtaatgcctttcccttcaggaagccccagaacacccacaggtcttggtaacaaacgccaccttacactctgcaggctgcagcggcagctccagatggcctcctgagctggacgaccccaggtctccagacatctagggaccagagcaggtttgggaacacagagggaagacaggatgggagtgtagccacagaacccacctgcaccctgacaggcacaccccactgaagagcctgagtcccaggaggcctcctggaagcccaggactgcccacccaccacgctggtgcccaccgcctggccagccaagccctgccgatcagacatgtgggctccccgaagcccagccagagactgccgtgctgtgggtgccaccaggcccagggactgcagcctgagctccccgaggcccagggcagccgggtgaggactctgtcctgtgtcacctctctccaggtgtccagctgtctcatgcctttttgtcctgtcctcagctctccgtgtggtcagcgaaaccattgttttctgttaggactcagttgcaagaacagaaaccctgcccccacttaataataaaaaagaaagtttattgatgggtggttgcaaaacaaaaaaaaaaaaaaaaaaaaaaaaaaaaaaaaaaaa

SEQ ID NO: 7685 - DNA, 600 bp, Homo sapiens
gaatactaggccatatgtcatataaatattttttctggatatggagtatgttttgctatgtaataatgggaagcatatgtcattccccatatgtgttggagaatgacatttaaataaatagcaaagctgggtgtggtgttgcaccgctatactcccagctgttggggaggctgagacggaaggatcgcttcagcccgggagattgaggctgcggtgagctatgatcgcgccactgcactccaggctgggcaacggagtgagaccctgtcttgaaaataataataggctggtcacggtggctcatgcctgtggtcccagcactttgggaggctgaggtgggtggatcgcctgaggtcgggggtttgagaccggcctggccagcgtggtgaagcctcatctctgctgagaatgcagagatgtgttgggtttggtggtgcatgcctgtgatcctagctgctggggaggctgaggtaggagaattcgcttgagcctgggaggcggaggttgcagtgagccgagatcgtgccattgcactccagcctggatgacaagagtgaaactccatctcaaaaaaaaaaaaaaaaaaaaaaaaaaaaaaaa

SEQ ID NO: 7686 - DNA, 1256 bp, Homo sapiens; identical to SEQ ID NO: 2451

SEQ ID NO: 7687 - DNA, 1400 bp, Homo sapiens
atggacccctcaaagcaggcacacccaaaacacaagtctgtggctagaacctgatgtggtgtttaaaagagaagaaacactgaagatgtcctgaggagaaaagctggacatatactgggcttcacacttatcttatggcttggcagaatctttgtagtgtgtgggatctctgaaggccctatttaagtttttcttcgttactttgctgcttcatgtgtactttcctaccccaagaggaagttttctgaaataagatttaaaaacaaaacaaaaaaaacacttaatatttcagactgttacaggaaacaccctttagtctgtcagttgaattcagagcactgaaaggtgttaaattggggtatgtggtttgattgataaaaagttacctctcagtattttgtgtcactgagaagctttacaatggatgcttttgaaacaagtatcagcaaaaggatttgttttcactctgggaggagagggtggagaaagcacttgctttcatcctctggcatcggaaactcccctatgcacttgaagatggtttaaaagattaaagaaacgattaagagaaaaggttggaagctttatactaaatgggctccttcatggtgacgccccgtcaaccacaatcaagaactgaggcctgaggctggttgtacaatgcccacgcctgcctggctgctttcacctgggagtgctttcgatgtgggcacctgggcttcctagggctgcttctgagtggttctttcacgtgttgtgtccatagctttagtcttcctaaataagatccacccacacctaagtcacagaatttctaagttccccaactactctcacacccttttaaagataaagtatgttgtaaccaggatgtcttaaatgattctttgtgtaccttttctgtcatattcagaaaccgttttgtgcctgctgggagtaattcctttagcaattaagtatttggtagctgaataaggggtcagaacttctgaaaccagagatctgtaatcatctctattggcctggggtgcctgtgctataaatgagtttcttcacatgaaaaacacagccagcccaagatgacttatctgggtttaggattcaatagtattcactaactgcttattacatgagcaatttcatcaaatctccaaactcttaaaggatgctttcggaaaacacgctgtatacctagatgatgactaaatgcaaaatccttgggctttggtttttttctagtaaggattttaaataactgccgacttcaaaagtgttcttaaaacgaaagataatgttaagaaaaatttgaaagctttggaaaaccaaatttgtaatatcattgtattttttattaaaagttttgtaataaatttctaaattataaaaaaaaaaaaaaaaaa

SEQ ID NO: 7688 - DNA, 600 bp, Homo sapiens
tttacttttccgtttcattctaaaggtagttaagatgaaatttatatgaaagcatttttatcacaaaataaaaaaggtttgccaagctcagtggtgttgtattttttattttccaatactgcatccatggcctggcagtgttacctcatgatgtcataatttgctgagagagcaaattttcttttctttctgaatcccacaaagcctagcaccaaacttctttttttcttcctttaattagatcataaataaatgatcctggggaaaaagcatctgtcaaataggaaacatcacaaaactgagcactcttctgtgcactagccatagctggtgacaaacagatggttgctcagggacaaggtgccttccaatggaaatgcgaagtagttgctatagcaagaattgggaactgggatataagtcataatattaattatgctgttatgtaaatgattggtttgtaacattccttaagtgaaatttgtgtagaacttaatatacaggattataaaataatattttgtgtataaatttgttataagttcacattcatacatttatttataaagtcagtgagatatttgaacatgaaaaaaaaaa

SEQ ID NO: 7689 - DNA, 600 bp, Homo sapiens
cccacacaacttcagctggcacgtcagttgaccaggaagtcccccaggagatgcagtgctcccaaagagacctttgctcagggacgcctcccgaaggactcgggaaccgagcactcatcagggaggacagtcaagacctctgtgcccctgtcccagccttcttggcacacacagcagccggtctgctccctggaggccagcggggagcccagcacagtggacatgagcatgccagtgagggagcacaccctgctggaggggctgagcgcaccggcccccatgtcctctgcgccaggggaggctgtcctgaggagtccaggagggtgtcctgaggagtccaaggtgagagctgccagcaccggcagggtgacccccctgtcttccctcttcagcctgcctaccttcagcttactcaactggatttcctcctggtcgctggtcagcaggctggggagtgtcttacagttctcccggacggagcagcttgcagatggacaagcgggacgtggacttcctgtccagccccactcaggccgatcaggacttcaagggccagaccacagactacttataggagcatcttcaaggcggtcacagtga

SEQ ID NO: 7690 - DNA, 600 bp, Homo sapiens
tggttcatgccagtaatcccagcactttcggaggccgaggtgggaggattgcttgaggccaggagttcaagaccagcctgggcaacacagcaagatcctgtctttgtaaaaaaactaaccaaacaggaaaaactgggagattttctgcagaaattgagttccagcctctctcgaacctgggaagacctggcaggagggggctgggctctcggctacagacttctccccaccccgtaggagctgaacgccaaccatcctgacccgccagtgctcttggtctcctgagtgtacccaggtcctcccaggtgcggtgtgcaccgagcgcgcctggcctgatgccctggcctgtgagctggggactcctgggccctgtgagcccctaggcggcaggcccaggaatggctgggtaggacagggaacacctttgccccacgtctggctgtgacctcggtgaaagccgacaggagagagatgggaccctcctcctcagtagtggctgccagtccctcgttgcaggacagggtcatcataaccataaataacccttcacgtgtcaaaaaaaaaaaaaaaaaaaaaaaaaaaaaaaaaaaaaaaaaaaaa

SEQ ID NO: 7691 - DNA, 600 bp, Homo sapiens
agtaagctgagatcccaccattgcactccagcctgggcaacagagtgagactccatctcaaaaaaaaaaagagagagagatgaaaagagtaggaaaatgagaaatcaccttcgttgaatcttaaatagttacatttttttctttttaacactaaaaatacaattcaaatttattagctctactacttgaatgattttggaattttatgtcatgctaaggtatgtgttacatatggccaagtggaaaatatatctgaagaggggctttcatacaaatagactgttcataatttatgtaaattttattttaataaaatcagttttttgtttaaaaaccttgtttcactgtcacatatgaaaaaaatactgcattgatatataattatttcatgttacataataacccaaaacaaataattacttgaatatgtttgtagagatactatttaatttattcatataaatgtgcagaaagattccaaaggagaatatatatcttgtgaaaatatggagatttgaaaatttgacatgatgcaaatagactgatacataatttggaaaggttctttacatggcagaatacatgtatgaatattaaagt

SEQ ID NO: 7692 - DNA, 1400 bp, Homo sapiens
aagacaatgatgttcctggggacaggcctccaagcagcccggaggctggggctgaggacagcatagactcacccagtgcccgccccctcagcacggggtgtccagctctggatgctgccttggtccggcacctgtaccactgcagtcgcctcctgctgaaactgggcacatttgggcccctgcgctgccaggaggcatgggccctggagcggctgctgcgggaagcccgagtactggaggcagtatgcgagttcagcaggcggtgggagatcccggccagctctgcccaggaagtggtgcagttctcggcctctcggcctggcttcctgaccttctgggaccagtgcacagagagactcagctgcttcctctgcccggtggagcgggtgcttctcaccttctgcaaccagtatggtgcccgcctctccctgcgccagccaggcttgactgaggctgtgtgtgtgaagttcctggaggatgccctggggcagaagctgcccagaaggccccagccagggcctggagagcagctcacagtcttccagttctggagttttgtggaaaccttggacagccccaccatggaggcctacgtgactgagaccgctgaggaggtgctactggtgcggaatctgaactcggatgatcaggctgttgtgctgaaggccctgagattggcgcccgaggggcgtctgcgaagggacgggctgcgggccctcagctccctgctcgtccatggcaacaacaaggtcatggctgctgtcagcacccagctccggagcctgtcactgggccctaccttccgggagagggccctcctgtgcttcctggaccagctggaggatgaggacgtgcagactcgagtggctggctgcctggccctaggctgcatcaaggctcccgagggcattgagcccctggtgtacctctgccaaactgacacagaagctgtgagggaagctgcccggcaaagcctacagcagtgtggagaagagggacagtctgcccatcgacggctggaggagtccctggacgccctgccccgcatctttgggcctggcagcatggccagcacagcattctaaactattcacccatgggttcctggtgcccctttccccccactttcagggctcaccaggcactggcagggagggtaagggctggctccagatacccctcccccacagattcctagcaatgaaaatctaatatatccttctgttgcccctggggttggagagtcagtgcctgcagtcaagtgcctcccagcctcggctcagcacatcccttgccaaaatcagtgtctggggcttggccaccctgccgctgcccagccacatcccttggttttgtattttatttacagagttttacagaaaataaaaaagcaaaatgtc

SEQ ID NO: 7693 - DNA, 600 bp, Homo sapiens
aaagtcctagcttcttacagagaggggtccaaatggtgaatgctcatcctgcctggattcaaggaattagctcagagattggcccctagcttttctgcctttgtagggacagcaaaaggggaaaatttgctgcagaaaattccaaaagattgctgtagctctcacagggaagtggtaaagatcagctaaacctgggttggggtgctttctgcccagtgggtcttggcataagtagattaatcctgctcttttaagaaaaggcaacttattcaggcagtctggaaagggggttctcagaaaactcagtttctttattccttcttttctcccaactactgttactggttatagaggtctttggactctaaagaccaatgtttggccactaactggactaatatgtatctttctgtgatttcatcatagaggtctgttttgtgagggtttggggtgcagaaaactttgattaaatcttaatgggaggctgggtgacctggattatctacagtgagcagacttaaatggaacagaagtttatgtgtccaaatgatggaatcattaaacctgagtgacttgaaaaaaaaaaaaaaaaaaaaaaaa

SEQ ID NO: 7694 - DNA, 600 bp, Homo sapiens
ggtcccctctctggctctgtgggtccctgggctctggacaagcactgggggacgtgcccccagagccacccacttctcatcccaaacccagtttcccttttccatttgaaagaaaggactctggggtttttactgttacctgatcaatgacagagccttctgaggacattccaagacagtatacagtcctgtggtctccttggaaatccgtctagttaacatttcaagggcaataccgtgttggttttgactggatattcatataaactttttaaagagttgagtgatagagctaacccttatctgtaagttttgaatttatattgtttcatcccatgtacaaaaccattttttcctacaaatagtttgggttttgttgttgtttcttttttttgttttgtttttgtttttttttttttttgcgttcgtggggttgtaaaagaaaagaaagcagaatgttttatcatggtttttgcttcagcggctttaggacaaattaaaagtcaactctggtgccaaaaaaaaaaaaaaaaaaaaaaaaaaaaaaaaaaaaaaaaaaaaaaaaaaaaaaaaaaaaaaaaaaaaaaaaaaaaaaaaaaa

SEQ ID NO: 7695 - DNA, 951 bp, Homo sapiens; identical to SEQ ID NO: 2460

SEQ ID NO: 7696 - DNA, 1400 bp, Homo sapiens
gtgtattggaaagtagagcccacagatctgctgcagaccagaaaggggcgcgagaaagagcggacagaggcagacgccggggctggcggcgatggagcagcagtcggaggacgcggaaggcctgcgagagtcgcccgcggcccagcgccggccttcgggtcccaccttgcgggtgatgttgtgcacgtaggggcacgtgttgcaggcgaagcggtggcagcgttgtccctcctccacgatcagcccgttcccgcagccggggcagaacagcagcatggtctcgaactccgcaggctccaactcccggcagctcccactgccgctcagcgccgatgcgccgcccgcctcgagctcacattggtcctggcagccttcccgccacaccaaccaaccaatagacagggcgattctgcgctcccggccctgctgcaggctgtctcgcacttgtcattggtcactgcagccgccccaccccccccggcgcgccagtggctgggcggcctcgctggggcgggccgcagttcctgcgcgtgcgcgcttggcctccctagtgcgggctggcagtgcgggcagagcccggctgagaggggcggccctggaggagacggaggccgcgggtgggcccgaggcgcaagaggaagatgaggacgaagaagaggcgctgccgcactccgaggccatggacgtgttccaggagggtctggctatggtggtgcaggacccgctgctctgcgatctgccgatccaggttactctggaagaagtcaactcccaaatagccctagaatacggccaggcaatgacggtccgagtgtgcaagatggatggagaagtaatgcccgtggttgtagtgcagagtgccacagtcctggacctgaagaaggccatccagagatacgtgcagctcaagcaggagcgtgaagggggcattcagcacatcagctggtcctacgtgtggaggacgtaccatctgacctctgcaggagagaaactcacggaagacagaaagaagctccgagactacggcatccggaatcgagacgaggtttccttcatcaaaaagctgaggcaaaagtgagcctccagacaggacaaccctcttcatcactggtggctgagctttttcccagcaggaatgggtcctcgaatcatcgtgcctctttcacagaaaggacgttgtggtggcctcaccccaggcatgcccaacagtaactgtcagcataaacctgggggccctcaggactaggacagggtgagccagtgctccctcctttcatgtacttggcctgagactgacctctccctaggtccaaatgccctagtcacatggcagacccacggcctggcccactgtataaaataaacctgtttgcttcttaaaaaaaaaaaaaaaaaaaaaa

SEQ ID NO: 7697 - DNA, 600 bp, Homo sapiens
gagagaagttgtgacctgtacttgtactatggaaggaaggatatcaacgtgtgtatattgatgtttatataagtaactcttgaaggagacttgttctagcgtgccccatggtacctagtgtgtgtctgatgccggttggtgtcaaagatagagggcttcttgaaggaacttgccattccttgctttgaccactgcatgaactgcttctaaattattttattacctaaaaatttaaaatatgccattcattgcacacacccacaaatgcaaatcattcctctctgtagatgctaggatatatataaattattttataaattcttgttttaaatgtcagtgtttctatgattgtaaactattaaattcttttcctattaaagtacagatctaatctaagtattattaagttgatagccctctagtcagttatattgctattgtaaattcttgtttgttgagtaaaatgtttaaatactatatgtatctcatgtacaaagttgacatacattatattcatgtacataaaattaaagagattagattatatactgaaaaaaaaaaaaaaaaaaaaaaaaaaaaaaaaaaaaaaaaaaaaaaaaa

SEQ ID NO: 7698 - DNA, 1400 bp, Homo sapiens
tacggaggctctcacagttcaacaaaactgcagtgccggtcaggtatccccccaaagaccccagaagtaaccctaggctcaatggaggggtctggggaccatggtataaagaggaaaccaagaaaaagaagccaagcaaaaatcaggctgagaaaaagcaaaagaaaagcaaaaaaaagaagaagaaacagcagaaagcagtctcaggttcaacttgccattcaggtgttacttgtggataagcacaaatatttcctgtttggttaaactttaatcagttcttatctttcatctgtttcctaggtaaaccagcaaatttggctcgataatatcgctggcctaagcgtcaggcttgttttcatgctgtgccactccagagacttctgccacctggccgccacactgaaaactgtcctgctcagtgccaaggtgctactcttgcaagccacacttagagagagtggagatgtttatttctctcgctcctttagaaaacgtggtgagtcctgagttccactgctgtgcttcagtcaactgaccaaacactgctttgaattataggaggagaacaataacctaccatccgcaagcatgctaatttgatggaagttacagggtagcatgattaaaactacctttgataaattacagtcaaagattgtgtcacctcaaaggccttgaagaatatattttcttggtgaatttttgtatgtctgtcatatgacacttgggttttttaattaattctattttatatatataaatatatgtttcttttcctgtgaaaagctgtttttctcacatgtgaacagcttgcacctcattttaccatgcgtgagggaatggcaaataagaatgtttgagcacactgcccacaatgaatgtaactattttctaaacactttactagaagaacatttcagtataaaaaacctaatttatttttacagaaaaatattttgttgtttttataaaaagttatgcaaatgacttttatttttatttcctgcataccattagaagaattttatttcatttcttcaaattatcaagcactgtaatacctataaattaatgtaatactgtgtgaattcagactattaaaaacatcattcagaaaactttataatcgtcattgttcaatcaagattttgaatgtaataagatgaatatattccttacaaattacttggaaattcaatgtttgtgcagagttgagacaactttattgtttctatcataaactatttatgtatcttaattattaaaatgatttactttatggcactagaaaatttactgtggcttttctgatctaacttctagctaaaattgtatcattggccctaaaaaataaaaatctttactaataggcaaaaaaaaaaaaaaaaaaaaaaaaa

SEQ ID NO: 7699 - DNA, 1386 bp, Homo sapiens; identical to SEQ ID NO: 2464

SEQ ID NO: 7700 - DNA, 1400 bp, Homo sapiens
cttgctgagagacgaaaagcagttgaatcctggaacccagtgccttattctgtggcctctgctgcaatccctgctgcagccattggggagaaagcaagaggctatgaggagagcgaaggtcataatacaccaaagttgaagaaccagagagagctggaagaattgaagagaaccacagaaaaattggaacgtgttttggctgaaaggaatttgttccagcaaaaggtggaggagctggaacaggagaggaatcactggcagtctgaattcaagaaagtccaacatgaattggtgatctacagtacccaggaggcggaaggcttgtactggagcaagaaacacatgggttatcgccaagctgaattccagattctgaaagctgagctggaaagaaccaaagaggaaaagcaagagttaaaagagaaactgaaggaaacagagacacacctggaaatgctgcagaaggctcaggtctcctaccggaccccagagggagatgacctagaaagggctttggcaaagcttacgcggctacgtatccacgtcagctatctccttacttctgtcctccctcacttggagcttcgtgagatcgggtatgactcagaacaagtggatgggatcctgtacacggtgctggaggcaaatcacatactggattgagcaccagactgtatacccttctcttctcttatcttctgtctgttctcttttctctccctccctcacgtctctctctctctctctctctctctctctctctcaccctcacctttatgccttatatagagaatctctgtgtaaatcctggctcataatcagtctcctttttatcagttttggtgtggagaaagaggccagtttaaataggctttcaagagtctagggtcagagaagcaatagtcactaagctaggtgacctgaaagctttaattttcatgacctggatatgtggtctattgtatatctttttctgaaatggtttgtattcatttaggttagatcaatcagcagatattgggtccggtataccaggtattattttggggtaagctaacaagtacaactcatgtttgcagccttcgaagatgtaacaatctcgttggaaacataagacatacatcacattatacacaaaagtgtatgatatgtacaactgagtggtacagatatgacatggaagatctgggggaggaagttcaaggaaggcaccacaccagaaatgggacctaaattaaggcttaaagaatgagcatggccacactgtcagtgagtgttctttaggtggtaggactatggttgatatttttcttcttcctatcttcctgcctttttcagattttcaatattaaacttgttattcttacattggaaaaaaataaattgtttttaaaaagatc

SEQ ID NO: 7701 - DNA, 600 bp, Homo sapiens
ccgaccagagacagagatgtagatgtcctttcagctgccttgaaagagcagcttagtcattccaggcaagtccattcatgtctagaaggcttacgagagcagcttgatggcctagaaaagacttgtagccaaatggctggggtggttcagcttgtaaagtctgcagcacacccaggcctggtggaaccagcagacggggctatgcccagcttcttgctggagcaggggagcatgatcttggcactgtcagacacggagcagagactagaagcccaagtcaacaggaacaccatctatagcaccctggtcacctgtgtgacatttgtggccacactgcctgtgctctacatgctattcaaagccagctaacccctggcccctcctccagagggtctgaggcaatagctgtgaatgtggatttaagtagagaatcgtagcaatgaagcgagcctttgggggcatgtacaacctcaatctgaaggagcagtatctgtgtggctcaccagcaggcatgcttcgctttgtagacaaggttcatttacattaattatcaaaactttgtgctaatgtccaattaaaatatcctgagttttattattt

SEQ ID NO: 7702 - DNA, 1400 bp, Homo sapiens
tttcgaaagacagtcctatgtgtctcacccaccggccactgcagccctggtgagggcgggtgggcgccggccggcctggaagagcgccgtggctgggccaccacctgtggctgcgttgttgctcactgaatctgttggggagaggtcaccatagtcaccgcctgacctggctgctgctcttgcttcagagccacaagcaaagtttgcactgggcccactgccgagtccagaggccggagaacggccactggtgtgggaggggagcgcacgagtgggactttgcacagcaaattgtgtccccagctcctcctctcccgcctgcctggagccggccctgaaggtttctatgaagaaataatcccccaatatttttactacgtgtgtgattttcctgttttatattgaaaaaacttttttgacactcccaagaccattcagggaaattttataaaaaatgcagatactgtcttgagcagatcgaaatgccgatgaagtggatgcaatttccttttgtgcaagcagtgcacggtgcccccccctcgggtgtccgtgctgtgccttagcttccccaggtgccgggactcacacctgctaggggctgggcaaggccccggctctgctttctctgaagggcttgtccaagttcattgccctgttacaggtggtcaagacgtccggccgccttgacccaggctacccttagccaatatcctctgcccctgggtggctggtggctgggcctcagggtgggcaacgttaggggtttggcgaaagcccgccccatgggattgagggacggggctgcactccaaccgtctgcacctgctcttcccccacccctgtgggacctcatcttcacgtgccatgtgtgctgaaggcccagggcccagcagggggcagtggcacctgttgacggaaaaggccgaggtgcttaccagtggaccttctggcccgcccctcccctgtcacttgtcgggcatccagggccccgacctgtgcctagccgccagggtgacagaaggcagaactgaagcggggtctgggccacgggccaggccactgccttttgtcctcagtgaccatacattcctgctctcggacttgaactctactgtaactgttttcttgaaatgaagctgtacaggacgattcactgccatgccagtcaggcgggcttgccatgttctgtgaatctcgagtgagcggtgccacccgcccccatacctccgccaccggccgctgtcggggatgccacagcctgccacggtcgcagccagacgtgagcttggcattgaagttgcaaagcggcccctggccgggctcgccgtcgctgtccagggccgtgtccggtgctgtggctgtaaagctgtaggaccctttttaataaatagagaattatt

SEQ ID NO: 7703 - DNA, 600 bp, Homo sapiens
gctgctcatctggttcaagagggaattccccttcccggatgtccttcggctgtgggaggtgctgtggacagggctccctggccccaatctgcacctgctggtggcctgcgccatcctggacatggagagggacaccctcatgctgtccggcttcggctccaatgagatcctcaagcacatcaacgagctgactatgaagctgagcgtggaggacgtgctgacccgcgccgaggccctgcaccgccagctaaccgcctgccccgagctgccccacaacgtgcaggagatcctggggctggccccgcccgcagagccccacagcccctcgcccaccgcctccccgctgcctctgtcgcccacccgggccccgcccaccccgccgccctccacggacacagccccgcagcccgacagcagcctggagatcctgcccgaggaggaggacgagggcgccgactcctaaccccgccaggcagcctcgttctgcacaggcactttagcccgagccaggcacacctgcgagggggcaggtgtgctccgccgccctgctgataagctggcttcattaaactgacacttctcaaaaaaaaaaaaaaaaaa

SEQ ID NO: 7704 - DNA, 600 bp, Homo sapiens
ggtgacctcctgtctcatcctgtgacttagaatgcctaacaggctggggacgcagcccagcagatctcagcctcattttactcagcccctcatcactctgattcaaatgcctctgacatgaccacgcagatttgagaaacaggccctcagccaaccagactctggctctacgacacacttaatactgtgaaaagaagattacgggtcatagtcacaaataccaggggtgcaaaacttcagattagaagacacttgtcagactcagaggctcatccaactccacggagatcattatcaccacaagttcttcagacaggtgtggaggttttctaagggatatttttattttctggattgcaattttgtttaggaagagatgaaagtgaggatcaactactttgaggattgtacaactttgtaaattgcacaaatatgacggcatatttatatctgcctgcatttgtgaaaacaaacttgtcaaggagcttatttctggaaagggtcaatgattctagaaaaaaaaaaaagataaatatgagacccttcagtaaaaagaaaaaaaaaaaaaaaaaaaaaaaaaaaaaaaaaaaaaaaaaaaaa

SEQ ID NO: 7705 - DNA, 1400 bp, Homo sapiens
ggatagagggaggagtaagtcagctgctctgtccccagggactcacagttcagtgcagtgggtgagagacgagtcagtaagcattcattcattagtaagcagcaatcttccagaagtggcgtgaactgtcaggagttctagataaaacgctgagtgtgttcggggaggaagagatggctgctgagcaaggggatcagggaagacttcgtggaggagaaagtaccaacacctctgcagtgcctgcttcttacctggccctaagccgggcgcttcccttgtggtgtattgtgaggtcctaccgacaaccctgagaagtggctggtacaacccccattctacagaggaggaagccggggctctttctttctgtaactcctttgtgctaccaacttactgctcttttgtaaattcttaaaaagacctagcgatgaaccacagagccttcaggaaccctacctgccatgaccaccacccataccgcccgtggaaaaatcatggagtttagagatagactcggcttgaatctcagctgcctgccacttactggaagtgagaccaagaagtctctctttcctctctgtgcctctctgtaaaatgggggatgatagtcaacaacatatttgtaaggattaagtgaaataacgggtatggcagaatctagcatgatgccttgaaataaatatttacttacttttccctaaattcccctaaaattatatgctggcttttaattttccccatgctactataatcatgttctggtaaaaatggagagatttactatttaaaattgcttaggatgatctcagacagtgactgaaatggttgtgattaggatggttaggagcatgatgactttgatgtaacctcattctcattaaggtgtttatgtctctgcaaaggctgacagattctgtggccaaggctcccactgtttatccattattcattgattctttttttctttatagaagagctaccagatggtgttcttgaatctgatgatgatgaagatgaagatgatgaagaggaccatgacatcatggaagccgatttggacaaagacgaactgatccagccccagctcggagaactctcaggagagaagcttttgaccacggagtacctggggatcatgaccaacacggggaagccaaggcggaaggggctggctaatgtgcagtggagcggggatgagcccctgcaaaggcccgtcacccccggcggccacagaaacgggtacccagtgtaagtcagggctaaaggaagcgggaattgactttcttaagctttgttttgattacagtgtaagatgtatgtatttttaaaattcaaaataaagcattcattttgaaaagcaaaaaaaaaaaaaaaaaaaaaaaaaaaaaaaaaaaaaaaaa

SEQ ID NO: 7706 - DNA, 1400 bp, Homo sapiens
cagccccaggacaggcaaagatcgcaggcggggccgcggtgtctgacagctccagcacctcaatgaatgtgtactcgctgagtgtggaccctaacacctggcagactctgctccatgagaggcacctgcggcagccagaacacaaagtcctgcagcagctgcgcagccgcggggacaacgtgtacgtggtgactgaggtgctacagacacagaaggaggtggaagtcacgcgcacccacaagcgggagggctcgggccggttttccctgcccggagccacgtgcttgcagggtgagggccagggccatctgagccagaagaagacggtcaccatcccctcaggcagcaccctcgcattccgggtggcccagctggttattgactctgacttggacgtccttctcttcccggataagaagcagaggaccttccagccacccgcgacaggccacaagcgttccacgagcgaaggcgcctggccacagctgccctctggcctctccatgatgaggtgcctccacaacttcctgacagatggggtccctgcggagggggcgttcactgaagacttccagggcctacgggcagaggtggagaccatctccaaggaactggagcttttggacagagagctgtgccagctgctgctggagggcctggagggggtgctgcgggaccagctggccctgcgagccttggaggaggcgctggagcagggccagagccttgggccggtggagcccctggacggtccagcaggtgctgtcctggagtgcctggtgttgtcctccggaatgctggtgccggaactcgctatccctgttgtctacctgctgggggcactgaccatgctgagtgaaacgcagcacaagctgctggcggaggcgctggagtcgcagaccctgttggggccgctcgagctggtgggcagcctcttggagcagagtgccccgtggcaggagcgcagcaccatgtccctgccccccgggctcctggggaacagctggggcgaaggagcaccggcctgggtcttgctggacgagtgtggcctagagctgggggaggacactccccacgtgtgctgggagccgcaggcccagggccgcatgtgtgcactctacgcctccctggcactgctatcaggactgagccaggagccccactagcctgtgcccgggcatggcctggcagctctccagcagggcagagtgtttgcccaccagctgctagccctaggaaggccaggagcccagtagccatgtggccagtctaccatggggcccaggagttggggaaacacaataaaggtggcatacgaaggaaaaaaaaaaaaaaaaaaaaaccaaaaaaaaaaaaaaaaaaaaaaaaaaaaaaaaaaaaaaaaaaaaaaaaaaaaaaaa

SEQ ID NO: 7707 - DNA, 1400 bp, Homo sapiens
tcagaacaaaagttccctgctgggaaaagttttaaggatcgatgtgaacagggcaggctcacatggcaagcggtaccgagtcccctcggacaatccatttgtttctgagccaggggcccaccccgccatctatgcctatgggatcaggaacatgtggcgttgtgctgtggaccgaggggaccccatcacgcgccagggccgaggccggatattctgtggggacgtgggccagaacaggtttgaagaggttgacctcattttgaaaggtggaaactatggctggagagcaaaggaagggtttgcatgttatgacaaaaaactttgtcacaatgcctctttggatgatgttctgccaatctatgcttatggccatgcagtggggaagtcagtcactggaggttatgtctatcgtggttgtgaatccccaaatctcaatggcctgtatatctttggagacttcatgagtggtcgacttatggctttgcaggaagatagaaaaaacaagaaatggaagaagcaggatctttgcctgggcagcaccacgtcctgtgccttcccagggctgatcagcacccatagcaagttcatcatctcctttgctgaagatgaagcaggggagctgtatttcctggcgacctcttacccaagtgcctatgcaccacgtggatctatttacaagtttgttgacccctcaaggcgagcacccccaggcaagtgcaaatacaagccagtgcccgtgagaaccaagagtaagcggatcccgttcagaccactcgccaagacagtcttggacttgctaaaggaacaatcagagaaagctgctagaaaatcttccagtgcaaccttagcttctggcccagcccagggtttgtctgagaaaggctcctccaagaagctggcttctcctacaagcagcaagaatacattgcgagggcctggtacaaagaagaaagccagagtggggccccacgtccgccagggcaagaggaggaagagcctgaaaagccacagtggcaggatgaggccatcagcagagcagaagcgagctggcagaagtctcccttgacctattggtcaaggtggccgacagggtgacgtgagagaggagagccacctcatcaaatgaaagtcactgctgaataaagaccttagaagtctgggaagccagggtagaggtggggcagggcggttttcctctccctgggaaatcttgctgtctactgaataaataaatgcaccttctctgtatgcagtgcttctgtgggagaccatatcccagattgctggtgcacctgggttatggtaagcactagtccatgagcctgcttggaatcacactggatgtctccgttttgtcttgtaaatgcctacaacctgaggtaataaatcaacatttgctc

SEQ ID NO: 7708 - DNA, 600 bp, Homo sapiens
tgagctcatgggattacataactgtgtctatcagcaagcgtcattgtggtttcattcgctcaaattatccctaaagaatcggatactcaatcactttggtcccatgccggagaaagacgccgatcctcagatgaacccgaatggcccagcctggtgctggtggatgttagcagttcttcccttggaaagccgagctcagctccccttcctagcaatgaggtccttaaaggacagactgaatggtattcgacgagtcctggccttcatatcccgaaaccaaaactagtgagtggattgccgaagaggagctcccaccttccccactgccgtcggggggagtcttcttgtaaatatatctaattgcaataacatcttaacagaagggggtgtcaaacagaggcatcagcctgctgttgatcacagagagaaattgagtagaaagaccaaaagaatgtgacctatttgaaactttctgtcttaagatgcttcttgacatgctgcataactacataaacagcagaggtgtttaagagcccagaaaaacataatttgattttaacattaaaatttccaaaagtttaaaaaaaaaaaaaaaaaaaa

SEQ ID NO: 7709 - DNA, 600 bp, Homo sapiens
atttgcctttttgtgtttgcttttgtttttgcaagcttaaaattttaaaaatctttcctgttactttcacctcaggtcgtaactttctttatgtgtttcattacagctccaaaaagccttccagaatttcctgaggcaaaaacacccttcccttttgagaaacctaggggcacattgggtaataagagtaccttaaatttaatattaaggctgtgggtggtgattgcttaattctgcaggacacatttactgcatcttatttctggaaacctcatgaactgatagttaggcaaacaaatggttgatttgatttttttttaataaatctatttggattttctgcaaattcggtaaaacccatcagtcttaattccacataatccacttagctttttgtccttaaaaatgctgacagtctgacaccaaactctggtctctctctgaccactaatcaaatgttctctggatggatacatactgatttcttactgatatataatgactttttattgtattggtatactgcaggcttctggtagccacttaaccataccagcaacctatttctgtctcgttctcctgttaaaaaaaaaaaaaaaa

SEQ ID NO: 7710 - DNA, 600 bp, Homo sapiens
tggtgaccgtggcttttcggagcccagggatccaggatgaacccccaaaagttcggggtgagaacttctcttggtggaaggtgatggaggaagacctgcaaagccagctcctccagcggcttcagggatcctctgttgtcccagtgaacagatagagaggtggaggaggtgacagggagctaggcagccgtgctccctccagtgcggacttgtctccctctgagggaggcaagaggctggcgatcagggatcttgttgcattgggagcaggggcggctctcctggtccccaggagagatgctttgaggagcattcctctagattgcacaagggacagtgcctttaaccaagcgaggagtccaaagctcaggacctgactaccctgagggcacgctgacgcctctccccagggggatggggagctttctgcacccccagtggcatctcctcatcacgttctgtgccgtccttgggaaaggcctgcattctgatccttccaggcccttcgagcatggaggggcactggggaaggtcccccgagggaggagcacgttgctgagtaaagaggtgttactcaccttgaaaaaaaaaaaaaaaaaa

SEQ ID NO: 7711 - DNA, 1400 bp, Homo sapiens
accttccatcatggataaagtgcaggattttatggagaagcaagataagtggacccggaaaaatatcaaagaatacaagactgattcattttggagacatacaggctatgtgatggcacaaatagatggcctctatgtaggagcaaagaagagggctatattagaagggacaaagccaatgaccctgttccagattcagttcctgaatagtgttggagatctattggatctgattccctcactctctcccacaaaaaacggcagcctaaaggtttttaagagatgggacatgggacattgctccgctcttatcaaggttcttcctggatttgagaacgtcctttttgctcactcaagctggtacacgtatgcagccatgctcaggatatataaacactgggacttcaacatcatagataaagataccagcagtagtcgcctctctttcagcagttacccagggtttttggagtctctggatgatttttacattcttagcagtggattgatattgctgcagaccacaaacagtgtgtttaataaaaccctgctaaagcaggtaatacccgagactctcctgtcctggcaaagagtccgtgtggccaatatgatggcagatagtggcaagaggtgggcagacatcttttcaaaatacaactctggcacctataacaatcaatacatggttctggacctgaagaaagtaaagctgaaccacagtcttgacaaaggcactctgtacattgtggagcaaattcctacatatgtagaatattctgaacaaactgatgttctacggaaaggatattggccctcctacaatgttcctttccatgaaaaaatctacaactggagtggctatccactgttagttcagaagctgggcttggactactcttatgatttagctccacgagccaaaattttccggcgtgaccaagggaaagtgactgatacggcatccatgaaatatatcatgcgatacaacaattataagaaggatccttacagtagaggtgacccctgtaataccatctgctgccgtgaggacctgaactcacctaacccaagtcctggaggttgttatgacacaaaggtggcagatatctacctagcatctcagtacacatcctatgccataagtggtcccacagtacaaggtggcctccctgtttttcgctgggaccgtttcaacaaaactctacatcagggcatgccagaggtctacaactttgattttattaccatgaaaccaattttgaaacttgatataaaatgaaggagggagatgacggactagaagactgtaaataagataccaaaggcactattttagctatgtttttcccatcagaattatgcaataaaatatattaatttgtcaaaaaaaaaaaaaaaaa

SEQ ID NO: 7712 - DNA, 1400 bp, Homo sapiens
tggcacaaagtggtagcacaattaaattcagtatgggtggagcatggtacagtcttggtgccatagaaggagtagttgcatagtcacacatcatttgataagttggatgttccattacatagaggaacacaaaattccagggtttttggaggaagggattagatagcgactaagccgccagaattgaggtggccattcctttttgtataggctaagaaacaggttatcagtgaaaagttaattatggctttggcactagaatagcactgttgcaaagtatttaagcaccccccatctcagccctttattttatctttcatgtgggctaatgtgaggataatcttacagatattataggaatttcttttctatctttatgaaaacaacgtatataaaatatatctagaaaacctttgtttgagactcttatttaatgggcttttgattctaatgataattgtacctttatctttcaaaagctgatatttcctacctaagcatctcccgagaaaaatatctcattaaaaagcccataaataataggggagaagaaagccttaggtatcaattccaaaacagtgattgaaatttcccaaaataattatggcttctgtcatctccagagataatctggcttggtttaccccataatctaatttcagaaaagaaagctttattttaacactcatctgaatcaacattaaagccttttctctcaaagcgtttattgagaaactcaaatgaatatactttttgaattactgtcatcaaaagtgtacggcttcctgtgctgcttgtgtcaaatggaacctgccctctaaagcactttctttcctttacttgcgtggtttcatgtaagctgtgctgtttagaaacaacatctcagactttacaaagaaatgacaaagaaggcaattgcactttttaagggatatcgacaagcagtttctgttttctaaaggacaaaatacagagtgtgtgtcatttttaattagattctttcccctgctgagttggaaattccagtgcagcactgattgaccacagttgccaatctaaaagcacaaagacagaagtaaagctttatgctaattttatttcaatatgatagaaaatttatcttggtatgtccttttttagataactccagcaggaaactgtaactgctatgtctttaggaaaacgtagaagaaagaacattattattctttaattcctacaaggtacttgaaaaccttaagtgaaaaagatttctatctttttatcttggcgcatttatggaaaaaatattaactgtcctgaatattttataattttgtaggaaaaatatgcatctattttttcttgacttcttttatatagtaataaaagttattttggaaaaaaaaaaaaaaaaaaaa

SEQ ID NO: 7713 - DNA, 1400 bp, Homo sapiens
gccccgcctctgcaggcatatgccgaatcatgggggacctgatgaggacaatgcccattcttagtcctgggaacacccagacactgacagagctggagctgaagtggcagcactggcacgaggaatgtgagcggtacctccaggacagcacattcgccaccagccctcacctggagtctctcttgaagattatgctgggagacgaagctgccttgttagagcagaaggaacttctgagtaattggtatcatttcctagtgactcggctcttgtactccaatcccacagtaaaacccattgatctgcactactatgcccagtccagcctggacctgtttctgggaggtgagagcagcccagaacccctggacaacatcttgttggcagcctttgagtttgacatccatcaagtaatcaaagagtgcagcatcgccctgagcaactggtggtttgtggcccacctgacagacctgctggaccactgcaagctcctccagtcacacaacctctatttcggttccaacatgagagagttcctcctgctggagtacgcctcgggactgtttgctcatcccagcctgtggcagctgggggtcgattactttgattactgccccgagctgggccgagtctccctggagctgcacattgagcggatacctctgaacaccgagcagaaagccctgaaggtgctgcggatctgtgagcagcggcagatgactgaacaagttcgcagcatttgtaagatcttagccatgaaagccgtccgcaacaatcgcctgggttctgccctctcttggagcatccgtgctaaggatgccgcctttgccacgctcgtgtcagacaggttcctcagggattactgtgagcgaggctgcttttctgatttggatctcattgacaacctggggccagccatgatgctcagtgaccgactgacattcctgggaaagtatcgcgagttccaccgtatgtacggggagaagcgttttgccgacgcagcttctctccttctgtccttgatgacgtctcggattgcccctcggtctttctggatgactctgctgacagatgccttgccccttttggaacagaaacaggtgattttctcagcagaacagacttatgagttgatgcggtgtctggaggacttgacgtcaagaagacctgtgcatggagaatctgataccgagcagctccaggatgatgacatagagaccaccaaggtggaaatgctgagactttctctggcacgaaatcttgctcgggcaattataagagaaggctcactggaaggttcctgagaactgcttcaatgtggtatctttgtatggcaatgtatatagattttttaaaagaataaatgttgttttgcaaatgtaaaaaaaaaaaaaaaaaaa

SEQ ID NO: 7714 - DNA, 600 bp, Homo sapiens
agcgagactccatctcaaaaaaaaacaaaacaaaaccaagttcccactggtgatgcctgtctgacacgttttggtatttagtaggaaatgaagtgtttcgaagcttcgagagaagcttcaaaattgtcacaattgctgaaaacagaatgaatcgtgaacattatctcaatattttgtataatagacaagaccacagtgttttggttccctgacctgtttttgtgtttatgttaggatctgaatcatgttctgggtaaggggacgaggagcgaacactgcactaagatttggtttgccaaatcagattctttggtcaagagtcagtttggggccaggcgtggtggctcatgcctgtaatctcagcactttgggaggctgaggtgggtggatcactggagtttgagaccaccctggccaacatggtgaaaccccatctctactaaaacaaaaattagccaggcatggtggcacctgcctgtaatcccagctacttgggaggctgaggcaggagaatcacttgagcccaggaggtggaggtttcagcgagctgagatcacaccactgcactccagccttggtgacagagtgagactctgtctc

SEQ ID NO: 7715 - DNA, 1400 bp, Homo sapiens
aaaagatttgatactgaaaactaaactgaatagttggttcctgaaatcttggactgtttatgacctactggctcctttaaatagtaactgaaaactaaaatggaatattttagttaacgcttctacaagtattttcattttaaaagcttacatgattcctaactaaagtgtcatgagaaaggattatcacacctgtagcaatttccagttttagtgattctccattttttcccttgtcatgtaaatatttatggaatgatcattttgtgtacatacaggttactgcttttttatttaaattcttttagtgtttagctccatgagacacttcagtttaaattgatggaataaatgttatatgacacatttacattttccttatcaaggtgtcaaatatgtggactttaaacaatgaaactttttcagaaagaaaaaacaaaaactttaactttgtgtaaaatcttatagtattatcagcttagagggaattgatatttttaatattgccgttatattccaaaatatatattgagataaatgaactggtgtagaatatcagtttgctatttagttttatgaattactatacatatacatgcatagaaatgaaatgctatactgataaattttaaagaaaatatgaggaaatggctataaatattaaactaaaagggtcttcaacagtaaagtgcagttatgtcatttaaaattccaatactttaaaggccaccaaattttgatgtatatgtccttgaagggctgctaaaatttatgaagaggactcacattttcccccatagaaatttgcagtttcttggtgatcatttaagcaggatccaaagaagttcctttacaaataagtaataagaaaaatgagtactaaaatacagctttgtgccttttaaccctatgccaactcctaaacatataagtagattacagtatacttatctgatcagagcatgatctgtttggccacatgcaagtgtgagcagaaatagagcagcacgtagaatagtaacttaaagcaagtcatcctttaaaaattctgagctaaaatctatttaccattgagtaattgaattaatcccataggaataagctccttgtaagtaaatccatgatatgaattagaaaaaaaaaacagctggaaattgaagtttttgatgcctgtatactggatatgaaactatttgatttctagtcttctgtgtttagcagttgtaatattttaatgattttgcttcatactcggttaatggaacataaacatatctttgatacttctttgtgagtgagagaatgctagatagggtggctttgttctttgtttaagttttttttcctgaatgtagttaatttatggcatctgttgaataaaactgctaaaatgacctctt

SEQ ID NO: 7716 - DNA, 1400 bp, Homo sapiens
ctgctgcccagtcctggcccctgcacaagacaacagaatccatcagggccatgagtgtcacccagacctgaccctcaccaattccagccctgaccctcaggacgctggatgccagctcccagccccagtgccgggtcctccctcccttcctggcttggggagaccagtttctggggagcttccaagagcacccaccaagacacagcaggacaggccaggggagggcatctggaccagggcatccgtcgggctattgtcacagagaaaagaagagacccacccactcgggctgcaaaaggtgaaaagcaccaagaggttttcagatggaagtgagaggtgacagtgtgctggcagccctcacagccctcgcttgctctccctgccgcctctgcctgggctcccactttggcagcacttgaggagcccttcaacccgccgctgcactgtaggagcccctttctgggctggccaaggccggagccagctccctcagcttgcggggaggtgcggagggagaggggcgggcaggaaccggggctgcgcgcagcgcttgcgggccagagtgagttccgggtgggcgtgggctcggcggggccccactcagagcagctggccggccccaggcagtgagggccttagcacctgggccagcagctgctgtgctcgatttctcgctgggccttagctgcctccccgcggggcagggctcgggacctgcagccctccatgcctgaccctccccccaccccccgtgggctcctgtgcggccggagcctccccaaggagcgccgccccctgctccacagcgcccagtcccatcgaccacccaagggctgaggagtgcgggtgcacagcgcgggactggcaggcagctccacctgctgccccagtgctggatccactgggtgaagccagctgggctcctgagtctggtggggacttggagaacctttatgtctagctaagggattgtaaatacaccgatgggcactctgtatctagctcaaggtttgtaaacacaccaatcagcaccctgtgtctagctcagtgtttgtgaatgcaccaatccacactctgtatctggctactctggtggggacttggagaacctttgtgtccacactctgtatctagctaatctagtggggatgtggagaacctttgtgtctagctcagggatcgtaaacgcaccaatcagcaccctgtcaaaacagaccacttgactctctgtaaaatggaccaatcagcaggatgtgggtggggcgagacaagagaataaaagcaggctgcctgagccagcagtgacaacccccctcgggtcccctcccacgccgtggaagctttgttctttcgctctttgcaataaatcttgctactgcccaaaaaaaaaaaaaaaaaaa

SEQ ID NO: 7717 - DNA, 600 bp, Homo sapiens
ctattctgccaaagcttttgatgtccttgagaggctggatcctaaccctgaatattgggaaggcaaacggggtgcctgtgtgggcattttccagatgatcatagctgggagagaacccaaagagacccttcgagaagtgctccatttactgagaagcacaggtaacacccaagtagaatacatgatccggatcatgaagaaatgggccaaagaaaacagagtgtccatctaaaatagcgccagcgtcctaggaaccagcttctactttgacataaaactggaaatcattttcactccagtttaatctgtgatacagggctctgttttattgacattttccttccttgctctttaagcctcaaggtcagagactgacttgctgagacttagtctcctggctgaacagagtgccatagtctgtgaccctgtatgatcctagtagcaataagattttggacttatctggtgcctttcttccaaaaatgctcagagtacttttatgcaatttactgactttaaggaaaacagtataacttttttttgttagcattttatggcattgtctcctggctgcaataacaaacatctttgatgttcaag

SEQ ID NO: 7718 - DNA, 1400 bp, Homo sapiens
cgccggaagggccaggtcgcagggctcctggagctgcaggcggcgggaggggctacaaatgcttgactcagtgatgcagaacctttcagagttagctggaagccacagccctgcctcttgatgcagcctggatccagccggtgtgaagaggagaccccttccctcttgtggggtttggatcctgtgtttctagcctttgcaaaactctacatcagggatatcctggacatgaaggagtcccgccaggtgccaggtgtatttttgtacaatggacatccaataaaacaggtagatgtcttgggaactgtcattggagtgagagaaagagatgctttctacagttatggagtggatgacagcactggagttataaactgcatctgctggaaaaagttgaatactgagtctgtatcagctgctcctagtgcagcaagagagctcagcttaacctcacaacttaagaagctacaagagaccattgagcagaaaacaaagatagagatcggggacacgatccgagtcagaggcagtatccgcacatacagagaagagcgagagattcatgccaccgcttactataaagtggacgacccagtgtggaacattcaaattgcaaggatgcttgagctgcccactatctacaggaaagtttatgaccagccttttcacagctcagccctagagaaagaagaggcactaagcaatccaggcgccctggacctccccagtctcacgagtttgctgagtgaaaaagccaaagaattcctcatggagaacagagtgcagagcttttaccagcaggagctggaaatggtggagtctttgctgtcccttgccaatcagcctgtgattcacagtgcctgctccgaccaagtgaattttaagaaggacaccacttccaaggcaattcatagtatatttaagaatgctatacaactgctgcaggaaaaaggacttgttttccagaaagatgatggttttgataacctatactatgtaaccagagaagacaaagacctgcacagaaagatccaccggatcattcagcaggactgccagaaaccaaatcacatggagaagggctgtcacttcctgcacatcttggcctgtgctcgcctgagcatccgcccgggcctgagcgaggctgtgctgcagcaagttctggagctcctggaggaccagagtgacattgtcagcacaatggagcactactacacagcgttctgagcagagacacgcagaccagctgaggaggacaaagataaggtggcattcacccccaggctctgactttcagcatcatgcaggggcttatctgtctggaggcagttacctcataataaactataaaatatagtcatcttgggaaaaaaaaaaaaaaaaaaaaaaaaaaaaaaaaa

SEQ ID NO: 7719 - DNA, 1400 bp, Homo sapiens
aggagctgtgaagcataagagctcagagagtggcaacagtgtgaaaagactgaaaccggaccctgagccagatgacaagaatcaagagccctcatcctgcaagtctctcggaaacacctccctgagtggcccctccatccactgcccctctgctgcagtatgtatcggcatcctcccaggcctgggtgcctactctgggagcagcgactccgagtccagctcagacagcgaaggcaccatcaatgccaccggaaagattgtctcctccatcttccgaactaacaccttcctcgaggccccctagtttctccgtccctacacagggagctcctccccaagggtagatcggaccgttcatgctgcctataggcattatgtccctcaaaaaaaaactcctttgcctgcatcctgtgtacaacatgacatttttaaccaatccaatctaaaaatgtgccagaatccacctgtggcccgaatcgtgtttggttcctctttctactccactgcagatgaccaaacctgtcccgctgccactttcctcactgatattgggaggagggcaaggcccagccgaagttccactaaaaatgccccaggagaataggcaccggctggcttgccaaagggtttgggttttattgctttctgtttttttcttttcccgacagcacaaagaagtaagggcagttattggacaggtgttatttaaacattctattgtaaatgaatgtgttgtttggttctactgcattgtggagcatgcgggggaagagaactgacccaggtaatgaaatggagcccttccctggaactaaccagtccttgatgttgtgtgactaagtaaagatgataaaccccatctgctgggggtgtcacttcacactcggcatgcattgtgatgccggcaggcagagcagctactgactttgaacatgggcagagaggcccctggatctcatccagcccactccttttccccttccagtacagtgacactctggtgcccattggcagatggcgacttccctgcacccataactgatgctctgtgaattcttcctccttttcagaactactctgtgctaattgttctgccagtatgggcgcatcagctccatcctgacaaacaagacatttaggtaaaactttgtaggcaccttctgcttctctgcttcattgttcctgtgatagtcctgttgttattacagcatgtgcccaaaacagcctcacattgttacaggaggcaggccaggacatcaaagtcatcatctttatgtggcatgactcttaagaggccattactgtatctcatggcctcttgatgtggaaagaagttgacagagggttgcagggtttaaaaacatccattaacatgaaagctaataaacctgtcagagaac

SEQ ID NO: 7720 - DNA, 1400 bp, Homo sapiens
gaagttgtagctccaaatgaatttcagggacaagtaattgcaggaattaaccgacgccatggggtaatcactgggcaagatggagttgaggactattttacactgtatgcagatgtccctctaaatgatatgtttggttattccactgaacttaggtcatgcacagagggaaagggagaatacacaatggagtatagcaggtatcagccatgtttaccatccacacaagaagacgtcattaataagtatttggaagctacaggtcaacttcctgttaaaaaaggaaaagccaagaactaactttgcttactgtgagttgactgactctaattgaatctgcgtggttttgatactttgatggattccagtggaataaattcaggctgctgaaacaagaaattctgagcccaggaagcgggctcttctttcttcaaaagaagcccttcttgttcatattcaggagcttctgttatattcaaaggtaattctatgtctatctcaactctattgattggttttatagtttattgaaaatcctcaaataaaatataattattactgaaatatgtttaatatttaaggggaaaagagactaatttcagttatacttttaagcttagaatgtatgttcatttccaaattttgtatcataagagttttcaacatagagaaaagctgaaaaaatgcaaagaataaccacatactttccatctaccttcctttgttaacgggttgtttatcatataataatttgttttgtcatatttgctttcactgtctattatctgtttaagtctcataactctatttttagtttgctgaagacttgaaagtgaatcgcatatatcatgacacttcttggagtgtcattaatgggcaggcttttctgttgaagagtggattccgtatgttcttcatagagagtgtttttcagattcttcattgggatattaaaatattagccaaatttctctctgttttatatatgtctgtttatttcagtttgtggtttctgcaaatttgtaactgcctctgttttaggagtataagtattacttccttgtggtctattgtgaagtaaaaagtagacccttgcatatactattcttgtttgtgttcatcttaatgtttttgtacagctaaatcaaatgtaatttatagagttagtttcatcaacctaatgaatgctagttaaatttgaattccttggaatttatcgtatattgtattcactgagattatgaagggacaaatgttaatcttttgtttccagaaaaagttgggctttcccaagcagttctattacccggttcagaattgcttcatccaaaaatcatctgatggtatagatggatcctagtccttttcattacctgatggtagaaataaaataattgatt

SEQ ID NO: 7721 - DNA, 600 bp, Homo sapiens
agtcctcatacaacagttttctgaagaatcaggagaattagtagatgcagagttatattataaccatagcaagctttgtcttttcataatttctattgatgtcttggctaaattttgatttgggtaattataggcttgttttcttaatatgcttcttgaaggttaaattgggtaacatgtttttcattttctgcattgactgcattttttttgagtgatctgcacacacaaatatagatgtaacttaggtgttggtataactaaatctttaaagtgttttgaagattagttggataaaaatggagttaaagaaaattgaccaggcgtggtggctcatgcctgtaatcgcagcactttgggaggccgaggcgggtggatcacttgagatcagaagtttgagaccatcctggccaacatggtgaaacctcatctctactaaaaatacaaaaaattagccgggcgtagtggcgggcgcctgtagtcccagctacttgggaggctgaggcaggagaatggcgtgaacccgggaggcggagcttgcagtgagccgagatcccgccactgcactccagcctgggcgacagagcgagactccgtctc

SEQ ID NO: 7722 - DNA, 600 bp, Homo sapiens
atcagcattttctccttctcttcacactcgcctttaccacctagttgatagttaatctcatgcagttttggggcacctcttaattcattttcatattgttctacacctgttttgttatgtaatttttatgtttgttttgtgtccgtatccagaaggatagtgatcatgtctagtaaatttgtgatcttcccacaatacttgcctaaggcaagtccctctcctctttctggctggttcagggggtcagttatcatgtccctgaaagggacattctgtggatcagtttgattactatgtacatttaaaaggtagcagcaagccaggtatggtggctcacgcctataatcccagcactttgcgaggccaaggagggcggatcacctaaggtcaggagtttgagaccagcctggccaacatggtgaaaccctgtctttactaaaaatacaaaaattagccaggcatggtggcgggcgcctgttatcccagctacttgggaggctaaggcagggagaattgcttaaaccggggaggcgggggttgcaatgagctaagatcgtgccactgcattccagcctggttgacagagtgagactccgtctc

SEQ ID NO: 7723 - DNA, 1400 bp, Homo sapiens
gacgcacctgggcatcggtggcgccggccagggaatgagcacacctggctcctctccacagcaccgcccagctggcgtcagccccctgtccctgagcacagaggcaaggcgtcagcaggcatcgcccaccctgtccccgctgtcacccatcactcaggctgtagccatggacgccctgtctctggagcagcagctgccctacgccttcttcacccaggcgggctcccagcagccaccgccgcagccccagcccccgccgcctcctccacccgcgtcccagcagccaccacccccgtcacccccacaggcgcccgtccgcctgccccctggtggccccctgttgcccagcgccagcctgactcgtgggccacagccgcccccgcttgcagtcacggtaccgtcctctctcccccagtcccccccagagaaccctggccagccatcgatggggatcgacatcgcctcggcgccggctctgcagcagtaccgcactagcgccggctccccggccaaccagtctcccacctcgccagtctccaatcaaggcttctccccagggagctccccgcaactggagcagttcaacatgatggagaacgccatcagctccagcagcctgtacagcccgggctccacactcaactactcgcaggcggccatgatgggcctcacgggcagccacgggagcctgccggactcgcagcaactgggatacgccagccacggtggcatccccaacatcatcctcacagtgacaggagagtccccccccagcctctctaaagaactgaccagccaccgaggacaccttccggatggaccgcctgtgagcgggcacgccggcaccctgccgctcagccgtcccgacggcgcctccccagcccggggacggccgtgctccgtccctcgccaacggccgagcttgtgattctgagcttgcaatgccgccaagcgccccccgccagcccgcccccggttgtccacctcccgcgaagcccaatcgcgaggccgcgagccgggccgtccacccacccgcccgcccagggctgggctgggatcggaggccgtgagcctcccgcccctgcagaccctccctgcactggctccctcgcccccagccccggggcctgagccgtcccctgtaagatgcgggaagtgtcagctcccggcgtggcgggcaggctcaggggaggggcgcgcatggtccgccagggctgtgggccgtggcgcattttccgactgtttgtccagctctcactgccttccttggttcccggtcccccagcccatccgccatccccagcccgtggtcaggtagagagtgagccccacgccgccccagggaggaggcgccagagcgcggggcagacgcaaagtgaaataaacactattttgacggc

SEQ ID NO: 7724 - DNA, 1400 bp, Homo sapiens
ggagaagaagatccgaatcacaactaatgatggacgacagtccatggttacccttaagtcttcaacaaccttttttgaacttcaggaaagtatagccagagaattcaacatttttccatatttacagtgtattcgatacgggtttcctcctaaagagttaatgccaccacaggcaggaatggaaaaggaaccagttcctttacagcatggcgacagaattacaatagaaattctaaaaagtaaagctgaaggtggtcagtctgctgcagcacactcagcccacactgtgaaacaagaagatattgctgttactggtaaactgtcatctaaggaacttcaggagcaagctgaaaaagaaatgtactccttgtgtcttttagcaacattaatgggagaagatgtatggtcttatgcaaagggacttcctcacatgtttcagcagggtggtgtattctacagtattatgaagaaaaccatgggtatggctgatggcaagcattgtacttttccacatctgcctggcaaaacctttgtctataatgcttctgaagatagactggaattgtgtgtggatgctgcaggacatttccccattggtcctgatgttgaagatttagttaaagaggctgtaagtcaggttcgatcagaggctactacaagaagtagggaatcaagtccctcacatgggctattaaaactaggtagtggtggagtagtgaaaaagaaatctgagcaacttcataacgtaactgcctttcagggaaaagggcattctttaggaactgcatctggtaacccacaccttgatccaagagctagggaaacttcagttgtaagaaagcataatacagggacagactttagtaatagttccacctaaaacagagccttctgtattcacagcttcttctagtaatagtgagcttattcgaatagctcctggagtaataacaatgagagacggcaggcagcttgatcctgatttggttgaggcccagcgaaaaaaaattgcaggaaatggtttcttctattcaggcttcaatggacaggcaccttcgggatcaaagtacagagcagtcaccatctgatcttcatcaaaggaaaacagaagttgtgagttcttctgcagagtctgggagtcttcagactggtttgcctgaatcttttcctttaactggtggtactgaaaatttgaatacagaaacaactgatggctgtgtagcagatgcactgggagcagcctttgccacaaggtcaaaagcacaaaggggaaattccgtggaggagcttgaagagatggatagtcaagatgctgagatgactaacacaactgaggccaatggatcactcttgatttaattagaggctaataaaggcagaatgtttattgtgaatatgta

SEQ ID NO: 7725 - DNA, 1400 bp, Homo sapiens
tatgacctcacagatgctgctggcagtcccttccttgcagaatccttgctcctgaatatctttaagaaaatttcttaaaggaaaagacaaaaaatttaactcaaaagttacctgtttgccatagaaattggtgtctcccctgaaggaggatcgagagccggtgaatgagaacattggcaaaggcactggaatggggacattcactcccacctaaaacagaacaaatccgtgtcatatcctaaggacaaaggaactctccatttagaaacacaaaggcatcagagaccagttttaaatacccaccttctaccctatcctctaccccatgaactttcattcctgaggaagaaatggggcaatgtgggaggtcatgggggcaatcttaaaccaatgactcaccattatttactgtttcctcttaggaaatagtaaatggatataagaatctcttaaaaattctgttcacgaacctgtccaacatccaccaagtgggcatatttccgagcagtggctccattggtggtgaagatggcagttccatttccatatgggttgttatttacaatctggatggcttcatccaatgtttctgtctccagaaccacaagaactggaccaaaaatctcctctttgtaacaggtcatatttggctgccaggagtgatgcatccagaaaagaagtcagctttttggattctgagtattttatgcttatttggtactttcacttactacacatcatttacgtggacaactttcatattactaatctcttttcatttcaaatcacctatttaaaaaaaaagtcctctctcaagtgtattccgtcttccaagttaccaatcatataaacaacttggaattcctatcaacaataaccacacttcctttaagggactgtatctttagttcatgacccatcatcagctgcctttttaatacctgaacgactagtttcatccaattgttatcaaaaagttacatgaaaatttattttttataaatccaatctatagtaaatataccaggataatttttctctttacagaaaccccatgctgttttctgtaacataaataatccattcttattcactcctttgcctcccaaatatgtctgtatgtttatattttgatatcaggtcgcagacactcaaaacatccttcaccatgcaattaatgtttgttgctgataaacggatttttctgtatggttctgtggcaagagatttcataatttctactgcacttacattcaacacttgatgattcactattatagtaaggatatatgaatttcaaaaaatgcctcataacctcaatttttaagtcatgttagctgagagactttcaaagttttgataaataaaaattgccaagtcaaaaaaaaaaaaaaaaaaaa

SEQ ID NO: 7726 - DNA, 963 bp, Homo sapiens; identical to SEQ ID NO: 2491

SEQ ID NO: 7727 - DNA, 600 bp, Homo sapiens
aatacgactgtcatcttcccatttcagacagcaacatgtagaagatgttcagcgtgcagggcttgctttcacaaacagtgcttccagtcctccgagtgcccccggtgtgcgaggatcacagcgaggagaaaacttctggaaagtgtggcctctgcagcaacatgatgcccctgagtactgtgaaaaagactgttcaacatgccttatgataacaccgatttgtgtctattattggtgacattgttttagatattgggtattgtatattaaggaaaaagatggtctatattctctttattgcatatacttaatgtttcaaaagaatgcagattctgtgtttaagcacagggctgatagttgtggttttgtttacaaatgttctgttttggctgctattggttttttaaagaggttttttatacttttgtatttgaatagttatgtttcactgatgctgagccagtttgtatgtgtgtgcatatatgtgaactgtaactgacaagatgaattactcagtttctctttctctaaagcttgtttgatgaaactggttggtcctttcagtgaacaaaaatatgaccccaaaaaaaaaaaaaaaaa

SEQ ID NO: 7728 - DNA, 1400 bp, Homo sapiens
aatggagtccacatgtttgggcagaatctggaggtgcagctgagctctgcgaggaccgagaacacgactgtggtgtggaaaagcttccatgacagcatcaccctcattgttctgtcatctgaggtgggcatctctgagctgaggctggagagactactccaaatggtgtttggagccatggtccttcttgtgggacttgaagaactgaccaatatccgcaacgtggagagactgaagaaggacttgagggccagttattgcctcatcgacagcttcctgggggactcggagctcatcggggacctgacccagtgtgtggactgcgtgattcctccagaggggtccctcttgcaggaagccctctccgggttcgctgaggccgcgggcacgaccttcgtcagtctggtggtgtccggccgggtggtggcagcaacagagggttggtggcggctggggacgcccgaggccgtgctgctcccctggctggtggggtccctgccgccgcagaccgctcgcgactacccggtgtacctgccgcacgggagccccacggtcccacaccggctcctgaccctgactctgctgccgagcctggagctgtgtctactctgcgggccgagcccacccctcagccagttgtatccacagcttctggagcgctggtggcagccactgctggacccgttgcgggcctgtctgccgttgggaccccgggcgctgcccagtggcttcccccttcacacagacatcctcgggctgctgctcctccacctggaactgaagcgctgcctcttcaccgtggagcccttgggggataaagagccttcaccagaacagcgccggcgcctcctccgaaacttctataccctggtcacctccacgcacttcccaccagagccagggccaccagagaagacagaagatgaggtctaccaggcccagctgcccagagcttgctacctggtgttggggactgaggaaccaggcacaggagtgcgtctggtggccttgcagctggggcttcggcggctgctgctgctgctgtctccccagagtcccacccatgggctgcgaagcctggccacccacactctgcatgccctcaccccacttctttgactacctagcagtgggtgatggacacagacatggggctgttagcgtctctctgtttattcgctcacaataatacacagcccctggatggggagggggtaggaggggctacaacagggtggggtgggaggggaggagacatccacttccctggcccctctcccctctgtgcttgggggggaaagggagggagggggactccccctaaccccccagaatgtaaacagcagcagatgaacaaaaataaaaatacaaaaggccgaaaaaaaaaaaaaaaaaaaaaa

SEQ ID NO: 7729 - DNA, 1400 bp, Homo sapiens
tctcattggagtcacagcagagctggtggattctctagaggccacagtcagcggcaagatgatcacccctgagtacctccagagcgtctgtgtccgcctgttcagtaaccagatgcggcagagcctggcgcatagtgtggacttcacgaggcctgggacggcatccaccatgttacgagcctccttggcacccgtgaaattgaaggatgtcccattactgccctccttggattatgagaaactgaagaaggatttgattttggggagtgaccgcttgaaagccttcttgttgcaggctctgcgctggcgcttgaccacatcccatcctggagagcagagggagaccgttctgcaagcctacatcagcaatgacctcttggactgttatagccacaaccagaggagtgtgcttcagttgctgcactccacgagcgacgtggtgcggcagtacatggccaggctcatcaatgcttttgcgtcactggcagaaggtcgcctctaccttgcccagaacacaaaggtgctgcagatgctggagggaaggctgaaggaggaggacaaggatatcatcaccagggagaatgttcttggggccctgcagaagttcagtctcaggcgcccgctgcagacagcgatgattcaagacggcctcatcttctggctggttgatgttctgaaggaccctgactgcctgtctgactacacgctggagtactcggtggctttgctcatgaacctctgcctccgcagcacagggaagaacatgtgtgccaaggtggcaggcctcgtgctcaaagtcctttcggatcttcttggccatgaaaaccatgagatacagccgtatgtgaatggagctctgtacagcatcctttctgttccatccattcgtgaggaagcaagagcaatgggaatggaagacatcctacgctgcttcatcaaagaaggcaatgctgaaatgatccgccagatagaattcatcatcaagcagctaaattccgaagagctaccagatggtgttcttgaatctgatgatgatgaagatgaagatgatgaagaggaccatgacatcatggaagccgatctggacaaagacgaactgatccagccccagcttggagaactctcaggagagaagcttctgaccacagagtacctggggatcatgaccaacacggggaagacaaggcggaaggggctggctaatgtgcagtggagcggggatgagcccctgcaaaggcccgtcacccccggcggccacagaaacgggtacccagtgtaagtcagggctaaaggaagcgggaattgactttcttaagctttgttttgattacagtgtaagatgtatgtatttttaaaattcaaaataaagcattcattttgaaaaaaaaaaaaaaaaaaaa

SEQ ID NO: 7730 - DNA, 1332 bp, Homo sapiens; identical to SEQ ID NO: 2495

SEQ ID NO: 7731 - DNA, 1400 bp, Homo sapiens
ccatctccactatttagaaatgttctcagactttaaaataatgcacagggcttgagctttctgtcatttgactttaaaaggaagtttcattcatatttatcctcttatgtaaaattgcggtataaagtctcatttccaaatatgttaaatgacaaaattattttataaaatgtttatgcacactttataaccttaagtttttatttgagaatgtgaaagtacaaagtgcagtagacttcaacaatcttgagtgccaagaataatacagaaaaagaagacagttgatgaatgagtttatagggttctaatcttaagatggtaaaaatgtagaaagaccttgctggttttttgggggtattcgtttcttaaacaatccaaatctaagcttagaagaaaagtttagcgttaagcacctttatcttcatgaataagcttcagcttgctcttggcaagagaagagtgcttgagttacagaaggcataagtagtttgaagaatgcagcagcctttttgtaaacttcccagatatcaaaatagactttgatatataaatggttttctgagatgacactgcctctatttctataaccatttcacctggactatctaaccagtcctatgaatgtatccctaaatgtggttattgaaaacctaatagctgcctcatgacaagtacatgttatttaaggaggaaaaaatattaaattttgaattgagtgtgtaggctccctatcattatatatagagtttctttttccacggtagtcagtgacttaacctgaattgtaaatgtttgtaaagggttaattgtcctacatcaaacttagttaaataattccatccacttatggaggaggaggagaatgtggaagaggtaaaaagctgggcacaagttcatatgcctatgagtcagtaaagactgaagtaatgtcctatgttgagctggttattttgatatatgataataattatctttgaagtagaacaattctgttaactggaaaatcacaggatatatccatcatatttttcaggacagatagtttttactgtggggcaaataggttaaaattacactatgttagttgcatttaggttttaaagcaaagaatctgtagagaaatctatgcaatatatagtttgtccagattagctttcatttggggaatgaagttctgaaatatctaaagcagtttactcatcaattgaaaagtcctccaaaaagagaactattgggaaaccatggtgtggtggtggaaaagaaaagctccctcagttttttggagggaataacttaaaaaaatacttaaatggctaagtttacttggtgcagttaagaattaaacttgtcaattttaacattgctgttacatctgaaataaacttatgtgatgttctggt

SEQ ID NO: 7732 - DNA, 600 bp, Homo sapiens
atcttcccacgtgggcctcccaaaacgctggaactacaagtgtgagccaccgcgcctggcccaagccctccacattttcaatccaggagccttgagtctgtgttgtgtcctgacacctccaagttctagggccgtcaggacacgggagggtttggggacagagtgtccttcctctgtcctctcatcccagtcctgatggccgcttggtgagtgtctggtgccctggtggcctgccccagctctcttctggctttctgagcaggaagcgagcagaggctccacaggcttacgctgctctcctgacagccacacgcgaccctcggtgcagagtgcagaggcggctctggttcctccagccacctcagtccctctttgggaggtgatgttcccattgtttttcaaaggcctcaccttcaactgtctgtcttagaattcccctctggagggctatggcctccctatgctttcacttcccacctctctacctaagttccttcccagcacatcgccagccctgggcctggggatgtccccaatgctgtacctggctgaccccggattaaaagcctcatccacgaccgaaaaaaaaaaaaaaaaaaa

SEQ ID NO: 7733 - DNA, 1400 bp, Homo sapiens
gaatttaaggggtcccctagtctagtctctgcccctggatagtgtccagccttgtatatttctgaagaggtggatcccagagtggctctgatgtccacattagaaaaacttacttgtaatgatcatgtcagccttcagaagagaatccccaccaacttctgtgcctcctcagatggggatttatctggatctctgtggttccttctcagccgaaacaggtccagtatcccagtcatttcttcaaatgctgataggggtatgttggaatccgaagccacttccccgccttcaagccccagatgggctgctctcctgtaactttctaggagaagagacattttcttctttccctttcctggtccatccctgcaccctggtcctctcccagcctctcccccacattgtccctgactctaggggcacatccagtctccatcgtgctgcagcagctggactgagggcagagcctgtaggtgcagaggccctggctcccgaggtccagccactctccctggggcctctggggtgagagcagcttccgataggacctgcccagatttctgcatgtgcacttttgtttactgaaagagagaaaggggggggtcacagcaacatgccctggcctttctgccctgttccccaaccccactgaggcctgctgcacaggtcaatgccttcgttatcgttattgtactgtcactttgttcttgaggtagtagtcaaggatcaggaggggcagatgtcttctctgggctgcgtggggccggagcagaggtgagcagcaatgcactggttcgggagcccccatcagcctccttgtgcaaactgggcccccatgccacagtctggctttccctccatctgccccaggacaagagcaagaaggacatcagttgcccagtcatgtgatcccctgccatcttgccttaggaacagccttcccccaccagcagccatggctggctggggctttagccaagccacctactgccaggaattggagcctcagttccctcctgtgtcaagtagctaactgcagcagctggactgagggcagagtctgtgggtgcagagaccctgcatgtaggtcacaggttgaggcccagccactctccctggggcctggtgggtaggcaagtagctctggggccacctcaagtgaccaaatgctattaatttccatcctttagcaggctgggccctaggcaggaagctggcttctgggagaggagtgagaacgtgcagggcctgcctagcttgcgtgcttgaggaaggtggcattccgtgcttgcctccttgaggagggtggcattctgtgtcttctgcttatgaagcgcctttcttaaagtttggcaataaatccatttttatggaaaaaaaaaaaaaaaaaaaaaaaaaaa

SEQ ID NO: 7734 - DNA, 600 bp, Homo sapiens
ctgcttggcctgggcctggtagagccaggcacccagtgtggacctagaatggtgtgccagagcaggcgctgcaggaagaatgccttccaggagcttcagcgctgcctgactgcctgccacagccacggggtttgcaatagcaaccataactgccactgtgctccaggctgggctccacccttctgtgacaagccaggctttggtggcagcatggacagtggccctgtgcaggctgaaaaccatgacaccttcctgctggccatgctcctcagcgtcctgctgcctctgctcccaggggccggcctggcctggtgttgctaccgactcccaggagcccatctgcagcgatgcagctggggctgcagaagggaccctgcgtgcagtggccccaaagatggcccacacagggaccaccccctgggcggcgttcaccccatggagttgggccccacagccactggacagccctggcccctggaccctgagaactctcatgagcccagcagccaccctgagaagcctctgccagcagtctcgcctgacccccaagcagatcaagtccagatgccaagatcctgcctctggtgagaggtagctcct

SEQ ID NO: 7735 - DNA, 1400 bp, Homo sapiens
gtttaggagagaatagtcatgaaaagaaagggaagaaaggggagaagggaagaggttaaaaagtaagtgctcagacctatgaacgtaatccctttgctagaaatatttaagagcagctcagcttggttgaaactgagttttgtcatcttccatatttgcaggaaggtattttctgacttgcaatgcagctagatgtaaaattttattttatcatcctagaaagccttgactagaaaaatgaataaatattgagggtttcctgtccatatctggcttgcatgtgccagaaagcagagaatagaaaatgtaatctccaacatccaagcatcgaaacccaaggggtaggcaattctatgtaggttttggacatgaagtttggtgcatcttggtttatgctggctcaactgctattaaacctctctggcttatagtctcttcattctattagacaagcacgtatcgaacacttgcttcgcacaaggctctttagttaacaatttagcagctactgtttgtgttaaacacacttttcaccaaataggttctgaggcaaacgagagcaatgactatttaaagaaaggctttcccagcatcacttacacatcccaaaactaaaaagatcaactcttccaactgagaaaagactcctggctttgaatggaaacttacagcagagagtcacaggccacggcaacaacaacgacaacaacaaacatttggaatattattctcaactcacgttttaataatacatcttaattatttttctagtagagaaactacaaatcagcctcttcaacatttatatacagtttaataagcctcttgcaagttacttgttctctcacctgaggtatttttttcctccccaccttgcccctgttcctcccttcctcttctccctttgcaagaggaaatatttaacatatttgggtccaacttcaataatgtaataattaatacattaaaagcatttaacttcctttctagaaaaatgcacaggctaaggcatagacaaaacaaagagaaatgctgagaaatttgccactggagacaagcaatctgaataaatatttgccaaaagttctttttatgtcatatagtgtcaggatttgaaggagctattttttttaatgttgcaactagcaactcatcttcggaagacacagccaggagaatgaagtagaagtgaaaggtttataaatccatttgtaagcatttatcccatatattttaaattcaagaaaaattgtgtttatctttagaattttgtattcaatactttatgtactatgtgactcatgcttctggataaataaagcaccaaatatgtatctgtaaccacaatcacacatattatattaaatatatatctatataacaaaaaaaaaaaaaaaaaa

SEQ ID NO: 7736 - DNA, 600 bp, Homo sapiens
ccggctggcagaacctggtccatgaggtgtggactgctgtcatcccagagactgaggctgtaagacgcattgtggagagggatggcctcagtgaagccgcggctcaaagccggctgcagagccagatgagcgggcagcagcttgtggaacagagccacgtggtgctcagcaccttgtgggagccgcatatcacccaacgccaggtggagaaagcctgggccctcttgcagaagcgcattcccaagactcatcaggccctcgactgaaaagttctcagtggggccagactggctcctggagctgacaagcgaccccgtggtgaggagaaatgggggccttgatgctcaccctggttcaggcccagaggtccaagctatactgtgcaggacatggccaggcctggtggacacaggaagcctacccaacacgctggtatttggccaacactgaggatgtggttcatgggggagcagtcccctccccactcttgcccatgggtgactcttacccacagctgactagggccagcgcaaatactggaacctgtaacagaattaaaggtgaatgttctgagaaaaaaaaaaaaaaaaaaaaaaaaaa

SEQ ID NO: 7737 - DNA, 600 bp, Homo sapiens
gccatgcgggagaaggaggagcagcgggggctgcgcaagtacaactacacgctgctgcgcgtgcgcctccccgatggctgcctcctgcagggcactttctacgctcgggagcggctgggggcggtgtacgggttcgtccgggaggccctgcagagcgactggctgccttttgagctgctggcctcgggagggcagaagctgtccgaggacgagaacctggccttgaacgagtgcgggctggtgccctctgccctcctgaccttctcgtgggacatggctgtgctggaggacatcaaggccgcgggggccgagccggactccatcctgaaacccgagctcctgtcagccatcgagaagctcttgtgaaataaaagcagggttggcctcagccctgtgggtctgtctcatgctctccctgttcctctccccgccaccccagggcctccaagccacctctggaaatacttggctctgccccatgggcacgggaggggcgccagccgtggagctgtggaattgggccccgtggcagagcccccatcccttgggggctgtggggatgcgcccaagcccccgagggagaggcctggggacaccaac

SEQ ID NO: 7738 - DNA, 1400 bp, Homo sapiens
agctggtctcttatcaagaatacctgcccgcccaaggatgacccccaggttatggaagacaaatccgaccgccctgtctgccgacattttgccaaaaagggccactgtcgatatgaggacctctgtgccttctaccatccaggcgtcaatggacctcctctgtgagactgtgccttcccatccaggctggaaggagctctctgtgacctagcggccatttatttctctgtagccctatgatggctactgtgaggctcttctaacaccctcagtcagtgacacacccatcccatccaccacttcccccgtgtggggtccagagtggtgttgcatcactggtgcgcggcatacgcgctttcttctgatccagcctgtagagactcgcctttgggacccatctttgcttcctttcagttgcctcctggatcttctttcccgtcatcaaatgactgctgaacaggaaacctctttggtgctgtttcttgtgcatctgtccacctgttccccagtattgccctcaattcctgagagccctggagcggtttcctaccattcccttcttttagctgcttgttttaagtcctttttatgtgacattccctacccccaatgttgtcagctgcttgtgaaactcagccaggttgtctaacctggggtcaagtttgggtgactggtgcagagttacttcctaaaaggccactctccctgcctttggatttcatagtttctctgtcagtagcatgatccccaccgctatggtctatctatgatcaccgtgctttgtgaaactgtgcatccccttgtagcctttctcagtgtccgtggcatttttgtgacttcccagcactagaataagttttcctgccaaaatgagtgaggcgcttggtgccctctggactttcccacttcccaacatgggagaattgtgaactttccatcagactgcctccctggccctccccattcttctcctgttggttattctgagtctgacacagacccatgacatgtcttataaagcctccaatggctttatcctacctagatcccttccagcccattttaattagactatgtcattgtgaggccaccagtccattcatttgaattctgtgaatctccaccttgcctatctttgggtagaagctggacagtactgttgccctcttccaatcctcttcccctacatccctggcactggttgttttctgtgaaaacagcagtgaacaggttcagttttgaactggccctgaggaaatgggtcaggagttgtattggcaagagggaggggtgagagctgttggagaactgagaatgaggttttttttttttttttctttttaactttttttatattagtaataaatgcagtggaaaccagcattttatttaaaaaaaaa

SEQ ID NO: 7739 - DNA, 1400 bp, Homo sapiens
ataggaaatgatgggattttcatgttaacttttttcatggcattcctctttaactggattgggtttttcctgtctttttgcctgaccacttcagctgcaggaaggtatggggccatttcaggatttggtctctctctaattaaatggatcctgattgtcaggttttccacctatttccctggatattttgatggtcagtactggctctggtgggtgttccttgttttaggctttctcctgtttctcagaggatttatcaattatgcaaaagttcggaagatgccagaaactttctcaaatctccccaggaccagagttctctttatttattaaagatgttttctggcaaaggccttcctgcatttatgaattctctctcaagaagcaagagaacacctgcaggaagtgaatcaagatgcagaacacagaggaataatcacctgctttaaaaaaataaagtactgttgaaaagatcatttctctctatttgttcctaggtgtaaaattttaatagttaatgcagaattctgtaatcattgaatcattagtggttaatgtttgaaaaagctcttgcaatcaagtctgtgatgtattaataatgccttatatattgtttgtagtcattttaagtagcatgagccatgtccctgtagtcggtagggggcagtcttgctttattcatcctccatctcaaaatgaacttggaattaaatattgtaagatatgtataatgctggccattttaaaggggttttctcaaaagttaaacttttgttatgactgtgtttttgcacataatccatatttgctgttcaagttaatctagaaatttattcaattctgtatgaacacctggaagcaaaatcatagtgcaaaaatacatttaaggtgtggtcaaaaataagtctttaattggtaaataataagcattaattttttatagcctgtattcacaattctgcggtaccttattgtacctaagggattctaaaggtgttgtcactgtataaaacagaaagcactaggatacaaatgaagcttaattactaaaatgtaattcttgacactctttctataattagcgttcttcacccccacccccacccccaccccccttattttccttttgtctcctggtgattaggccaaagtctgggagtaaggagaggattaggtacttaggagcaaagaaagaagtagcttggaacttttgagatgatccctaacatactgtactacttgcttttacaatgtgttagcagaaaccagtgggttataatgtagaatgatgtgctttctgcccaagtggtaattcatcttggtttgctatgttaaaactgtaaatacaacagaacattaataaatatctcttgtgtagcaaaaaaaaaaaaaaaaaaaaa

SEQ ID NO: 7740 - DNA, 1310 bp, Homo sapiens; identical to SEQ ID NO: 2505

SEQ ID NO: 7741 - DNA, 1310 bp, Homo sapiens; identical to SEQ ID NO: 2505

SEQ ID NO: 7742 - DNA, 1375 bp, Homo sapiens; identical to SEQ ID NO: 2507

SEQ ID NO: 7743 - DNA, 600 bp, Homo sapiens
atttcctggcagctgaactcgggtagtccagtggcctagctggtaccacatctattcccatccagagacattctctggcaagtgttctcagctgaaaagtggttggggatgattcttaccttggtaattaaatgaagctacacatttgggtaatctagcaaatgaagtattttttccctcttggcaacttgtgtcagagttactctggtctgagtcaactttcgctggggaaaacctatggaacctactgcaaaaagattgtccaaaatgcctaagaaaatactcctctgatgcatttagccttcaaccctacctgtcttgctgaagggagaaaaatgttttagtacattataggcccagcagcttttattcatgtccaccagctagttgcacagagaatcatgtgtacctaactaaggatgatctaggataagtaactcctgttttatattgagtattttagggaagtctttaaaagacttgttttatatctataaatctaggttattacaaatacaagaattttgtaccttaaataagcctcatttctatttcttcttcattaattctccatctagtcttgtgaaaaaaaaaaaaaaa

SEQ ID NO: 7744 - DNA, 600 bp, Homo sapiens
ttaagagcttttcataatgaggcccaggttaacccagaacgtaaaaatctaaaatggattggtcttgatttgagcaatggtaaacctcgagacaacaaacaagcaggggtgtttgaaccaaccatagttaaagttaagagtttgaaatttgcaacagaagctgcaatcaccattcttcgaattgatgatcttattaaattacatccagaaatccttcggattaaacatggaagttatgaagatgctgttcactctggagcccttaatgattgatctgatgttccttttatttataacaatgttaaatgcaatgtcttgtaccttgagttgagtattacacattaaagtaaagtacaagctgtaaacttgggtttttgtgatgtaggaaatggtttccatctgtactttggtcctctgatttcagatattgcaacctagtactttattagtttaaaaagaaattgaggttgttcaaagtttaagcaattcattctctctgaacacacattgctattcccatcccacccccaatgcacagggctgcaacaccacgacttctgcccattctctccagtgtgtgtaacagggtcacaagaattc

SEQ ID NO: 7745 - DNA, 600 bp, Homo sapiens
gaagagtattgagcccgtttcatcatggtttggtccaggttctgttctgatgagtagtatgtcagcactctttcagctatctatgtggatcaggacttgccataactactttattgaagaccttggattgccagtgtggggatcatatactgtttttgctttagcaactctgttttccggactgttattaggactctgtatgatatttgtggcagattgcctttgtccttcaaaaaggcgcagaccacagccgtacccatacccttcaaaaaaattattatcagaatctgcacaacctttgaaaaaagtggaggaggaacaagaggcggatgaagaagatgtttcagaagaagaagctgaaagtaaagaaggaacaaacaaagactttccacagaatgccataagacaacgctctctgggtccatcattggccacagataaatcctagttaaattttatagttatcttaatattatgattttgataaaaacagaagattgatcattttgtttggtttgaagtgaactgtgacttttttgaatattgcagggttcagtctagattgtcattaaattgaagagtctacattcagaacataaa

SEQ ID NO: 7746 - DNA, 600 bp, Homo sapiens
ttaatacatccaattaatgatgtctgacatgctatttttgtagggagaaaatatgtgctaatgatattttgagttaaaatatcttttggggaggatttgctgaaaagttgcacttttgttacaatgcttatgcttggtacaagcttatgctgtcttaaattattttaaaaaaattaaatactgtctgtgagaaaccagctggtttagaaaagtttagtatgtgacgataaactagaaattacctttatattctagtattttcagcactccataaattctattacctaaatattgccacactattttgtgatttaaaaattcttactaaggaataaaaactttaatatacgatatgatattgtctaataattaaaaaagacataatggatgctcaattagttttaagatatctataactatagggatacaaatcactacagttctcagatttacaccttttttttgtcattggcttgatgtcacacatttccaatctcttgcaagcctccaggctctggctttgtctacctgctcgttcccaatgtatcttaatgaaaagtgcaaaagaaaaacctaccaattaaaaaaaaaaaaaaaaaa

SEQ ID NO: 7747 - DNA, 600 bp, Homo sapiens
cagtcactacccactggccagccacccagccaacaggtctctcctcttgggccctgatttcagagtcctctttctcactagagactcaatgacagaagagaggctgggacttggttgggcatgctgtggttgctgagggatgagggggaggagagaggtaggagctggagatgaagagactgctagaagcagcaggaagcctgcccttctgccctctcccctccctgcccctgtgtgagtcttttagggagggtgactgggaggtgccccccgtcccacctttttcctgtgctctaggtgggctaagtgcctccctagaggactccatggctgagaggctcctgggcagatggggtcaaggctgggccagtcccagatgaagcctatgggagtcaggaccctctccactctccctctccactccccttcctgttctcacctggctgtggctggccctgtgtggggtgggtacactggaaaacaagaaggttggagttggtctaggacattggttttaaatgacagttctgtgaactggtccaaggaggttctgttattaaagtgatatatggtcttgaaaaaaaaaaaaaaaaaaaaaaa

SEQ ID NO: 7748 - DNA, 1400 bp, Homo sapiens
tccctgaacctcagtttcctcatctgcagaatggggataattatgtcccaggggtatatttagaccctgtttcctttcaggagggtccccagctggtccagggcctgggaaatttctacttatcctcattacccaggtccctcctttggaccctgtaaagggtcagggtgaatcagatgggggactgagcaagtagctatgactgcagatcatgtaaggaagggactgacaagaagctcccagatgctggggagaatgaagagctaaaatagatcctaggtgctggatgctttgtcatccatgcgtgcacatatgggtgctggcagagcccccaaggactctggcctctcgagttctcctatcttctccattctagatgcttcccttgtatccagtgatgtgctggagctggctttgccaagcttgtgagagctggttgctacattttcaggatttttacaagttggtaaacacagccattataaaaaattaaatgatttaaatttataattaagtaaattacattaaaacaaaaaaattatactcaaaattcattacttaattttactacctgttactattatctgtgcttttgaggctatttctacatagtaactcttatggagacctaggggagacaccgcgcatctcttcctgattccccactcaatgacatcatgttagtctttggttgcttaactggctgtggggagtgtttttgtatcacaaagattagagaggactacacatcagggcttgatttattgtttgttgattttctagacttcagaacatgctggataaaatgtcagtaatgcaaattaaactttaaagtatgtcttgtttgtagccaatacatggtgtatagcaccaaaaaatggagggattattcttccagtagttgaacactgtcatccgtttcagctgacagctgctcaaatcatttaagaaggagttctgacattcattttcattgttttacttttgtcttcctcactagtgtaaacaaaaatttcaaccagcattcatgccgaacctatacccattcttcagtgcctagctgtacagttatcagggatttttatttgtagtctaattttgtcaaatcatggccaaatcgcagtgatagttgactttggatacaaggtttggcaaaaaaaaaaatattaacaaaatattctgtaagaatcaattgtctatatggaatttaggataaagaatatttacaataaagaatatttacaataaagagtttattattatttgtaagttgtgtgcaacaaacataccctttatctctgtaaaatttatacacacaaaaattaacaaaagattctgtaagaattaattggctatatggaatttaggatagaatatttacaataaagagtatttacaat

SEQ ID NO: 7749 - DNA, 600 bp, Homo sapiens
aaaaaaaaaaagcactgaaaaccaattactgaaaaaaaattgacagctagtgttttttaccatccgtcattacccaaagacttgggaactaaaatgttccccagggtgatatgctgattttcattgtgcacatggactgaatcacatagattctcctccgtcagtaaccgtgcgattatacaaattatgtcttccaaagtatggaacactccaatcagaaaaaggttatcattggtcgttgagttatgggaagaacttaagcatatactgtgtaaacagtgccatacatttctaaaatcccaagtgtaggaaaaatatgcagacatacagatatataggccaactattagtaataatatgaaatatacttaaagagcttttaaaactttgtatttttgtacaaaatatttgtcttttacaatttttttcctttttttttttttgtcattttaccgacataatacatggagccaaagaaaacaataatggtactaataaaaactcctagggtttcctgtcagatttaattctacccagtggcaaagaattttttcaattgtggctttaaaaaaataattaaatatacatgtatatatatat

SEQ ID NO: 7750 - DNA, 600 bp, Homo sapiens
agagagacagagtggcgggggccggggaggagcgcaaactcatcctttataaagacaccactcctgagataacaatccaatcccatgataatgacattaatccattcaagaagatagagctctcgtgacttaatcaccttctaaagatctcacctgacaacactgttgcattggcagttaagtttccacgtaaactttcggggacacattcaaaccacaggagaaactcaaattgttcctgggcaaatcacaacatggggaattttattcataaatgtccacagaaacagtaaatgttctcgcttcagaacttaattcatctaatccctcctgtttgtctcaaattataggataactttgaaactttctgaattaacgttatttaaaaggaaatgtagatgttattttagtctctatcttcaggttattatcacttaaaaacctgcgaaagctgtcaacttttgtggttgtagcaagtattaataaatatttataaatcctctaatgtaagtctagctacctatccaatactaaataccccttaaagtattaaatgcactatctgctgtaaacggaaaaaaaaaaaaaaaaaaaaaaaaa

SEQ ID NO: 7751 - DNA, 600 bp, Homo sapiens
cttgggcacctcctggtatgtgcacaccccactttgaacacccttgctttagtgcaaatcagcacgcctaaatrgcatcccaaacccactgtgcgacatttggcctgcagaataggaaagtcctaggscagaatccccaggaacttcaaatctgggagatgaggaaagaaaactcactcacaaacaacataaatgtaaataattcaaaaccctaaaggagagctgtccctagacagtagtggctacaggtgctaagcaaaagtcaggtacactggacagagccatgcgattgattgttcatcttccctctctgggtctccagaaaaggacactggcaatatccccagctctctcctgattggaattctttgaaccctcgaagtgctccagcagtactaccccccacgtagcagtgggcccatgtcgcttgaatattatttttgatttgaccaccaagatgtaatgatgattctattccattttgaaaagggtctgagaaagtgtacaggtctaattatatatacatatttatacatgtgtatttttgtttattgttacattttgacattggactttctattaaataatttttaagagttg

SEQ ID NO: 7752 - DNA, 1400 bp, Homo sapiens
acatggtttcctttgagactaaaatagcgttgagggaaatgaaattgctggactatttgtggctcctgagttgagtgattttggtgaaagaaagcacatccaaagcatagtttacctgcccacgagttctggaaaggtggccttgtggcagtattgacgttcctctgatcttaaggtcacagttgactcaatactgtgttggtccgtagcatggagcagattgaaatgcaaaaacccacacctctggaagataccttcacggccgctgctggagcttctgttgctgtgaatacttctctcagtgtgagaggttagccgtgatgaaagcagcgttacttctgaccgtgcctgagtaagagaatgctgatgccataactttatgtgtcgatacttgtcaaatcagttactgttcaggggatccttctgtttctcacggggtgaaacatgtctttagttcctcatgttaacacgaagccagagcccacatgaactgttggatgtcttccttagaaagggtaggcatggaaaattccacgaggctcattctcagtatctcattaactcattgaaagattccagttgtatttgtcacctggggtgacaagaccagacaggctttcccaggcctgggtatccagggaggctctgcagccctgctgaagggccctaactagagttctagagtttctgattctgtttctcagtagtccttttagaggcttgctatacttggtctgcttcaaggaggtcgaccttctaatgtatgaagaatgggatgcatttgatctcaagaccaaagacagatgtcagtgggctgctctggccctggtgtgcacggctgtggcagctgttgatgccagtgtcctctaactcatgctgtccttgtgattaaacacctctatctcccttgggaataagcacatacaggcttaagctctaagatagataggtgtttgtccttttaccatcgagctacttcccataataaccactttgcatccaacactcttcacccacctcccatacgcaaggggatgtggatacttggcccaaagtaactggtggtaggaatcttagaaacaagaccacttatactgtctgtctgaggcagaagataacagcagcatctcgaccagcctctgccttaaaggaaatctttattaatcacgtatggttcacagataattctttttttaaaaaaacccaacctcctagagaagcacaactgtcaagagtcttgtacacacaacttcagctttgcatcacgagtcttgtattccaagaaaatcaaagtggtacaatttgtttgtttacactatgatactttctaaataaactctttttttttaaaaaaaaaaaaaaaaaaaaaaaaaaaaaaaaaaaaaaaaaaaaaaaaaaac

SEQ ID NO: 7753 - DNA, 1400 bp, Homo sapiens
ccagtctgcccagctgcagtactcacgccccatgggggatcttggtctgtttttcttgtgggagcctagtggagagcagacgtggctttttatgtgtcttgttggggaggtgacttgcatggtggggacaaggctgtcgtggcaaccttgggatcgagtttgagactaaaggatgtcatgagatccctggcttctccccatgttgttcccggacaagggcagaagggaggcatggcaagggacctctgctgtccttactcaacagtggtcctcatccctccccacctcccactgcttcctgcaagggcaccagttgtatgagaaagttggcctttggacttaggatttcttattgtagctaagagccatctgaagcagcaggttgcaggacaaatgcttcagtccgccgagagcagtaccgtgtggccaagaggtggactcagagccttccttgagctaaactcggccaaccaaggcacgcagcatgtcccctcaggtctccagtcagtccaggttgaccctcagttctggacgtgtgtatatagctgtatttaatacctcaaggtcattgtggctctggggatgccagggcaggaggacgagggtgcgctgtggacacagcagtccgcggaattccgttctgggaagccaatggtcgccggcaccccttgcttcctccctctgttgtctgcctgtgtgacacacatcaatggcaataacttcttccaactcctcgcagaagtgggagaggccggcagcctgcaccgagaggggctttcctctctcttgctccccgcttcgttctgttttggctgcagagagtggttcatccatactctcattccctcgcctccccttgtggacgggggtcttgccttttcaattcctgtgttttggtgtcttcccttatctgctaccctgaatcacctgtcctggtcttgctgtgtgatgggaacatgcttgtaaactgcgtaacaaatctactttgtgtatgtgtctgtttatgggggtggtttattatttttgctggtccctagaccactttgtatgaccgtttgcagtctgagcaggccaggggctgacagctaatgtcaggaccctcagcggtggagcctgctggggggacccagctgctcttggacaagtggctgagctcctatctggcctcctcttttttttttttttcaagtaatttgtgtgtatttctaactgattgtattgaaaaaattcctagtatttcagtaaaaatgcctgttgtgagatgaacctcctgtaacttctatctgttcttttttgaggctcagggagaaactagcatttttttttttccaaactactttttgtcactgtgacagttgtaaataaagtttgaaaatgctcaaaaaaaaaaaaaaaaaaac

SEQ ID NO: 7754 - DNA, 309 bp, Homo sapiens; identical to SEQ ID NO: 2519

SEQ ID NO: 7755 - DNA, 1400 bp, Homo sapiens
aacgtgaagagggggacctacctgccgcagacgtacatcatccaggaggagatggtggtcacggagcatgtcagtgacaaggaggccctggggtccttcatctaccacctgtgcaacgggaaagacacctaccggctccggcgccgggcaacgcggaggcggatcaacaagcgtggggccaagaactgcaatgccatccgccacttcgagaacaccttcgtggtggagacgctcatctgcggggtggtgtgaggccctcctcccccagaaccccctgccgtgttcctcttttcttctttccggctgctctctggccctcctccttccccctgcttagcttgtactttggacgcgtttctatagaggtgacatgtctctccattcctctccaaccctgcccacctccctgtaccagagctgtgatctctcggtggggggcccatctctgctgacctgggtgtggcggagggagaggcgatgctgcaaagtgttttctgtgtcccactgtcttgaagctgggcctgccaaagcctgggcccacagctgcaccggcagcccaaggggaaggaccggttgggggagccgggcatgtgaggccctgggcaaggggatggggctgtgggggcggggcggcatgggcttcagaagtatctgcacaattagaaaagtcctcagaagctttttcttggagggtacactttcttcactgtccctattcctagacctggggcttgagctgaggatgggacgatgtgcccagggagggacccaccagagcacaagagaaggtggctacctgggggtgtcccagggactctgtcagtgccttcagcccaccagcaggagcttggagtttggggagtggggatgagtccgtcaagcacaactgttctctgagtggaaccaaagaagcaaggagctaggacccccagtcctgccccccaggagcacaagcagggtcccctcagtcaaggcagtgggatgggcggctgaggaacggggcaggcaaggtcactgctcagtcacgtccacgggggacgagccgtgggttctgctgagtaggtggagctcattgctttctccaagcttggaactgttttgaaagataacacagagggaaagggagagccacctggtacttgtccaccctgcctcctctgttctgaaattccatccccctcagcttaggggaatgcacctttttccctttccttctcacttttgcatgtttttactgatcattcgatatgctaaccgttctcagccctgagccttggagaggagggctgtaacgccttcagtcagtctctggggatgaaactcttaaatgctttgtatattttctcaattagatctcttttcagaagtgtctatagaacaataaaaatcttttacttctg

SEQ ID NO: 7756 - DNA, 1400 bp, Homo sapiens
ggcagggtgcgcgacgcgtgcggctgctgctgggaatgcgccaacctcgagggccagctctgcgacctggaccccagtgctcacttctacgggcactgcggcgagcagcttgagtgccggctggacacaggcggcgacctgagccgcggagaggtgccggaacctctgtgtgcctgtcgttcgcagagtccgctctgcgggtccgacggtcacacctactcccagatctgccgcctgcaggaggcggcccgcgctcggcccgatgccaacctcactgtggcacacccggggccctgcgaatcggggccccagatcgtgtcacatccatatgacacttggaatgtgacagggcaggatgtgatctttggctgtgaagtgtttgcctaccccatggcctccatcgagtggaggaaggatggcttggacatccagctgccaggggatgacccccacatctctgtgcagtttaggggtggaccccagaggtttgaggtgactggctggctgcagatccaggctgtgcgtcccagtgatgagggcacttaccgctgccttggccgcaatgccctgggtcaagtggaggcccctgctagcttgacagtgctcacacctgaccagctgaactctacaggcatcccccagctgcgatcactaaacctggttcctgaggaggaggctgagagtgaagagaatgacgattactactaggtccagagctctggcccatgggggtgggtgagcggctatagtgttcatccctgctcttgaaaagacctggaaaggggagcagggtcccttcatcgactgctttcatgctgtcagtagggatgatcatgggaggcctatttgactccaaggtagcagtgtggtaggatagagacaaaagctggaggagggtagggagagaagctgagaccaggaccggtggggtacaaaggggcccatgcaggagatgccctggccagtaggacctccaacaggttgtttcccaggctggggtgggggcctgagcagacacagaggtgcaggcaccaggattctccacttcttccagccctgctgggccacagttctaactgcccttcctcccaggccctggttcttgctatttcctggtccccaacgtttatctagcttgtttgccctttccccaaactcatcttccagaacttttccctctctcctaagccccagttgcacctactaactgcagtcccttttgctgtctgccgtcttttgtacaagagagagaacagcggagcatgacttagttcagtgcagagagataggtgaggccagctcgagatcttataccactctgtattggacaaaggctagcacagggctaggcaccaataaagatttctaatgatgcacagaaaaaaaaaaaaaaaaaaaaa

SEQ ID NO: 7757 - DNA, 393 bp, Homo sapiens; identical to SEQ ID NO: 2522

SEQ ID NO: 7758 - DNA, 600 bp, Homo sapiens
ggaacctgaggccatttcactgccagttcctggccggcattcctcccccattgagcatgagctgtaacccggagccctgtgaggcgtggcaggtggagccttggagccagtgctccaggtcctgtggaggtggagttcaggagagaggagtgttctgtccaggaggcctctgtgattggacaaaaagacccacatccaccatgtcttgcaatgagcacctgtgctgtcactgggccactgggaactgggacctgtgttccacttcctgtggaggtggctttcagaagaggattgtccaatgtgtgccctcagagggcaataaaactgaagaccaagaccaatgtctatgtgatcacaaacccagacctccagaattcaaaaaatgcaaccagcaggcctgcaagaaaagtgccgatttactttgcactaaggacaaactgtcagccagtttctgccagacactgaaagccatgaagaaatgttctgtgcccaccgtgagggctgagtgctgcttctcgtgtccccagacacacatcacacacacccaaaggcaaagaaggcaacggttgctccaaaagtcaaaagaactctaagcccaaa

SEQ ID NO: 7759 - DNA, 1400 bp, Homo sapiens
tggttgtaaaatacacgagtatgagccagtctgtggatcagatggaattacatactttaacccttgtctggctggctgtgttaatagtggtaatcttagcactgggatacggaattatacagaatgcacctgtgtccaaagtcgccaagtgatcactccacccaccgtgggacagcgaagtcagctccgtgtggttattgtcaagacttatctcaatgagaacggctatgctgtgtctgggaaatgtaaacggacctgcaatactcttatcccattcttagtttttcttttcatagtcaccttcatcacagcatgtgcccaaccatcagctatcatagtaacactcaggtccgtagaagatgaggagagaccttttgcactgggaatgcagtttgttttgttgcgaacacttgcatacattcctactccaatctactttggagcagtcattgacaccacctgcatgctctggcaacaggaatgtggtgtgcagggttcttgctgggagtacaacgtgacgtcgtttcgttttgtgtattttggtttggctgccggcctcaaattcgttgggtttatttttatttttctggcctggtactccataaaatacaaggaggatggactgcagaggcggaggcagagagaatttcccctgagcaccgtgagtgagagagtgggacaccccgacaatgcccggactagatcttgcccagctttcagcacccagggagaattccacgaagagactggcctgcaaaaagggatccagtgcgcagcacagacctacccggggcccttcccagaagcaataagttcctctgcggacccggggctggaagagagccccgctgccttggagccgccctcctgaagcttgaaaatggaagaatttagttttgttggttgaattgaaaatggcgacttgagaaacaactgtgccttcttttctttctttcttttttttaacctctacagacacaatcctcaaaccaacaaaactcagtatacacagccgctattcattgagggctggatacctcaacaagactgagagcctttccccgcttctctccaagaaggagacgttcagctagatttgttcccatttccgttgtgttaattcaaagctcatgctcccctacggtacaggctgaggtacacggttagcaaaaccatgggaaggggaatggcggtgcatatcattaactaacactccaaacaaaggtgagcttgcccaggacttggcatttccaaatcaaagtttttagatatgaacacctactgtgagttctgctacaaagcacaaatgaatttgtctcaactatgcaatttgattggaaaaatgtatgtgcagcatgttacatttactttcacggaataaagcagatatgtttctgaaa

SEQ ID NO: 7760 - DNA, 935 bp, Homo sapiens; identical to SEQ ID NO: 2525

SEQ ID NO: 7761 - DNA, 600 bp, Homo sapiens
ccccagacttaatacccattgaaatttcacctcaggtgttgtgtcctgtgtctggttaagtgtcccatggaaggggaaagccttcacgtcagaacccaaccctataccttttacttcttaaatggtgctaaccacaggtgtcccagggtgctctgtgccagttaagatttttaactttcaaggggcagggcatactgggaaatgtagtttcccaaactgccttatcacttgggtggacatatgtctccttttatgccttttggtcttgagtaattaacagcatcctcttccacgctcagaagtgttctggttggggccaggcatggtggctcacgcctgtagtcccaacacttagggaggccgaggcgggcggatcacctgagatcaggagttcaagaccagcctggccaacatggcgaattcccgttctctactaaaaatacaaaaaatgtgtggggtgtggtggcaggagcctgtaatcctagctactcaggaggctgaggcaggagaatcgcttgagcccaggaggcggagattgcagtgagccgagatcgtgtcactgcactccagcctgggtgacaagagtgagactccgtctcc

SEQ ID NO: 7762 - DNA, 1400 bp, Homo sapiens
tccccacatttgaacagttggcagctttgcagatagaatatgaagatggtcagactgaggtccagagaggggaaggtactgacccaaagtcacacaaaaacgtggacttgaatgacgtcctggtgccaaagccgttctctcagttctggcagcccctgctcaggggcctgcactcccagaacttcacgcaggccctattggagaggatgctctctgaactgccagccttggggatcagcgggatccggcctacctacatcctcagatggaccgttgaactgatcgtggccaacaccaagactggacggaatgctcgccgattttctgcaggccagtgggaagcaagaaggggctggaggctgttcaactgctccgcctcccttgactggccccggatggttgagtcctgcttgggctcaccttgctgggccagcccccaactccttcggatcatcttcaaagccatggggcagggcctgccagacgaggagcaggagaagctgctgcgcatctgttccatttatacccagagtggagaaaacagcctggtgcaggagggctctgaggcctcccccattgggaagtctccatatacactagacagcctgtattggagcgtcaagccagccagctccagcttcgggtctgaagcaaaggcccagcaacaggaggagcagggcagtgttaatgatgtcaaggaagaggagaaggaggagaaagaggtcttgccagaccaggtagaggaggaggaagaaaatgatgaccaagaggaggaagaggaggatgaagatgatgaagatgatgaagaggaagacagaatggaggtggggcctttctctacagggcaagagtcccccactgccgagaatgctaggcttctggcccagaaaagaggagctttgcagggctctgcatggcaggttagctcagaagacgtgcgatgggacacatttcccctaggccgaatgccaggtcagaccgaggacccagcagagctcatgctggagaattatgacaccatgtatcttttggaccagcctgtgctagagcagcggctggaaccctcaacatgcaagactgacaccttgggcctgagctgtggtgtcggcagtggcaactgcagcaacagcagcagcagcaacttcgagggccttctctggagccaggggcagctgcatgggctcaaaactggcctgcagctcttctgatggccatccctggtgcaagtgttcatccagccgtgccagggcaacagcccaccccctagtacaactgatgctccctgagacaacctgggagacagcctggatcagccacatcaactcagttgtccaccacaggggaattttgaatgtcttttgtttttgttttgttttgaaaaataataaacaggcaactgt

SEQ ID NO: 7763 - DNA, 600 bp, Homo sapiens
atgaaaagtctcccatgtctacttctttctacacagacacggcaaccatccgatttctcaatcttttccccacctttcccccttttctattccacaaaaccgccattgtcatcatggcccgttctcaatgagctgttgggtacacctcccagacggggtggtggccgggcagaggggctcctcacttcccagtaggggcggccgggcagaggcgcccctcacctcctggacggggcggctggccgggcggggggctgacccccctacctccctcccagacagggcggctggccaggcagaggggctcctcacctcccagacggggcggcggggcagaggcgctcccatctcagacgatgggcggccgggcagagacgctcctcacttcctagatgggatggcggccgggcagagacactcctcactttccagactgggcagccaggcagaggggctcctcacatcccagacgatgggcggccaggcagagacgctcctcacttcccagacggggtagcggccgggcagaggctgcaatctcggcactttggggggccaagacaggcggctgggaagtggaggttgtagccgagatcacgc

SEQ ID NO: 7764 - DNA, 1400 bp, Homo sapiens
attactacacaagtaactattcccaaagatttggctggatctattattggcaaaggtggtcagcggattaaacaaatccgtcatgagtcgggagcttcgatcaaaattgatgagcctttagaaggatccgaagatcggatcattaccattacaggaacacaggaccagatacagaatgcacagtatttgctgcagaacagtgtgaagcagtattctggaaagtttttctaagactagtgaagaactgaaggagtcctgcatctttttttttttatctgcttctgtttaaaaagccaacattcctctgcttcataggtgttctgcatttgaggtgtagtgaaatctttgctgttcaccagatgtaatgttttagttcttacaaacagggttgggggggggaagggcgtgcaaaaactaacattgaaattttgaaacagcagcagagtgagtggattttatttttcgttattgtggtggtttaaaaaattccccccatgtaattattgtgaacaccttgctttgtggtcactgtaacatttggggggtgggccagggaggaaaagtaacaatagtccacatgtccctggcatctgttcagagcagtgtgcagaatgtaatgctcttttgtaagaaacgttttatgatttttaaaataaatttagtgaacctatttttggtggtcattttttttttaagacagtcattttaaaatggtggctgaatttcccaacccacccccaaactaaacactaagtttaattttcagctcctctgttggacatataagtgcatctcttgttggacataggcaaaataacttggcaaacttagttctggtgatttcttgatggtttggaagtctattgctgggaagaaattccatcatacatattcatgcttataataagctggggattttttgtttgtttttgcaaatgcttgcccctacttttcaacaattttctatgttagttgtgaagaactaaggtggggagcagtactacaagttgagtaatggtatgagtatataccagaattctgattggcagcaagtttattaatcagaataacacttggttatggaagtgactaatgctgaaaaaattgattatttttattagataatttctcacctatagacttaaactgtcaatttgctctagtgtcttattagttaaactttgtaaaatatatatatacttgtttttccattgtatgcaaattgaaagaaaaagatgtaccatttctctgttgtatgttggattatgtaggaatgtttgtgtacaattcaaaaaaaaaaaagatgaaaaaagttcctgtggatgttttgtgtagtatcttggcatttgtattgatagttaaaattcacttccaaataaataaaacacccatgatgctag

SEQ ID NO: 7765 - DNA, 600 bp, Homo sapiens
cgcatccaataccagctagtggacatctcccaggacaacgccctgagggatgagatgcgagccttggcaggcaaccccaaggccaccccaccccagattgtcaacggggaccagtactgtggggactatgagctcttcgtggaggctgtggaacaaaacacgctgcaggagttcctgaagctggcttgagtcaagcctgtccagagttcccctgctggactccatcaccacactccccccagccttcacctggccatgaaggaccttttgaccaactccctgtcattcctaacctaaccttagagtccctccccccaatgcaggccacttctcctccctccttctctaaatgtagtcccctctcctccatgtaaaggcaacattccttacccattagtctcagaaattgtcttaagcaacagccccaaatgctggctgcccccagccaagcattggggccgccatcctgcctggcactggctgatgggcacctctgttggttccatcagccagagctctgccaaaggccccgcagtccctctcccaggaggaccctagaggcaattaaatgatgtcctgttcaaaaaaaaaaaaaaaaaa

SEQ ID NO: 7766 - DNA, 600 bp, Homo sapiens
tccaagtacatcggcacgggccacgccgacaccaccaagtgggagtggctggtgaaccaacaccgcgactcgtactgctcctacatgggccacttcgaccttctcaactacttcgccattgcggagaatgagagcaaagcgcgagtccgcttcaacttgatggaaaagatgcttcagccttgtggaccgccagccgacaagcccgaggagaactgagactctgccttaccaccgcagtgcggggcacctctcccagcgtttctccggtttgccaatcctcttaagtattcctgtctccaaaggaccggctctccatggctcctgcgcctcgtgctttccgcgtacagaagtgcttgcccggggagtcccgcctgacctgccttcatgtggacccttagaacagcactgggagaccagcaggactcctgagaactgtgctggtggagaggtcctagagccggcgagcgtttgagaagagggcatggcgctggagtgagatgggatttggcgtctcgtttttggctaattgattgtcattggctttttccataaagtttagaaatcgttcaaaaaaaaaaaaaaaaaaaaaaaaaaaaaaaa

SEQ ID NO: 7767 - DNA, 600 bp, Homo sapiens
tcaaccttcccctatgctgccgctgcctgtagctgagggctgcccacctcccgccctcacagaggagatgctgctgaagcgcgaggagcgggcgcggaagcggcggctccaggcggcgcggcgggcagaagagcacaagaaccagactatcgagcgcctcaccaagactgcggcgaccagtgggcggggaggccgggggggcgcacggggcgagcggcggggagggcgggctgcggctccggcccccatggtgcgctactgcagcggagcacagggttccaccctttccttcccacctggcgtccccgcccccacggcagtgtctcagcggccatccccctcaggcccgccgccgcgctgctctgtccccggctgtccccatccgcgccgctacgcttgctcccgcacaggccaggcactctgtagtcttcagtgctaccgcatcaacctgcagatgcggctgggggggcccgagggtcctggatccccccttttggctacgtaaggcccttaacccggactctgcgccccgtcccatgcccgctcttgagtatcttccccaccctattaaattacatccggtgcaaaaaaaaaaaaaaa

SEQ ID NO: 7768 - DNA, 600 bp, Homo sapiens
aaagccagtgaaggtttgaagagtataaacccaggtgagacagcaccctctatgcgactgctggcctatgtttctggcttgggctttggaatcatgagtggagtattttcctttgtgaataccctatctgactccttggggccaggcacagtgggcattcatggagattctcctcaattcttcctttattcagctttcatgacgctggtcattatcttgctgcatgtattctggggcattgtattttttgatggctgtgagaagaaaaagtggggcatcctccttatcgttctcctgacccacctgctggtgtcagcccagaccttcataagttcttattatggaataaacctggcgtcagcatttataatcctggtgctcatgggcacctgggcattcttagctgcgggaggcagctgccgaagcctgaaactctgcctgctctgccaagacaagaactttcttctttacaaccagcgctccagataacctcagggaaccagcacttcccaaaccgcagactacatctttagaggaagcacaactgtgcctttttctgaaaatccctttttctggtggaaaaaaaaaaaaaaaaaaaac

SEQ ID NO: 7769 - DNA, 600 bp, Homo sapiens
aaagtcatctatttggacgatgatgtaattgtacaaggtgatatccaagaactgtatgacaccaccttggccctgggccacgcggcggctttctcagatgactgcgatttgccctctgctcaggacataaacagactcgtgggacttcagaacacatatatgggctatctggactaccggaagaaggccatcaaggaccttggcatcagccccagcacctgctctttcaatcctggtgtgattgttgccaacatgacagaatggaagcaccagcgcatcaccaagcaattggagaaatggatgcaaaagaatgtggaggaaaacctctatagcagctccctgggaggaggggtggccacctccccaatgctgattgtgtttcatgggaaatattccacaattaaccccctgtggcacataaggcacctgggctggaatccagatgccagatattcggagcattttctgcaggaagctaaattactccactggaatggaagacataaaccttgggacttccctagtgttcacaacgacttatgggaaagctggtttgttcctgaccctgcagggatatttaaactcaatcaccatagctga

SEQ ID NO: 7770 - DNA, 600 bp, Homo sapiens
gcgcgccgtcaccggctacaccgacccctacaccgggcagcagatctccctcttccaggccatgcagaaggacctcatcgtccgggagcacggcatccgcctgctggaggcccagatcgccacgggcggcgtcatcgaccccgtgcacagccaccgcgtgcccgtggacgtggcctaccggcgcggctacttcgacgaggagatgaaccgcgtcctggccgaccccagcgacgacaccaagggcttcttcgaccccaacacgcacgagaacctcacgtacctgcagcttctgcagagggccaccctggaccctgagacggggctcctatttctttctctctctctacagtgactgggcttcctccgtgcagttttctgcaactctggagaagttgaggcatacttgtgtgtctgggttgtttttttttttttttgtcattctttaattttgttgttttacccattcgttatctgtggaaaacgttttaagttgtcatgtgacagaaacttttcctttgtccatcgaggtgtttcataagttttttggtgtgttttctgggtcgtctatgtgtcatatggttttacttttctcccggaatt

SEQ ID NO: 7771 - DNA, 1400 bp, Homo sapiens
gaagagaattgagtttggtcggccctttcccaggactgaacatgaagagttatgccggcttcctcaccgtgaataagacttacaacagcaacctcttcttctggttcttcccagctcagatacagccagaagatgccccagtagttctctggctacagggtgggccgggaggttcatccatgtttggactctttgtggaacatgggccttatgttgtcacaagtaacatgaccttgcgtgacagagacttcccctggaccacaacgctctccatgctttacattgacaatccagtgggcacaggcttcagttttactgatgatacccacggatatgcagtcaatgaggacgatgtagcacgggatttatacagtgcactaattcagtttttccagatatttcctgaatataaaaataatgacttttatgtcactggggagtcttatgcagggaaatatgtgccagccattgcacacctcatccattccctcaaccctgtgagagaggtgaagatcaacctgaacggaattgctattggagatggatattctgatcccgaatcaattatagggggctatgcagaattcctgtaccaaattggcttgttggatgagaagcaaaaaaagtacttccagaagcagtgccatgaatgcatagaacacatcaggaagcagaactggcttgaggcctttgaaatactggataaactactagatggcgacttaacaagtgatccttcttacttccagaatgttacaggatgtagtaattactataactttttgcggtgcacggaacctgaggatcagctttactatgtgaaatttttgtcactcccagaggtgagacaagccatccacgtggggaatcagacttttaatgatggaactatagttgaaaagtacttgcgagaagatacagtacagtcagttaagccatggttaactgaaatcatgaataattataaggttctgatctacaatggccaactggacatcatcgtggcagctgccctgacagagcactccttgatgggcatggactggaaaggatcccaggaatacaagaaggcagaaaaaaaagtttggaagatccttaaatctgacagtgaagtggctggttacatccggcaagcgggtgactcccatcaggtaattattcgaggtggaggacatattttaccctatgaccagcctctgagagcttttgacatgattaatcgattcatttatggaaaaggatgggatccttatgttggataaactaccttcccgaaagagaacatcagaggttttcattgctgaaaagaaaatcgtaaaaacagaaaatgtcataggaataaaaaaattatcttttcatatctgcaagatttttttcatcaataaaaattatccttgaaa

SEQ ID NO: 7772 - DNA, 1400 bp, Homo sapiens
ctggtgatcgagtcacctacaccatcaatccatcttcccactgcaaccccaaccacctcagctacttcaagtttgtcggacgcattgtggccaaagctgtatatgacaaccgtcttctggagtgctactttactcgatccttttacaaacacatcttgggcaagtcagtcagatatacagatatggagagtgaagattaccacttctaccaaggtctggtttatctgctggaaaatgatgtctccacactaggctatgacctcaccttcagcactgaggtccaagagtttggagtttgtgaagttcgtgacctcaaacccaatggggccaacatcttggtaacagaggagaataagaaggagtatgtacacctggtatgccagatgagaatgacaggagccatccgcaagcagttggcggctttcttagaaggcttctatgagatcattccaaagcgcctcatttccatcttcactgagcaggagttagagctgcttatatcaggactgcccaccattgacatcgatgatctgaaatccaacactgaataccacaagtaccagtccaactctattcagatccagtggttctggagagcattgcgttctttcgatcaagctgaccgtgccaagttcctccagtttgtcacgggtacttccaaggtacccctgcaaggctttgctgccctcgaaggcatgaatggcattcagaagtttcagatccatcgagatgacaggtccacagatcgcctgccttcagctcacacatgttttaatcagctggatctgcctgcctatgagagctttgagaagctccgccacatgctactgttggctatccaggagtgctctgaaggctttgggctggcctaataaggccctgcccaactccgtggggttttttttaccattgttggacctggggaggggggagttaaaaaaagaaccagaaagaaattgtcaaaaaccaataaatgaaatccaccaactcaccgtgtgtgtcccagctgccccatcttccccagcgcatacctgttcctcttctcattctctccccgccgcctgtttcctcaccttctctcccctttccatgccgtccatgatccccaccccatgtgttttaaaaaggcagtagcctttgcagggacctgtctgtcccaactgtttgaacagtgtgctcctcagattctgtgttcagaaggatttgctgcattgagacttgaaacctttggataggggaaaaaattatatatatatatatttttttgttctgtttgcatttcttaatttgtgcttggaatgtgttgatgtgcacagctaatgattcaatgcgagacaagattggcgtctgtgttgtggaggtttcaaataaagagcactcttcataactcaaaaaaaaaa

SEQ ID NO: 7773 - DNA, 1400 bp, Homo sapiens
ttaacagtagcttttgagtaggaaaggactttgatttgtggcacaaaacattattaatatagctattgacagtttcaaagcaggtaaattgtaaatgtttctttaagaaaaagcatgtgaaaggaaaaaggtaaatacagcattgaggcttcatttggccttagtccctgggagttactggcgttggacaggcttcagtcattggactagatgaaaggtgtccatggttagaatttgatctttgcaaactgtatataattgttatttttgtccttaaaaatattgtacatacttggttgttaacatggtcatatttgaaatgtataagtccataaaatagaaaagaacaagtgaattgttgctatttaaaaaaattttacaattcttactaaggagtttttattgtgtaatcactaagtctttgtagataaagcagatggggagttacggagttgttcctttactggctgaaagatatattcgaattgtaaagatgctttttctcatgcattgaaattatacattatttgtagggaattgcatgcttttttttttttttctcccgagacagggtcttgctctggcgcccaggctggagtacagtggcatgatcttggctcacttcagccttgacttgggctcaagtgatcctcctacctgagccttctgagtaactgggactacaggtgtgcactcctcgcctggctaattttttattttttgtacaggcaggatcttgccaccttgcccaggctggtcttgaactcctgagctcatgccatctgcctgccttagtctcccaaaatgctgggattacaggagtgagccaccatgcccggctggcagttgcatggaagagaacacctctttatggcttaccctctagaatttctaatttatgtgttctgttgaaatttttgtttttttacctttattgaaacaacaaaaagtcagtattgaaacatatcttcctgttttctgttgtcaaatgatgataatgtgccatgatgttttatatatatcattcagaaaaagttttattttttaataacattctattaacattattttgcttgccgctggcatgcctgaggaatgtatttggctttgattacacactaagtttttgtaataaatttgactcattaaaaaccttttttttttaaaaaaaaaaaaaagaaaatctcattagtgaacttatctttgcagctgagtacttaaattctttttaaaaagataccctttggattgatcacattgtttgacccagtatgtcttgtagacacgttagttataatcaccttgtatctctaaatatggtgtgatatgaaccagtccattcacattggaaaaactgatggttttaaataaactaattcactaataaaaaaaaaaaaaaa

SEQ ID NO: 7774 - DNA, 1400 bp, Homo sapiens
cagacagcagccgcattctcatgcaaaattagttttaaactgctagtgtgggcatcggtaccttttgcctgggtgataccgaagaattgttgaggatttagtatgctccgtagagacagttcagccagtcatttctgcattggagagacttctcatactttctttgaagactcatagaaagctggatctagagcttttgaatccttaattagcacagtagaaattagctttctatgggaatgctttagtgttagcagttgacaattaggcccatattcaatctgaatgggaacaaaagtaaatgcaatgataatatactgctagttagagaaacatgttagttgattatacctgaaatggattatttatctcatcagcaagtattatttgaataaaatgagaaatgcttaagaaaaattgttgctctacagtaatttggtttcgaagaatggaatggtaactattttttcccatcgttcttttgagagaaggaagtgtgatgactgatgatcttgaaaagcccatttctgattgcacgttgactggaattctttctttgtgtctgtggactagcgatgctgtttgtaaaatgaagattcgggactggctcatatctttttatctaactagatgtcagatcttgaaatctgtattctcgaagcaattctgccacttgatcgtattcacaggggccctggtaggctcctttagaaggaccatttctgttcctagagcttaactagaattcattcttcactgaaaaaaaaaaaagttacttaagaaagcatttctttcctaatctcactcaaatctgcagaattatttgtaattagtaatacaaaatctggccaaaaggagacttgtaaatagcgtaaagtggtgtcttatgctaaacggtggaatgtataggcagagaagctctttgaagttgtcagatgagctgggctcacaagcctgattcaaacaggctgtcggtctcctctcaccccttaatactgtgcagcccaaactcctaggactcttgaacatctgagcagttttgtgctttgagccactttttgacaaaaatggctccatttttccacagcgtggttttcttaaaatagtttaatgttttatagtctcatagtagtagtgttgctttctaagctataacagtcgactttattcttctactctgaaaaatcttgacttgtttgagtgtatataatatatataaagggagccttaatggattggttttcataatttaatattttttgtatttgctcttgtataattgtttttaacggaaagtattaaagaattgagggtggaattcttagaaccaaagttattcttaataaaaatcaccacatgcttggaccatgcaaaaaaaaaaaaaaaaaaaaaaaaaaaaa

SEQ ID NO: 7775 - DNA, 1400 bp, Homo sapiens
gaattaatgtgccacaagtgttgtggccttcctgaactgggaagtccctggctggcccccgggggagaggggcaaatgcctccgggactgacactccaggcagctttgccttctctcccctgtcatttccagatttcattacctcctacttgccattcacccatcaatgtgaaagtcagggtcacagctggtctgtgtgtccagttccctaaaagcctgttctgttgggcagcctgaggctgttgcccgaatcctagttcagttttttgacttcctttgccctttttcccttttctccatgcttaatggtgtgaggcgtcaggagagaggccaagtacataaaaaaaaaaaaaagcagattatctctagagagtttgagcctttgctggtcacattgccttctgaagaggagggagtattagattataaatcctctttattttggtcctttatgcttgaggttccaacctggagccacagtgtgtgagaggaggaggagagggagaattctgttctcccagagctgcacctgcctcgcagaggccagcaccccactctcctgcctccagtggccctgccgcagatgtctcccaaaaagttgagcctttctagatggcttaggtggcaccatggctcagcaggaggggcgggaggcaccagggttcttgtttggaccctgcccctgggccatggccaggtgaccatggctacattgccaaacctctgactgccacagctgcagactgagagggtgggtctgagtccccacaatgtctgaagctgcccctgggattctcaggccaacctgccaacagcaagcggattttcttgcaagatcagggaccccatttctgcagccagtgtctcctgggtgccttctgaggactcccacccccatcccagtatctcatctgtcccctctcctggggcttaagtgggttgcttccaggcagaagcagccaaggaccgattccaggcactttctgtagcaaatgactgtgaattacgacttctcttgcccttcttctagcagtctgtgcctcctctctgaccagtttggagggcactgaagaaaggcaagggccgtgctgctgctgggcggggcaggagaggagcctggccagtgtgccacattaaatacccgtgcaggcgcggagaagcaaccggcacccccttccggcctgaaagccctccctgcaagaaggtgtgcaggagagaagaggccccggcatggggatctgggttctagagggcatgtgatgactgtaaatgttcactgggtgggtagggagtggtatccagtgttcaagtgcagaaatctttggctttgctaccagttccatatgatgagaaataaacgttcgctgaggttttgtttcataaaaaaaaaaaaaaaaaaa

SEQ ID NO: 7776 - DNA, 600 bp, Homo sapiens
acttaataactgtaaagtttttttctgttaatttaggcatatagaatattaaattctgatattgcacttcttattttatataaaataatcctttaatatccaaatgaatctgttaaaatgtttgatcccttgggaatggccttaaaaataaatgtaataaagtcagagtggtggtatgaaaacattcctagtgatcatgtagtaaatgtagggttaagcatggacagccagagctttctatgtactgttaaaattgaggtcacatattttcttttgtatcctggcaaatactcctgcaggccaggaagtataatagcaaaaagttgaacaaagatgaactaatgtattacattaccattgccactgatttttttttaaatggtaaatgaccttgtatataaatattgccatatcatggtacctataatggtgatatatttgtttctatgaaaaatgtattgtgctttgatactaaaaatctgtaaaatgttagttttggtaattttttttctgctggtggatttacatattaaattttttctgctggtggataaacattaaaattaatcatgtttcaaataggccatgaaggccgaattc

SEQ ID NO: 7777 - DNA, 1400 bp, Homo sapiens
gatggccccatgcgtttcataggctgtccactgagcgggattgtctgctgagtgggatgagccaactccagtttcttaaggaaaccactggaatctgcagcccccacatgcatctgtctaacgcatgcctcgtgttcgttttgcaaacatgcctgtggtggagggtggtcagtcgtagccctgtgcgtctcaaggctgccttgtgaggccattcccagtgcgtgcccttgagctccttaccaccccttttcctgctcggccctttaatccctgacagacctggactgtgtggctgaagggggacctgcagcactgcagaaatgcctctgcgtggtgccatgaaggaaagaaaccttggcctggtctcgagaagcttcccatgcttcaggaagttagtaagggtggggtggcttgcaggattggcctgtttccagggcctcccacactcattggccagattgtgaactttgtcaggcttgtccctccctgataccaagtatgtcgagaaccgatggccccaccctctggctggtgctgggccggaggtggctatggaggattttggcatgcgtggcctgtcgccacctggacagcgtgacctcaggggttgtccactttacctttatggtgaggcctgtcggatggctaagtccttgaaaccctagagctgtgacgtagaatatgtgctgtctgtgagaccgtgttcccaggagcactgactgcagttgagagagacccattttgctctcccttaccgccccccgccccgggtgctttctgcacaaagcctagagcctggcactcaagcccaccggtggcagctcctagtgactggacatgcctggaagacccctcagccttctgtttgcagaacgttcatttcaggagcttctccttcccacagacatcttacacttgctcgacactgccacctgcagaagcctggcgggctctggtcaccatgtgtctatctgaaggttgcactggccagcatgggcctgtcccaagcgagaggggagacacagtggactgaaaggactggttgaaagtggccaatctctatcagcttaatttggcagagaaaatttgtaacaactctgagcacatgctgggtgaagtcacagctcaaggaaagataaagctgggcggaaggaggtgtgcgtggcttctggggtgggacccagaggggaggctctgggacaggggctggggttcagtgccagggccctgaggaagaaatggggactgatctcaaaattccagaattccctgtacatctgttcacgtgcttgtgtccaggtgtgacttgtaaactgtctagtgtttgcattaaataaaatggcaccgagcagaaaaaaaaaaaaaaaaaaaaaaaaaaaaaaagaaaaaaaaaaaaaaaa

SEQ ID NO: 7778 - DNA, 600 bp, Homo sapiens
ctttatcgctgtgaggtcgttgctcgaaatgaccgcaaggaaattgatgagattgtgatcgagttaactgtgcaagtgaagccagtgacccctgtctgtagagtgccgaaggctgtaccagtaggcaagatggcaacactgcactgccaggagagtgagggccacccccggcctcactacagctggtatcgcaatgatgtaccactgcccacggattccagagccaatcccagatttcgcaattcttctttccacttaaactctgaaacaggcactttggtgttcactgctgttcacaaggacgactctgggcagtactactgcattgcttccaatgacgcaggctcagccaggtgtgaggagcaggagatggaagtctatgacctgaacattggcggaattattgggggggttctggttgtccttgctgtactggccctgatcacgttgggcatctgctgtgcatacagacgtggctacttcatcaacaataaacaggatggagaaagttacaagaacccagggaaaccagatggagttaactacatccgcactgacgaggagggcgacttcagacacaagtcatcgtttgtgatctga

SEQ ID NO: 7779 - DNA, 937 bp, Homo sapiens; identical to SEQ ID NO: 2544

SEQ ID NO: 7780 - DNA, 600 bp, Homo sapiens
tttccattgcttcatgtttcagtaaacaaaaggagtttgtgaccaactatgttttctttcttaattcttctaagttgacttttctttcctcctgaaactagtctctgtagcctttcactctgttccttatattctcagcctctgagcagccctaggtaaggattatgctggcatcccctttttcctgtgcagtggaacccctcttatcttgctttccctaggagttgaatccttctccctgcctacctgcagcatctcctttccctttaaaatgaccatgtagtggcaagcagccttttactcttctgttagctctggactcttaacacttaagttactcttctgaaattgctaggaccattgggggttttgttgttttgtttgttttttatgtccgacctgtgatcgtggtacagcattagctgaaatttacccttgttttactccactcctcccttttttaaaaaaattttttgacaaataaatgtttctaacacttaaaaaaaaaaaaaaaaaaaaaaaaaaaaaaaaaaaaaaaaaaaaaaaaaaaaaaaaaaaaaaaaaaaaaaaaaaaaaaaaaaaaaaaaaaaaaaccccggg

SEQ ID NO: 7781 - DNA, 600 bp, Homo sapiens
tgaggcaggagaatggcatgaacctgggaggcggagcttgcagtgagccgagattgcgccactgcactccagcctgggcagcagagcaacactctgtctcaaaaaaaaaaagaaaagaaaagaaaaagccagaaaaagttggtgcccctgaacccaagagtgatgtacagtctattccatagaatcacagaacaatcctgaaccaggcctgtcacctaccctccctgcagctcaggaaggctgtcagacaggctgggggcctcactctgttttccaggggagaaacctgagtctcagagcaggggagtggcttcccaaggtctcacagcttgtccccaggggccaggcaggctgtctgtctgcttcacatgtccccatcagcctgctgggacacacgggtcctcctgagtcccgtagcctcatttcttacagacggggaaactgaggctcagagcagcaggtgttacccaaggtcacaaggccgaacattttcagaaatctttcagaactcaaagggcatttagaggaagaaggctgaaatcactaacacatatagggcttcctttggtatcaaagtactttacttgggttaatttatta

SEQ ID NO: 7782 - DNA, 1400 bp, Homo sapiens
tcaggtccagtgcttggtcctgctctggtcactggggcttcccaggaggcagcagggtctggtcataatccagtgtgaagatgaggtgaggaaggaaggggttgctgtccagtgttggcctggtcgctttgattcttcctgcacagctcagcccaccccatctgtactggaagggaccctggagccctgggaccaccccctttcaagtcccaaacactgagtcctctgtcatgtgtccttgtccctaggctacaatgctacacttggctcaggctgatcaccatgctagtcacaggagggagagagaggcagtgtacttgcccccatctcctggagggaggtgcgttggaaattctaggcccttcagcagagacccatttgtgcccagaccacaatatttcttcttcctcagggactacatgccacagacctgtatccccagtggcaactcctgttagctcccaaacttaaacagtgatctcttctaaatatacaaggcatctacccagccccaatagtgaataaaagtcacaaatttaagttcaacaccctaagcaatttctcaaagccagtctacctgactaggtctatccacgcacggttcccaaccccaagggggaattaggggattagattaagagtaggtaaagacccttttgttctttcctgttgtaggggaggaagctgttctccccaccccaggtgcctttggaggttaaggctaggttaggccctgcactccacctggggacggcccctcatcacctgaagtcctctgctgtgttgactggaccctcagttcccacactgctaattactatgaaagctgctctggcctcgtcttctagcttgtgcctagttgaaagtctcacctttacaggatcatttgtaatgctggtgtacatgcagggaactcacaagctgtgtcaggtatgcaggacaaggaatgtctgctctggggggcacaggccaactatatggagggagggtcccaaattagcaaacccttcatttaaagcaaacccttgtcaagcctaccagagcagctgatacgtgtgcataacagtgaggcattgtgtcctggatcgtctgggagcccagtgtcaagtctgctggaatgcaggaagtagaacagaatcgccacaggactgttctggggccagcttcccttaactctgtagcctggcagtctgacccaaagttgccctcacccaaaggttctggctcttccctccctcacttttactttcccttcccccataagttggaggataaaatgggtatcaatgctaatatttccagggagaacatgaaaccagaggtttctttctttctctgtaatctgctatgaaagaaaataacaaatgaaaataaatgtgtactacactttgaaatatttt

SEQ ID NO: 7783 - DNA, 903 bp, Homo sapiens; identical to SEQ ID NO: 2548

SEQ ID NO: 7784 - DNA, 600 bp, Homo sapiens
aatcctactaaagatttgtatgaagataaaaatatcagaattccagaaagattccaaaaagtgtctgaacagactcagcagtgtgacggtatgagaatctgtgaacaagcccctcagcaggcactgcctcaaagctttccaaagccaggcacccaggggcacacaaagaacctcctaagacctacaaaattaaatctacagaagtctaacaggaattccctacttgcactgggttccaataagaatccaagaaacaaagacattttagataagataaaatctaaagccaaggaaacaaaaagaaatgatgataagggagatcatacctaccggctcattagtgttgtcagccatcttgggaagactctaaagtcaggccattatatctgtgatgcctatgactttgagaaacagatctggttcacttacgatgatatgcgggtgttaggtatccaggaggcccagatgcaggaggataggcgttgcactgggtacatcttcttttacatgcataatgagatctttgaagagatgttgaaaagagaagagaatgcccagcttaatagcaaggaggtagaggagacccttcagaaggaataa

SEQ ID NO: 7785 - DNA, 600 bp, Homo sapiens
ccggacgcacacgggcgagaagcgcttctcctgccctctgtgctccaagcgcttcacccgcagtgaccacctggccaagcacgcccgccgccaccccggcttccacccggacctgctccggcgccctggtgcccgcagtacctcccccagcgactcgctgccctgcagcctggccgggagccctgcgcccagccccgcgcccagcccagcccccgcaggcctgtagggccctcgtgcagcccaccctgaccgccaggatgcttctgccatccaggggtgtagtgaggacccacggggagcctgggccccttccagccgtgggcaaaccctgaagacacccctgcccccctccagagagtgaggagggggcctgagactggacctgggtctgcctgacctcagagtgtccaggggcttggagagacctgcgcccacccctccactctcccaggagtcgctgatcactgggacctggttccagccgtttgcaggggaggcggctccgagaggcgtgtgctttccgtgggtggcgcccctcccccgccctgcctggcctcatccttgtatttaattaattaaacaagcccctttttaaaccct

SEQ ID NO: 7786 - DNA, 1318 bp, Homo sapiens; identical to SEQ ID NO: 2551

SEQ ID NO: 7787 - DNA, 600 bp, Homo sapiens
ctgtcggtggggaagacttgcctcattaataggttctgcaaagacacctttgataagaattacaaggccaccattggagtggacttcgagatggaacgatttgaggtgctgggcattcccttcagtttgcagctttgggataccgctgggcaggagaggttcaaatgcattgcatcaacctactatagaggagctcaagccatcatcattgtcttcaacctgaatgatgtggcatctctggaacataccaagcagtggctggccgatgccctgaaggagaatgacccttccagtgtgcttctcttccttgtaggttccaagaaggatctgagtacccctgctcagtatgcgctgatggagaaagacgccctccaggtggcccaggagatgaaggctgagtactgggcagtctcatctctcactggtgagaatgtccgagaattcttcttccgtgtggcagcactgacctttgaggccaatgtgctggctgagctggagaaatcgggggctcgacgcattggggatgttgtccgcatcaacagtgatgacagcaacctctacctaactgccagcaagaagaagcccacatgttgcccatga

SEQ ID NO: 7788 - DNA, 1400 bp, Homo sapiens
aaggcctacacgctgtaccggcccgaggagggctactgccaggcccaggcgcccattgccgctgtcttgctcatgcatatgcctgctgagcaagccttctggtgcctggtacagatctgtgagaagtacctgcccggctactacagcgagaaactggaggcgatccagctggacggggagatccttttctcgctgttgcagaaggtgtcgccggtggcccacaagcacctcagccgtcagaagatcgacccgctcctctatatgacagaatggttcatgtgcgccttctcccgaaccttgccctggagctctgtgctgcgtgtctgggacatgttcttctgtgaaggggtcaagatcatcttccgggtggggctggtgctgctgaagcacgcgctgggctcccctgagaaggtcaaagcctgccagggccagtacgagaccatcgagcgactgcggagcctcagccccaagatcatgcaggaggcctttctggtccaggaggtagtggagttgcccgtgacagagcgccagattgagcgcgaacacctcattcagctgcggcgctggcaggagacccggggtgagctgcagtgccgctccccgcccaggctgcatggtgccaaggctatcttggatgcagaacctggtccccggcctgccctacaaccttcaccatccatccgcctgcccctagatgcccccctccctggctccaaagccaagcccaagccacccaagcaggcccagaaggagcagcggaaacagatgaaggggagagggcagctggagaagcccccagccccaaatcaagccatggtggtggccgctgcaggagatgcatgtcccccacagcatgtgcccccgaaggactcagcccccaaggactcagcccctcaggatttggctccccaggtctcagcccaccaccgctcccaggagagcttgacgtcccaagagagtgaggacacctacttgtaaccctggcagctaaggcctccagggcggggtctccatataactacacggttcatgaactgacattccacatcctgcccaccctctgagggccaagctgcctggccactgggctgggctggagtctggctggtccaacacagattctgcctggtccaacacagattctgcctgagcctccttatttattttctttacagtggcactcaggctggcccagccagggcaggcagaagctagggcctggggggtggggcctccttcagccccctcctcctgggggatgctccccagggttagggtgctggtgtgaggggaaagggtggggtgttctttgtgtaaaatagaaacatggttttgtacagaaataaacagccttgtatagagaaaaaaaaaaaaaaaaaaaaaaaaaaaaaaaaaaaaaa

SEQ ID NO: 7789 - DNA, 1239 bp, Homo sapiens; identical to SEQ ID NO: 2554

SEQ ID NO: 7790 - DNA, 600 bp, Homo sapiens
caccagtgcccttcaccaattacatcctccccgtgtgcctgcctgacccctcggtgatctttgagacgggcatgaactgctgggtcactggctggggcagccccagtgaggaagacctcctgcccgaaccgcggatcctgcagaaactcgctgtgcccatcatcgacacacccaagtgcaacctgctctacagcaaagacaccgagtttggctaccaacccaaaaccatcaagaatgacatgctgtgcgccggcttcgaggagggcaagaaggatgcctgcaagggcgactcgggcggccccctggtgtgcctcgtgggtcagtcgtggctgcaggcgggggtgatcagctggggtgagggctgtgcccgccagaaccgcccaggtgtctacatccgtgtcaccgcccaccacaactggatccatcggatcatccccaaactgcagttccagccagcgaggttgggcggccagaagtgagacccccggggccaggagccccttgagcagagctctgcacccagcctgcccgcccacaccatcctgctggtcctcccagcgctgctgttgcacctgtgagccccaccagactcatttgtaa

SEQ ID NO: 7791 - DNA, 1138 bp, Homo sapiens; identical to SEQ ID NO: 2556

SEQ ID NO: 7792 - DNA, 1400 bp, Homo sapiens
ttggtaatagctagcacagatgttgacaagacaggagcttcctactatggagaacaaactctacactacattgcaacaaatggagaaagtgctgtagtgcaattaccaaaaaatggccccatttatgatgtagtttggaattctagttctactgagttttgtgctgtatatgggtttatgcctgccaaagcgacaattttcaacttgaaatgtgatcctgtatttgactttggaactggtcctcgtaatgcagcctactatagccctcatggacatatattagtattagctggatttggaaatctgaggggacaaatggaagtgtgggatgtgaaaaactacaaacttatttctaaaccggtggcttctgattctacatattttgcttggtgcccggatggtgagcatattttaacagctacatgtgctcccaggttacgggttaataatggatacaaaatttggcattatactggctctatcttgcacaagtatgatgtgccatcaaatgcagaattatggcaggtttcttggcagccatttttggatggaatatttccagcaaaaacaataacttaccaagcagttccaagtgaagtacccaatgaggaacctaaagttgcaacagcttatagacccccagctttaagaaataaaccaatcaccaattccaaattgcatgaagaggaaccacctcagaatatgaaaccacaatcaggaaacgataagccattatcaaaaacagctcttaaaaatcaaaggaagcatgaagctaagaaagctgcaaagcaggaagcaagaagtgacaagagtccagatttggcacctactcctgccccacagagcacaccacgaaacactgtctctcagtcaatttctggggaccctgagatagacaaaaaaatcaagaacctaaagaagaaactgaaagcaatcgaacaactgaaagaacaagcagcaactggaaaacagctagaaaaaaatcagttggagaaaattcagaaagaaacagcccttctccaggagctggaagatttggaattgggtatttaaagattcacggaaagcaagttgatgaccagaaatcagtgcaaacacatcttctgttaaacccattggtatacacagaatattcctgtgcccacacttaatgtcaatctataattttaaccatttatccaagattctactaagtgtaaaattatttaataatgtctattaaattgatatttatatcttgcatcctatatcatgtcaatatgtgatatagaaaagagatacgtgaattttttagctaagcttgacagattgaaagacaagtgtcatttttttttgtagagggtgatatataccatgtaaatgaataaagacattttaaatttaaaaaaaaaaaaaaaaaa

SEQ ID NO: 7793 - DNA, 600 bp, Homo sapiens
aagcaaatgtgtggggagcaaaggcagtccgagccctgaagaacagtaatgatattgtaaatgctattatggaattaacaatgtaaccatctgaaagcaacttttttggtgtctcagatgagtaactgcagcttggtttgaaatttgtactgtttctatcataaataaagttatggcttcttgttggatgaaaaaaaaaagacagtattttgccaaattaaacagaaaagagagttcagtggaagatggctctgatttcagggtaataataatggtaggtaacaattaaatggcatttaaaaatttgctgaatgcttgctacgagcggtggctcatgcctgaatctcagcactttgggaggccaaggcaggcagatcatctgaggtcatgagttcgagaccagcctggccaacatgatgaaaccctgtctctactaaaaatacaaaaattagctgggcatggtggtgcacacctgtaatcccagttactcaggaggctgaggcaggagaatcacttgaatccagaaggcggaggttgcagtgagctgagattgcaccacggcactccagcctgggtgacagagtgagactctgtctcaaa

SEQ ID NO: 7794 - DNA, 1400 bp, Homo sapiens
tcaaaatcccaggctggaaattacctggagacaagagttgagtaccgtggatgttcctacaggagtgtccatagatggatggaggaggtggagcccagagcccaaggaagagctgggaattcttgcttctctgaccctcacttacagactagcccagtgtgggcagatgccagcggcccaggtggcgccattgctgtcctgggatggatcgtgggttttggtggatgcagcttcccagggcctggaccgtcttcggtgaaaagctgctcccgttggctttatgagcatcaagtcctcacccagaccccctgctggtgccgtggatgtcaccagtcggactgtgctgtggctaaccaggctgacaactgagatgaggattcactgtactcatttggtcacaagctgctggggcgggttttattttattttatttttatatttaagaaatgaaaatacgggtatttttaaagattctccaaaaagtccagaagccttgagagctggcatcaatcagcccaagacccccaggggattcatgggaaatgtcgtattttagagtcctacagaatatttctggcctcaaggaactggatgaagagactggacaaagtccccaggatgggcatcccccaagtcactacagcatctggagcccctaggagatactcagggaagcaaatccttgtttgggctggcaagcaaatccgacacgacgaggtccacaaactgtttctgcatcccagggctctgacgaaggcgttaagaaacagatgctgttcccgcgtaggctcccaggggccccagggaggtccaggtggactgcctctctcattcccaggagctgtcctgggactttgggatttcttctcagctttctccacctttcagtttctcagttgtttcagaaacatagcaatgacataaaaactgctatggagagaaagctaacatggtcccatgccttccaggcagccctgctgaaggatctaagttggccctgttcctgcaaatcatcaacgtgcctggactcgccagctaaaagcctgggccttccccagccttttttctggggcacctattcctctgccagtcctgctcccctcaccttccttgggcccgtcagagtcttttgtggtgctgtgcttctcagaggcaggatccaagcagatcagcccagcctagcccagctcaggcaggccatggccgctcaagggaaagactgccccagaagagcaagctggagaggctgggcaggggctgatggggctgggtacactggggaatgttagcaagactgggaaggaggccacattcctgtctgcagcagcccccagcgatggtcttcagcaataaaagttgtgtgacctaaaaaaaaaaaaaaaaaaaaaaaaaaaaaaaaa

SEQ ID NO: 7795 - DNA, 600 bp, Homo sapiens
cgggccctgctagatagagatgcgctcaaacagagccttgtggtggctgtacaggaccatggccagccccctctctcggccactgtcacgctcacagtagccatagctgacagcatcccagacatcctggctgacctgggcagtcttcagatccctgcagacctggaggcctcagaccttaccctctacctcgttgtggctgtggcagtcgtctcctgtgtcttcctcaccttcgttatcacgctgctggccctcaggctgaggcactggcactcctcgcatctgctgcgggctaccagtgatgggttggctggtgtgcccacctcacactttgtgggtgtagatggggttcgagctttcctacagacctattctcaggagttctccctcaccgctgactcaaggaagagtcacctgatcttcccccagcccaactatgcagacacactcatcagccagcagagctgtgagaaaaatgagcctttgtgcgtctctgttgattccaagtttcctatagaagacacccctttggttccggtgagttcattttttttctttctttcttttctttttttgttttttgttttgttttgtttttga

SEQ ID NO: 7796 - DNA, 1400 bp, Homo sapiens
cgctacagccgctctccctacagcagatctcgctacagggaatctcgctacggcggatctcactacagctcatctggttacagtaactctcgctacagccgatatcacagcagccggtctcactcgaagtctgggtcctccactagctctcgctctgcatcaacctccaaatcgagctctgcgcgacgatccaagtcctcctcggtctccaggtctcgctcgcggtccaggtcttcatctatgaccaggagtcctccccgggtatccaagaggaaatccaagtcaaggtcgcgatccaagaggccccccaagtctcctgaagaggaaggacagatgtcctcttaagaaaatgatgcatcaggaagcaacgtgatggaggacttgggggaaaaggatcacatactcagtctatggaagcaacgtccctggaagaagaggctgcctattgaaaaggttgtatcacacttttctacctttttgccagtttgaagctttgcatcaggtggcaaaattcattctatgtgccgttttgttgttattcacattttattgtaacttaggaggtgaacgacctaagattacgttattgggtttggatatttgaggcaaaaatttatttttatttctatagtgatgactgttttggtttgaaatgaacagattggtaacctaatttgtggcctcctgacttttaaggaaacgtgtgcagccattacacacagcctaacgctgtcaagacattgcttcaacattgccttcattccttaaaaacctacaaaaggtggtgtaaattaatatggataattttatttacctccaggtctaaaaggtagtgtgacccaaatttgtataaagatttttcatgtgaaaggactggggttttagcaaacacaggtctaatctcttttgtgtttttgtgcaccaggcccggctgcgtagcagttgagtgatgctggttagctattaaggtggcctgttgcagtgcagagtgctgagctgcttcctgttttcttctgattgctcctggggaaaacacgccttgtcctgaagaacaaatggctgtccagtttattaaaatgcctgtcaactgcacttccagtcacccaggccttgcagataaataatggagcatgcagtgagcacatctagctgacgataatcacaccttttcccccgtcttttctgaaaaattgtaaatctgatcatatcaacatgtatgaacttaaaatatggagaatgttatggaagaaatagtttataagtttgttaagtacttataacatggtttatctttttgattattaattttttacgctaaccattgtttctgtagttaaaattgttttcttggtgttatcttttctcagaataaaattagaaacttttgatggaaaaaaaaa

SEQ ID NO: 7797 - DNA, 600 bp, Homo sapiens
cctactgcgctccagcctgagtgatagagtgagactctgtctcaaaaaaaaagtatctctaaatacaggattataatttctgcttgagtatggtgttaactaccttgtatttagaaagatttcagattcattccatctccttagttttcttttaaggtgacccatctgtgataaaaatatagcttagtgctaaaatcagtgtaacttatacatggcctaaaatgtttctacaaattagagtttgtcacttattccatttgtacctaagagaaaaataggctcagttagaaaaggactccctggccaggcgcagtgacttacgcctgtaatctcagcactttgggaggccaaggcaggcagatcacgaggtcaggagttcgagaccatcctggccaacatggtgaaaccccgtctctactaaaaatataaaaattagctgggtgtggtggcaggagcctgtaatcccagctgcacaggaggctgaggcacgagaatcacttgaactcaggagatggaggtttcagtgagccgagatcacgccactgcactccagcctggcaacagagcgagactccatctcaaaaaaaaaaaaaaaaaaaa

SEQ ID NO: 7798 - DNA, 600 bp, Homo sapiens
tttaaacacatatcgtttctttttcttggaaaaaaagttgattaggaccacagatttggtttagaaagggtaatattttgaaatactacaaggtttagacagtccatgaaatcgacctgtttaataatttaccatcctgaaagtccagaattaaaatatggaagcaagaactatataattgattaggatgcttggtaggtttttttcattgttcaaatattcattgcacagtggattgttttgattagttagtatgctttttttttaattaattcagtcttctgttaatttttaagttttggttagtgccacaaggaatttaactttttgatttgtataatagaaaactgaactaggaattgttagcggggttttgaaggatgtgtactttccttcaaaataaagtggtagattttcaaaattttacactagtcagttctttatattctaagttaaatgtagtttgtaaaattattttggttttcttctacaaaggaaaaaattggatttatatatataaggttactgcataatgatttcattttgataatgtgcagaatggcctcataagctcacagaaagtaaaaaaaaaaaaaaaaa

SEQ ID NO: 7799 - DNA, 1400 bp, Homo sapiens
cgatcacggtaggcagtgcttgaatgagaaaagcctcctggtgcatcttcaaaatgagtcctaaagaacatactgagtacttataagtagcagaacataaaatgtatttctgactaacacaaatggtcctttcacatgtgctttattagactctgggagagaaaagtaaccaagtgcttcagaacaggtttttagtatttacttcttcatggtaagataatgaagttctaatgaactatttctcccaaggttttaaaattgtcaagagttattctgtttgtttaaaaagtaagaaacctctgtaagcaatagattttgcttgggttttctttcttaaaaaaataatactatgcaggcaagacaccataaaagtttaattccttacagaagaaccagtggaagaatttaaatttggcactacgatcaaaactactgaattagcagaaataacgatatctaaagcttaccagcaaaagaaccctcagcagaatagcaaaaactttgctcaggacatttgaggtcaaattgaagacggaagacggaaaccggaaaccgttttcttgtaagcccctagaggcagatcaggtaagcatacatagtagagggaaaggagagaatggaaataaaactgaatattatgcagatttatgccttattttttagcattttttaaggttgggtctttcaggctggttttggtttgtattagatctgtatagtttagtgatttagttttatatttaagctacgattaatattttttctttggcgatatttctttgctttttttttttaacaactttccatttttagatgtttcgttgaatctatttagagcttcaccatggcaatatgtatttcccttaaaacactgcaaacaaatatactaggagtgtgcccttttaatctttactagttattgtgagactgctgtgtaagctaataaacacatttgtaaaaacattgtttgcaggaagaaaacttcgagttacaggtcaggaaaagcctgctgaatttatgttgtaaacgttacttaacacagtataaagatgaaaagacaacaaaagtatcttcatacttcctcatcccctcattgcaacaaaaccttaaactgggagaaccttagtcccctctctttcctcttcctcctccacttcccacttattgccactttgtaatattcagagagcacttggattatggatctgaatagagaaatgcttacagataatcattagcccacataccagtaacttatacttaaagatgggatggagttataaagtgcttttataatccaatataattgctaaaggcaagggttgactctttgttttattttgacatggcatgtcctgaaataaatattggttcactatgaaaaaaaaaaaaaaaaaaaa

SEQ ID NO: 7800 - DNA, 1400 bp, Homo sapiens
tcaaggttcttcggggtgtgagctggcatgaggacctgttggaagtgggatccaggcctggtccagcctcccagctgcctcgatttgtgcgtgtgaacactctcaagacctgctccgtttatgtagttatttcaagagacaaggtttctcctatcagggtcgggcttccaggctggatggagtgccctggcgcgatctcggctcaccgcaacctctgcctcctgggttcaagcgattctcctgcttcagccttctgagcagctgggattatgaaggggtggcctgcccctccacatctgtgggatatctcatcagcctcgatgacttacgagccctcaaggggaagcattttctcctggaccccttgatgccggagctgctggtgtttcccgcccagacagatctgcatgaacacccactgtaccgggccggacacctcattctgcaggacagggccagctgtctcccagccatgctgctggacccccgccgggctcccatgtcatggatgcctgtgccaccccaggcaataaagaccagtcacttggctgctcttctgaagaaccaagggaagatctttgcctttgacctggatgccaggcggctggcatccatggccacgctgctggcctgggctggcgtctcctgctgtgagctggctgaggaggacttcctggcggtctcccccttagatccgcgctatcgtgaggtccactatgtcctgctggatccttcctgcagtggctcgggtatgccgagcagacagctggaggagcccggggcagggacacctagcccggtgcgtctgcatgccctggcagggttccagcagcgagccctgtgccacgcgctcactttcccttccctgcagcggctcgtctactccatgtgctccctctgccaggaggagaatgaagacatggtacaagatgcgctgcagcagaacccggacgccttcaggctagctcccgccctgcctgcccggccccaccgaggcctgagcacgttcccgggtgccgagcactgcctccgggcttcccccaagaccacgcttagcggtggcttcttcgttgctgtaattgaacgggtcgagatgccgacctcagcctcacaggccaaagcatcagcaccagaacgcacacccagcccagccccaaagagaaagaagagagcaaaaagctgcagccggtgcctgcacaccgccttgcgcatagcagaggctccgggctcactccttcctggtgggaaaggaagatgcctgtcctctccgtggaggaccctgggccctcaccgcaggcagcagtttgcgttttgaaaggttattgggtcccttcctcgggctgtgttcttgctggtgagcaaaagtgttgcctgcagaaataaaatgcagaacgtactct

SEQ ID NO: 7801 - DNA, 600 bp, Homo sapiens
gagtaagctggacctgcaacctgcctgagccccgtggcctctcagctctgcggccaccccgttccctccccagcttcctgcccaaagagccccacattctagccaacttgagggaagggggcgtctcgtcagctggtccctgctagggagctattgatgtgcaatattagaaaggagacatgaaaaaaggagaaaaggaaagacagaagtgtatatatatattatttaaacaaacaaaaagaaggtgcgttactatttttttttcacccgggaaagaggtgagaggatgggaaggagcagccaggcgtgggaagcggcgagatcctcgggctgggggtgcccacgtttgctacctcccactgtgaaatcgctggtgctcacaattgtctctcacagtgtatgtgatttttttaaggaaaaaaaaaaatccctatttaagattctgaaggtgctaccattattttgccacagactttgaagaaacttttggatgtggggcatcatccgcatctttctctctcctccaaatgacaaagtttggggaatttttgaattttcctagcatcgcccttgtgctcatcaggtaatctgctaaggagg

SEQ ID NO: 7802 - DNA, 600 bp, Homo sapiens
atcatactgaatgagaaaaagctagaagcattccccttggaaactggcacaagacaaggttgccctctctcaccacttttattcaacatagtgttggaagttctggccagggcaatcaggcaagagaaagaaataaagtgtattcaaataaaaagagaggaagtcaaactatccctgtttgcagatgacatgatcctgtatctagaaaacccatcgactcagcccaaaagcttcttaagctgataagcaacttcagcaaagtctcaggatacaaaatcaatgtgcagaaatcacaagcattcctatacaccaacaacagacaagcaaagagccaaatcatgaatgaactcccattcacaactgccaaacagagaataaaatacccaggaatacagctaacaagggacacaaaggacctcctcaaggagaattacaaaccactgctcaaggaaataagagaggacacaaacaaacggaaaaacattccatgctcatggacaggaagaatcaatatcatgaaaatggccacattgcccaaagcaatttatagattcaatgctattgccattaccataccattggcattcctcacagaattag

SEQ ID NO: 7803 - DNA, 1400 bp, Homo sapiens
ccgccgagtttggaaagcagagtggagaacaaagagttgattccaatgcaacaaattttagaagaagcggagccacaggggcaactacaagaagcgttccaggggaagcgccccctgttttctaagtgtggcagtacccatgaggacagggtggaaaagcagtccggagaccccttgcccctgaaacttgaaaattctcctgaagcagaaggactcaacagcatctcagatgtcaataagaatggttccatagaaggggaagactctaaaaataatgaattgcagaacagtgccaggtgttccaaccttgttctatgtcagcacatcccgaaagcagagaggcccactgacagtgaggaacacgggaacaagtgcaagcaaagtttccacatggtgacgtggcacgtgctgaaacctcacaagtctgacagtggagacagtttccatcattccagcctttttgagacccagaggcagctccatgaagaaagaccttataaatgtggtaactgtgggaagagtttcaaacaacgctctgacctctttagacaccagagaatccacacaggtgagaaaccctatggctgccaagaatgtgggaaaagcttcagccagagtgctgccctgaccaagcaccagaggacacacacaggcgagaagccgtacacctgtctgaaatgtggggagcgcttcaggcagaattcacacctaaatcgtcatcaaagtacccacagtagagacaaacattttaaatgtgaggaatgcggggaaacctgtcatatttccaacctttttagacatcagagactacataaaggggaaagaccctataagtgtgaagaatgcgagaagagcttcaaacagcgctctgacctctttaaacaccacagaatccacactggggagaagccctatggatgttccgtctgtgggaaacgcttcaatcagagtgcaaccctcattaaacaccagagaattcacactggggaaaagccttacaaatgtcttgaatgtggggaaagatttagacaaagtacacaccttatccgacaccaaagaattcatcaaaataaagtgctgtcggctgggcgtggtggctcacgcctataatcccagcactttgggaggccaaggcaggcagatcatttgagatcaggagtttgaaaccagcctggccaacatggtgaaattctgtctctactaaaaatacaaaaatgagccgggcatggtggtgcatgcctgtaagcccagctattcgggaggctgaggtaggagaatcacttgaacccaggaggcggaagttgcagtgagctgagatcatgccactgcactccagcctgggcaacagagcgagactccatctcaaaaaaagaaataaagtgctgtcattttgatatgtt

SEQ ID NO: 7804 - DNA, 1400 bp, Homo sapiens
ctctcttctctcagtgctagggcaacttctgcctgaaccctaactggccgtatttattcattcattcaaaaactacttagtgaatgtctgtgctaggcactgtgctatgttctgggaatgcagtggtgaagcagacacaacccctgcctcaaggggcttgcatggagttagatcctgctggcaagaaggccgggcatctattctctccctcccaggtctgggcaacccagatctaacccctagtccccaattctgataggctgacctctctgccagctaacctcaccctccacccctcaatgtagggaggtacatggtcagtggagaaggtgatccaggtgccccccaagaaagtgaagggctggctgctgcccgaaatgccaggcctgatcaccgacatcctgctctccctggacgaccgcttcctctacttcagcaactggctgcatggggacctgaggcagtatgacatctctgacccacagagaccccgcctcacaggacaggtggagaccctggcaggaggagcagaagggaaggaaggaaagagaagagaagctggggatggggtggatgatctgaagcagctgcaggatgttgagggaggtgcaggaaaagcagacatgtgtgctgtgggacagcacaggcccaggactgtccaggccagggatgggcatgcagagcatgtctgaaaggagagaggggttccagccaggcaagctgctcttcctgcaatgtttgcgcctcccactatggtcctccttatactctgcacctccccatctagctcttcctcggaggcagcattgttaagggaggccctgtgcaagtgctggaggacgaggaactaaagtcccagccagagcccctagtggtcaagggaaaacgggtggctggaggccctcagatgatccagctcagcctggatgggaagcgcctctacatcaccacgtcgctgtacagtgcctgggacaagcagttttaccctgatctcatcagggaaggctctgtgatgctgcaggttgatgtagacacagtaaaaggagggctgaagttgaaccccaacttcctggtggacttcgggaaggagccccttggcccagcccttgcccatgagctccgctaccctgggggcgattgtagctctgacatctggatttgaactccaccctcatcacccacactccctattttgggccctcacttccttggggacctggcttcattctgctctctcttggcacccgacccttggcagcatgtaccacacagccaagctgagactgtggcaatgtgttgagtcatatacatttactgaccactgttgcttgttgctcactgtgctgcttttccatgagctcttggaggcaccaagaaataaactcgtaaccctgtccttc

SEQ ID NO: 7805 - DNA, 600 bp, Homo sapiens
aaccagtatagtgagggtgttcagagggaggcacaaagaatagctctgagattaggcaatggaaatgacaaaaaagagatgaataaatccgatttgaataccaacaatttgctcttcaaacctcctgtagagagccatatacaaaagaataagaaaattcttaaatctgcaaaagatttgcctcctgatgcacttatcattgaatacagagggaagtttatgctgagagaacagtttgaagcaaatgggtatttctttaaaagaccatacccttttgtgttattctactctaaatttcatgggctagaaatgtgtgttgatgcaaggacttttgggaatgaggctcgattcatcaggcggtcttgtacacccaatgcagaggtgaggcatgaaattcaagatggaaccatacatctttatatttattctatacacagtattccaaagggaactgaaattactattgcctttgattttgactatggaaattgtaagtacaaggtggactgtgcatgcctcaaagaaaacccagagtgccctgttctaaaacgtagttctgaatccatggaaaatatcaatagtggttatgagaccagacgg

SEQ ID NO: 7806 - DNA, 600 bp, Homo sapiens
attatggtctaagagcgctcaggctgggtgcagtggctcatgcctgtaatcccagcaatttgggaggccgaggcaggaagatcacttgagatcaggagttcgagaccagtctggtcaaaatggtgaaaccccatctctactaaaaaatacaaaagttagccaggcatggtcacgcatgcctataatcccagctactcaggaggctgacgcataagacttgcttgaacccgggaggtggaggttgcagtgagccaagatcacgccattgtactccagcttgggagatactcccgctgtctcaaaaataaaataaataaataggccaggcacagtggctcacgcctgtaatcccagcaccttgggagggtgaggcgggtggatcacttgaggtcaggagttggagaccagcctggccaacaggtgaaaccccatctctactaaaaatacaaaaagtagccgggcgtggtggcgcatgcctgtaattccagctactcgggaggctgtggcaggagaatcgtttgaacacgggaggcggaggttgcggttagccgagatcgcgccattgcactccagcttgggcaacgagcaaaactccatctc

SEQ ID NO: 7807 - DNA, 1400 bp, Homo sapiens
aaccttgacaccgctgtagtctgctctcgccgcgctgggttttaggagccgtaacgacaataatcgtgtccaccattctcactacaggccccgaagcacgtaggtgccgttttttatcccaacttaactgaagaaaaaaaacacggccgggcgcggtggctcaagcctgtaatcccagcacgttgggaggccaaggcgggcagattacatgagaccaggcgttcaagaccagcctggccaacatggtgaaacctcgtctctactaaaaatacaaatatattagccgggcgtggtggcgggcgcctgtaatcctagctgcttgggaggctgaggcagagaattgcttgaaccctggaggcggaggttgcagtgagtggagatggcgccactgcactcccgtctgggggagagagagagagagactcttgtctcaaaaaaaaaaaaaaggacttgtcctccaatgtcaataacaacaaactagacaaataaaacttcgagggcattaaggcaatatggtgttatgccacaaacagaaggcacagctaacggccagtagctgagacgccacctctgccacaggtcagctatgtgacccacgtgcaaatctcatcacttcctgtctggttctgcttctgtggatgtagaatggggcaatcaatggctgtcttgctcaattggccagacatttaatgtgtcagccacccaggcccaacatgttgtgagttcgtgtacaccgaccattttgctatttcttttctatatgtcacttttttttttttggttgttttttgatacagggtcttgtgtcacccaggctggagtgcaatggcgcaatcatagcacactgaagccttgacaaccccagctcaagcgatccacccccctcagcctcccaagtagtaggcaacacagatgtgtgcgactacgcccagctaatttttttttttttgtggagacaaggtctctccatgttgcctaggctggtcttgaactcctgggctcaagcgatcttcccccttcgacctcccaaagcgttaggattatgtaaaagcatgagtcactgcgcccacctgtcacatctttttgtttcttctatactgccttattttgtagaaagtagctattttctcgtataacattaattcctttatttttaacttgtccctcatctctgttttgtgttattattacccttattatctatgttacaaacccaaccatacagtgctaatcttgttttaaaaagctgagaaaaaatatatagttacagagtttttttaaccttctaatttgccacttatacttctgattgattcctttgtgtagattagagttacacaatttattgctaaagaaaataaatatgatcaaaagtcataaaaaaaaaaaaaaaaaaaaaa

SEQ ID NO: 7808 - DNA, 1400 bp, Homo sapiens
ggcagagtcagatttctccaacaatatgctgcagtgccgctgcaagtatgatgggcaccgggtctggctgcacaactgccacacagggaattcatacccagccaatgcagaactctccctggagcaggaacagcgtctcaggaacaacctcatctgaagctgtcactgcacactcctagctgctgccgatacaccagatacctcagcttattggagccatgcccttcacagagtcccaactcagaggaaaagggccagtgccaaggggcaccaagaacctgctcaggaagccttttgatggcaagatcaccaatccagatggtattgctccctcaggatggctctgggcctgcccctaagggcctgtggcctatggaatatgtcctccaggctttgctcagctgagctcctcttctgtaaggaaacccagtcatccctgaatcttgccacagagatccgggattcaggagctctcagtttcttagggatggactatggcccagtcccccatctaagtggtgctttgcaaatgtcttggaggagtataggacagaggaccaaaatacacagcaggtagtgttagctctctgctaggagctcaaagcaacacaacttgtatcaaaatcacaactggcagagaagctggtggatccaatcctttcttcatctgttgttatttagaactcacctctcacactctgttctttagtgtccttacctttatcttaccacacacatgggtgtttctattatccttggaagcacagacctcgggcatccccttattgcctgatgggccaacaccaacagttacggagtgcttgagaaggggcaagtttcacagaaatggccagatagggccttcctacagagcagcaagagtaggccaagcagaaagactgctgaggtaacacggaccccagcccctgtcagggcctctgccaaggaaataatatggaccatttacctggcaggcagtctgctctctctcaggatcaccacgcatctcaggattggtctaaacttcaagtctcaaccaagtgtctgaagtgaactttgcattgaataaatttttgccatggaaagaacatcaaacaagccactcatctctacagagataagaaaacaagtttggcagagcaagagacagaagaccgtggagaaatcagaagggggaacagtcagtttagttaaggatggaacctgggaaaggccaccattcctgcttgatggggctctgatttgctcttgctcaagtggaataaaaccccatggtcttcttgacatgattcttgatcttttctccactgagacacacttaagtgatgatccttacaggactgacaccctaatgccaataaaagttgctcattatggactgctacaaaaaaaaaaaaaaa

SEQ ID NO: 7809 - DNA, 1400 bp, Homo sapiens
cggctccaagtttgactgtgcccttcatggaaaccactgggaggacctgggctttcagggagcgaatccagccacagacctgagaggcgcaggcttccttgccctcctgcatctgctctacctggtgatggactcaaagaccttgccgatggcgcaggagattttccgcctgtctcgtcaccacatccagcaattccctttctgtttgatgtccgtgaacatcacccacattgccatccaggccttgagagaggagtgtctctccagagagtgtaatcggcagcagaaggtcatccccgtggtgaacagcttctatgccgccacattcctccacctcgcacatgtctggaggacacagcggaagaccatctcagactcgggctttgtcctcaaagagttggaagtattggccaagaagagcccacggcggctgctcaagaccctggagctgtacttggccagggtgtcaaagggacaggcctccttgttgggagcacagaagtgctatgggccagaagcccctcccttcaaggatctcaccttcacaggtgagagtgacctgcagtctcactcatccgaaggcgtatggctgatctgacctccgagatgaatggaggcttaaaggctgagctgcaggggctttcagggggtcagtggagccatgtcaggagcctggccaggccgcaccccttgctgtctcagcagatgggatataggaagctcctgggcttagctgtgggaagccaagtaccctcaccggcatgggacatgaggggcagctagacttcacccccttcccgcagacctacctccagagcaaggagaattctgccttaatctgttgggctccagtctccgggttgaattccagtgtatcccactgggagtgaatggatcatgaggtgggatggccccatctggatgttctgcagatccccacatgggaggagattcccaagtagaggcagccagaattctgactccctggcagcagcagggctttcaggcaccagtgtctgtgttgttagaactcagaggaagaggcaggggcagcagccgacagggggcagcatgacccaagcaaggggcctgaggcctcagtgggggtagggcaaggaggtacctcacaggtgggtgtgaggccccctctggagtttctggccattcacttacccactctcttctccccctgacccccgctccattgtttatgatggaaaaacggacatttggctaggtgtctctcacggctgctccatcctagcccccacaagctggggcttcctcctgtagatgctgtgcatgccccatgatgagtttctggcctaattgagggaaggaggaaattcataccagcagttttcaaataaaagaattgttctaaaaaaaaaaaaaaaaaa

SEQ ID NO: 7810 - DNA, 600 bp, Homo sapiens
ccctagcacactggccttgccatcttgtggccgaataaaaaataacacctcttaagtctagcacactgcagtgaggccaggcacctcagtgctgggcaggggcatcagaaggtgctaagccctctctccacaatgccaagacggagaccacagcctacaccaaatccagcccttgatttccctgctgcctccataaacagaaagaggtctgctggatccgctaagggatcagggagaggaagaaagagggatggggtgggaggcaccccctccagtgctcctactggttcccaagctacaggtggggtgggaaaggctttatcaggtatcatcaacaggttctcaattaaagatttgatttattcaagtatgtgaaaacattctacaatggaaactcttattagatgctgcatgtactgtgctatggaccacgcacatacagccatgctgtttcagaagacttgaaatgccattgatagtttaaaaactctacacccgatggagaatcgaggaagacgatttaatgtttcatctgaatccagaggtgcatcaaattaaatgacagctccacttggcaaaaaaaaaaaaaaaaaaaaaaaa

SEQ ID NO: 7811 - DNA, 1019 bp, Homo sapiens; identical to SEQ ID NO: 2576

SEQ ID NO: 7812 - DNA, 1400 bp, Homo sapiens
ggaaaaaagcagctgtaaagtgagttacacatcacaggaaagggaacttgatgggaaagaaacgaatggcagccttccaggagataagatcagaaacaaaatggtagcaggcttgttaaatagtggaaattcaaacaaaaccattcacacctccagtagcatcaaactcagtgaggaagggctggaaggaaaggagcaggatgtatccaaagaaactgtattttgtaagtataacatctctgatcatgctatacaagaactaaaccagactgtaaacattccaggtcctgaaaaagtgttggaccagtctcctactgttatgttctccagttttaaaaatgtaaaatcagttgaaacactcgatcagaaggcagatgaagtccttgactgtcagagtaaccaaaacagaccagatgaatgcaaaagtgaaggtcagtcagccaaggagatgctaagtagtgaccagagagagactgtcaccgagcctcacggggaggtaaaccacaaccaaaaggatctgctggtcagctcaggcagtaataactcactaccttgtggtagtccaaagaaatgcaatttgaaaggagcctttgtcaagatgtctggttgtgatgagtccacagaaggtatggtagacatcgtctacacggactgtagtaataagcttgcagaaggtgtgctggacgtgaaggcatctaatctactggattgtggtgcaaggcaagagaaactggcatttcaagaggactccaggagtaccttgtctcggagagaactggatgctgcacatacaggaacaactggtcaggattcagatttcccagttactgctgcttctacagtggactttctcaaaataaaaaaatcatgtgaagaaaacgtatgcagatctttaaaagactgtgaaatggaaaagtgtccagactcttgtgcccatgagatggagtctgttgcagatcatgaaccaaataaaagaatattgggcagagtaaattttgtctttaaatgatagccattatggccagcaagataaaggaacatctctcagagaaacacaagaaatgactgaaggatcaagactagaaccaaactctgagtttggcaaagaaagtacctttggaatttcctcaaaagagtcgatgttttgccatgatgaaagctctgtttccctaagaagcccctgcctgaccacgtgagcattgtggaacccaaagatgagatactgcccaccacccccatctcagaacagaagggtgggaagccagagccgcctgccatgccccagccagtccccacagcataacagggtctccttggcagctgtattctggagtctggatgttgctctctaaagacctttaataaaattttgtacaaagaaaaaaaaaaaaaaaaaaaaa

SEQ ID NO: 7813 - DNA, 600 bp, Homo sapiens
ttgctctgttgctgaggctggagtgcagtgatgtgatcttggctcactgcagcctctgcctcccaggttcaagcaattctcccacctcagcctccaaagtgctgggattacaggcgtgagccactgcgcccggccacattcagttcttatcaaagaaataacccagacttaatcttgaatgatacgattatgcccaatattaagtaaaaaatataagaaaaggttatcttaaatagatcttaggcaaaataccagctgatgaaggcatctgatgccttcatctgttcagtcatctccaaaaacagtaaaaataaccactttttgttgggcaatatgaaatttttaaaggagtagaataccaaatgatagaaacagactgcctgaattgagaattttgattttttaaagtgtgtttctttctaaattgctgttccttaatttgattaatttaattcatgtattatgattaaatctgaggcagatgagcttacaagtattgaaataattactaattaatcacaaatgtgaagttatgcatgatgtaaaaaatacaaacattctaattaaaggctttgcaacaccaaaaaaaaaaaaaaaaaa

SEQ ID NO: 7814 - DNA, 600 bp, Homo sapiens
ggatgtggcctccctggcccccgtggactcctccttctcgctcctgtctgtctcacacgcgctctacgacagccgcctgccgcccgacttcttcggcgtgctggtgcgcgacatgctgcacttctacgctgagcagggcgacgtgcagatggctgtgtctgtgctcatcgtcctgggtgaacgggtgcgcaaggacatcgacgagcagacccaggagcactggtacacttcctacatcgacctgctgcagcgcttccgcctctggaacgtgtccaacgaggtggtcaagctgagcaccagccgcgccgtcagctgcctcaaccaggcctccaccaccctgcacgtcaactgcagccactgcaagcggcccatgagcagccggggctgggtctgcgacaggtgccaccgctgcgccagcatgtgtgccgtctgccaccacgtagtcaagggtctcttcgtgtggtgccagggctgcagccacggcggccacctgcagcacatcatgaagtggctggaaggcagctcccactgtcccgcaggctgcggccacctctgcgagtactcctgacggggcatctgctgggcttgcccgggcggccg

SEQ ID NO: 7815 - DNA, 600 bp, Homo sapiens
gcgagctctacctgaatgagcagattggtccgtgcttaccactcaaatcccaaaccattcagggcctgaaggaactattgccctctggggatgtgatcccctggattcccaaagcccagaaggagatttgcaagatgctcagtccctggtatgatgagtttctagatgaagaggactactggtttctcctttttacggtaggaaggactttgggttaggaaggaatcatgaggatgagggaagaagaaagagtaattactgttttaaaagggttatgtgttaaagtaaatgaaattgttatttttcctagagtcaaccaaagatcagcatggtccctgttgttctaaagctaaacctctcaaggaaaaggactcagtgcataagatgactttggtgaaaccccgtctctactaaaaatacaaaaaattagccgggcgtagtggcgggcgcctgtagtcccagctacttgggaggctgaggcaggagaatggtgtgaacccgggaggcggagcttgcagtgagccgagatcccgccactgcacgccagcctgggcgacagagcgagactccgtctcaaaaaaaaaaaaaaaaaaaaaaaag

SEQ ID NO: 7816 - DNA, 600 bp, Homo sapiens
gtctcccagaaggcggagtcgatctcccaaaaggagaagcccctcccctcgccgagaaaggcatcggagcaagagtccaagacgtcaccgcagcaggtcccgagatcggcggcacagatcccgttccaagtccccaggtcatcaccgtagtcacagacacaggagccactcaaagtctcccgaaaggtctaagaagagccacaagaagagccggagagggaatgagtaatggactcagtttggttttagtccacatggcctcctgtggatatgaggatatctgtatgtggaaggattaagatctcccccaggcagctataagaatattttagtttttttcttatcaagtttctcaacctttatttttaatgaaggaggtgctgagttttgtatctttttaatcataatcaacatcagtttttgacccaactaaccttgactgtattcaaacttatgagagtataaaggatctggaggttggggatatgactgacaaggaaaggctgtggccacctgatgaccctttccctttttattaaaccggacacacctgtttcccataaaaaaaaaaaaaaaaaaaaaaaaaaaaaaaaaaaaaaa

SEQ ID NO: 7817 - DNA, 600 bp, Homo sapiens
tgcagctgttttcacttagcatatcgtgggcatctccccttatgattactaaatattttattttggagtggctgtgtactctcccattgactagatggaccattgtgccagttgccaatcactaatgctgttactaacttttcagttataaattgatgaatatctttgtgcacaggctgtttcccaatgtcaagttattagggtagactccaggaggtgggattcttcaactaaagaatatgaaaacctttgaggcttttactacatattgacaaaatggtttccggaaatatttgtatccccttacactgccaccagcaaggataaacatgtccatcttgcccgtattgggaattatcatctggctaaatatttgctaatttgataatgaaaaaatagcatcgtgtttcagttggcatttcactgacttctagcacggttgaacatctttcatgtggagcgattgtatttcctcctttgtggattgtcagtgtcctttgctctatcttctggggtcagataaatttgtatgagctcggtatatattaaagatattaacctggtgtgtgtcaaaaaaaaaaaaaaaaaaaaaaaaaaaaa

SEQ ID NO: 7818 - DNA, 1400 bp, Homo sapiens
attaaataatttatagctccaaaaacaaaaatatacttgtatatgtcacagagaaaaaaaatgcaaaatttataatagagttacattaaccttgttgtttacctttcactgatttcttatatggtataaattaaagttcaggcatttatggggagaaaaggccctccccaccgacccgccacctgccacctctgacggagtgggagaagttagtctgtgctaagatagtactgagtccccagatgttgtatactgtaaattacagtataatgccaaatgcagcaaaatcttccagctgtacgttacaagtttggtcattttgaagcttgacattttagtttgccattatgttaaaaacatctaaataggtgttagtttctcaggagtagattgttagtgttgacttttcctgtaaagcagacatcgttcttggcctgccctgcattgtatactagatttcattgttgtctctcatgcttcttgagttgcttcatggtttatgctcgccatggaaagctatcagtaacagtttcatgcttataccaaagaattaaatctgatctttaatatctgatattttcctggtactcgtactgataagggattattggaagtcagtcacagaatttggaaataaattctagtctctccttagctatttgatgcttttcatataggccaagaactcattgcaaaacatttttgcaaggatgaatgcctgtatttggtctaggaacagtacattttagtctgatttagaattactggtagcttattttaaagcaaggaaaagcagctgagctcaagtttgctgtctttagaatggtttgtgaaaatatggtataaaggtgttttcattttcctgttcttacctattattgtatagagctattcatgccattttttgggaaaactttaaaaattgccccaaatactgacattgagtgcattaaataacaaattatctttgatacattaaacttttattcttcatgcatctgtaatttaattttaagtataatgttttgcctttggtacaactaaattaaaactcttggtggtcacatattgtatataaacaaaacaatatgctttgttgaaggaaaattttctttattggaatgtggttgtaatccttgttcagttcttaagtttcggttttttttaaaaacaggatgcaacttaaacttttctttgcatcaaggtatatgcaaaacattggtgccgtgcatcaccaaatgaaagtttgtatttaacgaggaggtgctttacactgtactttttggtgttttttggaaaagttacatttagatctattctgaagctgttcatttttaacaaataaaatgttacaggtttcacatgatttattctcagctctaaaaaaaaaaaaaaaaaaa

SEQ ID NO: 7819 - DNA, 1400 bp, Homo sapiens
tctttgtttggcctattgaggtttagcgttttaaccttaactgttgttttggacttgaactttctctagccttgaaaatggagtgaacaggaggcaaagccacgcgtggtttgtgttggtggtatgttccacaaatggaagagatcattgcattttgctttggtaatgagtttacagagagtgggtcatctttgaagcatcaaatcctgatcaaatgctcaagctggaccgagctgcaagcctgccttggacaaagaatccctctgttcactgtggtgggaaagatcacactacatgcctgttgattggctcagtcactctgtgtctgatctaaacgtcattcagccctagaagcatgaattgcttcaaattattgtcaacttgttctcttccattttcattcaaattaactttgactcctggaagtattgagtcttcctttcaaggaccataaggtacatcagttatcttgaacattctgacgtgtaaaggaccataaggtacatcatttatcttgaacattccgacgtgtaactcacagccgaagcactccatcccagatttgttgtctgggaactttaggatcctctaggaagctaatctgcttagtctatttttagaggattgatctctggcacaaccagcttcctggagttacctcagcagaagactagaattagagaaaagggaaagaccttttcttctagtaagtgtcaagtacagatgctctttgacttatgatggggttatgtcccagtaaacccattggaagtcaaatgcatttaatacccctgactggacaccacagcttagcctcgtccaccctaaatgtactcagaacacttagaattgcccacagttgggcagaatcatctaacacaaactctattttataatcgagtgttgaatatatcatgtaatttattgaatattgtacattatgttgaaattgcaaccatttcacaccattgtaaagtccaaaaatcagaagctgaggactgtctgtacatgacattgaatcacatgaatggattactagggcctgaggggtgtccgttctttagaaaaatgtagagtatatatatcttcagggctgtgaattccatactagttatcaatattttaagatcattctgtatatacatattttaaattatgcaagcaaactaggaggagaatgtgcaattttgagggatacctaatttgcattcggttaggggatatttttcaacctcttgctttatactctgatatggggtgtgtttatgaacttgttaatgttatttaatcatgcagatttccaatcagtgtattgctcatttactgacaaaaagggaaaatacgaaacacagaaagggaaaataaactgacttttataatgaaaaaaaaaaaaaaaaaaa

SEQ ID NO: 7820 - DNA, 1395 bp, Homo sapiens; identical to SEQ ID NO: 2585

SEQ ID NO: 7821 - DNA, 600 bp, Homo sapiens
atgcaggctttcacaaggtgacttacgaaagtctaacatcaggcattgtggccattcattctggcttcaaactttaattcctttcctatcatggagcatgaaccagtcatatcctgttgaaagcctggaactgaaggataatctggcaaatgagacagcagcagagcatctcctcttaaggatacgtgccttggactcatgtttgaatcgaacagtctcaaagtggaagaacaaattcttgtcacttttttacagctttctttggagctgcttcagtccatctcccagaggcatttggtctgtatctttgctcaactgctaatttctcttggctgtagggtgtgtggttaaggtacaaccacccctaaagctcagttttgaagtgagtgtatttatagcttctctgctggtgctgccttctagagggatgatagatcatttgaacccaatgacaatttttaaccagaaaatttaattgtacctgaatcaacctttcagcctaggacgaagtctaggcccaagtcagagtattaatgatcatgagaattgtgtgctgaaccagtaaacgagtttaccttttgaaaaaaaaaaaaaaaaaaa

SEQ ID NO: 7822 - DNA, 1105 bp, Homo sapiens; identical to SEQ ID NO: 2587

SEQ ID NO: 7823 - DNA, 600 bp, Homo sapiens
taagatgatcaaaccacagactttggcctcagagaaaaaatgattgtgtgaaactgcccagctcagggataaccagggacattcacctgtgttcatgggatgtattgtttccactcgtgtccctaaggagtgagaaacccatttatactctactctcagtatggattattaatgtattttaatattctgtttaggcccactaaggcaaaatagccccaaaacaagactgacaaaaatctgaaaaactaatgaggattattaagctaaaacctgggaaataggaggcttaaaattgactgccaggctgggtgcagtggctcacacctgtaatcccagcactttgggaggccaaggtgagcaagtcacttgaggtcgggagttcgagaccagcctgagcaacatggcgaaaccccgtctctactaaaaatacaaaaatcacccgggtgtggtggcaggcacctgtagtcccagctacccgggaggctgaggcaggagaatcacttgaacctgggaggtggaggttgcggtgagctgagatcacaccactgtattccagcctgggtgactgagactctaactaaaaaaaaaaaaaaaaaaaaa

SEQ ID NO: 7824 - DNA, 1400 bp, Homo sapiens
tccacctgacggtcgccgaaccccacgcggagccgcccccccggggctctccgggcaacggctccagccacagcggcgccccaggcccagaccccacactggcgcgcggccacaacgtcatcaatgtcatcgtccccgagagccgagcccacttcttccagcagctgggctacgtgctggccacgctgctgctcttcatcctgctactggtcactgtcctcctggccgcccgcaggcgccgcggaggctacgaatactcggaccagaagtcgggaaagtcaaaggggaaggatgttaacttggcggagttcgctgtggctgcaggggaccagatgctttacaggagtgaggacatccagctagattacaaaaacaacatcctgaaggagagggcggagctggcccacagccccctgcctgccaagtacatcgacctagacaaagggttccggaaggagaactgcaaatagggaggccctgggctcctggctgggccagcagctgcacctctcctgtctgtgctcctcggggcatctcctgatgctccggggctcaccccccttccagcggctggtcccgctttcctggaatttggcctgggcgtatgcagaggccgcctccacacccctcccccaggggcttggtggcagcatagcccccacccctgcggcctttgctcacgggtggccctgcccacccctggcacaaccaaaatcccactgatgcccatcatgccctcagacccttctgggctctgcccgctgggggcctgaagacattcctggaggacactcccatcagaacctggcagccccaaaactggggtcagcctcagggcaggagtcccactcctccagggctctgctcgtccggggctgggagatgttcctggaggaggacactcccatcagaacttggcagccttgaagttggggtcagcctcggcaggagtcccactcctcctggggtgctgcctgccaccaagagctcccccacctgtaccaccatgtgggactccaggcaccatctgttctccccagggacctgctgacttgaatgccagcccttgctcctctgtgttgctttgggccacctggggctgcaccccctgccctttctctgccccatccctaccctagccttgctctcagccaccttgatagtcactgggctccctgtgacttctgaccctgacacccctcccttggactctgcctgggctggagtctagggctggggctacatttggcttctgtactggctgaggacaggggagggagtgaagttggtttggggtggcctgtgttgccactctcagcaccccacatttgcatctgctggtggacctgccaccatcacaataaagtccccatctgatttttaaaaaaaaaaaaaaaaaa

SEQ ID NO: 7825 - DNA, 1350 bp, Homo sapiens; identical to SEQ ID NO: 2590

SEQ ID NO: 7826 - DNA, 1235 bp, Homo sapiens; identical to SEQ ID NO: 2591

SEQ ID NO: 7827 - DNA, 1400 bp, Homo sapiens
aatgagctgagccggtcagtaaatgagtttctgtccaagctgcaagatgacctcaaggaggcaatgaatactatgatgtgtagccgatgccaaggaaagcataggaggtttgaaatggaccgggaacctaagagtgccagatactgtgctgagtgtaataggctgcatcctgctgaggaaggagacttttgggcagagtcaagcatgttgggcctcaagatcacctactttgcactgatggatggaaaggtgtatgacatcacagagtgggctggatgccagcgtgtaggtatctccccagatacccacagagtcccctatcacatctcatttggttctcggattccaggcaccagagggcggcagagagccaccccagatgcccctcctgctgatcttcaggatttcttgagtcggatctttcaagtacccccagggcagatgcccaatgggaacttctttgcagctcctcagcctgcccctggagccgctgcagcctctaagcccaacagcacagtacccaagggagaagccaaacctaagcggcggaagaaacttgccgaactaaagcaagaatgtcttgctcgtggtttggagaccaagggaataaagcaagatcttatccacagactccaggcatatcttgaagaacatgctgaagaggaggcaaatgaagaagatgtactgggagatgaaacagaggaagaagaaacaaagcccattgagctccctgtcaaagaggaagaaccccctgaaaaaactgttgatgtggcagcagagaagaaagtggtgaaaattacatctgaaataccacagactgagagaatgcagaagagggctgaacgattcaatgtacctgtgagcttggagagtaagaaagttgctcgggcagctaggtttgggatttcttcagttccaacaaaaggtctgtcatctgataacaaacctatggttaacttggataagctgaaggaaagagctcaaagatttggtttgaatgtctcttcaatctccagaaagtctgaagatgatgagaaactgaaaaagaggaaggagcgatttgggattgtcacaagttcagctggaactggaaccacagaggatacagaggcaaagaagaggaaaagagcagagcgctttgggattgcctgatgaaaagttcctgatactttctgttctccagtgttttccatttctctccttcttcttggtcacatatatgcctaaatgcacagtcatgtgcctacgtcctgcctcgcaatgagggagcatgtaccccaggtacatccatgaactgcggcagcagtttgacttattgctgtttcagctttaaggttgttgtgtttttgtttttgattatgttgcttgttaataaaaaaaaatagaaaaaaaaaaaaaaa

SEQ ID NO: 7828 - DNA, 1400 bp, Homo sapiens
cagagccagaactcacaaccagatccagaggcaacagggacatggccacctgggacgaaaaggcagtcacccgcagggccaaggtggctcccgctgagaggatgagcaagttcttaaggcacttcacggtcgtgggagacgactaccatgcctggaacatcaactacaagaaatgggagaatgaagaggaggaggaggaggaggagcagccaccacccacaccagtctcaggcgaggtcatcatcatctgcttggtggttctggatgccctcctggtgcttgctgagctcatcctggacctgaagatcatccagcccgacaagaataactatgctgccatggtattccactacatgagcatcaccatcttggtcttttttatgatggagatcatctttaaattatttgtcttccgcctggagttctttcaccacaagtttgagatcctggatgccgtcgtggtggtggtctcattcatcctcgacattgtcctcctgttccaggagcaccagtttgaggctctgggcctgctgattctgctccggctgtggcgggtggcccggatcatcaatgggattatcatctcagttaagacacgttcagaacggcaactcttaaggttaaaacagatgaatgtacaattggccgccaagattcaacaccttgagttcagctgctctgagaaggaacaagaaattgaaagacttaacaaactattgcgacagcatggacttcttggtgaagtgaactagacccggaccagctcccctcaaaaagaagacactgtctcatgggcctgtgctgtcacgagaggaacagctgcccctcctgggccgcttggtgagaggtttggtttgatacctctgcctccctcctgccagcatggattctgggtggacacagccttgtggaaggtccagtaccaccaagagctgcccatccactcccaccccacactgtatcaaatgtatcacattttctcatgttgaacactttagccttaattgaaaatgagcaacaaagctggacaattgctagttgtatataaaatttaatctcaccgaatgtacagttttcaaatttcacgtgtatattaaggaactgatgcatctgagcattctgaaagaaagaaaaagaagctactttagctgccaccccattctagaaaagtctcttattttcaagctgttctaaatagcttcgtctcagtttccccaaaaggggtacccaggcccctcctctgtgtgccccagctgcatcagccagcttctaggtggctccattgttttctgccacctgacaacatttttcctcaattactgtacaactactgtataaaataaaacaactactgtataaaataaactctctcttttccctggaaaaaaaaaaaaaaaaaa

SEQ ID NO: 7829 - DNA, 600 bp, Homo sapiens
gccaccgggccacggccccacagacccagcacgtatctcccatgcgccaagtggagcccccagccaagaagccagccacaccagcagaggatgacgaggatgatgacattgacctgtttggcagtgacaatgaggaggaggacaaggaggcggcacagctgcgggaggagcggctacggcagtacgcggagaagaaggccaagaagcctgcactggtggccaagtcctccatcctgctggatgtcaagccttgggatgatgagacggacatggcccagctggaggcctgtgtgcgctctatccagctggacgggctggtctggggggcttccaagctggtgcccgtgggctacggtatccggaagctacagattcagtgtctggtggaggacgccaaggtggggacaaacttggtggaggaggagatccccaagtttgaggagcgcgtgcaaagtgtcgatatcccagctttcaacaaaatttgaagcctgagtgtgtgtacgagggggcgtgcgtgaggccctcccccgattaaataattggcccggcaaaaaaaaaaaaaaaaaaaaaaaaaaaaaaaaaaaaaaaaaaaaaaaaaaa

SEQ ID NO: 7830 - DNA, 1400 bp, Homo sapiens
aaactagctctccagtatgtcccagagccagtccctggtaaaaagcttcctacaactggagaagtgcacatctgggtgaaggaatgccttgatctaccactgctaaggggaagtcatctaaattcttttgttaaatgtaccatccttccagatacaagtaggaaaagtcgccagaagacaagagctgtagggaaaaccaccaaccctatcttcaaccacactatggtgtatgatgggttcaggcctgaagatctgatggaagcctgtgtagagcttactgtctgggaccattacaaattaaccaaccaatttttgggaggtcttcgtattggctttggaacaggtaaaagttatgggactgaagtggactggatggactctacttcagaggaagttgctctctgggagaagatggtaaactcccccaatacttggattgaagcaacactgcctctcagaatgcttttgattgccaagatttccaaatgagcccaaattccactggctcctccactgaaaactactaaaccggtggaatctgatcttgaaaatctgagtaggtggacaaatatcctcactttctatctattgcacctaaggaatactacacagcatgtaaaagtcaatctgcatgtgcttctttgattacaaggcccaagggatttaaatataacaaaatgtgtaatttgtgactctaatattaaataagatatttgaacaagctaggaaaattgaatttctgctgctgcttcaaagaaaaagctgccccagagcattaaacatggggtattgttaagaagcaaaatgttcttgtttgccatcatgtgtttcacaccacaattctgtgccacagttaagagggtctggtacccttgcaggacctttgtaggttgtgggaaaaagtcgcagaaagatactcaaagtggagcagggaatggagacagacatcagtgatgataaaaaaaaaaaaggaccttaagaaactatttactctgtaatctctaataaaatatggaattccatattagggcaatgagactgaaactactggtgtttttctgccttgagaaaacaaacagttaaaacaagcctcaaatgtattttagtgccacccactggccataggtacaattcagttgttggcttgttttgacttaattctaaaataggtctcaagcctgtatttttatgagtttatttttttaaaaccctgcatatatatgattgtttttcttataactttactatatgaaagcagcataagagtagtcacaaacatgttttgcaacaaagttttaattagaatgtaagttgctcagttatactgttcttcttatgtatgtaaaattttcgtattttgtaaaaacccttagaataaattatcatttgatttaaattgt

SEQ ID NO: 7831 - DNA, 600 bp, Homo sapiens
tctgcaccctgagccatgtggtctggcagatgacttaaccactctgtgcctcagtgccttcatctatgaggcattgatctacacacactcatctgactgagggtgatcggggtgactgttccctcaggggatctgataactgggattctgcccagtcttcttttctgctgccatcattcggatgctcaacagagggcactcttcccccgcaggcctgcccacatccagtcaccccatccccatctggggccactgtcccttctctccgtctccgtggcagtggaaagaaactggatttggaatcaggacaagcccggcttccagtcccagccttgccactggagtggctatttcatctcactgagcctatttctccttctgcaaattaagaatgatgatcaaacgtatcccatgttggtgtcctggggatgtgaaggagttttcttcctatcggtgtgtctagcaccaagactggcacaaagaaccaacttctgaaaagacgctagccttattaacgctattatgattccttccttcctttgaccaatgagcatgctcaggagtagaaaattattttggtcttgaagatacttatgatcc

SEQ ID NO: 7832 - DNA, 772 bp, Homo sapiens; identical to SEQ ID NO: 2597

SEQ ID NO: 7833 - DNA, 798 bp, Homo sapiens; identical to SEQ ID NO: 2598

SEQ ID NO: 7834 - DNA, 1400 bp, Homo sapiens
aatttggatgttgtaaaactacgtgttacatttggagaggtcttgttgagaaggcaaaattttctaaatattttgatatcaatttgggtaaagaaaggaatacttttgttagaatgagaattaaagagaaaacaaaagaatcttggcaaaattttccctctgaaattacaaactttaggaacttttccagatgtatcgaatttaatttgacattgatgtcactcttcataccaagtgaatctattctcatgaactttgaacccatgttaattttggaccctataactaatttcctttctgtatcccatggtggtcaaagcagtaaaggagtttagagatacttagcaaatgccattcatatagtattgttagccaaactattattccttccttagaagttgatgtatcagaaaatttataagttatttgtatttatatataagtacatcagaacttgcccacatgataactcatgtttgctttaataaggaaaatatgttatttgaggttaattatatgatagtgaggaacattttacaattatttacagtgtttgacattaattgctgtcctatgatacagtagtaatgttaacagagagtttaatatgtttagcattatctttatggaatttatattcaccaatttcaggaaaaccaaccatagaactttataataggacagttataacctgactgaaccaaatccatcagcataatgactgtgtgttctgagaaatgcaaacaactttatgaaagtgtggtcatcttgacccccaaagagccacagtagctgtcaattattgagatttttaaatggtaaatattgcaaaagttaaacaagggtaccacaatatcatttataattgatgtcaatattagtagtccactttatgcttaaaataaaatcataaaaaatcaagttttaaggttatattttttaaaataatgaattttctatctctaggcaacatgtctttattattcaagctgaatgtttaagagagattttggtcttaaaggcttcatcatgaaagtgtacatgcatatgcaagtgtgaattacgtggtatggatggttgcttgtttattaactaaagatgtacagcaaactgcccgtttagagtcctgttaatattgatgtcctaacactgggtctgcttatgctagttcagtatttggtctaggcttcattttgatatgactgaattgcaatctatatttttaaaaagaaaaatcaaaatacattagggtttacttggttgtggcaaacaaacaaaaaatgctttcagtgttgaaatatctctattttccaaagatgataaactttcatcgttcttagcctacattgtcatttatatcaccaaatgagtttatagattaatgcaataaactttctaat

SEQ ID NO: 7835 - DNA, 1400 bp, Homo sapiens
ccagctcacgcactcgctgggcggcggcacgggctcaggcatgggcacgctgctcatcagcaagatccgtgaggagttcccggaccgcatcatgaacaccttcagcgtcatgccctcgcccaaggtgtcggacacggtggtggagccctacaatgccacactgtcggtgcaccagctggtggagaatacagacgagacctactgcatcgacaacgaggcgctctatgacatctgcttccgcactctgaagctgacaacgcccacctacggggacctcaaccacctggtgtccgccaccatgagtggggtcaccacctcgctgcgcttcccgggccagctcaatgctgacctgcgcaagctggcggtgaacatggtgcccttcccgcgcctgcacttcttcatgcctggcttcgcgccgctcaccagccgcggcagccagcagtaccgggccctgaccgtgcccgagctcacccagcagatgttcgacgccaggaacatgatggccgcctgcgatccgcgccatggccgctacctgaccgtggccaccgtgttccgcgggcccatgtccatgaaggaggtggacgagcagatgctggccatccagagtaagaacagcagctacttcgtggagtggattcccaacaacgtgaaggtggccgtgtgcgacatcccgccccgcggcctgaagatggcctccaccttcatcggcaacagcacggccatccaggagctgttcaagcgcatctccgagcagttctcagccatgttccggcgcaaggccttcctgcactggttcacgggtgagggcatggatgaaatggagttcaccgaggcggagagcaacatgaacgacctggtatccgagtaccagcagtaccaggatgccaccgccaatgacggggaggaagcttttgaggatgaggaagaggagatcgatggatagtcggaatagagccgccccaactcagatcctacaacacgcaagttccttcttgaaccctggtgcctcctaccctatggccctgaatggtgcactggtttaattgtgttggtgtcggcccctcacaaatgcagccaagtcatgtaattagtcatctggaacaaagactaaaaacagcagagaattgcgggttctacccagtcagaagatcacaccatggagactttctactagaggacttgaaagagaactgaggggccacaaaataaacttcaccttccattaagtgttcaagcatgtctgcaaattaggagggagttagaaacagtctttttcatcctttgtgatgaagcctgaaattgtgccgtgttgccttatatgaatatgcagtatgggactttgaaataatgattcataataaaatactaaacgtgtgtcttcaaaaaaaaaaaaaaaaaaa

SEQ ID NO: 7836 - DNA, 569 bp, Homo sapiens; identical to SEQ ID NO: 2601

SEQ ID NO: 7837 - DNA, 600 bp, Homo sapiens
  misc_feature (310)..(310): n is a, c, g, or t
  misc_feature (356)..(356): n is a, c, g, or t
  misc_feature (358)..(358): n is a, c, g, or t
  misc_feature (556)..(556): n is a, c, g, or t
gctgcatgtgtccgacaggcagcaccaggccatcttggtgctggaggtgcaggccttggagccttacctctatgtggccaatggctccggcctcaaggtccctcaaggagaccagggtaccatcaatatggccgagctccacctgggcaccaacctcgacatccgcagtggggatgaggtccactaccacatcacagacagcccttgctggggacagttgctccaggccactcagccagcacagccttcgcccagaaggacctgctggttggggccgttctctttggccacaatggcagcctcagctccngcaacaccctggccttctcaatggatgtggggccttctcaatggangnggggccttctcaatggatgtggggccagtgcacacagacagtgcacacggtgcactctacaagtgaccattgccctagagggcccactagccccactgaagctggcctggcacaagaagatctacatcttcctgggagaggcagctgagatcagaagggaccagctggagaccacggagttcatcatctcggagccgntggccaatctgtactcatgtggggaccagaacacactgatggag

SEQ ID NO: 7838 - DNA, 1250 bp, Homo sapiens; identical to SEQ ID NO: 2603

SEQ ID NO: 7839 - DNA, 600 bp, Homo sapiens
aaagggaggctccggctgccccagattggcagcaaaaataaactgtcaagtagtaaagagaacttggatgccagcaaagaaaatggggctgggcagatatgtgagctggctgacgccttgagtcgagggcatgtgctggggggcagccaaccagagttggtcactcctcaggaccatgaggtagctttggccaatggattcctttatgagcatgaagcatgtggcaatggctacagcaatggtcagcttggaaaccacagtgaagaagacagcactgatgaccaaagagaagatactcgtattaagcctatttataatctatatgcaatttcgtgccattcaggaattctgggtgggggccattacgtcacttatgccaaaaacccaaactgcaagtggtactgttacaatgacagcagctgtaaggaacttcacccggatgaaattgacaccgactctgcctacattcttttctatgagcagcaggggatagactatgcacaatttctgccaaagactgatggcaaaaagatggcagacacaagcagtatggatgaagactttgagtctgattacaaaaagtactgtgtgttacagtaa

SEQ ID NO: 7840 - DNA, 1257 bp, Homo sapiens; identical to SEQ ID NO: 2605

SEQ ID NO: 7841 - DNA, 600 bp, Homo sapiens
tgtcttcaactaccaagggaatttgtgaactagaaaactaccattatggggaggagagtaaacgaccccctctgttccacacgtggcctacaacccatttctatgaggtttcgcataagctcttggagatgtacaggaaggagctgctcctgaagcgcacggtggccaaggagcttgcccacaccggggatcccgacctcaccctgagctacctgtccatgtggctgcaccagccctatgtggagagcgacagtaggctgcatctggagagcatgctgctggagacaggccaccgagctctctgacgtcctgagacggctgcggacactggctccttccacgtctcaccaggcagacagtctgcctaggacccagtgccgcaggcctggatcagaccccaggatcagaccttcttggggtcttctggccagagcttgtcaccagccccatggcctctccaggcgtgctcatgcccacaacccgcggccagccccacgtggtgccgctcagccttctctgcccctcctgggaatctgtcattcgtgggtgcttcagagtaaaatcaatgagtttctgagcagaaaaaaaaaaaaaaaaaaa

SEQ ID NO: 7842 - DNA, 600 bp, Homo sapiens
gcccttaagtaaaggaggggtgggggcgatagaaggatggcagggcaacttgcctgtcctaagtctagccgctcgtggcaagtgttgactgcgtgtaggagactcccgtcctatctcccagtaccaagtctcggggaaaaggagtgcgacgagggtggagaagaccaagtttcgcttctcggccccaggctgttgcgcagtttccctggaatctttttgatcgactgctacgttgaccatgtccttcccagtgtccttagcaggagtgatggccagagagagaacttttgcacatgccatgttttcgtggcaaaaattttagtttcaagtaccttatgagggcggttacctagttttgaattttgtcacttgttgagggtgtacaaaatcctatctagagtcatactcgttggatgtattttcttttccgaaatgtacccataggacacataaccttattcctggtctttaatatttctcggttttataccaagcagcagtgttcggaagaccatgttagtgctacattgtgcacagtgagaaatgaacaagttttttaattaaagacagcactgtaattttaaaaaaaaaaaaaaaaaa

SEQ ID NO: 7843 - DNA, 600 bp, Homo sapiens
cggacccatacggcatttcccgggacagacaaactgctgtcgggctaccccagctcgtcgtctctggccagcgctgccgcggccgccatggcttgccacatgcacatccccacctcgggcgcaccgggcagccctgggacgctggcgctgcgcagcccccaccacgcgctgggactcagcagccgctaccacccctactccaagagcccgcttcccacgcctggcgcccccgtgccggtgcccgccgccaccggaccgtactactccccctacgccctctacggacagagactgaccaccgcctcggcgctggggtatcagtgagggcggccgggagggcgagcgagggagaggagggagagggggaggggaggagtccagggagaggcgggatcacggcccaggctgctgacacccgcgcgtggggaggactcgggccacgaaaggaaagaaatgtataccgtatctatctacccgacagcagcgaccgagacccggtgggacactccccttctccccactttcacctccccacccaaactttataaaagttgaaaaaatatcatttgactttttatagaaaaaaaaaaaaaaaaaaaa

SEQ ID NO: 7844 - DNA, 1400 bp, Homo sapiens
gctacaaagactttagagatatgaaccagactctaggagataacattactgtgaaaatgtattctccatcgtggcctaactttgattatactatggtggttatttttgtaattgcggtgttcactgtggcattaggtggatactggagtggactagttgaattggaaaacttgaaagcagtgacaactgaagatagagaaatgaggaaaaagaaggaagaatatttaacttttagtcctcttacagttgtaatatttgtggtcatctgctgtgttatgatggtcttactttatttcttctacaaatggttggtttatgttatgatagcaattttctgcatagcatcagcaatgagtctgtacaactgtcttgctgcactaattcataagataccatatggacaatgcacgattgcatgtcgtggcaaaaacatggaagtgagacttatttttctctccggactgtgcatagcagtagctgttgtttgggctgtgtttcgaaatgaagacaggtgggcttggattttacaggatatcttggggattgctttctgtctgaatttaattaaaacactgaagttgcccaacttcaagtcatgtgtgatacttctaggccttctcctcctctatgatgtattttttgttttcataacaccattcatcacaaagaatggtgagagtatcatggttgaactcgcagctggaccttttggaaataatgaaaagttgccagtagtcatcagagtaccaaaactgatctatttctcagtaatgagtgtgtgcctcatgcctgtttcaatattgggttttggagacattattgtaccaggcctgctgattgcatactgtagaagatttgatgttcagactggttcttcttacatatactatgtttcgtctacagttgcctatgctattggcatgatacttacatttgttgttctggtgctgatgaaaaaggggcaacctgctctcctctatttagtaccttgcacacttattactgcctcagttgttgcctggagacgtaaggaaatgaaaaagttctggaaaggtaacagctatcagatgatggaccatttggattgtgcaacaaatgaagaaaaccctgagatatctggtgaacagattgtccagcaataatattatgtggaactgctataatgtgtcattgattttctacaaatagacttcgactttttaaattgacttttgaattgacaatctgaaagagtcttcaatgatatgcttgcaaaaatatatttttatgagctggtactgacagttacatcataaataactaaaacgctttgcttttaatgttaaagttgtgccttcacattaaataaaacatatggtctgtgtagtttccgagatgtactatatacagtatatttttct

SEQ ID NO: 7845 - DNA, 600 bp, Homo sapiens
ctaatttttgccagtctcatgggtagatagtggtgcagtgctttaacatacattcatctgatcagcattaatttggggaattttttcacttagcctttctggtttcccttcctgtgcattgcccattttctcatggagtttcttatcttttttggtttattctcaggagttgcttgtacattcttgggcaattgcagataattccaagaatgcatatttgggctgggtatggaggttcactggtaatcccagcactttgggaggcccaggcagaaggatcgctgcagcccaggagttcgagactagcctgggcaacatagcgagacctcgtctctacaaaaaaaaattaaaaagggggctttgggaggccaaggcgggcagatcatgagggcaggagattgagaccctcctggccaacatggtgaaaccccgtctctactaaaatacaaaaaattagctgggcatggtggcgcacacctgtagtcccagctactctggaggctgaggcaggggaatcgcttaaacccaggaggcggagattgcagtgagccaaggttccaccactgcactccagcctggcgacagagcaaggctccactc

SEQ ID NO: 7846 - DNA, 1400 bp, Homo sapiens
gtgtgaccaagtgtgtggatgaccacatgcacctcatcccaactatgaccaagaagatgaaggaggctctcttatcaattggaaaataaaagtatttgccagtggccatcaggctgagggcaagaatatattttttataaggaattgggaattttagtcttttaagcaaagtttacgaatgaagaaatgaaggatggccacaagcgtaaggcatatgtcacttgcctctggacactggttattttatgtttcagtccctaaaaaatgaaatggaaaaaagtggtgctaaatcgagtcagagatattacaggagagttttagagcttattatttcctgtggccagtgcttgtcctggcagtaaggctctcccctgtaacaagccagagccctccaaggtaccagactcttcttactacacaggtactaacaggctggcaggttagagttggtggagtctgaggagagatattttctctttgttgccaacatcctgtttaccaaaagtgtcaccccaccatcttccataagctgtgaaacaaaatcaatgaggtcactaacttagaagggaaagaaagttttctgggtctttgttttcttgatttggggtaatttatacaagggcatacaagttgattttaagatgtggaactgggaggtagactagtttggataagaactttgaaatgttccttgtggatccccatttctggtcatcaagatgtggatgtacatttcttaaaattattacatgctgcatctttcagcctggagactgtgcagaaacatgagaggtgatgacacactaattatgggaagcagaattactggctgatggcccctgaggctgtgtgtaacaaaatgacaggacaatcttgcagtaacactttccccttgaagagaagggggttttgattgtgatatatactagtatctaggaatgaacagtaaaagaggagcagttggctacttgattacaacagagtaaatgaagtactggatttgggaaaacctggttttattagaacatatggaatgaaagcctacacctagcattgcctacttagccccctgaattaacagagcccaattgagacaaacccctggcaacaggaaattcaagggagaaaaagtaagcaacttgggctaggatgagctgactcccttagagcaaaggagagacagcccccattaccaaataccatttttgcctggggcttgtgcagctggcagtgttcctgccccagcatggcaccttattgttttgatagcaacttcgttgaattttcaccaacttattacttgaaattataatatagcctgtccgtttgctgtttccaggctgtgatatattttcctagtggtttgactttaaaaataaataaggtttaattttctcccc

SEQ ID NO: 7847 - DNA, 600 bp, Homo sapiens
gatggtttttgcaagagctttttttttttttaaactaccatctcccaacttttaaagccagattcttgacaaggattttagatcttaatgggttcgatggtagggaatacggaaaggatacactgctaatattgtgtctaacaataaagcaaacaactcgatgctgtaagaagacaagctgtttgagctttcaaacacacatgcacacagcacaattcagaaatacccaggaggattcctgcaggcttaacagttggcatcgtactgaaatgaaacgtgtattaacaagaaaatgtcaaacttttggggaaacaaattttctgttacttcccacccaactaaaagggaagataaaaccatcatcaccagaacaaaacagattttctccaaacaagtacaatgatagtgccgggttggcagttaactctttcaccctactaaattcaagagctcatctccaccctgtcctgtatattttctacatttctattaagaggctacttggtagtgtcagcgggcaccttttacaccttctagtagctcaagctagtaaaaccttgtacttctctattgcgccgccattaaaagcagcattagtgc

SEQ ID NO: 7848 - DNA, 1400 bp, Homo sapiens
ggtggcaaacctaaacagtcatattactttgctggatttcaagatgacagtttgatttacatggatcctcattactgccaatcttttgtagatgtcagcataaaggatttccctcttgagacattccactgcccttctcccaaaaagatgtcttttcgaaaaatggatcccagctgtacaataggattttactgtcgaaatgttcaggacttcaaacgagcttctgaagaaatcaccaagatgctgaaattttcttctaaggagaaatatcccttatttacttttgtaatggtcattccagagactatgattttacatctactacaaccaatgaagaagaccttttttcagaggatgaaaagaaacaattaaaaagatttagcacggaagagtttgtcttgctttaaagattagcacatttgtgcttgataagaagaattccattgaaaggggaaaaatgaagagaaacaagtatatctgaaatgtttattttcacaaatatcttaattttatatgttctttaaaaaagaacatttgaaaatataacagttaaagatatttttctaaaagagaaatgatttaatgaatcttgctttctaataaataaattgagtgattctggttgcattcctatttccctaagatctactagtgataattctaccttaactgtaagccttttagtcttcaaagtcttccacctgagcccattgttctcatgggggttttgtgatattaaccctcccccaaagactgggatcaccaaatagtttcaaaattctcagtttgtactgaagaccagaagatcagagaaggaaactttaatgctgtctagcctcctgctattaatgcaatcaaagaatacttttgcatatgtcttgataattaaatagtatttgttaactgtgatatgcatacacttatataagcagaattatgagttaaagtaatacttagcaatatgattttataatggctcctcattatgcttgctgttgaaccttttatgaggagtgaatataaagtattggttttccctcacaaatttaaagattatgttattaatactattataactgcatcaatcaagtcagataaaggcaactataaaatagtagtagtgtttgtttcctatctcaagggcgaaattttatgggaactcaatttattatgcagtttttaagtttaaaataccaagaaagatgtcactagattctcttctatgtgatttttgttttttatataaagcagtgtagtggtgtttagaagctgaggccacctgtaaggcaaatctgccttaagtgtattatgtgttacttaaaggcaaatttgtgatctaaaagtacaagagtgatttttgagctaggattataaaatacataataaagatgtgagaagat

SEQ ID NO: 7849 - DNA, 600 bp, Homo sapiens
gtccctgttaccagctgtgtggccttgggcaagtctgccagcgtcacttagcctcagtttccttatctgtaaaatgaggatagtaagaactacctcgtagtgatattgcgaaggttagaagaaacgcatggcataattacttggtagctattgttagatctgggagtgtgaaatggtagcgttttgtccctgtcttcacactatcatagggagaatcaaaagagctaacaaatataaacatgctttgtgaatttttttaaagaaaaaaatgtagaggggccaataaacatgaaaaaatcccagccctagtagcaattaaggaaatagcaaaacaggatttctgctcctcttgagtgggtctcatgggaacacaggtgcactttcccacacttgtccccccaggtgactaggttcaagagacatttgcttttggtggccccacaaacatttccttttgagggcccatagtgaatattaaagtgtgctggacatggtggctcatgcctgtaatcccagcactttcagaggctggggtgggcagattgcttgagctgaggagtttgagaccagcctgggcaacatagcaagatcccttccctt

SEQ ID NO: 7850 - DNA, 1400 bp, Homo sapiens
ggcaggttccgcgtggctcgaattcctgagcagcggacaagttcaatggtgtctgaggtgaagaccatcacggaggctgggccctcgtggggtgatctccctgactccccacagcctggcctcccccctgagcagcaggccctgctaggaagtggcggaagccgtacaaagtggctgaagcccccagcagagaacaaggccgaggagaaccgctatgtggtccggctaagtgagagcaacctggtcatctgaggggcggtctagtctaaggacactgcggccctgccctgggaggttccgaaggcttcctggaggaggtggagctgcagctgggactgtgaggaccgagaagcaatggcccagcagacgagacagcaaagaccaaggcctggaggtgggagcgtctgccccagtgaggaggcaggtggccggcgggcactgtgtacaggagcaggctgagccccgcccctggccctgctgccatgttgctcccctgaaggatgccccgacccccgtgcctgccctggctggatcctaggagcccacgggattctctgtatcatcagaggctgggcttggcagaggggaggggcctgtgcccgtcacccctggccccattccttggtaattagccacacccttgcctctgtacagggccctagagcagatgtgcgtccccctcctcttccagcaggtctataaagggaaggggtagcagaaagtcctgggctaggagagtgagtccctgggttctaatcttgggcacatctgtggccatcgctgggtccatttttctgactgtgaagtaaggagagacgtctcagtacccagggcctcttcagctctttgtaggttctgggctgggttgtgggggactggggagctgggctctaccatccctcccattagtagctttatccagccccgtttttgctgcttccagggcctctgccttcaaggcccccatggggctgtccatccatggctctgcctacggaaggggcttaatgcatgtgcctgcccctcccccagctgtttttaatgaaactgaaaaaatagacttgatcccagcaggactgtgatacagagccctagcctgcccagccagccccaagatctcaggagctttagggagaagacttggtggggctggagcacaccttgggcctcagtggtttctgtgtccctgtggtgccagtgcttctgggcagtgcaggcggctgccaggcccagccctgacttccactctggctcagcaacctggttatttatgtggggccgtgcaggcatgggcccactgcctgtccatcctgtttctcttatttattgaaactcaccattgccctatccttgtgtctccacccccttccatgtgttgaataataaaaggtgggaaagtg

SEQ ID NO: 7851 - DNA, 600 bp, Homo sapiens
cggacgcatagacaatgtcgatgctttcatgaacatccgcctggccaaagtcacctacacggaccgttgggggcatcaggtcaagctggatgacctctttgtgacaggccgcaatgtccgctacgtccacatcccagatgacgtgaacatcacctcgaccattgagcagcagctgcagattatccatcgggtgcgaaactttggtggcaagggccaaggccggtgggaatttcccccaaaaaactgtaagtgaggccctcagcaagccctggccccaactcggagtcctccagtgatctccagagctagttccctgccctcacaccctgtctggtacccgagaagaaagcagggccaggccagaagctggtgtccaacagacaccacctgtcaaagctgcctttcacagggttccacctcccagactcactctgggacccagaatcctatatgtggccttggggtaggtgacaatccccctttttgatgatctgaatctctgacttattgattatggaacctgtcaagtagttttcaactctcccagtgaggataattaaacatgctcagcctgagccaccaaaaaaaaaaaaaaaaaaa

SEQ ID NO: 7852 - DNA, 1325 bp, Homo sapiens; identical to SEQ ID NO: 2617

SEQ ID NO: 7853 - DNA, 1400 bp, Homo sapiens
ttatatgggaaagtggataaaactttcattggactggaatgtttggagattattaaattccaaatcaggaatcaaaactgccctctaataagacattagctgtctaggcgtgtgggtgccccctttctgccagcagttctggttctcaagaaaatcatcataaatcagacatgaaaattctggctccaaaaatagcattttctttctgcaaataaaaacgtgtgtatcaaggacgacgttcccccaacgtggacacactcggttcctcagaaagccaagcccgctgcagctgccacatccctggacacactcggttcctcacaaagccaagcccgctgcagctgccacatccctggacacactcggttcctcacaaagccaagcccgctgcagctgccacatcccagggcttatggtgcagcaggtgcttttttcaagacaggaatgaaagtgttaggaacacggcagaaaggtgacacctggagaccaaatgcaggatgaggagtactgcagaggtcacagggaagtcacagaacagtaatacgctagcaggggcatggggcatgaagaacagaagacaggaagcatttcagagactccaaagaagaaatcagggccaaccacagcttcccgggtcattcaccaggtgacaccactgccgtcatttcagcttctggccactgggaggcgctgctcgaaaggctttgccctgagactccaagaagctgcgggaaggacagcaggggccctggggttttagcctctggcccaggagttatgtgtccataaccaaagggagcacagtctgcacccagctctcatcccatcagagctgctgagactcttgcaggttcttccagaactggtttagcttgcctgcaggatcagaaaagtttgagaaaagcatctgcaaaatgctaaagagcagagcttaactcattgcctgtccccaccccatcccaggtcaccacttggatgaccccaggtccccgacccaacaacaacccctcccaagtccctaactccctcacttggacttgagacccttcacaacccccctcacttggacttgagacccttcacaacccagcagcgctccacctccaacttgacatcatgctttctggaaacttccccgtatgtctcactttcccacacttggtgccctggagcaccttccggcctctacatgctgtacgttcccctgtgagcaccctcctctcggtctctggccaacacagtcccacccatctgtgggtaacaagggggtgtgggtgttcttttcagccttgctaaactgtctgaatcaaggatcacaaactacagcctgcaggccaaatccagcccacagcctgtgtttgtaaataaagctttgttggaacaaaaaaaaaaaaaaaaaa

SEQ ID NO: 7854 - DNA, 1400 bp, Homo sapiens
cgcatgtcaagcaagccattaacaagatgctcaccaaaatcagtagttaggcagcccagctgaggtggaccaactaattggaaacactcttccccttctgttcccctttcaaaaataaaacaaaatattgcattctttgtttggattctgagaaatgtctgggcttcccattgtttctggcctctaataggttgggaagttttagcgtgttttatgcaatttcagtgctaacaatttcttcctttcctgcttgaataagatacactctaatggcatttgaacatgtaatcaccagagattctgaaatgactggtttatgttaagctatttttaggcatcttcaccttgctttaagtaggttgaagtttttgcaaaggcatttaaaaattcaatttcttgtcagatactacaaataattttcttaaaagtctaagatagcagaaaatacagtaaaaacacaggagaagaagctgagctattggaacaggaaatagaaggaactctagtttctgtttgaagtgaggattttctgaattatctaatatcatctaggttttctttaaaattttattttgttcttcagttcaagcatcttctcactaatgtttttcactataacagagaattcatttcaatttgagttggttctctcaatgatctattgatcattacaccctaactctccttccttggctcaaacaatattttccctataacaaaggcaataggacacaaaattcacatcctgctgggccttttttcatcaagtcagggtgatataaaaacattggaagtcttttcaccaaaccctgactttattgaatgctagtagaagatgtagaattagagacatctgatttgtttatcaccttagcagaaaaaccacagtccaaaagacaagcaaattaagaatggagcttaaccatgcctccattgggaagtctagactttgagccaggtacagtaagaaaaattagcctctgattcattaagtttgccacatgacttattttgatattttggatacattaactcacttaggagaattcagaaaagaatgggtgattaaagttcattacagctgaataaatgtgtctaaaacagactcttgtattctgaaagtacagtctacaactgataaaaccttatgattcttttctcccccattatgcccctatatatatcaagatttgggtactttattttagtagaaaatatatatcttttacatatgtatgtatttataaatgcatagatatatgtataaaaatttgtaagcgttagcggcattaattcaccaatgcatttggacaacttgatgtaactgactttattttatgtgactataataaaaagcataattttctcattctgtcaaaaaaaaaaaaaaaaaaaaaaaa

SEQ ID NO: 7855 - DNA, 600 bp, Homo sapiens
tgggtcctgttatttgctagggagggtaaagggagactatttcaaagctactgttcctagtccagctttaagtttcggtaagaaacatgctgttttgtttcatgatttcgttaattatggaaatttggcattgagggattattttattgagggtagaagagattccagaatcatcatctgtgatgatggtgtcctttagggctcttggagcagccagaccatgtttccaagagaaacctggtgatattgccagcagaccccctgccatcccccccagttgtcctggggctgaatgggcaaatctgtccaaacagctagtaaccggctgtgagggagagggtcagaagcacttagcgttggcctctgattgctgtcctctcttgtcctcttcccactccaatgatgaaaatgattttctctaaatgcctgggtaaggatgctttcaaggagctcacttggcctgcttgccctgccctctcacctctgacacccagccccaggagccagaccactcctgcctccacctctgactcttcagcagctgaagattaatgcagagaaagagcaaagcccaaaagggagaaaaaaaaaaaaaaaaaa

SEQ ID NO: 7856 - DNA, 1400 bp, Homo sapiens
tgtcttgttttggtacttaaaacagtctactccaggcatccagtccttacagaccaaggaagagcatagcgatgcctgttggaattgcagatgcattctggccttctcccccgtcctgaaacattttctttgaggaaggctcttagaacattagatagtctgctgaggttgttggcccagctccatacacccagtagaacagtggaacaactcatgcttcatgctgccaagctgctgtacttcaaaggaaacagatctagcacactgctgcacccctgcttccacactccacacttcaccccgctgcttttctctgacccgcccctggccttgtaagactcacgtaagctaagtccaggatgcctgtggcctgcggcttgattcttccctttaggattcagcaagttaatggcttcctcgctatagaagtgagactttgacttgatgcctcttggtatatcaaaaagatattcatccagaaagtaccaaatgttctgaaagacccgctcttcactccagttttccctagggtgtttctggcagggcgtttttaaaaggcatctacctgagttgacgctaatacttgtcaccacctggaacgtagttatcggtcggcaggctgaacatactccagattccccagaggccacttctgtagcccagcgatgcatctgagcctctctgcgtggtttatgcttgaaaaatagataatgcttttagatggttcactgccaggccatgggccccacacatctcaggccctgtgtgagggagcacactgagatggtgcaggagtgaatgggcatggcttggcctcgctacctcggggacctgttggagttctggcagcagggtgtctgcaggtgggacggcgttctgggcagagtcagaatggtcagaatgaaacagaacagccaactcacccacaggacagcttattttgaggcaaggttttggattttggaggaagcagccagatgaggcggtgagcctccagaaggtcagcctttggagcacgtaagatactgttacagggtccagaaatcgtgttcacatgggggctttgactcttcaaacagcttttgcagatcgtaaattgcatttgcctagtcgtgtgacctcaaaagaagtcagacatatttaatccagaaatagtttcgtttgagggagggcttgcaggtctgtaaatagcatttgctttcctggttagagattgggatgcagaaggagttttcagtattttttttaaaacactaatgatcattgaagagtatttatgtaaacatacaacgtataatgggtgggggatccgatcatggtgatgtacggggtgaattctcttgccgtgttgcaaatgtgtaaaataaagattatctggcagaaaaaaaaaaaaaaaaaaa

SEQ ID NO: 7857 - DNA, 600 bp, Homo sapiens
cgagggcaagccagcctcccaggcaaagccagagagccagccgcgggccgccgaaaagcgcccggctgaagattatgtgccccggaaagcaaaaagaaaaacggacagggggacggacgattcccccaaggactctcaggaggacttacaggaaaggcatctgagcagtgaggagatgatgagagaatgtggagatgtgtcaagggctcaagaggagctaaggaaaaaacagaaaatgggtggttttcattggatgcaaagagatgtacaggatccattcgccccaaggggacaacggggtgtcaggggagtgaggggtggaggtaggggccagaggggcttacacgatatcccatacctttaatgcctttggccttccattctgatttctctgatgagaatattgctggccctgctttccctggtaggtatttgccaggcccaatgctttaaccttaagctgatactttgctttagatgtcagtctcgttaccagcagccttttgacccaactacggcgctctatattttagtagaggattttcacccatgtgcatggaaaagatgttcatggtacattgtaaaaaaaaaaaaaaaaaa

SEQ ID NO: 7858 - DNA, 600 bp, Homo sapiens
tttcttgttcctttcgtagcctgcattttccagtgttatttgtacctgttctacagtccagccaggactatgaaggtggtgcttatgctgctctttatttgcctgggcaacatgtacctgcacgggctgaggaacctctggcaaatccttttccacataggagtggcttttctgtcttcatatcagatactaacaaggcagcttcaggagaagcagtctgactgtggagtatgaggatgacactgtgatgaatggattctttgattttcttttgaggatcaatctatgtttctctttctgcttctctactttacactccagtttccatccttttcagccaactggactgaaaaaccaggaattggggatgttaaacagttgcagtggaagtcatgaggttgcttgatacccagccttggttctgtgccaagcattactgcaggatctccagccagttcagcacgtttacctaggacagctggatctgggggctcatccagaaagagctttattggaagagagaaaggaaatattttggtcttttaagttgaatgatacagtaaaccacttgattcaataacaaaaaaaaaaaaaaaaaaa

SEQ ID NO: 7859 - DNA, 600 bp, Homo sapiens
aacaaacaaaaaacaaaaccaaaacactctggttcagtgttttgaaaatattgactaacataatattgctgagaaaatcatttttattacccaccactctgcttaaaagttgagtgggccgggcgcggtggctcacgcctgtaattccagcactttgggaggccgaggcgggtggatcacgaggtcaggatattgagaccatcctggctaacatggtgaaaccccatctccactaaaaatacaaaaaattagctgggcgtggtggcgggcgcctgtagtcccagctactcgggaggctgaggcaggagaatggcgtgaacccgggaggcggagcttgcagtgagccgagatggcgccactgcactccagcctgggtgacagagcaagactctgtctcaaaaagaaaaaaatgttcagtgatagaaaataattttactaggtttttatgttgattgtactcatgctgttccactccttttaattattaaaaagttatttttggctgggtgtggtggctcatacctgtaatcccagcactttgggaggccgaggcgggtggatcacctgaggtcaggagttcaagaccagtctggccaacat

SEQ ID NO: 7860 - DNA, 537 bp, Homo sapiens; identical to SEQ ID NO: 2625

SEQ ID NO: 7861 - DNA, 1400 bp, Homo sapiens
tggatgtgaatggaggcgatgagtggaaggtggaggatctctctcgagaccagaggaaggaattccccaatgaccaggttcgcagccaggccagattgcgggtccaagtaccagctgtgcgttcagctcctgtcgtccgcgcacgcgcctctggggaccttccagccagacccggcgaccatccagcagaagagcgatgccaagtggagggaggtctcccacacattctccaactacccgcccggcgtccgctacatctggtttcagcacggcggcgtggacactcattactgggccggctggtacggcccgagggtcaccaacagcagcatcaccatcgggcccccgctgccctgacaccccctgagcccccatctgctgaaccctgactggtaaacaactgctgtcagaaaagggctgggcttgggaaggggaggtggaggccaggtgtccccagacctctaacccttgcccctagcagcctcttctttgtggagcctctcagtgtgggcagccctcgcatgctggggtcgggccagctctccccgaaaggtcttgacctgaatgatggccggggaagcctgcgtgtgcccctttcagagacggagcacctgagatgtgggaggtgcagcatgttcccctgggcccctcagaaagtcgagcttggaggccagcctggatctgtctctcccttcccctcctgggaccattctacctgtgttctttgaccctcggagcagggacaggcaagacaactggcaagcttgcagctgccctgatggtgcaggtgcagggaggtgaccatgtaactctgaccaatctgggaagtggagggtgggctcatgggccgtgctctgcccctgtctgctgctcccagtctctcgctctgcctgcctgctcagaagaggtggctttggcccagaggctcaggccgggactgagatggacagacccagggtggggtggggtccaggtcgggtgtggactgtcctcactgtcagtggagccccagaagctagatgggtaccaggtggggttaggttcccagaggactgagggaatcctgtacaggatgtcccagggtagatggggagcaggattgggacctgctctgacagctggacacatgagccctggatgagtatggtagggggtttgaagaatcccctgtccacctcccaaatccaggcccggccccctctggcttggagagcattccaagcccccaccccacccctagaactgccattcccaagacctctgtctcccagccaaccacccttggaacttgcctcttgtcctgctggaaagatagcagtgttctcctgacttcgccctactgcatgcagccaaataaaaggtgtgcccagtctaaaaaaaaaaaaaaaaaaaaaaaaaaa

SEQ ID NO: 7862 - DNA, 600 bp, Homo sapiens
ggtggcattatggtatataatgttgactccaaaacctataatgcctcagtgctgccagtgagagtcgaggtggacatggtgcgagtgatggaggtgttcctggcacagttgcggttgctctttgggattgctcagccccagctgcctccaaaatgcctgctttcagggcctacgagtgaagggctaatgacctgggagctagaccggctgctctgggctcggtcagtggagaacctggccacagccaccaccacccttacctccctggcgcagcttctgggcaagatcagcaacattgtcattaaggacgacgtggcatctgaggtgtacaaggctgtagctgccgtccagaagtcggcagaagagttggcgtctgggcacctggcatctgcctttgtcgccagccaggaagctgtgacatcctctgagcttgccttctttgacccgtcactcctccacctcctttatttccctgatgaccagaagtttgccatctacatcccactcttcctgcctatggctgtgcccatcctcctgtccctggtcaagatcttcctggagacccgcaagtcctggagaaagcctgagaagacagactga

SEQ ID NO: 7863 - DNA, 1296 bp, Homo sapiens; identical to SEQ ID NO: 2628

SEQ ID NO: 7864 - DNA, 600 bp, Homo sapiens
cacatgaataggggctgcccctcggctgcagtgggctacccgggcatgaagccccagcagcactgcccaggcgagcttcagcagcagagtgacaccagcagcctgctgaggcagacccatcttggcaatggatatgacccccaaagtcaccagatcacgaggggtcccaagtctagcccggacgagggctctttcttatacacactgcccgacgactccactcaccagctgctgcagccccatcacgactgctgccaacgccaggagcagcctgctgctgtgggccagtcaggggtgaggagagcccccgacagtcctgtcctggaagcagtgtgggaccctccatttcactcagggcccccatgctgcttgggccttgtgccagttgaagaggtggacagtcctgactcctgccaagtgagtggaggagactggtgcccccagcaccccgtaggggcctacgtaggacaggaacctggaatgcagctctccccggggccactggtgcgtgtgtcttttgaaacaccacctctcacaatttaggcagaagctgatatcccagaaagactatatattgttttttttttaaaaaaaaagtcg

SEQ ID NO: 7865 - DNA, 794 bp, Homo sapiens; identical to SEQ ID NO: 2630

SEQ ID NO: 7866 - DNA, 1400 bp, Homo sapiens
agtgggaagagatgcggcccctggacatcgtcgagctggcggaaccggaggaagtggaggtgctggagcccgaggaggatttcgagcagtttctgctcccggtcatcaacgagatgcgcgaggacatcgcgtcgctgacgcgcgagcacgggcgggcgtacctgcggaaccggagcaagctgtgggagatggacaatatgctcatccagatcaaaacgcaggtggaggcctcggaggagagcgccctcaaccacctccagaacccgggcgacgcggccgagggccgggcggccaagaggtgcgagaaggccgaggagaaggccaaggagattgcgaagatggcagagatgctggtggagctggtccggcggatagagaagagcgagtcgtcgtgagcgcggtcggcggtttccagccaatggattctggtcaactggtggagattggctgacaccctggagaagccgaaaccagagagccttttgttttctcttttttcctgtctatgctctgtctcacttaacactacgttttctgctatggtctgtggttgatgacctcaatatgagtttcgattgttaacgtgtttttgtttgggaagtaattttgtttgaaaatgctctcacatacaggaattagggcctagattgtaagctcttgcagcagtcacatttgttcccgggctttggtggttatttctaaatttttgaggtgctttgctatttcttgtgtgacctgatagctccctggaactttgggtctgtgtgtgacacatgagactcacagttggagttctccagctctggaggtgctgaaggagctgcattaattctggaagacgactccatgcagcaactactgaagaaaggaccagacttcaacggggagtgtggatgggccgacctggctgggactcgtgaatctggagaagagctggagaatggatagtattgtctgtatttggagactttaatttctgtgtgagaccaaaggaggagagatgtgttttgttcaaaatttaaatttgttgtggtacactatcttatgtaacctgtctggtgagtttgtttggacaacctaactcagctttatttgacatggaacctaaaatagaagataagatcttgatattctgtacaagttgatgtaataccctgatgcgttttagaggacttggcataaaatgaaagattggcaaaggcccttgaggggcttggggatgacagtatggaactgtctgcattggaccctaaactggactagaagaggcatcttcaaggttcatacgttgtccagctgtaagttcatttgagtagcagacctaacaaatatttgaggtcagaaccctaccatgttaaaacaaacaaaaacttaccatgttaataaaagtattcatttgc

SEQ ID NO: 7867 - DNA, 967 bp, Homo sapiens; identical to SEQ ID NO: 2632

SEQ ID NO: 7868 - DNA, 600 bp, Homo sapiens
tgctgtacggagtcttcctctacatgggcgtggcctccctgaatggcatccagatggggaccggagggtcagaattcaaaatccagaagaagctgactccattctgggaacgctgcaagctcttcctgatgccagccaagcaccagccggaccatgccttcctgcggcacgtgccgctgcgccggatccacctcttcaccctggtgcagatcctctgcctggcggtgctctggatcctcaaatccacggtggctgccatcatcttcccggtcatgtctctctccaccacagatcctgggcctcatcatcgttcgaaggcttctggatttcatcttttcccagcacgacctggcctggattgacaacatcctcccagagaaggaaaaaaaggagacagacaagaagaggaagagaaaaaaaggggcccacgaggactgtgatgaggagccccagttccctcctccctcggttataaagattcccatggaaagtgtccaatcagatccccaaaacggtatccactgcattgccagaaaaagatcttccagttggagttactcactctgattcttccttcagtgacacagaacttgaccgaag

SEQ ID NO: 7869 - DNA, 1400 bp, Homo sapiens
gtgccatcacccatcatggccaccacactgacgtggtcagggaagcctgctgggccctgcgtgtcatgaccttcgatgacgacatccgtgtgccctttggccatgcccacaaccatgccaagatgattgtgcaggagaacaaaggcttgaaggtgctcatcgaagccaccaaagcgttcctggataaccctggcatcctgagcgagctctgtggaaccctgtcccgcctggccattcgcaacgagttctgccaggaggtcgtcgacctcgggggcctgagcattctggtgtccctgctagccgactgcaatgaccaccagatgagggaccagagcggcgttcaggagctcgtgaagcaagtgctgagcaccctgcgagccatcgcaggcaacgacgacgtgaaagatgctattgtccgtgctggtgggacggagtccatcgtggctgctatgacccagcatctgaccagcccccaggtgtgtgagcagagctgcgcggccctgtgcttcctggccctgcgtaagcccgacaacagccgcatcatcgtggagggtggcggggctgtggcagcactgcaggccatgaaggcacacccgcagaaggccggcgtgcagaaacaggcttgcatgctgatccgaaacctggtggcccacggccaggccttctcgaagcccatcctggacctgggggctgaggcactcatcatgcaggcccgatctgcccaccgtgactgtgaggacgtggccaaggccgccctgcgggacctgggttgtcatgtcgagctccgagagctgtggacaggccagaggggcaacctggcgccatgaccccaggcccagtctgggccgtgactctgggtgagtcgtgtgactcaggaatgggggtagatccatgtcctccactgtcccccattagttctgtccccttcacaatgagaagtgttttctggcaggccctaggtaaagggtcgggggaggggggagccttgtagggaggcctctacacagaagaaagcagcccccatgtcccagccacttctgggtcccagccagcagcacggatgttactgtcctgctccttcccccagccccacgccctaccagagggggcaaagggcacgtcccatcactcactgccctgtctgaaatgtggcagccactgtgggccaggctcagggcagggcaggcgattccagtggggttgggccccctggcgcctgctgcttactgcagtttcatgcaggcctctgctccttgtctttcttacctgtaaaatgggtctcagatgctccgccctgcttggccccagcttgtctgtctctgggtcctgggccagccaggatacctgataataaaagatcattgggtgaaaaaaaaaaaaaaaaaaaaaaaaaaaaaaaa

SEQ ID NO: 7870 - DNA, 988 bp, Homo sapiens; identical to SEQ ID NO: 2635

SEQ ID NO: 7871 - DNA, 979 bp, Homo sapiens; identical to SEQ ID NO: 2636

SEQ ID NO: 7872 - DNA, 600 bp, Homo sapiens
gtctatgaactagacggagctcccacggctgcccaggtgctgatcatgggacctgatgacttcattgtggccatggttagctccctgaaccagccctttggcagcggccttatcaccccctcggggatcctgctcaacagccagatgctggacttctcctggcccaaccggacagctaaccactctgcacccagcctggagaattcagtgcagccagggaagcggccactctctttcctgctgcccacagtggtccgacccgcggaggggctctgtggaacctacctcgctctgggggccaatggagctgcgcggggcctcagcggcctgacacaggttctgctgaatgtcctgaccttgaaccggaacctgagtgacagcctggcccgcggccgcctacacccggacctgcagtccaacctcctgcaggtggacagtgagttcacagaggaagagattgagttcctggaagccaggggtcaccacgtggagaaagtagatgtcttatcctgggtccatggcagccgaaggaccaacaacttcatcatcgctgttaaggaccctcggagcccagatgcagctggagccaccatcctgtag

SEQ ID NO: 7873 - DNA, 1400 bp, Homo sapiens
tccgttccgcgcacaacgtggataggaacttgaccatcgatacgtactatgaccgaaatgccgagatgctgtcaactcagaaacgagacaaaatatggaacttccacgtctggaatgagtgctggatgatccggaaagatctcccaccaggatacaacgggtggcaggttctggaccccactccccagcagaccagcagtgggctgttctgctgtggccctgcctctgtgaaggccatcagggaaggggatgtccacctggcctatgacaccccttttgtgtatgccgaggtgaacgccgatgaagtcatttggctccttggggatggccaggcccaggaaatcctggcccacaacaccagttccatcgggaaggagatcagcactaagatggtggggtcagaccagcgccagagcatcaccagctcctacaagtacccagaaggatcccctgaggagagagctgtcttcatgaaggcttctcggaaaatgctgggcccccaaagagcttctttgcccttcctggatctcctggagtctgggggtcttagggatcagccagcgcagctgcagcttcacctggccaggatacccgagtggggccaggacctgcagctgctgctgcgtatccagagggtgccagacagcacccaccctcgggggcccatcggactggtggtgcgcttctgtgcacaggccctgctgcatgggggtggtacccagaagcccttctggaggcacacagtgcggatgaacctggactttgggaaggagacacagtggccgctcctcctgccctacagcaattacagaaacaagctaacggacgaaaagctcatccgcgtgtctggcatcgcggaggttgaagagacagggaggtccatgctggtcctaaaagatatctgtctggagcctccccacttgtctattgaggtgtctgagagggctgaggtgggcaaggcgctgagagtccatgtcaccctcaccaacaccttaatggtggctctgagcagctgcacgatggtgctggaaggaagcggcctcatcaatgggcagatagcaaaggaccttgggactctggtggccggacacaccctccaaattcaactggacctctacccgaccaaagctggaccccgccagctccaggttctcatcagcagcaacgaggtcaaggagatcaaaggctacaaggacatattcgtcactgtggctggggctccctgagacccgccctccagctgccctccctggcacccctgccccacctggctcctttctactcctggctatgtcgtcttggctccacctctgtcctctctctagcctgcctgggaatgaatgaagctctgttagaaacaccgtgtgctttgggaagagacaataaagatgtctttattt

SEQ ID NO: 7874 - DNA, 1400 bp, Homo sapiens
cacagcagggctcggactgcgacatctgggacgggcagcccgtgtgccgctgccgcgaccgctgtgagaaggagcccagcttcacctgcgcctcggacggcctcacctactacaaccgctgctatatggacgccgaggcctgcctgcggggcctgcacctccacatcgtgccctgcaagcacgtgctcagctggccgcccagcagcccggggccgccggagaccactgcccgccccacacctggggccgcgcccgtgcctcctgccctgtacagcagcccctccccacaggcggtgcaggttgggggtacggccagcctccactgcgacgtcagcggccgcccgccgcctgctgtgacctgggagaagcagagtcaccagcgagagaacctgatcatgcgccctgatcagatgtatggcaacgtggtggtcaccagcatcgggcagctggtgctctacaacgcgcggcccgaagacgccggcctgtacacctgcaccgcgcgcaacgctgctgggctgctgcgggctgacttcccactctctgtggtccagcgagagccggccagggacgcagcccccagcatcccagccccggccgagtgcctgccggatgtgcaggcctgcacgggccccacttccccacaccttgtcctctggcactacgacccgcagcggggcggctgcatgaccttcccggcccgtggctgtgatggggcggcccgcggctttgagacctacgaggcatgccagcaggcctgtgcccgcggccccggcgacgcctgcgtgctgcctgccgtgcagggcccctgccggggctgggagccgcgctgggcctacagcccgctgctgcagcagtgccatcccttcgtgtacggtggctgcgagggcaacggcaacaacttccacagccgcgagagctgcgaggatgcctgccccgtgccgcgcacaccgccctgccgcgcctgccgcctccggagcaagctggcgctgagcctgtgccgcagcgacttcgccatcgtggggcggctcacggaggtgctggaggagcccgaggccgccggcggcatcgcccgcgtggcgctcgaggacgtgctcaaggatgacaagatgggcctcaagttcttgggcaccaagtacctggaggtgacgctgagtggcatggactgggcctgcccctgccccaacatgacggcgggcgacgggccgctggtcatcatgggtgaggtgcgcgatggcgtggccgtgctggacgccggcagctacgtccgcgccgccagcgagaagcgcgtcaagaagatcttggagctgctggagaagcaggcctgcgagctgctcaaccgcttccaggactagcccccgcaggggcctgcgccaccccgtcctggtgaataaacgcactcc

SEQ ID NO: 7875 - DNA, 1400 bp, Homo sapiens
cgtggacaggcggacactcctggtcttcagctttatcctggcagcagctttgggccaaatgaatttcacaggggaccaggttcttcgagtcctggccaaagatgagaagcagctttcacttctcggggatctggagggcctgaaaccccagaaggtggacttctggcgtggcccagccaggcccagcctccctgtggatatgagagttcctttctctgaactgaaagacatcaaagcttatctggagtctcatggacttgcttacagcatcatgataaaggacatccaggtgctgctggatgaggaaagacaggccatggcgaaatcccgccggctggagcgcagcaccaacagcttcagttactcatcataccacaccctggaggagatatatagctggattgacaactttgtaatggagcattccgatattgtctcaaaaattcagattggcaacagctttgaaaaccagtccattcttgtcctgaagttcagcactggaggttctcggcacccagccatctggattgacactggaattcactcccgggagtggatcacccatgccaccggcatctggactgccaataagattgtcagtgattatggcaaagaccgtgtcctgacagacatactgaatgccatggacatcttcatagagctcgtcacaaaccctgatgggtttgcttttacccacagcatgaaccgcttatggcggaagaacaagtccatcagacctggaatcttctgcatcggcgtggatctcaacaggaactggaagtcgggttttggaggaaatggttctaacagcaacccctgctcagaaacttatcacgggccctcccctcagtcggagccggaggtggctgccatagtgaacttcatcacagcccatggcaacttcaaggctctgatctccatccacagctactctcagatgcttatgtacccttacggccgattgctggagcccgtttcaaatcagagggagttgtacgatcttgccaaggatgcggtggaggccttgtataaggtccatgggatcgagtacatttttggcagcatcagcaccaccctctatgtggccagtgggatcaccgtcgactgggcctatgacagtggcatcaagtacgccttcagctttgagctccgggacactgggcagtatggcttcctgctgccggccacacagatcatccccacggcccaggagacgtggatggcgcttcggaccatcatggagcacaccctgaatcacccctactagcagcacgactgagggcaggaggctccatccttctccccaaggtctgtggctcctcccgaaacccaagttatgcatccccatccccatgccctcatcccgacctcttagaaaataaatacaagtttgaacaggc

SEQ ID NO: 7876 - DNA, 600 bp, Homo sapiens
gtggatgcacctttctgtctaaatgcgaatgaaaacaagagtgtgaagatgatgacgcaaaaaggcctctacagaattggcttcatagaggaggtgaaggcacagatcctggaaatgaggtacaccaaggggaagctcagcatgttcgtgctgctgccatctcactctaaagataacctgaagggtctggaagagcttgaaaggaaaatcacctatgaaaaaatggtggcctggagcagctcagaaaacatgtcagaagaatcggtggtcctgtccttcccccggttcaccctggaagacagctatgatctcaattccattttacaagacatgggcattacggatatctttgatgaaacgagggctgatcttactggaatctctccaagtcccaatttgtacttgtcaaaaattatccacaaaacctttgtggaggtggatgaaaacggtacccaggcagctgcagccactggggctgttgtctcggaaaggtcactacgatcttgggtggagtttaatgccaaccacccttttctctttttcattagacacaacaaaacccaaaccattctcttttatggcagggtctgctctccttaa

SEQ ID NO: 7877 - DNA, 600 bp, Homo sapiens
gtaagagagacagttaaaagtccttttcagctaagtgaaggtaaaaatgtaactgtggaaatgatgtatcaaattggaacatttaaactggcctttgtaaaggagccgcagatgcaagttcttgagctgccctacgttaacaacaaattaagcatgattattctgcttccagtaggcatagctaatctgaaacagatagaaaagcagctgaattcggggacgtttcatgagtggacaagctcttctaacatgatggaaagagaagttgaagtacacctccccagattcaaacttgaaattaagtatgagctaaattccctgttaaaacctctaggggtgacagatctcttcaaccaggtcaaagctgatctttctggaatgtcaccaaccaagggcctatatttatcaaaagccatccacaagtcatacctggatgtcagcgaagagggcacggaggcagcagcagccactggggacagcatcgctgtaaaaagcctaccaatgagagctcagttcaaggcgaaccaccccttcctgttctttataaggcacactcataccaacacgatcctattctgtggcaagcttgcctctccctaa

SEQ ID NO: 7878 - DNA, 600 bp, Homo sapiens
caccagaactccacggtgagggccgatgtctgggaacttgggacgccagaggggcagtgggtgccacaatctgaacccctacatcccattaacaagatatcatcaacggagccctgcacgggagacaggtctgtcttctgccagatggaagtgctcgatcgctactgctccattcccggctaccaccggctctgctgtgtgtcctgcatcaagaaggcctcgggccccaaccctggcccagaccctggcccaacctcactgccccccttctccactcctggaagccccttaccaggaccccaggaccctgcagatgctgcagagcctcctggaaagccaacgggatcagaggaccatcagcatggccgagccacacagctcccaggagctctggatacaagctccccagggacccagcatccctttgcccctgagacaccaatccctggagcatcctggagcatctcccctaccacccccggggggctgccttggggctggactcagacacctacgccagtccctgaggacaaagggcaacctggagaagacctgagacatcccggcaccagcctccctgctgcctccccggtgacatga

SEQ ID NO: 7879 - DNA, 600 bp, Homo sapiens
cactaggtcttcccgtcacctccacctctctccatgacccggctctgcttacccagacccgaagcacgtgaggatccgatcccagttcctccaaggggcctgggtgctggggaggggtcaggtagtccagtgcgtccacctgtatccacctggggccctagctgggcccagctcctggacagtgtcctatggctgggggcactaggactgacaatccaggcagtcttttccaccactggcccagccctgctgctgcttctggtcagcttcctcacctttgacctgctccataggcccgcaggtcacactctgccacagcgcaaacttctcaccaggggccagagtcagggggccggtgaaggtcctggacagcaggaggctctactcctgcaaatgggtacagtctcaggacaacttagcctccaggacgcactgctgctgctgctcatggggctgggcccgctcctgagagcctgtggcatgcccttgaccctgcttggcctggctttctgcctccatccttgggcctgagagcccctccccacaactcagtgtccttcaaatatacaatgaccacccttcttcaaaaaaaaaaaaaaa

SEQ ID NO: 7880 - DNA, 600 bp, Homo sapiens
ggtggctccctcatcagcgaacagtgggtggtgtcagcaggtcactgctacaagccccacatccaggtgagactgggagagcacaatatcgaagtcctggaggggaatgagcagttcatcaatgcagccaagatcatccgccaccccaaatacaacaggattactctgaacaatgacatcatgctgatcaagctctccacacctgccgtcatcaatgcccatgtgtccacgatctctctgcccactgcccctccagctgctggcaccgagtgccttatctccggctggggcaataccctgagctcaggggccgactacccagatgagctgcagtgcctggacgctcctgtgctgacccaggctaagtgtaaagcctcctaccctttaaagattaccagcaagatgttctgtgtgggcttccttgagggaggcaaggattcctgccagggtgactctggtggccctgtggtctgcaatggacagcttcaaggaattgtctcctggggctatggctgtgcccagaagagaaggcctggagtctacaccaaggtctacaactatgtggactggattaaggacaccatagctgccaacagctaa

SEQ ID NO: 7881 - DNA, 741 bp, Homo sapiens; identical to SEQ ID NO: 2646

SEQ ID NO: 7882 - DNA, 590 bp, Homo sapiens
ttcttctagggacatgggtactctttttattagtgtatttatttttgagatagagtctcgcattgtcgcccaggctggagtgcatggtgccatctcggctcacttgcgacctctgcctcctgggttcaagcgattcttctgccttcgcctccagagtagctggcactacaggcacacgccaccactcccggctaatttttgtatttttaatagagacaaggtgtcaccatattggccaggctggtctcaaactcctgacctcgtgatccgcctgcctcggcctcccaaagtgctgggtattacagatgtgtagccaccatgcccagccagtactctttttggccactccttctcagcttcattggctagtttctctctcatctccctgaactccaaggttcagttcatagatgccttcctctcagaggtgttctaagggatctcatctaatctcatggctttaaataccatctatatgctgatgatactcaaatttctatctccaactttgcctctttcctcaactacagacttatatattcaagtgcttacttgctacctccacttgaatatctaatagacatcttact

SEQ ID NO: 7883 - DNA, 729 bp, Homo sapiens
aaacactagctggacgggtaccaaacaagactttcgttcgttgcttgtgggaatgcaaaatggtccaggcattttggaagtaagtatttcaatgttcttacaaaactattcatactcttgtcatatggtctagaaattatggtccttgatatttgcccagatgagttgaaaacgtttgtctatgtaaaaacctgcacacgaatgtttacattacctttattgccaaaacttggaggcgaccaaaagttgttgagtaagtgaatgaatgaataaactatggtaaatttatagaataaaatattcagcaatgaaaatggcgaaactttggagacagtgaaaaacaacagcggttgccaggagtttgtggagaaggagaaagggaagaaaaggtggaacataggcagtttttgagaagtgaatgactatatgctgtattacactgtaatggtgcatatatttctttgcaagtttctcaaaatccatagaatgtataacacagagagtgaactctaatgtaaaccataaactttagttaatgatgtgtcaatactggcttatgaattattaaaaaaactaccactttaatttaagatgttaataatggagaaaactgagggaagataatgttttatgggaaccttgtattttctgctcatttttctgtaaactttaaactaaaaaaaaagcctattaattaaatttacaagctaaactaaaaaaaaaaaaaaa

SEQ ID NO: 7884 - DNA, 730 bp, Homo sapiens
ttgaggaagagactggtttgactcgtgctgtgacttcggaagttccccctaacagcatgtgtgcacactacactggaggaatgtaacctggaagtcatggaagacagtatgtcagtaggtatcacgtcatgccatgtgagacataagtgagcttttgactggtacagtgatagttgataagagttgtgtaaagaattttcagatattggtccatgattgaatgtgcacacagcaggaaagggggagtcaaggataactgagagctcaacatgggtagtctgggaagatggaaattaccatggactaagagaaagaacacagagtacccataatatgtaattctaacacccattccccactaacctgccaatattgagttcactgccaaatcttaaaggcagacattccatttggctaatggtcagtaagccccatttcctgccagatattagggcttgcttaagagtttgccttcattagtggtttgagaaatgatacgcaacctctccatggaacatgcattttgtaatagcaaaattatcaagagccttttcagtgctacaattgagatactagctgtgaatcaatgttcaaaaaaatcttaataaattgtttcagatgttactaggaaggatatttctggagtgtcaattagacacaattatagtttgagttgaataattaccctttcttgtacatattttgatgatgctttaaaaaaaaaaaaaaa

SEQ ID NO: 7885 - DNA, 512 bp, Homo sapiens
aagtttctttgaggttccttgtacgattgtagatactagtccctgtgtcaggatggtacagattgcagagagttttttcccactctgcgggttgtctgttaactctgctgattgtttctgttggccgccctttttgttgttcgtttgtggtttctggttttgttttttttggtcagagtgaaatacgtgtccaccgctctgtttaagaaaggtacccatatgtcctttccgcaattacccttttaaaaagactgtcaaccaggtgtggtggctcacttgaggtcaggagttcgagaccagcctggccaacatggcgaaaccccgtctctactaaaaatacaaaaattagctgtgcatagtggtgcgcgcttgtaatcccagctacttgggaagctgaggtgggagaattgctcgaacctggaaggcagaggttgcactgagcagagattgcaccactgcactccagcctgggcaacaagagcaaactccgtctcaaaaaaaaaaaaaaaaaa

SEQ ID NO: 7886 - DNA, 790 bp, Homo sapiens
acctactgttatagaagtttgtaaggtccaagtattggggaaccttgtacccatgtggtgtaaccatattgccgcaatggttcacagttgatacgttctgctccatttaatttgtgctatttggggtcatcttttctcagcatggttgttagaagtctgtaagttttttgtaattcatggttttgttgccacaagatgacattggtgatacaatattttgtaattttgtgcattggcatatgtcagtttgtgtatctactgtattcgtccagagacctattatgaggtgcaacgggtttttgttgtgtgttttgtccttttgtgttattgtgaacaacacaggaagagaaataatgggttggctgaaaatggatttggggtgaaaaggcagggggaaaatgtgaagaattttgaaataaaacatactaatgtgcttagaggtaaaatagattataaaaccagcccttgttgtattaaaatactaatgcacgagtctgggcgcggtggctcacgcctgtaatcccagcactttgggagtccgaggtgggtagattacctgcagtcaggagttcgagaccagcctggccaatatggtgaaactccatctctactaaaaatacaaaaattagccaggcatggtggcatttgcatgtagtcccagctagtcgggaggggtgaggcaggagaatcgcttgaacccaggaggtggaggttgcagtgagtctgagattgcaccactgcactctagcctggctgacagagtgagactctgtctcaaaaaaaaaaaaaa

SEQ ID NO: 7887 - DNA, 634 bp, Homo sapiens
gttggatggctttatttgagatatatggctcagtaaatattatatggtgcattttagaggagataggataggagagagtagttaatgttagtagagtcttttatataggcaaaggacctttagaataagtatcttacagacctcagggatatatgatatatatatgtatataatacatatatatgttagttctcaggatttatcaggagttaactgaagatattcgttcgtacatgtttgacattaaaagcctacactattgcttgtgtaaggctactatatgatatttgcatgcataaatttctgaagaagaaaaaagcaccgattcctcaagcttgaagtcagagacatcattgacagtctttctagtaagcactaatccttaaaaatattttagagtgtcttaatccagtctatcattgttggacatttgggttggttccaaatctttgctattgtgaatagtgccacaataaacatatgtgtgcatgtgtctttatagcagcatgatttatagtcctttgggtatatacccagtaatgggatggctgggtcaaatggtatttctagttctagatctctggaatactatgcagccataaaaaaaaaaaaaaaaaaaaaaaaaaaaaaaaaa

SEQ ID NO: 7888 - DNA, 650 bp, Homo sapiens; identical to SEQ ID NO: 2653

SEQ ID NO: 7889 - DNA, 681 bp, Homo sapiens
gattagttaaccactcattgccacactggacttctggactacatatagaaaacttctacccagcaaatggtgacactaaccattttgacggacgacaaaggacagactagtacaataaaacctcatgacctcatcacctcacttaaacaattataaataaatgaacaagactttttttcttctccaatggatcattttaaagcaaattctagatatcattatttcatccataaatacttcagtgtgtatctctaaaagataaaattgccataataccattattacctctttgaaaataaccataataccattatgatattaactataattatttttaaataaccatatcattattaccacattttcaaaattagtaatccccgccaggcgaggtggctcaggcctgtaatcccagcacttttggaggctgcagcgggtggatcccctgaggtcaggagtttgagaccagcctggtcaacatggtgaaaccctgtcgctaataaaaatataagaaattagccaggcgtggtggcgggcgcctgtagtctcagctacttgggaggctgaggaaggagaatcgcttgaacctggaaggtggaggttgtggtgagccaagatggcaccattgcactccagcctgggcaacaagagcgaaactccgtctcaaaaaaaaaaaaaaaa

SEQ ID NO: 7890 - DNA, 660 bp, Homo sapiens; identical to SEQ ID NO: 2655

SEQ ID NO: 7891 - DNA, 686 bp, Homo sapiens
  misc_feature (346)..(346): n is a, c, g, or t
  misc_feature (409)..(409): n is a, c, g, or t
ccttgaagcgagtgatgctagctgagtgtttactaaggattattataagggcctgaaggtgtgggactggagattaattaatacctttatgttctcccatatatagggaaaagcacggttggtactacttctgattaggcagattacaccacggattccttaagtgatccttgaaatggttattgttttctgccttgtcacatttgcccctgtgcccttttaaacgatgtggtaacctccggtttgtggacaggcaacaggtggaaagacattcttgtggctttcctggagggcttccccttcttaacccaagggccaaccaatttaaggcctttaagtgcctttnccaagaattgtccagcccccaaagttcccttgtgttaaccttccgttgttcgctgcgtgcccnagggaagtagtgtgtgtgctggagctggagcgcttgcactcttcaggtgactattctcacctccatttcctccacatgcattaggtgaaactgaggtctaagcctcctgcaaggtctacattttaaggactcacacatcaggctctcagaaatgtacacaggtattagttctgtttgttctaaaggaaatgtgggtatctctcaggccaggacttagtgactagttttcgctagacagcaggttaatacctagatctcatttaaaaaaaaaaaaaaa

SEQ ID NO: 7892 - DNA, 754 bp, Homo sapiens
  misc_feature (368)..(368): n is a, c, g, or t
tataagataaccctatagactaaaggcaggcatccagtgaagtggctgagcaaggattcgtcatcattttccctctccttgtagtggtcaagaggtccactcagatgctccttcaagagaacttcaagagaactgggctatggagagcttttggggctcgaccatggctaacagcttccagctgccacaccttgagaccctctacagtggtcttgctgtggctaggccacccccacttttcctctgcctaaccacccgtaggaacggcctggtgacactaagagcatgctccaacacagcgaactctacttgtagcaaactatttgctgctatgggcgccctctctctggtgcctcgtgccaacagancgtctttctgatgagtacgtgtcggcgcaaaagacgtcttttctctataccaccgctcttctccttctctctcctctcccaactcttctttatacacagggtgactcacccgtgaaaaggattcggaagccactccctgtactgctccctccacttttatgcttcacagccatttcccccaataaataaatattctgcggtctaatcccatctgggcacatgcttcttggagaacctgaactgacacacttctccatattctgtcaccatcaatcaagaatacatgcacttttggaggccaaggtgggtggatgaactttgaggtagggagtttgagaccagcctggccaacatggtgaaccccacctctactaaaaaaaaaaaaa

SEQ ID NO: 7893 - DNA, 443 bp, Homo sapiens
tcaagctgtccatctgagcagcagagcccagatggaaatcagaccactcattgttctactgaggtaaggatgggctttcttagttctgctctctctgtaggaaccttatgacttacgtaatcgataagactaactttttgtgtttttttgcattcacctagactattatgccagaacttgcgtaagaaaacacttctgtccgacccctgtagtgatcaactgatgccttcaagcaggaaacctgattgccctcatctcaggctgagtctgttttatcaatcacaaaatgactcaacccttttttaaaagccagctgtgaccattgactctgtgacctcctgtggtggtgaattcagtttaaaaaataataatgttaaaataacaagcttattgaagctattatgcttcaatgctccaccctttgggggctaaaaaaaaaaaaa

SEQ ID NO: 7894 - DNA, 718 bp, Homo sapiens
ctgtgtcaccagttaatctttctccaatgatcctatgaggaaagtgctattttctgtctccatttcatagatgaggaaaatgaggcacagaggagacgtgtatgtagccactaccactgcaacttgctcaaacttccggccaagtcggctctagtccagacagcctgactcctcagcctgcgtctgtatgctgcctctcctaattcattatgtttattaataatttttccccgttttgttaacacttatgtttcaaaaacagtcatctttatttacattgactgatcatttcttttgtaatttcttctagtacttacaatagttctagtttcattaacatttcctatagactgaaaaaattttttaatctttttggaattttaatatagtcaacagaaagtatctaaacttctcatttttccaaattctttactgtccaattttaaataaatccctttcccctttgttcccacctgattttgtgacactataatagtaaattttacaagggcttgttttggttacttattcttgccctggggttatctttaaactgaccacagctttctaatatatttgatcgtaacttccaaaaactgtgtaatttttgcttatttgtcttgcatctagtcacttaactctcttttgcttttctaggcagatcctatatatctacaaataatatatttatttccttctttccaaaaaaaaaaaaaaa

SEQ ID NO: 7895 - DNA, 726 bp, Homo sapiens
gcagatgtccagtgctggatgtaaatggcgtagatttacatatgacctatgcactcctcctatgtttgttttccttatggttgggggagggtgaaagaaaccaagagaaaggaccctcttgtctacttttaatcctctttgaattacttacatatctgatgccttgtaatgccatgtaaatagttgttatactgtattgttttatttgtattatgtttattgttgcatttttattttttaaagatttgcagaatattttcgatctgcgattgtttgaatctgcagatgcagagggcttactgtgtatgtcttcttaacctcctcctagttgtctttcagctccatatttacttatttttaaaattacctacagtaaaatttactttttttgtggacacttctgagttttgacagaaagtagatttgtgtaaacagcatcacaaagtacagaacaggtctgtccctccccaaaaaaattttttgtggccccctttagggtcaaccctactctcttaccatcagcccctggcaaccaaccagtgactgcactttatcctatagttttgccttttccagtatgttatgtaaatggaactgagttgagcttctttcgcttgatacagtgtatttagatgcatccattttattgtgtgtatcaatagtgcattcctttttattgtggaataattaataaacattgattaaaagaccaaaaaaaaaaaaaaa

SEQ ID NO: 7896 - DNA, 698 bp, Homo sapiens
tactatttctacacctacttggatatacttctggtcagtagccagcatcttgtaactaaatgatataaataaggttggtagtctgtgcctctgggaccaagtttaaaagtacctatgtgagggctgggcatgatggctcctgcctataattcctacttttggaggctgaggcaggaggattgcttgaggtcaggagtttgagaccagcctgggctccacagccagatcccatctctacaaaaaaattaaaaataattagccaggcatatggcacaggcctgcaatcctagctactcaggaagctgaggtgggaggatcccttgagcccaggagactttgaatgatcacactgtttcactccagcctggtgacagagcaagtgtctccaaaaaaaaaaaaaaaaaaaaagtgcagtgactcacacctgtaatcccagcactcttggaggccgaggtgggtggatcacaaggtcagagaacgagaccatcctgacaaacatggtaaaaccccatctctactaaaatacaaaacattagccaggcgtggtggtgcacacctgtagtcccagctactcaggaggctgaagcaggggaattgcttgaaccctggaggtggaggttgcactgagctgaggtcgcgccactgtactccagcctggtgacagagcaagactctgtctcaaaaaaaaaaaaaaaaaa

SEQ ID NO: 7897 - DNA, 623 bp, Homo sapiens
gttgtaaagccaccatacaggctatacacgagagtagcacgtgataaagttacatagaactaactatacacacacacacacacacacacacacacacacacacaaaagtaaaactgagggaacctgagtatgatcagtggcttctgtcaatgtcactgtgcaggttgtgacattgtaccattaggaggagctgggtgaactgtacccatgatctcttggtgttatttcgttaccactgcatgcaaatctacaatggtctcaaaattaaaagtttaaattaggccaggcgcagtggctcacgcctataatcccagcacttcgggaggctaaggccggcgggtcacctgaggtcaggagtttaagcccagcctggccaatatagtgaaaccctgtctttactaaaaatacaaaaaaaaattagctgcgcatggtggtaaaattacacgcctgtaattctagctagttgggaggctgaggcaggataatcgcttgaacccaggaggcggaggttgcaatgagccgagattgcgccactgcacaccagcctgggtggcagagcgaggctgtctcttaaaaaaaaaaaaagtttaaattaaaaaaacccaccataaaaaaaaaaaaaa

SEQ ID NO: 7898 - DNA, 714 bp, Homo sapiens
tggagtcactggacttgccaggagttgtctgcgagattgtaggtgcctcaagtgtttctcgttcgggactgagttgtgaatctgtaaaggggaaaatcctcgcaagaggtctacgagaagtttgagggcccaagtctagggtctaaacaaagccaggagtggtttggtatattactgagtgcaatcattgcgtgccattcctgcactcaatgtattgtgtaaaatccttaggtaataatgggataaacccacagctggtcctacttggcctcttgaaaaccattccatcattgtgccactctagcctgaaaaggaggaaatataaaagggaaaccacctgattgtctcttgcctcggagattgtggggtatatcccctatcttcacggctttgcccgatgatcaaatgaagtccattatgggagatttggggcctggcccacaaccccttttgggaatcccaacccccaagtcggttggatcacttgacctcaggagttggagaccagcctgggcagcacggcaaaaccccatctctacataaatcacaaagattagccgggtgtggcgggtgcctgtggtcccagctactcaggaggctagggtgggagagtcgcttgggcctgagaggtcgtggttgcagtgagctgcgatcctgccactgcattccagcctgggctacaaagctagaccctatctcaaaaaaaaaaaaaaa

SEQ ID NO: 7899 - DNA, 693 bp, Homo sapiens
tcccataattaagaatatattttaataaggctcaaaatactaatttcactttgtgtgaagcacacaatttccaggatgctgagatctaaacccaattgatgttgaatcctgggttgggaaataactctgggatctcatttcccagtttaatcatagaattaggaatttactaaggaccagaatgaaaacactaatttcagtttgcttgttgtaataatcagaatttgaacactgtccttaagaagtgaaaagctatttggtgtattacatctcattatccttccacttctgtagtcccggttaaccagctgctatgttaaaataccactatgtttagggacagacattgcagtaaatacctacacaacattctgacaatgtcaaatttttgcccctatatgaaccacacagactaggttctgcctttgactcactgacagaagtaaccaggaaagccggaccctattccttacttgttgtttaaaatgtgtagatgagcagagcaagaatgtaaagtgtatatttactgttaacccagaacaaatgtccactgaatttgttaatttaggtgtggttgaaatataaccactgtcatgtgcctcattctggtcacctgcaaatgccacctgagatgaacatgaacgttgccatatgcacaaaagaaagagagaaaggaaggaagaaaaaaaaaaa

SEQ ID NO: 7900 - DNA, 684 bp, Homo sapiens
acactctgcgtgaactcgtgggatccttatgttagtcagaattcaggtttagtccttacatcacttctagctcacttttaatgctcatgatctaatttttatatttgacatttaccaaatttggatttgttattcacacaagtgtttacttatagaagttcaaccaagatgatactgttcaatcgtctctcataataccacacaagtgactgactcactatggaactagaatattccttagcagatgatcacatgctcgtgaaaaataaatgtccaaaaaccgaatgagccattaaattcatagctttcgcaatatttgttgaacaatttatgtctgctttacaacagcctcagaaaaactgcacggtgacattcacaatgtcttgtttggctggaaggtgtggatttaaggctaaacttcaggggatcagctttcctgggagattggtgttaagcttgggaaatttatttagcaataatccaaggaaggataagccattaaaaaaaatccaggctgtataaactctctggaccaaagggcctatgtaaagaggttttcaaaacggctcacaaaatgaaaacgagtatcaacatgagcatagacaattctattgtgctttatattttttccactgaattgaactcatctaaacacagtcagaatgaaaaaaaaaaaaaaaaaaa

SEQ ID NO: 7901 - DNA, 637 bp, Homo sapiens
aaatcttttaaaacgatcaacaccatggattcacagacattctatttggtcaatgcagagacacagatctttgttctgaagttcaaatttaagtgcaaagcttcagagcctgaaaacatctaaaattatacccatgactgacagctggcctaggctcaatgtctttggaatttgctctactaaatttgctactgtttgaatgtattccctccaaaattcaagtgttgccaatgtgatgatattaagaggtaggacttttaagagatgattaggccaagagggctcctttctccttcatgggattaaggcccttatgaatgaggcttcacacattggactagcttgctctcctgcccttctgcctgctaccatgtgaggatgaaacaagaaggtcctgagacaccaaatgttgatattttcatcttggatttcccagactccagaactgtcagaaaataaatgactgttcttcataaattactcactctctgttattctgttacaatactataaaacagactaagacaaatttctttgaatgatttttcagcaagagacagtttcactacttctggcaagtagtctctaaaatattctgaaattctccttttatgcaaacataaaattttttaaactc

SEQ ID NO: 7902 - DNA, 736 bp, Homo sapiens; identical to SEQ ID NO: 2667

SEQ ID NO: 7903 - DNA, 709 bp, Homo sapiens
gttggaccccatctttacccctcactgtttcgtcacagttgaatttcctgcagatgtccactgtttctctgcatcttcaaattcttctgctccaatgcctattcccctcagcatacaattacgctccactgtcctccattttaaacagataccttcccttggcgacacttccctaccactgttctcccacatacctgctgcctttcacagcaaacttttctggtaagttgtctgaacaggttgtcaccacttcctcatctccacctccgatgtcttgcatggccttctgtcctccgatatgctttttttctttttcatgctctttagtaacttacatgatgtcaaatccaattatcatccctctgacctggcttgccctcttagtagcattgaacgtgctggccgactatcggtctcttgagatcttgtggattccatgaaaccatcttcttctggtgatcttccttccaggatagatcctattctttgagttgtttcctggctcctcttcttgtaaactcctctactttttgatatgctccagattgtggccttgtttcctccttttctacatttttttctcgaagaaatttcctttcactttacagatgtaaataacaccatctgccacctcctgtgtccatcagaatgtttggttagcaacaacagaaaaacactcacgattgctcaaccaaaaaaaaaaaaaaaa

SEQ ID NO: 7904 - DNA, 680 bp, Homo sapiens
ccgatacaccaccacctgtgttccccacccccagttctacgcttttgaacttgcaggctgattaaaagtaagttccatgtgctttacttgctgaagctaagcactgctgcctagtctctgataatttaggtcctatcattcctagtactagtagatagcccagttttataacagtatctccttctattagtcccagcctgcaaaagacaaccactactgagtttccaatgtgttaatacccctcctcactagcacattctttgtcaccttggtaaaattttgtctggcatgaggtaatggttttggtggctgataaatactggttatttgagaaattggattgaatttattcagcatttttacagagaagaagagaaagactccgtacattccaattattagaaatgttctctctataattggacagggataattcatgaggctttttccatgactcaagggaaaaattttataataatatgtaattttattttctattattctaagtttagaagtcatccttctgattatttattcagctttcagaaacctggatatgaaaaaatagtccccataatacaagtatgtggttttcttttttgaagctccctagtgagaggataaattgagatatctagtcctgaaaaacctagggcaacagcaacaaaaaaaaaaaaaaa

SEQ ID NO: 7905 - DNA, 691 bp, Homo sapiens; identical to SEQ ID NO: 2670
  misc_feature (42)..(42): n is a, c, g, or t
  misc_feature (48)..(48): n is a, c, g, or t

SEQ ID NO: 7906 - DNA, 627 bp, Homo sapiens
ggacttaccaggtaggtagtccccgcttttatctgagtcctagaccttctacttcaagcctctcaggtctgctttctctcttcccttgccatctgttactcagctttcctagagcctctactccttgtccttcagttctgttatactccagccatttgctgtctttgtgcctatatttgacaccagctgagcactaccccaaagcctcccatggccatgtgcattggagccattgtaacttcatgtgtctccaacagttccctccatgactagtaatctttctatgtctctaatggcctctgtttcctgctccacacaggccattacaattcttctctcagactccaaccccaccattcccctgcctgctgccctgcagcccctgtcaccatcagcaataaccttgcgaatgccccaacttcctgccatcaaacctaaacctctctgaacttgcacctatattttccttctctctcctgacaccacagataaatctgagcccttctctcatttttcagggaccactcttccctcccttgcttatatctgtaagctttacctctctgctggtctcttcccatcaacatttcaatatgttcaaggctttattatcttaaaaaaaaaaaa

SEQ ID NO: 7907 - DNA, 711 bp, Homo sapiens
agttctctagctgattcctataccactcaaatgtgtgaccacatcgagttacaacaatagaagaaatcccagagaagtagatcatgtttccaagtctattctgctagataatgaagctttcaaagccaggacttctaggaattaaaataaataatccttataataaaccatgagagtagtcattgtcactgccaagcgtacagactgatccaagatgacactgcaggttaagggcagattgagaccaaacagaccctttggcctttaaaaagggagttcacctaaaactcaaaaggcctaaaaaagctggattaagactattcaactttattttctaggtaatttaaagtcattgaaagtttttgaagggagcaagttacaattacagccaggccttgaagaataaaagtgataaataagtagattagatcagatgtataagaattcagagtgactagaagaccagtcctaaattagtataggagtggtataaatgaagataaatgtgcagctataaaagtttagaggtagagggtgggaggaaaggggagggagagcattaagacaaatacctaatgcatgaggggcttaaaacatagatgatgggttgataggtgcagcgaaccaccatggcacatgtatacctatgtaacaaacctgcacattccacacatgtatcccagacttaaagtaaaattaaaaaaaaaaaaa

SEQ ID NO: 7908 - DNA, 675 bp, Homo sapiens
ttgcgactttgataatcatctagaagggatatgcagtgtctttagatatttgagggaaatcgggaaagatgcatgtggattaaatcagaatcatcccatcagataatatctgctatcatttctatagtattgaacattgaaatgtcaggtagtgttctcagtagtctaagtattccacacacattaaatcagttagccccatttattcagtatttccaatctataattatccccattttacagatgaggaaactgaggcacacagaagttaaggtgataacactgtaactagctgagctgggattcaaaagtaggtaatctagttccagagtctgtattaggagaacttcgtcctgaggttactctatatttttagattaaataatttcattcttagaggttgggaaaccgctaatatttgttagatttgtagctgataagagaatgtaaaaagagaagataattcaccaaaatcattatcccttaatattaaaaagactggaagccagacacagctgggacacatgcctatagtcccagcaactcaggaggctaaggcaggaggattgcttgagcccaggagtttgaggccagcctgggcaatatagtgagacccctgtctccttaaaaaaaaaaaaaaaaaaaaaaaaaaaaaaaaaaaaaaaaaaaaaaaaa

SEQ ID NO: 7909 - DNA, 687 bp, Homo sapiens
gacttgagaggatggaaggatcggaagtcatggttaatgaatatagagtttcagttttccatgatgaaaaattgtcctgaagatggattggtgggtgtattttgcacaacagtattaaggtacttaataccagtgaactgtacacttaaaaatggtgaatatggtaattgttatgttatgtgcatcgttgccacaatagaataaatgaatataatagaaagtttaaaagcatagttacagtagaagttgttacacctctaaaatggtagttttgttatacaggtattacaataaataggctatagcgtacatgaatcagtatagacatcaataacatgaatgttgaagatgaaaagcaagctgaaaattgatatatttatatctatttatacatcttttaacactgtgaatgaagctatatatttttcagatacaccacatacatattgtgtgacaatataaaaatatcccttggaaatcctgggcattctgaagtaaattcagattgtgttttcttcttggatagaacataaggaactgaaattagagagaaacacatcaacagatgaatggataaagaaaatgtgacagtccacggaatgtgataaaaatatttgcaaactattcttacgacaaagattaataaccagaatatatatacaagtaactcataggaaaaaaaaaaaa

SEQ ID NO: 7910 - DNA, 661 bp, Homo sapiens
atctatgataaagagcaataataaggagagaagtgactgttttttatgataaggtcaagattttcagaaaaatgagtaaaataattaatggaacatatgtagagcacttaatggtctctgttttcaatatgaattcttgatttcagttttctctggaatatatgtggccttctacagctattactgaattatagaaactggtttatttctggcagaaagctgcagtgccacctgagttccaaattttaccattctttgtaaacagttggatggattatgataaagaagatgctaccaatgaaatagataaaccaacgagatgagaagactgtgatcctcatgtactcagaggcacttccctcctaagtcaaagaccatcctcacgagctatagtggcgcacaagcgctctgcgtttacaggcttgtgactcaaccaaagggcttttcccattgaatagaagccagtttgggatttgtagttgcgacttcttcgatagtacctgcacgtccattgctggcaactgacttgtcattaaaacctggctctttggttaagggagctacgctgtggtttattcttaagttacgtggataaactaacctctaacagaaatatactttggttaattttgaaaaaaaaaaaaaaaaaaaaaaaaaaaaa

SEQ ID NO: 7911 - DNA, 642 bp, Homo sapiens
tgccacaccctttggctcttggacttctgtccctgcaggacttagcacgagattcacttgggggttttttttaagcccactctagtttttgtgtgtaacctctttacacgcagcgcccacggaaacacttcacgaccttcacacgttctttgtttgtgcttctgttccccggagacctgtcctgtgcccttgaattgggaaggctgtgttaattgtggaagcctccaagctttttggcttcccaggacccaaaaccccaggcccctgatcccggcccccctggcccagccctgagaccttctgaaccgtgtcctgtctgtttccagtttagtaacacctgcctcacaggttgctatgaggcctggatggcatgtggtaggtactaaatagacagcagttagtattattggcttattaccatgagactgccagctccaagctatttctacactatctgtggcaacaggaagaggaaactctgtttcattttgttgccctggatctttataaatgacaggtaggcatcttagtggacgattgttctccataaggcattttatttttcactttgctacaccattaagaatatgtccttaaaattgtttttacatgcatttgaattttaaaaattgcttcttggct

SEQ ID NO: 7912 - DNA, 700 bp, Homo sapiens
aagcgaaagtggcattataggtgtttccacatgaattaatgccgccttcagagcaatattgtgcaggtaaaacgctgtttgtggctttctgttgcacagttaaagctgacccaccctatgcacaagacaatcaaatataaatctgtcctcctcaggatgcagataatactcatgtaaattatggagcacaatgtaagacaaaaggagacactttacatatgtattgttgatacagaaattatcagggcatgaatgagctgatgtgacattatgccacttctttcttttggttctcccttattaacttggcatttttaatttgaccatagagccaaattagttctccatgctttcttcgtagaaaatccttttttttcccataatgttttcatgccctgagaatcagaaaaatactacagaatagaaaaagatttacagtcattggaagatttgtgttttgcaaacagtgttaagtgatattgctagatggtgatatttttttcagcctaaaactctgttgaaatctgtgatcaaaatgttttaaactatccaaaaaaaatttgtatatttgggaaaaatggatttttacatagcttttgtatgcagatataaaactgtaattatgaatatagtgggcgtagataaactcataagcttaaattctaaaaaagaaaaagcttataacaaaaaaaaaaaaaaa

SEQ ID NO: 7913 - DNA, 172 bp, Homo sapiens
tggaagattagcccagtgcggtggcactcacctgcagtcccagctactcaggagactgaggcaggaggatcacttgagcccaggagttggaggctgcattgagctatggtcgtgccactacactccagcctgggtgatagagcaagaacctgtctcaaaaaaaaaaaaaaaa

SEQ ID NO: 7914 - DNA, 682 bp, Homo sapiens
ctgaaaaaaggcataaagatactgcatgggtcatttcccagcatgaacagctgacattgagaaatggttgtcaaatgttaagtcctctatttgtctgaggaaagaaaggtatcttatttttcattttatcttatccttttaccaaatcaatattatggatgatggtgtaatattttcatcttaatctgatattcccccaagcctatagaaaaaaaaagctgaaatattaagaacacttctacatttttaataaactatgtttcatagtttacaataagttattatgccattttataattttaaatttgacagtaatgtcacttacacaaactgcaaatatttctaattagataagaaataatataataaaaatatagtcagcccagcatggtggctcatgcctgtaatcccagcactttgggaggctgaggtgggtggatcacttgaggccaggagttcgaaaccagcctagccaacatggtgaaaccctgtctctactaaaaacacaaaaataaattagccgggtgtggtggcatacacctataatcccagctactcaggaggctgaggcatgagaattgcttgaacccaggaagtggaggttgcagtgagctaagaccacgccactgtactccaggctgggcaacaagtaagactctgtccccccaccaaaaaaaaaaaa

SEQ ID NO: 7915 - DNA, 630 bp, Homo sapiens
atggtggctatgtgcctggtcatgagattcaggccaggggttattataagggagggagataacaggttttcccaagtggagatttaagtaatactttacagtgtgggccatctggtgaatgccatggagaacgaattgcctttcataagcatttttactatctctacgccttgctaatttcggtggaccaactattccttaatggggttttgcacagaccaagtatagagggcagcttctcggtcctttcctttgcttctctaggctccagaaatgtctttattttccagcttgtcagagccaaccgtggtcaggatcatttgctctctttaagagtccaggtgacatccactatagtcttaaaagtattgattgaacacctactatgtgatcctataatgttggatgctatgagaaggcatagaattataagaaatagtcttgtggactgtgtcagtgagtataaatttacacctttgaatgttctatatcttcatagggacttggcatatacacagatgtatgcatttttcaaaatccaaatacaaatacaccgttaggattgtacctttcattgtatttaaattttacttcaaaggaaaaaaaaaaaaaaaaaaaaaaaaaaaaaaa

SEQ ID NO: 7916 - DNA, 127 bp, Homo sapiens
ggacatatggccagaggaaagaagagtgacgttgtctaagatgtaatgagtgctctctgagagaatcactcaattcctattggagtgcaatccttacttgagaactttattactcttgttctgtgta

SEQ ID NO: 7917 - DNA, 699 bp, Homo sapiens
cccatgacacacaccgcactgacacacattcagagtttctaccaatttcccatcttactttctcattgcccctatttccatgcctgttttcatagacattcccaggaacccacgtgtcaaaattcagacccaagattctgtcctccttcgattcttctaaggaatctcatcactttgagcacacacgagcttagtaactttactgaagatcatcaaacatagtgtcttgttatggtgcccccatcttctattccgtgctataccccactgctgtcagcgttccgaaagcttgtcccgccatatgctgcccaccttgtcacacagggctggctggacgaggtagttctaatgcttctactgcagctgcttttggaatgacactccccacttcccattccaaatgtcttcctttgtcaactaaaaagcatgcactctaaagtatcagatatgtaaattataagaaggctgaaattttaatttcaagtcattcaggatatatctattgatgctcttccttagtcataaattgtgctagtttctccaaatgcaataatagctacaccatatttccttctccaaaaagctggcagccacgttcaaaaagagcatggatggcaaatggctacaggacagcatcatcagtgaagaggggacaggcgtgcatctcccacttctggagaaggtaaaaaaaaaaaaaaa

SEQ ID NO: 7918 - DNA, 684 bp, Homo sapiens
  misc_feature (189)..(189): n is a, c, g, or t
gctagatcctctccagtggtgaaacgaagcaatgtgagagagctggaagcagcctcttaataaaagtactttttggatgtagagaccgcttcattactccttctgcagccttgtcagtgtgtggaccatggtcaggtagcatcagtatcacctaggaacttgttagaaatgcagattcccaggccccanccctgggtcaacagaatcaaaacctgcattttaaacaagatccctagatgatacacactcatatttacatttgagaagcccttgcctggctcaatgtctcatacctgtaatcccagcactgtgggaggcccaggcaagtagatgcaaggagttcaagaccagcctggccaacatcgtcaaaccccgactctactaaaaatacaaaaattagccgggcatgatggcaggcgcctgtaatcccagctgctcaggaggctgaggcaggagaattgcttgaactcgggaagcagaggttgcagtgagccaagatggtgccgctgcactccaacatgggcaacagagcaagactcagtcttgaaaaataaaaaaaataaattaaaaaaattaaaaagtagccctggccaggaacggtggctcatgcctataatcccaatgctttgggaggcagcctgagcaacatggtgaaacttcatctctactaaaaaaaaaaaaaaa

SEQ ID NO: 7919 - DNA, 665 bp, Homo sapiens; identical to SEQ ID NO: 2684

SEQ ID NO: 7920 - DNA, 720 bp, Homo sapiens
cactcttccctttccccggggtcgatgtcctccactgcagatcattcctttaggtttagagctggtcagtgaagtggatatcactgaaggagataggaagccagactacactgcttacgttgccatgatccctcagtgcataaaggaggaagacaccccttcagataatgatagtggcatctgtatgagcccagagtcctatctggggtctcctcagcacagcccctctatccaaggggctctccaaataggagcctcccatcttcaggctgttctctgttgggtctgcccgtccccaaccctctacgatcctcctggagagaagaatggtagcagccacaagtaaaggagtgatgaaactggagtaatgaagctgctgaaaaaatggagcgcaacaacgacacgcaccgccacatattgatgtccgccccacgagagagagagaggcgcgagacacagagagcttcttatgtgttgagtccaaagagctggaaaagaagaaccgaggcttctaaaagagaggccggattccctggccaaggagatccagtacctgaaagatttgatagaagaggtccgcaaggcaagggggaagaaaagggtcccctagttgaggatagtcaggagcgtcatgtgcttgtacatagagtgctgtagctgtgtgttcccaataaattattttgtagggaaaaaaaaaaaaaaaaaaaaaaaaaaaaaaaa

SEQ ID NO: 7921 - DNA, 720 bp, Homo sapiens; identical to SEQ ID NO: 7920

SEQ ID NO: 7922 - DNA, 166 bp, Homo sapiens
ctctccttctacaatggccccatcagcctccatggagtacttcaaatctgcccactgcatcctaccccagggcctttgcacctgccaatccttcttgctggaccacttcttccctctcttaccgtcctctaggtaactcaagtgtcacctccttggagaagccttc

SEQ ID NO: 7923 - DNA, 759 bp, Homo sapiens
tacgaaaagctttttttttttcaaagagttccatattcagatcactggagagaagtacagcctgaaatggtgtttacccatctggaaagaggggataaagcatccctaatttctcttttccagcaagtacccagggtacatgtgggagatgataaaagtgcatccccgttgttcttccatcgttgtagccccacgtttcgccaacttgacaggtgctgcccatgggtcccaatatggccttcacccatgtagcagggaagcctagagggtaggaatatctgcactggcctgtcctcttgctgttggtaaccttcgagtcccctagacctcatttatgccttggatacacacataacctccttccatgaagctggggggaggtgcctaattggcaggaattagtcgtacttgcctgtgctgtgcccctagacttctgctgttgtctgatctaagacctagttttcttttctggggcttcaacctgaaggttggaattgagtttgggacaacaaagtgccccgggagggtgcatggactcattaaattgactcccatgtgggccttgcaaactgcagtcagtgactggcagtggcagcctgggccattcctccattgtttctctgccattgtttctctgcagactgctaaggtgaagctgtggaaccacatcctcctctaacagggagagaaagggagtcccaagatttggggatgtggcccagtaaggtgcctcccataaggaagaaaaaaaaaaaaaaa

SEQ ID NO: 7924 - DNA, 645 bp, Homo sapiens
acccgacacggccgggcaccgtggctcacgccctgtgatccccgcactttgggaggccacaggtgggcgatcacccgaagtcaggagttcgagacccgcctggtcaacatggcgaaacccccatctctacttagattaccaaattagcccaggcgtggtggccaggcaacccgtagtccccagctaactagggaaggcttgaaggccaagaaggattcccctggaaccccagaaggccgaaggtttccattggacctgccaatcacacccactgcacacctctagtctgggcaacagatccagactccatctccaaaaaatttaaaaaaaaaaaatgaaagaaagaagccagacagaaattttaaataaactaaatagagagcagagattttataaatatttaacacaaaaatatattaggctgacttaacaaaagaataacattgttaaagaacagaacaggaactggaagataaatatatagaaattatccaaaataaaatttggagagaaaaaagtatttaaaaagattgaacagtgaattatcagtgacatgtgaggcagtattaaatggtattacttccattttactggactttcataaaaagaagcaagagagaatgaaaaggaacaaaaaaaaaaaaa

SEQ ID NO: 7925 - DNA, 330 bp, Homo sapiens
tttttgagtcggagtctcgctctgttgcccaggttggagtgcaccgggcagcctcctttctcggcgcccccaatcccatcccggcctggatcacctgaggtcaggagttcaagaccagcctggctaatgtggcataaaccctgtctctactgaaaataaaaaaattggccaggcgcagtggcacatgcctgtaatcccagttatctcaggagactgaggcaggagaattgcttgaactcaggaggcagatgttgcagtgagcggagatcacaccattgcactccagcctgggcgacaagagcgagactctgtctgaaaaaaaaaaaaaaa

SEQ ID NO: 7926 - DNA, 501 bp, Homo sapiens
ctcttacaccttgggcccgttaaggaaaccaagtttggtttaagacctgactcccttccctgagtaatctcccctttatttttgaccagcttcatttgtcagctttgctccagatcagatcgatgggattggaatacattgtaactaaaatcttcctcaggactattaacccctgcaaagtttctacagggaactgcctagtgtaacaatgaaaccagatttctcacttgctcttcatacttctattttgaggtaactgttgtaactatgaaatgcttatctgaaagtagtgcttaaacctgatttctaaaaattatcccattttctgatgatttgaaggggagaaaagccagtgtatgtaaagaaaatgttccagccaggcgcggtggctcacgcctgtaattccatcattttgggaggccacagtgggcggactgcttgagcccaggagttgaagaacgtggcgaaaccccgtatctattatttaaaaaaaaaaaaaaa

SEQ ID NO: 7927 - DNA, 619 bp, Homo sapiens
gttggtaccggtagccggctggtaccggtccggaattcccgggatcgcgagcgccgccctttttttttgttttgtttctttttttttttttttttttttgtttgttccagggtaagcatctgttttattcagatctgggtggctcagggcctccaggcagccagttttgcaggagattcagcacctagtgtcttcctgcctcacgctcccaagaacctgctcctgcagggggaacatcagaactcatccttgatgtcaaaatggggctggtcttcaggcttgaagtccaggttagggctgccatcctcattgagaattctccgggcagtgtagccgacgatggggtatttggctttgtacactttggtgaagacctcatccagggcctccagttccttggccgtgagacccgtagtgtcatgggtgaggtctgcaggatccaaggacatcttggctacccctctagtggagtccttccccgtcaaggcattgtagggggctcctcgtccataaaactctcctccccgccatagcgggccagctcctcctcggtgaaaagccgcactgggggcccccgctcggcagggcgcggtgtctgcccggcccgggctgtgggcag

SEQ ID NO: 7928 - DNA, 669 bp, Homo sapiens
cactactcaggaggctgaggaaggagaattgcttgagtccaggaggcaaagttcagtgagccgagatcacaccttgcactccagcccaggcagtagagcgagtctctgcctcaaaaataaataaataaatgaataaaatataaaataataagataagtaggtagaagtagaaagcaatccaatgtttgttgcatagctggtacatgctaacgcatggcatgtattatttagttgttaaaaacattggattagagaggtgctgccatccctgtgtgtgtcccacagtctcacagctaataacacaaatttcaaccccatctacagaaattcaaagctcgtctgcgctttctaatccaccaacaactgtacatgctcaaggatcaaccaaccaaaccacctactggcattccttgaaatgcatattgccagctccgtggggcatcatgaggagatgaatcgagggaatcagttcttacacaatatcccgcggaaccccagtaaaccaaactggaagatgggatttccctgattctaattgcatttcaagcttttaagggcaggggcgtctaatatcctggcttccctgggccacactggaagaagaagaattcactgggccacacataaactacactaacactaatgatagctgatgaggaaaaaaaaaaa

SEQ ID NO: 7929 - DNA, 175 bp, Homo sapiens
ttcttgttctcaaaaataaataaataagaggccgggcgtggtagctgacgcctgtaatcccagcactttgggaggctgaggcaggtggatcacttgaggtcaggagttcaagaccagcctggccaatatggtaaaactccgtctctaccaaaaatattttaaaaaaaaaaaaaaa

SEQ ID NO: 7930 - DNA, 631 bp, Homo sapiens
cagtgtttacttgtagatgtaacatgtaggataatcttggaagagtcactgatttgaagaactgtctatgaatttattctggttttgttactgttgtcattatcacataatctcaagttatgttgttttagagttcttccctggaatccagcacagactgattttgaaacttcctagtcaagtcagttggcccctctttgtaaggccttgtatgtgtgccaatgccaggttccatactacttaaattaataaaattgcaaataggccatgcacagtggctcacacctataatataggcactttgagaggccaaggtgggaggatcacttgagctcaggaattcaagaccaacctgggcaacgtagtgagaattcatctctactaaacatcaaaactgttagccaggtatggtgatacatgcctgtactttcagctactcaagaggctgaagtgggagtatcgcttgagcctaggacgtagaggctgcagtgagctaagattgtgccaccacactccagcgtgggccacagagtgaaagactgtctcaaaagcaaattttctaatttaactctatgtgtactccaaagttgtgatgtaaaaaaaaaaaaaaaaaaaaaaaaaaaaaaaaaaa

SEQ ID NO: 7931 - DNA, 121 bp, Homo sapiens
aacataacttcaggtacagcagagataaaactctgagagactacttatgaataagttaatgactaatatgtttacaagttagataaaatagacaatttcctaaaaaaaaaaaaaaaaaaaa

SEQ ID NO: 7932 - DNA, 693 bp, Homo sapiens
tattccgtattgttgtcttccattcgtcttgtgcctttgatggtgttcatttgcattttattattctctcttctagcgtggttttcttgtggttgcccttgtgtttgccgtatagatttacaataatgcacccctctttcaaatgataatatactgcttctttggcagtgtaccttatagtaacaaataatcctatttctctttcctatcccatgtatcattgctgtcattccacttatatataagcacccctaagtatgacgactatacacacacacacacacacacacacaaatatatgtgtaccaaatcaaatacattgttgccattattttgaatgaactgttaactgttagattaagaattggtaccatatggaacaggttagtggaacttactataaaaggcttttctttgggggaaatttttaattactgaaactatttaggagctgtgggattacatgtctatcttcaattagtttgagtaaaatactcgtagtaatttgtgtattttgtcagttttcaaatgaattgttcataatatcctcacattttcaaatttcaactgcgtttataaaattttcatttttccattctctatttgtgtcttcttgctcgatcttaccaaaatattttgttttagtgctttttcaataaacagttctggcttattttaaaaaaaaaaaaaaaa

SEQ ID NO: 7933 - DNA, 582 bp, Homo sapiens
cggcagtgtaagctgcatagttgtactgtgcctgtctgtctccctcgttgtactcttccctccttgtcttatgttttggctttttgtgtattcagagcatctgtctttgcagcattcctagtcgttgcttcagtgttctgtggtctcttgttcatcctgcttgaagattcggatgtgtggaaggaggctaggaagtctggtgcgctaggtgagcagacctctttgctgcccagcccagggtgggtggtggcgcacacctgtctttgtgcatgccaatctgatacacctggcgcatcctctggagagcacaacgcatggaaaggtctggaagctctgtgtagccattccttctgcagtcatcctacccaagtaaaagtaacccttggctatgttaccaccgttttggtcacccatggaggacatcttagcaagggtgcctgcgagggagtgtgggactgggcctcatcctcgccggcgttggaaaccaaggccttgtatgccacgccttatgaagcctgtttcacagttactttcacttcccgaataaaggttaccaggtaattaataaaaaaaaaaaaaaaa

SEQ ID NO: 7934 - DNA, 410 bp, Homo sapiens; identical to SEQ ID NO: 2699

SEQ ID NO: 7935 - DNA, 391 bp, Homo sapiens
  misc_feature (69)..(69): n is a, c, g, or t
  misc_feature (145)..(145): n is a, c, g, or t
tgttttctcacgggcccccgggcccccaggcacacgagacacttggtttcacaaaaagtggtttgtggnatggtcgaaggggaaaataggagcacagggaaataaagaatttaaagaaatgaaaggattgcccgattttatcacnatcaaagttaggaaaatatattttatttcttgattttactaaatgaaatgcttccacagctaacgttgttaattgcttttttctattgatatttccattctgtggattagtgctagaatagagctatgaaagcaataagcatgtgtgttgaatgtcacaaatgttaaatattccttcacatatctttataaatatctatgataatttataaatataattaaatacataactaaaaaaaaaaaaaaa

SEQ ID NO: 7936 - DNA, 655 bp, Homo sapiens
agagcgaccttggcatggacaccatctggcgaggtcatttactgagtgcccctcacctctaatctaccttctgtactcttcttccccgtgattatggggctagttgtcctccaactgtttctcagacttctttttaagcttgcttcctgttcagttctgcccataggggtcactagagagagactgggaggccgaaggagagatatgcttcctgttttttctgttcttgttcatgttgcttacaggacccgccatgcttcttcacctagagacccttctcccaagcagtggcagtgccacttcagcttctttcagccctactggaatcagcctccgtgattccccctgtacccgctccgagattatcccccgcagcccgatggttctaccttcccccaagattgtggttgccattctgggcttctaagttctggttacttcatatttttccttttgttcctcccgccctagaggtggtagctgctttctgaagttattatttctagatgacttttggtttttcagcctttgtattttgcttttcagccctcttaatgcctgtataacccattttccctgtaataaataaatttcctcccattgaaaaaaaaaaaaaaaaaaaaaaaaaaaaaaaaaaaaaaaaaaaaaaaaaaaa

SEQ ID NO: 7937 - DNA, 97 bp, Homo sapiens
gtgctttccaaacaatacctatcataactacgtattcattgtctacctgctaagtcaagggttcactgcatttctccttcctcagaatacactctgg

SEQ ID NO: 7938 - DNA, 637 bp, Homo sapiens
  misc_feature (332)..(332): n is a, c, g, or t
tgtaaaatgagataatgaccgtacatagaaggtcatgcagatgatctgagcgagattaccaagtataagatatttgttataatgccttgtaaatgctttataagtagctgctgttataatcattatgattattttctttttgaagaaaaaaagataatgtttgtaaaactgaattcaaatcataggaaaggatttggccaggcgctgcagctcatgcttgtaatcccaacactttgggaggccaaggtgggaggatcacttgagcccaggagttcaagaccagcctgggtaacaaagtgaggccccacctctacaaaaaaatttttaaatantccagccacaggctgggcacagtggcttacacctgtaattccaccactttgggatgaggcaggtatcactagaggtcaagagttcaagaccagcctggccgccatgttggtgaaactccatctctattaaaaatacaaaaattagccaggcatggtggtggatacctgtaattccagctacttgggaggctgacacaggagaattgcttgaacccaggaggcggaggttgcagtgaggcaagatcacaccactgcactccaacctgagcaatagagtgagactccatctcaaaaaaaaaaaaaaa

SEQ ID NO: 7939 - DNA, 670 bp, Homo sapiens
tgtcattaatttgctactgaacttaataaaataactaaagagttagtaatttataacacctaatttgtcattttaaaattagaggagtattactcataatgtcatatttactaactgttctaaaaagctgaaaaaattgaactaccttgaaaaggagctgttgctttgtgagtgtaattgagtaatattctatattgggaagcaggagtagtattgatgtaaggaagtatttttctaataaatttattttaggaaaaatatagttatgatgtgaatagtaaaaaatagaaaaatatataaaaaatattttttattttgataaatattaacaatgaaaactgtcactaaggaaaatatcaacttgaaaataaataattaaatgcactcggtactttagataaaggaagaaaaatatactttgctataaatatgataatgctaatggataatattctaggacttagaaatacatatattaagtcacatgataaatcacatttctttcctctgttatagcattcaatgacattataaatctctcctcttcaaaatatgctatatttttcaagtaaatctgagtgttgtccatcagtctgatttaggcacaagcaaagaggcttcttcctttgtcttaatactttagaggacccacatatcattaaaaaaaaaa

SEQ ID NO: 7940 - DNA, 739 bp, Homo sapiens
  misc_feature (215)..(215): n is a, c, g, or t
caatcagagcatgtggatttgcaagtgagaagacatcagatctaggatgtgctagggcaaaatgatatggtttggctctgtgtcccccatccaaattctcatgcttcaatgtataatgcctcaagtgtgtgggaagctggtggtccttgattgtggaagaatggacttggggattccactggtgtgtttgtgatcctttccatgaatgggtttangccccttccactcgttgctgttctcacgatggtgagtgagttctcatgagatctggtggtttaaaagtgtgtggcacctccccctacccctctcagtcctgcttctgccatgtaagatgcctgctcccactttgtcttccacaatgagtaaaagctccatgaggccttcccagaagagatgctgcccgtacagcctgcaaaaccatgagcctattaaacctcttttctttataaattacccagtctcaggcatttctttacagcagtgtgagaattgactaatacaatcatgctgtgcttgcaggtttgtagtctaggatcaataggctgtaccatatagctgtcaacttaaatgtcagagagaggctctctaaaagaaaatgatgtttatggccaggcacggtggctcatgcctgcaatgctagtgctttgggaggccaacgtgggtggatcatttgagcccaggagttgacgaccagcctgggcagcatggcaagccctgtctctacaaaaaaaaaaaaaaa

SEQ ID NO: 7941 - DNA, 722 bp, Homo sapiens
tctcatacagtgagaagcatgcaccagtcatgtgaaggtatttctcccaaaatatatgacatgaatctgaacattaaggtaaacacaagacagaccccaggttaatgagacatcttacagaataaaggtgtgtactctctaaattggtaaggtcatgaaagatagagaaaggtgcaggaactcttccagatagattaagactaaaaagacatgacaattagaagcatcaatgatcttggatgggctgatgaccataaaggaaaaaataaacattgcaggataggtagtaaagtttggatggggttgtataaataattttaaaaggtgaatttttttaaagtatctatttactcccacaaagaaaacccaggaccagatggctttactgataaattctaccaacatttaaagaagaatctacaccatattccctcaactcttcccaaaacctgaagaggaagtataacacttcccaactcactctgaggccagcattatcctgatatctaaagcttgacaaagacactataaaaaaactacaaccattatctttgattaatactgatgtgaaaatcctcaacaaaataataacaaacagaattcaacagcacatgaaaaggattatatgccatgaccaagggagacattcttggaatccaatgatggttctatataatgaaaatcatcaacataatgtatcacattaacaaaaaaaaaaaaaa

SEQ ID NO: 7942 - DNA, 597 bp, Homo sapiens
tcgtcaggggagctggagcacgtgacccgccgcaccctgagcatggacaagggcttctgaggccagccatgcccacgcccctccccagcccccacccatgccagcgcagcgccagggctcagatggggcctgggctgttgtgtctggagcctgcaggcaggtgggggctgcgtccctgctcagcccatcccctgcctctatccctggccacctgccaggcctccctccggctggtgtcttgagaccagcctgccaggccctccagcaggaggacagagtgccctggggcatccaccttcctgcccaggggacgtggcgctgtcggtgtttggaggctgctgccccctggctttggcgccccatgggccctcagcgtctccccatgctgggctcactacatgggccagcccttgctctacctggccggtaggctgctggcgcctaggttgtgttgagagggggatgcccctggccctgcctcactgtgacctgctcctgcccacgtgcagcacctgtcaccttttctagaaataaaatcaccctgactgtggggtgcatcggtctccggaaaaaaaaaaaaaaaaaaaaaaaaaaaaa

SEQ ID NO: 7943 - DNA, 686 bp, Homo sapiens
  misc_feature (669)..(669): n is a, c, g, or t
tagactccagtcttgcacagcatagaaggtatttcagcctgctgaactgccagaatccatgctcagcctagaaactaccagtaaatctacctctggtgatttagccaggtgtccccagtcatagaaacaacctggatgcttgcccctagttaagtcaatccccagtctactcactcaccatgcacccatacccttggcctgagagacagtctggaggccctgcccttggtggaccaatttccaagctggctgaccccttacttgcatgctgtgagaaccagcctggtgagcccacccctggcaaggctgcactgccaccactgaaaactcctgtagcctaggctacttaggaatttgcagacagagttaaagtagattatagctgaataaacggcaaagaggctatactaatgaatccactcagctacccaactgacaccctaggactcatctacatttcccacaaagtcacttcctacaaaactattgcataaaattggaagaggcaaacatttcaccagatgtgcaggtatcaatgtaggaacacaagaaacattaaaaagcaaggaaatatgatgccttaaaaaaaaacacaataattctccagtaacagaccccaagtaaaggaatttattaaatgccgggagagtaattcaaaataatgatttncaggaaactcagtgaga

SEQ ID NO: 7944 - DNA, 701 bp, Homo sapiens
gatgttacccagtctcgagacatattgtgttagtgtaagtgttcagggtccatgtatacgttggaggagttcgggagagaatactaggaagaggaagagatgtctgagagtgatggcatacagatagtagaccgttggaataatgttgcagtgttcatagtcaggcgttagtaatgtccttattttccctctccctctgaacctttgcgctggataagggggagttgaatttagctttaagaagggattagtaagaagagaatgtgaatgttggtttgacaggtgaaacgggggaggtccatgaaaatccaggggccagcactaccctatagtttgttttcctccatgttataaaacctagttattatatatttccattctaaaaaattttataacatattgtaagctattttgagtgtgactatgaccagttaacaacatattagtaaggatgttttgctggaatttaatgatgtctttccaaaaatgaaggtgtatttaaaaatttattggtgacttcattttatttacatagtagattaattattggctggacgaggtggctcatgcctgtaatcccagcactttgggaggctgaggcgggaggatcatttaagccccagagtttgagactagcctgggccaaataggaagaccccatctctaaaagaaaaaaaaaaaaaaaaaaaaaaaaaaaaaaa

SEQ ID NO: 7945 - DNA, 639 bp, Homo sapiens
gtagtgatgcacgctgacctctggttttctctccactcaccagttctaaaagggtatcagattctattgtgacttcatagaatttatgatagattattttttagctattttttccatgtgtgaaccttgagtgatactaatcatgtaaagtaagagttctcttatgtattattttcggaagaggggtgtggtgactcctttatattcgtactgcactttgtttttccaaggaaatcagtgtcttgtacgttgttatgatgaatcccacatggggccggtgatggtatgctgcagttcagccgttgaacacataggaatgtctgtggggtgactctactgtgctttatcttttaacattaagtgcctttggttcagaggggccgtcataagctctgtttccccctctcccccaagccttcagcgaacgtgaaatgtgcgctaaacggggaaacctgtttaattctagatatagggaaaaaggaacgaggacccttgaatgagctatattcagggtatccggtattttgtaatagggaataggaaaccttgttggctgtggaatatccgatgctttgaatcatgcactgtgttgaataaacgtatctgctaaaaaaaaaaaaaaaaaaaaaaaaaaaaaaa

SEQ ID NO: 7946 - DNA, 689 bp, Homo sapiens; identical to SEQ ID NO: 2711

SEQ ID NO: 7947 - DNA, 110 bp, Homo sapiens
ccctttcccttcttgctccctctcgccttctctttgcccttcggtctgtggcatgacagcaagaagggcctcatcaaatgcagccccttgatcctggacttcccagactc

SEQ ID NO: 7948 - DNA, 619 bp, Homo sapiens
atgaccactcatgggtatatgctaggattgtacaccacagcccttgtggatgtgtcccctagcgtattctgtcgagcagtctttcctcatccgtttttgaaattctcatgatcgatatcccatttctgatgtgtatcaagtttaatttgtgtattagctacatcatcttatttattgcattgggtataatctgtgatttattaattttgaatctacctcaatatgggtatcacagtgtcttaagcacagaagtcactgaatatacactttgatggtgtatgtacgatgaatgaatatttagtctgagataaagatatagagatgaaattactatggtttatgagatagtgggtagtaccagaaaataaaattgagaacctgtagatttcttaccctacagatcttttaaatagaatgtccatgaatatttaatatcttcattaaaactgcattaatggaagacatcagcatggatagcagagtaggccctctgaaaacctctccttcataaaatgcatgagaactctgaccaaattgtcaaattcaatttttcagaagtctggaaatcacccaaggcttgcaacaatatgggctacatttagtcagaaaaaaaaaaaaa

SEQ ID NO: 7949 - DNA, 615 bp, Homo sapiens
ttcacatgagttagctctctagctctgcactctgaacattcttgctttggttctgacttctgggaactgctttgcatttctcctatagatctgtagttaagggaaccaaggggtcattggggcaaaagcattgtttctcaaagctccttgattaagagaaagaacagaaatttgcacagaagatagtgtcaaggagtgagaaagtttgtttgagggcagtagctcagtgtggaagaaaatcctgaagtttctgttgaagccatacaatgttctatggggttactctctaagacattctctgaggtgtgtgaggaagtcactactcctagcctttgttaagatgtaattttaaatattcagttatggtactatgtttgcaactctcgtcttatcacaatgcctcagtagtttgttcccttagaaacatttagatgtgcacaaattaatcttttatatatctcaaagctttttctatcatgccattggattgctcagaataaagtgtctgttagacttcgttttggtaaataaattctccataatgtagattcataatataaaagtctttaatgacacaatatatctatatagcctcactgtataattcagaaataa

SEQ ID NO: 7950 - DNA, 762 bp, Homo sapiens
  misc_feature (152)..(152): n is a, c, g, or t
agtgcataataaagtcaatgaatagattaaagtttaaagctatggcatcatataatttgctagtcatcccctatgccattgcatatcaatcagtaaatacacttaaatgttgcatgagtgatattttggtctgggttttcctcttaagattntagtttgtctgaataaggaaaaatgtttttaatatacattcttattttgtcccacccctccagaaataagctggaaatcttaactttttggggggtcttttttggtgttttaatgggcccagaactgtggtttaaatttttatgtatgtattttcttttttgtggagtataaatttaaaaactggatttgggacctaaaatactcctcaggttgatgtattcatgaagttttaaaacatctttagttttccaagtaaactggatatgtggacccttaaagttattgagtttaagctaccaaattgtaacgtcattactggacatgtcagcatcaaccctctcaaaatagcttggtcactttatgaaggggcgttttaaagttgttgtttagcagtgacatttaatatggtcccattgcttttctttttaacgtgacaaaaagagaataaggaacaaacactattgctgccgaatgccataacactgagttgtacaaattgtgattgaggaaatgaaaaggtttatactttttaaaaaaaaaaaaaacaaaaacaaaaaacaaacttcaaatggaataaattattcatgaagccttcaaaaaaaaaaaaaa

SEQ ID NO: 7951 - DNA, 75 bp, Homo sapiens
ctctggccactccagaaatgtcttgtaacctttcagagcttgtgcctttgttcacaccaatccttgctacttaga

SEQ ID NO: 7952 - DNA, 707 bp, Homo sapiens
gactgtttctcagctcagccttatctggctcccctcagtgtcaactaaggatcgcttgaagcctgggcctggaaatgtctaaatcttatccacatgtctgtgcctgggctgggaagactcatgcagctggggttggagcaggtgggcctcctgggtatccctctctctacgtgaaacactgtacacagcctctccagtatggtggcttcagggtagccaattaagatatggttttacaatctattaaactggtaaatgtgatgcccaaggctggcaaggatagatctattgttggcaagggtaagctgactaaaccacttgggagggcaatttggcaatacacaccaaaatgttaaattccgtttgctctaataattctactgctaggaatttacctttcagatataaacaaaagtgtaccgaaatattttgtatgaaaatgtccactgcagcactgaatataccagcaaaaaatctgaacactcaagtgtccatcagcagggactatgcagtgaaacagtggttcaaacctcaccatcaccctgctgatgtaggacaccttcagctatggcctgcactactgaagcacctcccagctcacggctcacacctgctggggtcctcttctgatcacttctcctgtgcaaccagtgcaacctggactgcctttcacacccaccccatcacgtgggaaaaaaaaaaaaaaa

SEQ ID NO: 7953 - DNA, 639 bp, Homo sapiens
cggcccctgccaggcagtctcagtgatgtcacgtgttcccatggcacctgtgattgtactcttatcatgtcatttatatggactgttaactgtccccagatactatttgggctctctcccataagactgtgagcatctgaccacttggaagttgttgctttcccagtaatatccccaatgctcccctataatctgctgagtaatcttccgtttccaacaacctcaggcataatctcatcttctgtttctattacaatttcaaattctgggaaaaaggaagttgtggtctggaattatatggtccagatgatctggttgtgcacaagcctgcttatgtcccgaatctccagtctagggtctgatgctccttgctgcagtaatatgctttgtggcatctggagcacgttttggggcctaaacagccacaaaccctgtcagagatgagcaccagacttaagctggagacacactgattctcctgtttctgggggaggattctcagaaggtggctcatatgagtaaaaatcgtttttcctgggtagttgattcctaaaaactcgcaggccggcacagcacggctgctcgcggcagcagaagaggaagatgcagcggtggaaggcgtccgggcggccaggcagc

SEQ ID NO: 7954 - DNA, 731 bp, Homo sapiens
tacgtttctactagtgcaactgtgaaggaaaactttcttcttaaggattctcagtactggcgttttaccatgatataaaagatgcagggtaccccaaccaattttcaaaggatttggaggactaactggacaaatagtggcagcgctttcaacagctaaatataagaactggcctgaatctgtgtattttttcaagagaggtggcagcattcagcagtatatttatacaacaggaacctgtacagaagtgccctggaagaaggcctgctctaaattatccagtgtatggagaaacgacacaggttaggagacgtcgctttgaacgtgctataggaccttctcaaacacacaccatcagaattcaatattcacctgccagactggcttatcaagacaaaggtgtccttcataatgaagttaaagtgagtatactgtggagaggacttccaaatgtggttacctcagctatatcactgcccaacatcagaaaacctgacggctatgattactatgccttttctaaagatcaatactataacattgatgtgcctagtagaacagcaagagcaattactactcgttctgggcagaccttatccaagtctggtacaactgtccttagactgatgagcaaggaggagtcaactaatgaagaaatgaataataaattttgacactgaaaaacattttattaataaagaatattgacatgagtaaaaaaaaaaaaaaaa

SEQ ID NO: 7955 - DNA, 656 bp, Homo sapiens
cctgaatatccagcacctccaggtttcaactcagaagaggcatgttaattctggttctatctacctcaacaagtttctaagtatagtagcagctaatgaatatgaagctgtttttcaaaatcataattcttttcccaatgtaggtatgaagatgatttttcttaaataagatatatcgctagttaaaagatgcacttgtattgaatgaatgtcctaaatgcctttaagatcccatctgctaccggccatttagatgactgcaggaactaatggtagactatacatctgttgtttgggctgcctaacttccatttcccttctgatgttaaaaggtacagttttggccaggcacagtggctcaagcctgtaatcccagcaatttgggaggccaaggtgggtggatcacctgaggtcgggagttcaaaactagcctgaacaacatggagaaaccccgtctctactaaaaatacaaaattagccaggcatggtggtacatgcctgtaatcccagctactttcaggaggctgaggcaggagaatcacttgaacctagaaggcggaggttgcagtgagccagattgcaccattgcactccagcctgggcacaagagcaaaactccatctcaaaaaaaaaaaaaaaaaaaaaaaaaaaaaaaa

SEQ ID NO: 7956 - DNA, 218 bp, Homo sapiens
ccaatacaggatatgaatgaaaaatttacaaaaagaagaaaatttactaaaaagatagatattttaaaaaaacagaacttctgcaaatgaaaaatgtattataggaattacaaacacagttgaaagacttagaaatagactagaccaagcagaagaaagaaatttagcagaagaagacagtcttttaatttaacccagtcagacaaaaaaaaaaaaaa

SEQ ID NO: 7957 - DNA, 571 bp, Homo sapiens
actggtatgatcctctgcacctggccggtctgcctcccaagtgctgagattacaggtatgtgccttctgcacctggcctgtcttttcactttcctgatggtgtcctttgaaggacccgtatgtttccagttttgatccagtcctgttgatcatgtctcctgttgcttgtgcttctgagtcatgctgtcctcatcctgttgcttttattccttgtgaggcgacataacaagggaacttccacatgtcctctcgcattgtaaatacataaaccatgccttccctgcagcctctgcttcttctctaacgcagaacatctctctagaaacaagtattccagatttcccatctgcccagggagtgcacagtgctccagaaattggatgcttttttttttttaatcttcctaagatgtttgatggattgattgaaaatggcaaatatggccaggcgaggtggctcacgcatgtaatcccagcaccttgggagtccagatgggcagatcaccaggtcagcagattgagaccatcttggccacatggtgaactctgtgtctactaaaaaaaaaaaaaaa

SEQ ID NO: 7958 - DNA, 650 bp, Homo sapiens; identical to SEQ ID NO: 2723

SEQ ID NO: 7959 - DNA, 662 bp, Homo sapiens
ttagaactccgattactgagatgcacctctttctttcttagtaaagtgctgttagtattacaaacctttaaacatttagaaagttcaggggaaaatgtgatgaaaccctatgtatgcaccattaatatgtaacaaaaataaacttactatcattgagtcctttcttatttaaaaaaaaaaatgctacaaggccaggcccggtgtctcatgcctgtaatcctagcactttgggaggccaagcggagaggatcacttgaggccaggagtttgagaccagcctggccaacatggtgaaatcctgtctctaataaaaatacaaaaaaaaaaaaataatagctaggcatggtggcgggcacctgtagtctcagctacttgggaggcagaggcaggagaatcgcttgtacccaggaggaggagattgcagtgagccgagatcataccactgccctccagcctgggcaacagagtgagactccgtctcaaaaaaataaaaaatttaaaaaaattaaaaagctacaaacataaaatgaaagccacctattcatttctgtctaatttcactctgttcctccacaacgtgtccattatcctgaagttgctatggctatcttgtcttttccaccatttttcttccatttgaaataccttattaaaaaaaaaaa

SEQ ID NO: 7960 - DNA, 145 bp, Homo sapiens
aaaaaagggcggccccagactccagcctgttcttgttgccctccagcagcttcatgtaggtggcaacctctgtgtccagggccagcttgacattcctcagctcctagtatgcctgcttgggggtggtgtcttttaaaaaaaaaaa

SEQ ID NO: 7961 - DNA, 686 bp, Homo sapiens
agaagggtaattccctatgttcccaggtcttttgtgagaaggttaggagcctaaattcagtggatttcttgctccgattgcaaaattacctccagttatgaagatatgagaaagtttacttttcctttgaataaggccaattagcaacacagatggctacaatttccctgatcctagctctttaaaatagccttgaattaagtcttccttccctatttaatattggctagtgtaatttttgttccaacagcatgtattatctatattttgtgatactaaataatatctaagctatatcaaataagaaaaaactggcattaaaaaaagaacaaaagaaaaattttaaaaaagaaaagcacataatggaccaagtaagatcatgttggaaagtaaagataatcacatttcagtgcatctttgggtaatggaatgtggggagcagctacagtatggatttttagcaaaaatgcccttttaattctaataaatattttcttttgaaaaacatcctatttactctggtaacttcagggagtcctgaacaactggggagatttccactaatataccaaaatttaacatgtaggaaaaggaactctgatctaccaccccaaccccaaacataaaaaacacatacaacaaaaacaataataaaaagagcaagcagttaaaaaaaaaaaaaaaaa

SEQ ID NO: 7962 - DNA, 641 bp, Homo sapiens
ggtcaggatttatatctatacctagcaccagtgcttggcatcaggtgtttagtaggttccataaatgcccgacaagtaagtaatataaatgtacgaactgtatgttactagaaagtcttttggccatcagatgtaaacaagtcctttcagttactccccacagctgtgagtatgctgcggactttaattcaaaccagaccttaatacctatgagaagaaggatatatcacaaagccgaattaccgggaacaatgctgtaaccacctcagttaaggtcatctaccgagcttggccttcccaataatgttgttgacatcagaaaaatcatttaaagattcaatttaaaatgttaatactgcagtgtcagaaacatacaaacatgaaacaagaaaaaaagccttccttccattgtgtgaaatgagctttgtcatgccctgtgttcagatggaagattttcttttgctaaaatattaagacctacttaatgaactttgacaaagcaatgcacttttccagtttgcatagtttgcgtggttatctgtttttggtaccactatctcctgtgttcctgaaggagtttcttgccatgatttgaatgaataaagatcttttcgaactaaaaacaaaaaaaaaaaaaaaaa

SEQ ID NO: 7963 - DNA, 687 bp, Homo sapiens
gtccctcaaaataaattttgtttaaaaatagttatttcaggcatcttactccgtgaagggagaagcaaagattccatcagggccatgttgcctgtccctgtgtagccctaggttgtagtaacatttaataccatctagtgatatatgtgggtgtgagagtggttcattccaaaggaaccatcttcccaactggcactgggcagtcagtctctgttgtcaacctcatagaagtggtgcttgactttgccattttctatcctgcagaccatacaggaggctgatgcctcagccgccactgattcttcaggttgatgggcaagccataatgaggcccatcctgattatgggccaggcttctgctgctgtcacctggcactctattctaacaccctgagtctaccttctagtacttctcataaacactagggtttcttttggtctagtgccatagtcctcaactccagatacatgattaaatcacctgggaagccatttgcaaaaacctttgccagcatcccaccactagctggttgaagtagactcctcagtggtggtgaggccctggcatcttattttctaaaaagctctccagaggattcaatcttgtagccagtattgagaaccttttgtttagcacaatgagtagcaaggggagaattaacttcaaaagcagagaaaaaaaaaaaa

SEQ ID NO: 7964 - DNA, 183 bp, Homo sapiens
aatgaacttaccatagtatttttgtattgtaacctgataaattcatagcccaacaaggtaattattttagaacttaagcaacttaaacataatattgatatgataaactctagctctaaatgctagctctaaattgtgtacaactataaaaaataatattgtcaataaatatgacttcacatg

SEQ ID NO: 7965 - DNA, 817 bp, Homo sapiens
  misc_feature (206)..(206): n is a, c, g, or t
ggtcaacccaggtgactggactcagcctgggctgggagccgtctgaaagcctcgatgctgttgcagctcaggtctagcacccgcagctgctggaggctgaagtcggagatgcaggtgagggaattcctggagaggttgagatgggtcaggcggggcagaccctcgaaggcgccatcctcgatgtccatcagcacgcttgctatgcnaggtcaagctgctccaggcgcacggcatgtccctggaaggctgtggccgggtgacggcagagtccagactcgttctccgccccagtgacgagaggtatagcaaggctgtggtgccatccccccagccaagcccgctcccagcaaggcccgctgtaccaaggcctagttcccctagaccaaggttccaagggaaggtcacatgcagtggccaaggcgggccccaaggcccacccaagccactcccagccgaccaagtcggcccatcccgcccaagcccggtttgttgaatcgccaagcacttgaaggtatgcttccctaagccgttgggttccagcgaccctcggtaaggcttcttggtctggtagagagactgatatctctgtggctctcatgtcacaggtgcacgaagtcccgtgtagaacgccacagggtgtgaggccaggatactccgcagctggttcccagatagatcaagggtctcagtgtctggcgggagcaccgaggggacctggagcaggcccagaacctggcacgagaccttcttgtccaccatcttacagggcactttgtcttggtgttgtgcagccaggcctagggtcagcagggccagg

SEQ ID NO: 7966 - DNA, 596 bp, Homo sapiens
gttaatctttcccatcagttgtatgcataggaccgacatttcagacgggtagaggagtcatgaaaggtaggagcctgggtccctgatttgcccatgctaagcaggcacaccagcactggcctgcattgaataaaatccacgaatgaaatgtctgtttacgtcaacccaccgcaacttctgtgattcatctatgttggattattagaggtattattcttctctatatccgccattgatatcgaatatcactctctcttacccatactattatattttggttgtgccccacattttgataacgctgtgtactcatctcattgtgaactagtgatgtagaatcatggattcccatgatcatgctcttatctcccttgctttgaagatgttatcttcttgctattttgctctgtttacatgtttcactgtgttctatatggttacgtataaagtattctacttggggctgggctcagcggctcaagcctataatcccagcactttgggaggctggagtgggtacatcacttgaggccaggagttcaagaccagcttgggcaacatgaagaaaccccgtctccactaaaaaaaaaaaaaaa

SEQ ID NO: 7967 - DNA, 701 bp, Homo sapiens
tgtgtaataggcagatcgacttctccacttcattaatatacaggcttagtcagctgcccaagaactagtaatattacagtcttcagaatgactgtctaaatttagattctggcttagatcctagtgactacagggttccaggtcattcacagcctaatttgggtagaagttctactgtaataactatcctgattgtaattctaaaggtgttaacttttaagtaatggcatttcataggatatgttagggtctcgtgaataaatatctcagatgcaggatccactaattttttgtcttattcagaagctccgtgatagtaaaaagtctatattttttcttatatttgttctgccccagtaaacctttgtttggtgacttacatgtgagaaaggtgtaagtagaaaactgttgaataattctgaaacctagattctagaacaggtaaaaatgaatttgtaaatagaatgcttatttagtaagcattaaacacagatccatacctcattactaacttagacattgggcttgatctggaatttctggtaatctgctccaggtagtcagtcagaatatcagtaagtaatgagtatttattataggttctaattagtatggttttacagtttttctattgttgtaaaatatacataaaataaaatatacccatttaaaaaaaaaaaaaaaaaaaaaaaaaaaaaaaa

SEQ ID NO: 7968 - DNA, 667 bp, Homo sapiens
taaatggaagtatttggaccacagagttggatccctcatgaatggaattgtgccttcctcttggtaatgaatgtgttctcattctatgagttccctcccactacaactggttggtaaaaagagcctgacacctctctgctatctggccacgtaaccactgcatatgttggctccccttcaccttccaccacaagtggaggcagcctgagactttcactttctagctagcagaattgtgagccacataaacctctttcctttacaattacttggcctcaggtattcctttatagcagcactaaactgactaagataatactcttaaacaagaaaaatttttacatagttaagacataataccaaagacttacgggatgcagcaagacagtgctcagaaggaaatttacagctgtaaatgcttacattaagaaagaagatctcaaatcattaatctaactctacaaccggagaactacaagaagaaactgaacccaagctaacagaaggaaggaaataagaaatatatgaatagagatgaataaaacagagaacagaaaaaaaacagaatcaacaaaactaaaagttttttttcttttcaatcaacaaactgacaaacccttaaaagagtttagatgtagggatagactgacaataaaaaaaaaaaaaa

SEQ ID NO: 7969 - DNA, 715 bp, Homo sapiens
  misc_feature (353)..(353): n is a, c, g, or t
  misc_feature (471)..(471): n is a, c, g, or t
  misc_feature (477)..(477): n is a, c, g, or t
  misc_feature (564)..(564): n is a, c, g, or t
  misc_feature (597)..(597): n is a, c, g, or t
gctcccgcatccttgaggcaactatcatattcatataaaagttcaaggacccacacttaaagagagatttcaaatcctctaagcatgctcagctaatagctgttgagttaattaggaggactaagacttagaatattaaatctttgaagaaaatgtaatggtatggtttaattcagagaagaggttgaggagtaagcttataacccttttcacaagctgaaatgagctaagcccttggatccgtgttcccccaatgaaaggatgaaaggattcacctggaacccttgtttaaggatcacacgcccaggtctctactctgcagactgggattttgaggtggggcaactgttccntgttgaattgtcattatcggctaatgttctgagaaacttctagatttagaatgccaccccaaaaatgccctatggcacgtaatgtgccccctgtgaatagtgtttaagactaggtatngtttgnttttatcacttaagtacccatatgttgggtttacgttttgtatatgatacctctttattggcccggaccccggtggcctcatgcctnttaaatacccaccacgtttgggaggcccaagtnaggtggattgctttgagctcaggaccctccaaggcaccgcctgggcaccatggtgaaacctccaaaaaaaaaaaaaaaaaaaaaaaaaaaaaaaaaaaaaaaaaaaaaaaaaaaaaaa

SEQ ID NO: 7970 - DNA, 709 bp, Homo sapiens
cagtgttttctagttataaccaccagccgttaaaaatgagtgaccattttgtaggttacagcctcagccatctgtgtcatttgaaaccaatatcctgatatttttaaataaggtgagcaggcacggcacggaaacccatatttagtacttttgtgattagacacttctagaccaggcttgttgatatgtatgcccatagcctagaatttttggcttagtgtaaaatgacatgtcttttctattgtggtctgatatcccgtttctggtaataagatcacgtttgttgtcctctgtgcaccaagtggttttgcccttaatttttttttggctagcatcaccacagatctgtcatccagagctgctgagaaaaatacatgttgcccaaacttttcttaaaattgtgctgcccagtggtattttccccagatgtgaaaataataatcttataaaggattaatatctaataccataccattgttgaacatgctcatggaatgtccaccttcttctgattccttttttgtatttgaaaatgccatggtgtgttcccaattattgttggtgttgttaatgtcatgactctcctttgaatagaataaaataaccccttttgttttgtgttttctactgaattagattttcctctagtcctatgtgaataaaaagctatttgaaataaaaaaaaaaaaaaaaaaaaaaaaaaaaaaaa

SEQ ID NO: 7971 - DNA, 699 bp, Homo sapiens; identical to SEQ ID NO: 2736

SEQ ID NO: 7972 - DNA, 613 bp, Homo sapiens
gccccgctccttaggaatgttagcttacagaagtcactatgaatgtgtgcatagacactattcacatgattatttgccattgtttcgaaatagtgaaaagttagaaatgacttacaggtcaaagaggttaaataaagtgcttatataggtatgtggtatcaggtaagcaggcatttaaaatgatgtaggaaaatacaatactgtggaaaattgcgttgataaacacacaggtagaaaagtatgtatggtatatgtgcttggaagcaaaaaaagaaagattagctagacaccaaaatatcaattattatttctgggtagtgggattatttgtagttttttcatttaaaaatattttttcaaatttttgacagtggatatgtattatttttataaccagaagaatgtttagtaaattcacaaatcccattttcagagcaacaagataaagtggactgtgactgcttcccaatatttatgatgacatcttatatttgtgacccttgttaccaaaacacaatagaacaagatagagtttagcgatttttaagatggaattatttttttaaaaaaaaaaaaaaaaaaaaaaaaaaaaaaaaaaaaaaaaaaaaaaaaa

SEQ ID NO: 7973 - DNA, 623 bp, Homo sapiens
cggccatttaggagactaagttcagttactcgggatttctacagctacctctcatgtcgtccaccatcattcctgcttgccccacattcatccttgaagtccggggtattatgtgcttagcttgcttgagattttgagttcaggatgaaggatgaaagagaatttaggtcaatttatctagtccatgtacttaaaggttgcatgccaatgaaaacattgaaagatttgttaccaaattataaaactacacttttttgaatcatactacggactagacataggtatgaagctcaacacctaaattattaatttttataaaaatatttgataggctgggcgcagtggcttatgcctgtaatcccagcactttgggaggccaaggcaggcggatcacaaggtcaagagagcgagaccatcctggccaccatggtgaaaccccgtctctattaaaaaaaaaaattagctgggcgtggtggcacatgcttgtagtcccagctactccggaggctgaggcaggagaatcacttgaacccgggaggcagaggttgcagtaagccgagatcgcgccctgcactccagcctagctacagaactagactctgtctcacacaaaaaaaaaaaaa

SEQ ID NO: 7974 - DNA, 649 bp, Homo sapiens
agccccgggggcagcaagcatctatgctgccagtgaaaagcaggtaccaggcccctgttcagacagcttgtgattcgctctagacttttgttggtcgccctaatagggaaaaaatcttgataattttctgtgttctacatgcacttaagactaaaagcacaggttgtggattaatctttatttgcttcctcgtttccgcttttcttcccgcagagcctgatgggagaatgtccagggcagggaaaccacattttttgtaggtgataactcaatgtaaattggtgcttattttttacacttctctcttgtggctctcttgtggtgctatctatctgttttaaggtctccttgaaggcgcactggggagccctggccatgcctcgttctccctgctttctttatcctgttattgcctccacagtctgttgccaaggactctaagatcaatgcacgtcactttcctttccactgggcaggatagccaagcacactccctcctgcgctctcccgccccggtgcgtccactcccgagggctgttatgaggactgggttgtgcctacttgatttgaaaacacacacaagcaataaaaagcctcttcctgcattgtcaaaaaaaaaaaaaaaaaaaaaaaaaaaaaaaaaaaaaaa

SEQ ID NO: 7975 - DNA, 661 bp, Homo sapiens
  misc_feature (11)..(11): n is a, c, g, or t
  misc_feature (13)..(13): n is a, c, g, or t
  misc_feature (215)..(215): n is a, c, g, or t
  misc_feature (321)..(321): n is a, c, g, or t
ggagacagggncntcggtcaacgcacccccggatccctgcaagcagtcgcctgtccacttagccgcaggaagcgccttgcttgctttcttctctggcagctgcaaacgggcgctgacctcaaccagcaggatgttttaggagaagctccactacacaaggcagcaaaagttggaagcctggagtgcctaagcctgcttgtagccagtgatgcccnaattgatttatgtaataagaacgggcaaacagctgaagatctcgcttggtcatgtggatttccagactgtgcgcaagtttcttacacaattaaatgtatgcagacnataaaagcaagtgaacaccctgacaggaatgattgtgttgccgtgctcagacagaaacggagtctcggaagtgtagaaaataccagtgggaaaaggaagtgctgatgtcacgtgggttatgaagaagtctgaagaacgccttcatttcatgcaaatctataagctcctgcttttggctttaccatatgttgtgtctaatctccttctgagaaggacgaaaaactttcttccaagtgaagatccatttaagaacacatgtatttacatgcctataatatgctggttgtgtatgctttgtcttttaagttattaaaggaacgtctaaaaaaaaaaaaaaaaa

SEQ ID NO: 7976 - DNA, 698 bp, Homo sapiens; identical to SEQ ID NO: 2741

SEQ ID NO: 7977 - DNA, 686 bp, Homo sapiens
  misc_feature (13)..(13): n is a, c, g, or t
tctgtgtaccttntgctgcttttcttgccatactgcataggctagaatctccaggaaatgttggagaagcagtgagagtagacatattgccccattcctgatcttagggtgaaaacattcagtttttgactattaagtgtgatgttagctataaatgtttcatagtgccctttgtcagtttgagggagcttccttccatttctagtgtattatttttacgaagaataagtattgaaatttgccaaatatgttgtctccatctattgagataatcatagtttttcttctttattctgttgatgtggtgtaatacactgattaatttactcacgttaaaccaactttgcattcctggaataaaaaccctacttggttgtgatgttatccttcttatatattgatggattcaagttgctaatattttgttaaggatttttgcatcaatgtttacaagggatattgacctgtagttttattttcctgtaatgtttaatgttttccatgtttccttatgcatatttaaaagaaagataagttggccaggctggtctcgaactcctgacctcagatgatctgcccacctcagcctcccaagatgctgggattacaggtgtgagccaccaggcccagccttatgaactgaattctaaaataagtttaaaaagcaaatgcaaaataatattata

SEQ ID NO: 7978 - DNA, 704 bp, Homo sapiens
gagctgggacagccagcttagcccatgcctacagatctaggacactgttgtggggtttgcaagcaccacagtagctggctgaagcttgggttcctggtgagagacagagggaaggtgatgtggggatgtgtagtgaaagaagaagacagaggttttcctgattgcttgacaaacataagcccagcccttagcttcagcccaggctctgacaacatcagatcacaataaacctcaggttgtgtttactccccttccctggctctacctcccctggtttctcaatctgtctactcttatctggcactgataatgtgtgggctctgaaaatgtgccctttggtctaaaagtgtggggattccaaaagcctccaagaatgaatgactcaatcaaggctgaaaagagccacattgtccagatgtgtacatctgcttggacccagctcgcaaagcactttaaccatcttttcacaaccgctgtccacatggagtgaggctgcagggccggcattcctactcctagattctcatcttcctggatgcatcgtcagtccctggttgggattccaccaccgagagctgcgctgctccatgtgactcctccactgcctctgaagaccccctttaggacccaaggatcaaaatccctacctcagggtgcccgtcttgttttccctgtcctaaaaaaaaaaaaaaaaaaaaaaaaaa

SEQ ID NO: 7979 - DNA, 717 bp, Homo sapiens; identical to SEQ ID NO: 2744

SEQ ID NO: 7980 - DNA, 691 bp, Homo sapiens; identical to SEQ ID NO: 2745

SEQ ID NO: 7981 - DNA, 662 bp, Homo sapiens
tcatggtcatggctcactgcaacctggaccttctgggttcaagcgatactcccatctaagcttcccaagtagctcggaccgcaagtgcacaccaccatgcctgggaaattttttgatttttttgtagaaatgaggtcttgttatgttgcccagtctggtatcaaactcctgggctcaagtgatcctcctgcctcagcctcccaaagttctgggattacaaggtgagccactgcgcccagcctatctattgcattttgtgctaagtatatatctgagcactggtataagatgtgagcaagactaacaaatcttagtcctcataaaccacagatacagatctgtgaatagatctggatatgggtgtggatatggatggatatagatatagaccattagttctcaactagggatgggtttcctcccacgaggacatttgacaatgtctgggatgatttttagttgttacactagaaggaaaatcctattggcatctagtaggtaaaggccgaggatgctgctaaacttgctgctaagtactgaacagccccatccacaacaaatgattattaagttcaaaatgtcaataacatgttaagaatctgatattgtgtgtgtgtgtgtgtgtgtgtgtgtatgagacagagggaaaaaaaaaaaaaaaa

SEQ ID NO: 7982 - DNA, 701 bp, Homo sapiens
cttactccactgtagattagctggatacttcccaggatatttcagaaatggtaagtagccctctaagacaagatatgaagtgtttgcagatttcagtagtcaagactccattatatagtcacggtagtaatttcattctgaccagacagatgtagggctggtctcaaatctttgaggttaataaaaagttgtttagcttcttagcacaaagattgagaaaagtcaggtggaataacatgtgcattccaaagaacatctgcagatgcattcatcatggaagacaaggtcaggcatttttttcatgtaagttgatcaaatgttataattgaagagaaatatctcaataagaggggctccaataaatgtggatagcagcagattcaaattggaagttctcggataaagagatgttttgattttgttttatggtagcgtctcacatacagaaatttgggctgacaaacgtacatggttcttaaaagacgatgttgaccataacttctccaggatattctcagttgcaaaagagatttgccaaagaaaatggatgaaagaggtcaagagacaggttgttccgatttgacaggacatctagccagagttccagtcaatttcattatcagcaggcatctgcacagatgaaggtgttcagagaaaactaataaaacagatacagtattgatgataaaaaaaaaaaaaaa

SEQ ID NO: 7983 - DNA, 734 bp, Homo sapiens; identical to SEQ ID NO: 2748

SEQ ID NO: 7984 - DNA, 626 bp, Homo sapiens
atagttatggaaaacaccagtatagaatagacagggagaactcgtcggcaggttttggcagtgaaatttgtcttccagtgaattgctattattttcaaatgtgcctatagtcctataagcttttccacttgatggagacttactttcaaatgagcttgtgttgagattcagcactctagattctctctgacattttcctgtcttttgggaaaaaaagcagatattcccaaatggcagaaatctaatttttgtaaactttttcatctataggattgagcccttaaacatacatactattttaaagaaaggtaccatctaattcttttattaaagatagctacttctgaaatgtcttaacagagtttcaagattgcaaagtagtattgcatagctggttttcttacatgtgatgatggaggagagaggaagacccagacttaggcatgtagtgaaatatgtacagtttctggcatcagtgtactatttatagtctatagcatacattacttgcaaatgggaaaagtattttataattatttttgtacctcaaaataattattatattctactgtattatattcaaattaaagtttattatttgaaaaaaaaaaaaaaaaaaaaaaaaa

SEQ ID NO: 7985 - DNA, 751 bp, Homo sapiens; identical to SEQ ID NO: 2750

SEQ ID NO: 7986 - DNA, 666 bp, Homo sapiens
  misc_feature (205)..(205): n is a, c, g, or t
ggtggtgaaatgaggccgggactgctacagaggagaactgggtctgctgtggaggggctcctccttccccatgactgcaagtgtcgtggtctgagacagggaacccctctgctttcttgtgtctctggtgagaagttcatatcggcacttgtggaagatattctctgtgtctaaacacaccgttagagatcactgagctccacgngcacagccgagatgtagtactcctgtctgtgctcttggccacttaatttataaacacagccctcgtgggcacattgttaattggccgcccaagggtttaagctacttccgggagggcttgaggttggtgatggattcgccttgagccctgggaggttgaggctgcagtgagctatgatcatgccactgcactccagcctgggcgaccaggtgagaccctgcctcaaaaataatacaattaaaagtataaagcagccctggggaaatggagacagtggacaaagcaggctggggcaccaggtgtgcatgtgggtgtgagtctgtcatgagagctgtcctgaatgcccttaacgccactgaactgtatgctggaaaacagtgacaacagtggattttgtatatagacaattaaaaaagaaataacacccaaaaaaaaaaaaaaaaaaaaaaaaaaaaaaaaaa

SEQ ID NO: 7987 - DNA, 683 bp, Homo sapiens
aactcagacgaacgctagagagccaaatatgttctcaaaccaatcacacagaatgttctgcttctagctagcctgcctctagcttccccatgccttcaacctatgatcatagcatactttgtcgctccactttttcactatagagcctttctactctcctgcctctcttccaaatgtaagtgacagtggctcactcccttgctatagcaagctctgaataaaaataaccttggcttgtcatttcagtggtcttcatttctttctacaatcctgttacatagatattttagagccaagatttttaactggttatgtaaatatagtcgactaagaagcttagaaagtgcagatgacaggccaggccatggtggctcatgtctgcaatcccagaactttgggaggccgaggtgggtggatcacctgaagtcagcagttccagaccagcctggccaaaatggcgaaaccccgtctctactaaaaatacaaaaattagccaggcatggtggcacgtttgtaatcccagttactctggaggctgagacaggagaattgcttgaaccctggcggcgaaggttgcagtgagccaaaaccgtgtcactgcactccagcctgggtgacagagtgagactccatcccatcaccagccacccctgtgcaaaaaaaaaaaaaaaaaaaaaaaaaaa

SEQ ID NO: 7988 - DNA, 662 bp, Homo sapiens
taatccagccccatacttctcgctgaccttctgttgaacgtacctgagcctgcaaatgtagagatgatgtatctgaatttgcactaatggtgtctgagagcaaaaagagtgtgacctctattggaaacctttgttcaaattcaataattcagagatgctacatacttctgcaagcttcctgattatgttcactgtaatattgaatgacctaagtttgaatgtatttccttacagtccattaatttgacatccatcttttacctggggattattacaattgcaataagtcattaatgttttcttcacacagcttcttaaaccaagtttctctgcagctctttcggttctgcttacagtgtgtgggaaatctgatttttttcccctagtaatagtttgataagaaatttagtgtattgactgcctcagtgacacaatttatctttaaaggtgtggaagctggtggggaccaaatgttacctgtgtttttgctgttgattgctattttcagaagcaaaccatgtttttcacttacagtaggagtcaacaaatttgggattttagaagggggaggagggagctatttgtgtaagactgctgtcatatttgactacatattaaaaacagtaaatgagcattttgttttaaaaaaaaaaaaaaaaaaa

SEQ ID NO: 7989 - DNA, 680 bp, Homo sapiens; identical to SEQ ID NO: 2754

SEQ ID NO: 7990 - DNA, 715 bp, Homo sapiens
  misc_feature (83)..(83): n is a, c, g, or t
gttcgcggtctcgtctggtctctctctctctctctcgtctctctctctttcgttctcctgctggagccagagacatcctgttntttccagcccttggaaatcagaacttcagcttctcttgccttggggttctggaacttaccccagtgtccccaacccccaactgggttctcaggctttcagcttgaactaagagttatacaattggcttttggccttttagacttggactgaggcagtcaccagcctcccaaattctctagtttatagatggcctgtcatggagctcctcagcctccataattgtatgagccaattcccctactaaattctctctctcagccgggcgcagtggttcatgcctgtaatcccagcactttgagaggctgaggtgggcggatcacttcaggtcgggagttcaagaccagcctgacaatatggagaaaccccgtctccactaaaaatataaaactagctgggcatggtggcgcatgcctgtaatcccagcgactcgggaggctgaggcaatagaatctcttaaacccaggaggcagaggttgtggtgagccaagattgcgccatttcactccagcctgggcaacaagagcaaaactctgtctcaaaaaaaaaaaaaaagaaaaaaaaagaaaaaaattatctctctctctagatatatgtgatatattctgatgtatgggtgctaaaaaaaaaaaaa

SEQ ID NO: 7991 - DNA, 574 bp, Homo sapiens
tggttattaaaatcaggcaattcaggtccggtcctgagtattcggcaaacagcacactaatcctggagcttttgggaagtcagatattgtatatcatctggccgcctaaagcccatattcattcaccataaatctttgccaggaagaatgcttaaggatgtgattggatggatctcaatgacctggcgaagactgaaaatacaactcccatcaccagcagagttgctaggctgctgctgtatgggtacagagaagggtttgacaaaattgacctgactgtggaagaacttccagcagtttacacaggactgttttataaactctatcataaggaactgccagagaattataaaactatgaaaggaattgattaaattcacatttatatgtttagaaacatgtagactaacgaatgacataagaaatagtggacattttggattgattaaacatctgactgtgattttcgtaatgtatatgatttccatgaagaaattttgtttctaaacatgcacattttaaaagcctcttttcgaataaagcaaatgcgtgaaaaagaaaaaaaaaaaaaaaa

SEQ ID NO: 7992 - DNA, 164 bp, Homo sapiens
atcgtgtggcgacggataaggcctgaactgggaaacccaggccttcctgttcaccctgagctgcttcctgagacagatgctcaagtgaggctgcaggcgcggtgtggtggggccgagtgtgaccgtttgctaaataaagtgaaataccctataaaaaaaaaaaa

SEQ ID NO: 7993 - DNA, 116 bp, Homo sapiens
agcctggccaacatggtgaaaccccatctctaccaaaaatacaaaaattagctggtcatggtgtgtacctgtaatctcagctactcaggaggctaaggcatgaaaatctcttgaac

SEQ ID NO: 7994 - DNA, 608 bp, Homo sapiens; identical to SEQ ID NO: 2759

SEQ ID NO: 7995 - DNA, 727 bp, Homo sapiens; identical to SEQ ID NO: 2760

SEQ ID NO: 7996 - DNA, 160 bp, Homo sapiens
tcaggttgagatttaagtttttttgaggttggatgcagtggctcactcctgtaatcctagcactttaggaagctgaggtgggaaggtggcttgagttcaggagttcaagaccagcctggacaacatagtaataccctctctctacaaaaaaaaaaaaaaa

SEQ ID NO: 7997 - DNA, 677 bp, Homo sapiens
taatcccggtctatcttgtgacatttggttggttccaagtcttgctattgtgaatagtgccgcgataacagtacgtgtgcatgtgtctttaatagcagcatgagttatactcaatttgggtataaaacccagtaatgcgatgcttgggtcaaatggtatttcttagttgctagactccctggagtattcgccccctgaccggacttccacaatggttgaactagtttacagtccaaccaacaggtgtaaaagtgttcctatttctccgcatcctctgccaagcaccgggtggtttccggactttttaatgattgccattctaactggtgtgagatgatatctcatagtggttttgatttgcatttctctgatggccagtgatgatgagcatttcttcatgtgttttttggctgcataaatgtcttcttttgagaagtgtctgttcatgtccttcgcgaaggacagataccttaaagataagttttcgataaagaaaagccttcattttcctgggggaaatgaagcacttgatgccaaggacattagtagagggctagaaagattgcctgtgtgaaagacatatgctatatccaaataataaaacaaacgagatcctggggctcattcatgtgactttcaataaagtatgtagactgtctaataaaaaaaaaaaaaaa

SEQ ID NO: 7998 - DNA, 620 bp, Homo sapiens
cacaccgttgagctaatgttgtattttagtacaaatggggtttctccatgttggtcaagctggtgtcaaactcccaacctcaggtgatctgccggcctcggccccccagagttctgggattacaggtgtgagccacctcgcccggccacttaaatcattcttaacagaattaataatttcttagtattatctagtacccagtccatgttcaaatgtccttaattgtctccagaatgatattttacagttgtttttcctaacatggcccacacgttgtatttggttgataatgaccaaccgaaacctctctcccagccaggtgctgcggttcacatgtgtaatcccagcactttgggaggccgaagcgggaggatcgcttgaacctacaagttcgagaccaggctgggcaacatagtggaaccccctctgtacaaaaaaaaaataacaaaaattagctggtgtagtggcatgtgcctatagtcccaactactcgggaggctgaagcagcggaagggttgcttgagcctgggagatcaaggctacagtgagccatggtcataccactgcactccatccagagtgacacagtgagatcctctctcagaaaaaaaaaaaaaaaa

SEQ ID NO: 7999 - DNA, 676 bp, Homo sapiens; identical to SEQ ID NO: 2764

SEQ ID NO: 8000 - DNA, 701 bp, Homo sapiens
gtccgttccaattcatcctcttcccccaggaagccctcggccccccagagagggagcctggttctgctgctagaacttgaaactggccacccagctgaccggaccggtcatgcccgtccggaacgtctataagaaggagaaagctcgagtcatcactgaggaagagaagaatttcaagccttcgctagtctccgtatggcccgtgccacgcccggctcttcggcatacgggccaaaagagccaaggaagccgcagaacaggatgttgaaaagaaaaaataaagccctcctggggacttggaatcagtcggcagtcatgctgggtctccacgtggtgtgtttcgtgggaacaactgggcctgggatggggcttcactgctgtgacttcctcctgccaggggatttggggctttcttgaaagacagtccaagccctggataatgctttactttctgtgttgaagcactgttggttgtttggttagtgactgatgtaaaacggttttcttgtggggaggttacagaggctgacttcagagtggacttgtgttttttctttttaaagaggtaaggttgggctggtgctcacagctgtaatcccagcactttgagattggctgggagttcaagaccagcctggccacatgtcaaaactactaaaaataaagaaatcagccatgaaaaaaaaaaaaaaaaaaaaaaa

SEQ ID NO: 8001 - DNA, 701 bp, Homo sapiens; identical to SEQ ID NO: 8000

SEQ ID NO: 8002 - DNA, 718 bp, Homo sapiens
tatagagtagttgttccatgcagtatgactgggttctatagatgccatggggagacacaatgagacagccaagtataatcggtccccagagaccctctaaccagcctgtgcactggagaatggatggagctatgaagttcctgccgtttgcagtggggagcagcctggcctctccttttcctgggtggtaacctgggatccagtctgtaagatgggggcctgttaacaggaacccctcgttactttgctgagagtctttttcctttttgccaaataaattctgtaaccactcacccttcaaagtgtctgcgtgcctaaattaacctggtcatgtgacaagaacccagattttcctgcaacacagagacacagagaaaatgccatgtgaaggtgaaggcagagactagagtgataggtctacaagccaagaacttccagccatcaccagaaggtaggagagaggtctgaggcagattctcctccaagtctctggaagaaaccaaccctagacactttaattttggacttccagtctccagaggtgtgggagaataaatttcagttgttttaagctacccagtgtgtggtattttgttagggcagctcttggaaactaatacattgtattttcacattaaaaatatatttcaaagttcccaggagttgatgtttctggtctctaatttattgaataaatcacaaatctaaaaaaaaaaaa

SEQ ID NO: 8003 - DNA, 727 bp, Homo sapiens
  misc_feature (62)..(62): n is a, c, g, or t
gatttcaggacccttgaaactaattgagaaaagcagaagatcggcagacagatgaataccantacaccagcttttagaaaaggaaagaggaaaagaacagagacatggactcagaaaatgcaaatagtgacatggataaaggacagagagacccatattcgggaaatgcctttctgcctggtgaaagctccagtgaggatgaagagcctttagcagaattgtcaaaggaagaattgtgcgccaaaataaaaagcctgaaagaaaaactaacaacacccggaaagaaaacagccgacttcgacagtctttggtcatgcttcaagcttggtccagagagctgccttagactctccaatgaatgtgttcaaacagctgcctctgttaccttgactcatctcagatacgggtcctggcgctaggaatcaaagactgtctctattattttggcttgctccaggttgggcagaagcccatgcaaggctactactgatcatgtttcatttctagctttgatgtctgggcactgatttccctaggtttaactatttgctcaatgtcaaggcagtgctgtggaaatctgtctgtgtaactggagtgctatgcagacctgtctgtgtgactgtcatgcaggcctgtctgtgtgattgtcagggagaattggcctgccacaacttcactgcagcctgggtgacagacacagacaccatctcttaaaaaaaaaaaaaaa

SEQ ID NO: 8004 - DNA, 701 bp, Homo sapiens
tcaatactacatagttattaggtgtggccagtagaagctctttcagcttggctcctatgtctcttcaacaggctccatccttttgtttttgttgaacagtttccgtacattcttgaactacatgatactcacttacacacatctaaaatgtttccctgcccctagtattagccattacttgagaggagccctgattccttttattgatgaatggtgtatagcaccaaggtctgggcattaatgtgttccttcaactaccctcaaagtttgttgaagcttcgagttagtgtatatcgagcacttcctaacacagagcctgacacatagtaatcactcaataaatgaaagaatccatcattgttattatttttatgcacatttgtaataaatttggaatttccagctgctaatccacaattgtatcctattactcactgcatcaagccctgacatgtccacagatctttctatatttctttctatatttctgaggctaaggaccacagaaggccaagaaatagacgctctccatcctctggaccggaagtctgcattctttcaccataaaacattttccctcctttccaagcatctatgcagaacaatgaaatcaaagagctttgtggaaaacatctcttgtgatcttttagtttttaagtttaaatgaaatgttttgaaaggcactaaaaaaaaaaaaaaaa

SEQ ID NO: 8005 - DNA, 751 bp, Homo sapiens; identical to SEQ ID NO: 2770

SEQ ID NO: 8006 - DNA, 751 bp, Homo sapiens; identical to SEQ ID NO: 2770

SEQ ID NO: 8007 - DNA, 101 bp, Homo sapiens
agaagatataaatggaaacacaaaagttaaaagcagagagatgaaatttattaattttctcttttcttgtttgattgattgtttatgcaatcatcattaag

SEQ ID NO: 8008 - DNA, 692 bp, Homo sapiens
aactccactgtggaaattgacagtacggtataagaccataacccaggtttctcaattgaaataactttgccacaaatttcatctcaacgtctgtaatatcatggttcccagcccttcatgctcattagtatcccctgggaagatttaaagctgtactgatgccctgaacccgtctcctgattctgatgtggttggtctagggtcagcctgggcatcaggagatttaaaagctcccagggaattgtatgtgcaggtactcagtgtttatccaaagacagaagacacagctattccagacacctgtttgaactgattgatggcaacccagcttcattagatgtctacctagtgttgaatctttgtagcatcccccacatttgttccgtgaaacagggacaataggagatcacagtcttacatagctctctgacccattaatcaacgggttgttcctctctggttctctctgtgggttctgattcatgctgcagtagagaaaaaagacaaacagcctagcccataaacgaccgctgctacgcgatctcctttgactacagtaaagggccagaaactgcctttgggagtgcagagacagtgtaggaacgatgctgccatctggctgccttcctgggcatctctttaaaaaaaaaaaaaaaaaaaaaaaaaaaaaaaaaaaaaaaaaaaaaaaaaaa

SEQ ID NO: 8009 - DNA, 702 bp, Homo sapiens
cctatcaatcaacctcagctttctatcatcttttgttgtgtaacaaattacctcaacatgtattggcttaaaataacaaccatgcatttagttcagaattctgtggatcagtaatttgggctgggatcagctgggtggttcttctgctggcctctactgagcccattcatgtagctacagttagctagcagtctgtagcctcatccacatgtctggcagatggctgagtatcagcaagggcaaaggaggtaactggatctcgggtctcatcatccagcaggctctctggggctcattcaaataaaggtaagtgcagatttccaacagcagaaagagggctagtcactgggcacaagtttgctgatgcccttctggccaaaaccagatatatagccaagtctaaattaatatggtgaatagactgtacttctggatgggaggggctccaaagtttcattataaaggtgtattcatatcaggatgggaagaatttgtggatattttttgcagtctacctcagaggtgagtgcttcttccagggctatctgtaccctatggtctaatcactcccctagaaagtaaatctcctctatgcatgtcaggaaagtcttccataactttcccagggcaccctgaagtcagtgccaaatggtgccatgatccccagcctagaagcctgcagagctagagacaaaaaaaaaa

SEQ ID NO: 8010 - DNA, 702 bp, Homo sapiens; identical to SEQ ID NO: 2775

SEQ ID NO: 8011 - DNA, 96 bp, Homo sapiens
ttggaagccactggcgggggagccttacacaggaaaggatgtgctgacttttttccttggtgcgacactgtgcattgcattatggacagcactttg

SEQ ID NO: 8012 - DNA, 644 bp, Homo sapiens
accacttggtactcaagggaaactacagccaaacgcagagcaagggctgtgttttggaaatttttagggaacaatcctccttttctcaggctcagcttacccagaagtgcatgtgccatcccctgaaacagcccacttgtcggcctctggtccctggcacttgtcctttgggatgaaagccacgtagattcctcttgcccagagtgggagtggggagcttgggaaagctcataaccctcatctcttgagccagaaatctaagctgcacatgggggcccagcactgaggtgagaggctgtagtgcctccctgggtcactggtctccagtggcctctgaccaggtgctgttctcagctcactggttttggtccatctcaaaggcagaagcgaatgcttcaagatttccttgcctgacatgttttctcctgacactaccaagttacttgaatcccatgggggtcccatgacattttctctttctggcctcttctcgtcacaaaaaactcagggatttggttctcatcaacataaaaaaaaaaatgccattatttcttttccttatacatattgattaaaacaatcttgggaaacattgaacaaaacaacacagctaaaatcagcctaacataaaaaaaaaaaaaaaa

SEQ ID NO: 8013 - DNA, 89 bp, Homo sapiens
ctgacattatccctagccaagcttcaaggcaaaaatcgttgtcacatcagtgactggtatatcttcatcagtgacgaggtatatctttc

SEQ ID NO: 8014 - DNA, 766 bp, Homo sapiens
taacaacgtgggaacccttttccaatttaattaccggctgttgagggcatgtaatccagctactcaggagctgaacagagatatcagcctaggaaattaagtgacttgctgtacgtgatatacagggtcagggctggaactggggttcctaactccaatttctaagcagtcataacgaagtgtaactacaaacttaccactggttatcttaaagaattttctccttagaagtattttgccagagtttaattttagactgcaagtgttattcacactgtcacgtttcaacaggtttgcaagttcttctgtgtggaaaacatacttttaccacagggaagagtcagatgttctttgcagagtctttgctgtgctttaattacctagaaattactccttggaagtttgtatatagctacattaccacattgaagatgcatatttaacatgcacaatcagctttgaggaaaaataataggggtgtgaattaccataccatccaacaattccacttccggtacatatcaaagagcgaaagcaggatctcaaagagatattggtacacccatgttcatagcagcattattcataaaagcccaaggggaagcaatgcaagtgtccattgatagatgaataaagaaaatgtgatatattatatatatcactgtgtgtgtgtatatatatttacatacacgtacatacatatatatatgcaatggaatattattcaaccttaaaaaaaaaaaaaaaaaaaaaaaaaaaaaaaaaa

SEQ ID NO: 8015 - DNA, 755 bp, Homo sapiens
atccttagagattaaatacttgaaattggaaatgattgagaattcttgcctaggaaaacaggtattttgaaatacgttatgaaaatatgtcactggagctttgttgggaaaaaggccttgcaaatgcgcactctatggacaccaaagccccttgggttaactaagaatgggcgtccaaatatggttataaatgtgataaaattaaagagatttaaagtcactaaagaagtgagatgagaagggaaaaaagaattttaagggaggaatttgtaaagaataattttaaaacatctcacagtttaaggaataagggcaagtaattcacaccaggccaatccttgttaaccacctaaaaggggcaatttttttaacttagaatattaaaaactaatagaagagattgaaaaaatataaatattacacagagaagacttaaaagttcaattctaggccaggaacggtggctcatgcctgtaatcccagcactttggaagaccaaggtgggtggatcacgaagtctggagttcgagaccgtcctggccaacatggtgaaaccctgtctctactaaaaatacaaaaaatgagccgggcatggtggcacatgcctatagtcccagctacttgggaggctgaggcagggaactgcttgaaccggggaggcggaggttgctgcagtgagccgatatcgcgccactgcactccagcccgggtgacattgcaagactccatctcggaaaaaaaaaaaaaaaaaaaaa

SEQ ID NO: 8016 - DNA, 76 bp, Homo sapiens; identical to SEQ ID NO: 2781

SEQ ID NO: 8017 - DNA, 479 bp, Homo sapiens
ggcttcaccttcaagctccacagagagtctcccatgctttcagccattgtgggtatggactggatgcagcgtaggagatctctgtggagcctgaggatgaggtcaacactgcaaaaggcagtaagagagagagagaaacagtgttggtgtcatgggttggcctgctggatcacatatcctgcctaaagcaggtagctctgacactttcagttctatgaaccaactaatggtctaggttaggatgcttgtcttttacaaaacagagattcccattggacataatggtctcaggcaaactatcacagtcctgcctctgtaaaatgaaggtggagataagaattctttcctcaaaagactgctgggaagattaaataaggcaatacatttgcaagtatctaataaactgggttcttaaaaatttgttgtatttgtatattttcctttttaagcaatagaaaggccatggaatttgaagtcgc

SEQ ID NO: 8018 - DNA, 719 bp, Homo sapiens
  misc_feature (75)..(75): n is a, c, g, or t
  misc_feature (160)..(160): n is a, c, g, or t
ggtgctaaagaggcaagaaatccctaggacacacagagccacagcaggccctgctgattatgagaactgaaattngtgataaaagtcgtttcacaaataaatacaaagaaaatataaggaccactcaataagtaatgtagaaataattaacagcaagttntaggaaaatccatttatacttcccaaattatgccacctaatgaaatacacttcaaaccaatcaaaaagttattttttcatcaaatgatataactaagatgaaagaaaaaatgagtatcagtggctccctaggaaaagcgttactttcaaaaattaggagtgatggaagaaatttcaattattaaaaaaaggtgtgtggtggcacacacctgtagtcccagttattcagtaacctgaggcaggaggttcacttgagcccagaagttctgggctatagtgtgctatgctaattaggtgtccacactaagttagacaccaatatagtgacctcatgtgagctggggaccaccaggttgcctaagaaggggtaaactggcccaagtcggaaacagagcatgtcaaaactcccttgctgatcagtagtgggaatgtgcctctgaatggccactgcactgcagccagaacaacgtggtgagaccctgtctctcattttaaaatttttaaaataaattttgacagctaaacttaaaagtaaatgttttctatacaaaaaaaaaaaa

SEQ ID NO: 8019 - DNA, 769 bp, Homo sapiens; identical to SEQ ID NO: 2784

SEQ ID NO: 8020 - DNA, 748 bp, Homo sapiens; identical to SEQ ID NO: 2785

SEQ ID NO: 8021 - DNA, 709 bp, Homo sapiens
catgagccccgttgtctggaattcgctgctgtgaaatcagatgtagagaggatgtgaacatccctctcgtgcgcctgagtcccaccacaatctcgcaccaatggtcaagctagcttctcatgttcccgagttgaaaacagatggtggctgacaccgttcgtcaagaatcctggaaacccaccagtctacccactgaggcacgaaaaaaaaaagggatccgaaaatgtggtgtagaaagataaatgactgaagtaggatgagcccaagagaagcctgtcctgctcagtgtgatggagcagtgttctctaagcgttctcacaagccagaaatttgggagcaggggcaggtgacttgcaaccccttacgtgagatgttgctgcagccaggagtctaggaccaaagagcattccgacccagcctgggcactgggaaactcttttgcccaaagactctggagatgagttagagcaatgcattccaaatttttatgcttgccttaaagcaacagaattccttccaggttcgtaaatggaagcttgagttgtgaaaactagatcatagaaaaagtgaagagaagaaaaggaaaatcaatgcaatatggcatacctacattttccttgagaaagcaaagcacaccacaaacccatgtccactcttaagcactgaagatcaagcaaggacattttccaggcttgttaggataagaaaa

SEQ ID NO: 8022 - DNA, 405 bp, Homo sapiens
gtgatactaaagagatattgtggtgataaatatatccaggtgtctcccccaaagaaccatgtattaaccacacttaaacttagagtttttctgaacctgatagttttcacctcatttataatccagtaggagagacctgtcctagatgttggggcagctctatgatttaagtctgtaacatgttataactgaatttagtaccctagttttgttaagctattaggattttctaatagaacttactccccctgcctccccagccttatgtttcttttaatgacttctggatcctgagctccctttgcagtctgaaaaaggtattgcagtcagaactgtgtactgatgataaaagcctctggtagcaataaaaagttgtccttaaaaaaaaaaaaaaaaaaaaaaaaa

SEQ ID NO: 8023 - DNA, 632 bp, Homo sapiens
ctgttcgggcacagtgataggaaaggccaccaagggaaaatgttggccatgttgttctctgagataggatgtaactctggtttcccttatatcttgaccgtgggaccagacacacagggcctaattaacatctctatatccagatttaatggtggggagccagcttggtaaatgggggcttccttgggggtcttcaatgcagttaattggggcaattctatgaaaggggaatatctggtgattttcagacccttaacccttagcatggaaatccaaattctgtggtgctttgaggcccacttttgtcatttaatagcttggagacatgagacaatctgggtggccactcaggcaaatcacctaaagcaactggatctccagttttcccttctatgaaaaccaggattggcatggggaccaaacagccaaagattgcaaaaatgctttcatatctgcagaacgttacagccacattactgatgggcattgtgcttatttttccttcagatgtctcaacactgcaaaatttcccatggagaaatttatttcaatttttatcaagttaaaaaataaaatacacactgtgaagcactttggggacagtgaaattgtaaagcaaaaaaaaaaaaaaa

SEQ ID NO: 8024 - DNA, 731 bp, Homo sapiens
gctggaaagatatgaactgattttttaattaccatgcttcacaatgtaagttatatgggggagcaacagcaaacaggtgctaatttgttttggatatagtataagcagtgtctgtgttttgaaagaatagaacacagttttgtagtgccactgttgttttgggggggcttttttcttttcggaaatctttaaaccttaagatactaaggacgttgttttggttgtactttggaattcttagtcacagaaatatattttgtttacaaaaatttctgtaaaacaggttataacagtgtttaaagtctcagtttcttgcttggggaacttgtgtccctaatgtgtttagattgctagattgctaaggagctgatactttgacagtgtttttagacctgtgttactaaaaaaaagatgaatgtcctgaaaagggtgttgggagggtggttcaacaaagaaacaaagatgttatggtgtttagatttatggttgttaaaaatgtcatctcaagtcaagtcactggtctgtttgcatttgatacatttttgtactaactagcattgtaaaattatttcatgattagaaattacctgtggatatttgtataaaagtgtgaaataaattttttataaaagtgttcattgtttcgtaacacagcattgtatatgtgaagcaaactctaaaattataaatgacaacctgaatatctatttcatcaaaaaaaaaaaaaaaaa

SEQ ID NO: 8025 - DNA, 655 bp, Homo sapiens; identical to SEQ ID NO: 2790

SEQ ID NO: 8026 - DNA, 117 bp, Homo sapiens
tgagaaggattatgaggaggttggtgtggattctgttgaaggagagggtgaggaagaaggagaggaatactaattatccattccttttggccctgcagcatgtcatgctcccagaat

SEQ ID NO: 8027 - DNA, 725 bp, Homo sapiens; identical to SEQ ID NO: 2792
  misc_feature (454)..(454): n is a, c, g, or t

SEQ ID NO: 8028 - DNA, 569 bp, Homo sapiens
tccagcggcgatattggtagattggcctgtaccttttagtatgacctacaatctcccgacactgacttcagtctacttacagtccctgccgtcaattagcctgctgctttttgcctatgtgttccagtttgacctgaagtcagagaagttaagttcagcctcatattctgtattcatgagatcacactgcctctctttctacagagccttacactctgcgaataaagcctctgtcttgtgttctgtgccatcagccatacccactgcagaaccatttcttatccttcttattcttcagatgccccttactggcccaaacaaagagaccaatgagaaggactatgtggcagtgttaatgagaaatcagaaaccagacattttgaggaaaagccacattgaccaagagttgtcaacaactttctcccagaggcagtgactttatttccaaagatcataatcactcaactttgaagtcttcaaagtctgttcttcctggtgagtgagtgtgtgtgtgtgtgtgtgtgtgtgtgtgtgtgtgagagagagagagagagagagaaaaaaaaaaa

SEQ ID NO: 8029 - DNA, 372 bp, Homo sapiens
tgctccacgctcactgtctcgccggcccaggcccaaaggaaatggctgtgagagcaagatgtaaagatagttacaaataccagctagggccagtgacagttgcagaaatgaggacttgtaatagttaggagtatttcttcattattttgagatgaatacatttggttatatgttaaccaatacttttcttgagaattctcgtcttccatcatcctcgctatcatattcattaataattaacttttagaaatctcaatatttaggttacaggatagcaaatatggaatgtgatctagctaaaaaaggagtgaacatcattcaaagacaaataaaagactttatcctgttggggaaaaaaaaaaaaaaaaaaaa

SEQ ID NO: 8030 - DNA, 310 bp, Homo sapiens
ataatcgtctctcgtctaggggagacattcaagcaagatttctaccagcccctttatcacagagtatgctattttttaaaacctgaggtccctcagctgtgatgcaaagtcattgcttgtgcactatccacctggtcttgttcttatggactaccatgccatgtggagaatagaggaaacttatgcaggcatggaactcaagattcctcctttgtgttgagtaacaaaatcctgtctttgactgaggcatcacatgccttctgctagcatctgtgaacttgtgacaggtttgcctattatcttgcaagtg

SEQ ID NO: 8031 - DNA, 728 bp, Homo sapiens; identical to SEQ ID NO: 2796

SEQ ID NO: 8032 - DNA, 697 bp, Homo sapiens
cattgcaactggctgtagtttcctttaaaatagtcatttaaatgtaattgccagataatcacagtatatcaatttctccttgacttgtaaaaccttgaattactagtgccatctgaatgattcttctgaagatagacagagtagtctctacttacctgtgagagaataaagctgcactagtccctcttattcatgtgggatatgttccaggctccccagtaaatgcccgaaatgattaatagtattaaacccaagtagactatgtttttccacctgataacttggaatactactaagtgactaacaggctggtgcatacactagacgaagggaggattcatgctctgggcgggatggagctgaatggcataggatttctatcaaagactactaagtgactaacaggcaggtagtataaactgtggatgcactagacaagaaagtattcaggctctggggagaatggggctgaatggcataggatttcatcacactacccagaacacctttttttattgctaagtattattccattatatcatgtatcacggtctgttaatccattcatgtgttgaagggcatttgcattgtttttggcatttgtgaatcatgctgttaagaaaaatattcatctgcagtttttatataaacacaaatttattcctcatggaaaaaaaaaaaaaaaaaaaaaaaaaaa

SEQ ID NO: 8033 - DNA, 456 bp, Homo sapiens
aaacttgtagtacagagatccagataagagttaaaaccttttatgacagggtgttgcagtaacaaaatcaagcacatccttgtctaatttcaataactaccagttctttattggtgaagaacatgaatccagatggcatggttgctctattggactaccgtgaggatggtgtgaccccatatatgattttctttaaggatggtttagaaatggatataatgttaacaaatgtggcaattattttggatctatcacctgtcatcataactggcttctgcttgtcatccacacaacaccaggacttaagacaaatgggactgatgtcatcttgagctcttcatttattttgactgtgatttatttggagtggaggcattgtttttaagaaagaacatgtcatgtaggttgtctaaaaataaaatgcatttaaactcaaaaaaaaaaaaaaaaaaaaaa

SEQ ID NO: 8034 - DNA, 456 bp, Homo sapiens; identical to SEQ ID NO: 8033

SEQ ID NO: 8035 - DNA, 738 bp, Homo sapiens
tctggacagcatagagacagtcccctcgatagagagctcacccgcatcaacaatctaagcctgcatctggctacctgggacgagtcctgtttacagtgcctattcctggagctcgcctctttttgccttttgtttgattatgtgatgtattacttttcccagcaggccagtgctagcatactggaagagggatttaataagctggcacccttgatgctatgctcctaatccaaccttatttgcctcattggccatttccattatggtggcagccctccattccagccacagcagcccctcagcgtcccccagtcacactgtccccattgctgctatctgtgcctttgtcagtctacaatgcccttatttcactctgcctgtgggagtcctgtgaatctctccaaagccaactcagttcatctttctgcttgaaaccttccctgaataggccaggtgcggtggctcacgcctgtaatcccagcactttgggaggccaaggcaggcggatcacaaggtcaggagatcgagaccatcctggctaacacagaccattctctactaaaaatgcaaaaaattagctgggtgtggtggcgggcgtgtgtcgtcccagctacttgtgaggctgaagcaggaaaatggcatgaacctgggaggtggagcatgcagccagccaagatcgggccgctgcactccagcctgggggacagagcaagactctgcctcaaaaaaaaaaaaaaa

SEQ ID NO: 8036 - DNA, 650 bp, Homo sapiens
caccattgtgtagttaattaaattctgggtggataggagcagactgattactatgtcttgcccttcgccctttgtttttttcagaaccatataacagaaatgtgtatgtgtgtactgtatctgccgtgtccaccacatttttatgacactgtattccatctgcctgcttgttttacggtcgtttccctaggatttgtcctacagcttagtattgtggttgacagcgatactagggctgacagcacagaagtcacaagagaagagtggaagggcaagaattcataagcatttgttcatacaatgtggcaacctcttttgcatagttgcgtaggatcctgtttgtaatgctatcataaatattctgtagtttgtttttttttctctcccaactggagctatgacactttttattggattcagtcttgtctcttgtctagaaagaactttatcttgttgacgcatgagctgtttaaaaattatcctattaaatgttggttaatagttgtgcagtttttcatttcagatggaaaggcaatgcaaattttgcctttgttttctgtcaccttccaacacctgagcacttctagtcagatacagattcatcagtgtatgcaacatcctttgtaatttaaaataaaaaaaaaaaaaaa

SEQ ID NO: 8037 - DNA, 677 bp, Homo sapiens
aaggggcacactaatgggtacagaaccgttcgtcgagaactcagtctgcgcgtacgtgtctgccaggattctgtaagagacagtgcggattgagagcgtccctcagtcaccctcttcgtgtagagatgcccggtggtcaaaagttgcaggtgctcaggcccagccctctgccacgacacacaccttttcccaactccctcggcttgtgcgccccaagcgccttgccccatctgtccttgggggttccacgtgtaagctttgagccctagcccgatgtctggcacttggatcgggggtgtagacacgctcctgcgacatcaggttctcagtcccaaggagaacgaaggttgaaggagtggaagaccaattgaacggaggggacaccccggaccttccggggcttcccgcccgcttcccggggcttgggcttccctgatacccagcggaaaagggagctggcgggatccccaaattcgaggctgagtttggggcacacagggaacccggccatgatgtagcgcggcaactgcagttcggtgaaggcgggcgggttgcgctccaccttgtacttaacatcgccgatctgcagcaccgcgccgtcttgccaggcatccacgttgagcacgtcctcagccactgcctcttcccggtagtacagcttcaccacgggctcgcag

SEQ ID NO: 8038 - DNA, 587 bp, Homo sapiens
ggaacatggagagcaggcaattcaaattttttcacatgctgcatgtccgcaaatggctgcaaaagcccagcaagtactgatactggagttagaaataaattttagcaagaggtaaattcacacatacggagtctgcaaaaaatgagaattgactattatgtgtgtgtatattatatatatgataaaaaactagaagacatgaataaaaattcccagataatgtttactttggtggtgagaagaggatggcaagtaaaataagtctatattgttatcagcaattatctagtttgaggttggacagtggtttcattcataggtattgattatattataaatagcccacctgaactcatgaccatagtgtggtgttattacttagcgttattctagacttattagccattgtatttaaacaagaggaaatagagaccattgaagataaagtggagccaggcacagtggctcatgcctgtaatcccagcactttggcaggctgagatgggttaatcaagaccagaagttcaagaccagcgtggccaacatggcgaaaccccgtctctactaaaaaaaaaacaaaaaaaaaa

SEQ ID NO: 8039 - DNA, 84 bp, Homo sapiens; identical to SEQ ID NO: 2804

SEQ ID NO: 8040 - DNA, 772 bp, Homo sapiens; identical to SEQ ID NO: 2805

SEQ ID NO: 8041 - DNA, 772 bp, Homo sapiens; identical to SEQ ID NO: 2805

SEQ ID NO: 8042 - DNA, 629 bp, Homo sapiens
gtaatctttctttgcctaattgcagaggcagcacgtatttaatactttcatgctaagccaatctttgcatagctaatgggtaaataaaaaagacacaataaatctgaatgataaaactgagcatttattctcattctccatagtattctaataaaatgtacgtacactgaaccagaacaacagcatctaataacataatctgttgttacagtttaacaaagttcatctgaagtctggaatgacgttaatgttcctgccttcaatcaatattttggttttcgaaactaatcaaatattttcatgtaagtattcattccagagaagaaagttagagagaggattgtgggtttagaagatggataacttcaaatcaaaattcaattacatataaatcatggcctgagctacaccaaatagctcaacatataagccgctatattaaaatattttttaaataattaggtaaaagaggttatttggcttagaaatcctttcagtgctatgtaggtaaagataaaattgaattccccttagaattatatctctaattaatatggtcctttaagccataaatattcttccccatccatagatagacataaccaactattatgaaaaaaaaaaaaaaa

SEQ ID NO: 8043 - DNA, 793 bp, Homo sapiens
atgaggttatgggacctgagctttaggcctggtatccccttctcccggcctcagcctgcttccttctgcccgctggcccacaaggtctccctctggttcccggtcccctctggtgtttggggatggagcggcagcaaggggtgtaatggggctgggttctgtcttctacaggccaccccgaggtcctcagtggttgcctggggagccggacggggctcctgaggggtacaggttgggtgggccactccctgagggtctggggtcaggctttggcctctgctgcctctcagtcaccaagtcacctccctctgaaaatccagtcccttctttggatgtccttgtgagtcactctgggcctggctgtcgtccctcctcagcttcttgttcctgggacaagggtcaagccaggatgggcccaggcctgggatcccccaccccaggacccccaggccccctcccctgctgctttgcggggggcagggcagaaatggactccttttgggtccccgaggtggggtcccctcccagccctgcatcctccgtgccgtagacctgctccccagaggaggggccttgacccacaggacgtgtggtggcgcctggcactcagggacccccagctgccccagccctggtctctggcgcatctcttccctcttgtcccgaagatctgcgcctctagtgccttttgaggggttcccatcatccctccctgatattgtattgaaaatattatgcacactgttcatgcttctactaatcaataaacgctttatttaaaaaaaaaaaaaaa

SEQ ID NO: 8044 - DNA, 504 bp, Homo sapiens
tgggggtctcgctggacgttggaggaaagaaggaatatctcattgcaggaaaggccgagggggacggcaagatgcacatcaccctctgtgacttcatcgtgccctgggacaccctgagcaccacccagaagaagagcctgaaccacaggtaccagatgggctgcgagtgcaagatcacgcgctgccccatgatcccgtgctacatctcctccccggacgagtgcctctggatggactgggtcacagagaagaacatcaacgggcaccaggccaagttcttcgcctgcatcaagagaagtgacggctcctgtgcgtggtaccgcggcgcggcgccccccaagcaggagtttctcgacatcgaggacccataagcaggcctccaacgcccctgtggccaactgcaaaaaaagcctccaagggtttcgactggtccagctctgacatcccttcctggaaacagcatgaataaaacactcatcccatgggtccaaaaaaaaaaaaaaa

SEQ ID NO: 8045 - DNA, 717 bp, Homo sapiens; identical to SEQ ID NO: 2810

SEQ ID NO: 8046 - DNA, 752 bp, Homo sapiens; identical to SEQ ID NO: 2811
  misc_feature (100)..(104): n is a, c, g, or t

SEQ ID NO: 8047 - DNA, 733 bp, Homo sapiens
gacagggcagttttacaaaccctatgcccagaatcattaatatttgagaaaattgtagaaatatagacctgtgaaaagacgtcaatatctgctcacatcttactaaacaccagagagttcatgcttaataaaagcatgataagtgcaattactgccaaagatctttcagaaaatattatcctttaaagtgaaggagagtatttatattaaagatgaacattacaaccataaagagggttgaagtacctttacttgtatcagatcttattgtccacattttgtactacagaaaaactctgaagaggtcactcaaactttgttcaacatcagggaatttatattggagagctgtcttgcaaatgtaataaatttgggaaaacaaattttcaaaaactacagcttagaaaacaccagagtttatacgaaaatatattttcaaaggtgtagtaaaaaaaaaaaattttaatccaaatttgtctatgtaaataccagaatttatagtagaaatatatgaggaagcgacacttcgaatattctactaaatgagagttctgagtatagaaaataaaactaaagttggtagaaaaattatttgtatataatgttaagaggagtaaaagattttttgtagaataataactatattcagattatactttgtttcttgaaaaaattacagattttttgaaaagccaaaaaaaaaaaaaaaaaaaaaaaaaaaaaaaaaaaaaaa

SEQ ID NO: 8048 - DNA, 766 bp, Homo sapiens
atagagccctatcctctttctcagaaacctaagaagtaagtgtaacttttaaagtaagtatatatcagtgagagtaggcttgttttacactatttctagccagtgaattgtgttttcatgtctcatcaaagacaataccacttgcatcattttacaaatatgttgtcattttcatttcagttgtaacataggaaaatagatatttcctagatgatttctgagtttcttactgcacaagaacagttataaattggtatacatgtgtctctgtaatagggataatattgatatatctgttgctacatatttaagaatcattctatcttatgttgtcttgaggccaagatttaccacgtttgcccagtgtattgaattggtggtagaaggtagttccatgttccatttgtagatctttaagattttatctttgataactttaatagaatgtggctcagttctggtccttcaagcctgtatggtttggattttcagtaggggacagttgatgtggagtcaatctctttggtacacaggaagctttataaaatttcattcacgaatctcttattttgggaagctgttttgcatatgagaagaacactgttgaaataaggaactaaagctttatatattgatcaaggtgattctgaaagttttaatttttaatgttgtaatgttatgttattgttaattgtactttattatgtattcaatagaaaatcatgatttattaataaaagcttaaattctcatctaaaaaaaaaaa

SEQ ID NO: 8049 - DNA, 749 bp, Homo sapiens
cagtttacatgatagacttggtcccagatgacaagtcatctttcagtatctcctctgtcacttcaaaactccagcttgcccaataaggatttagaaccagagtgactgatatatatatatattttaattcagagttacatacatacagctaccattttatatgaaaaaagaaaaacatttcttcctggaactcactttttatataatgttttatatatattttttttcctttcaaatcagacgatgagactagaaggagaaatactttctgtcttattaaaattaataaattattggtctttacaagacttggatacattacagcagacatggaaatataattttaaaaaatttctctccaacctccttcaaattcagtcaccactgttatattaccttctccaggaaccctccagtggggaaggctgcgatattagatttccttgtatgcaaagtttttgttgaaagctgtgctcagaggaggtgagaggagaggaaggagaaaactgcatcataactttacagaattgaatctagagtcttccccgaaaagcccagaaacttctctgcagtatctggcttgtccatctggtctaaggtggctgcttcttccccagccatgagtcagtttgtgcccatgaataatacacgacctgttatttccatgactgctttactgtatttttaaggtcaatatactgtacatttgataataaaataatattctcccaaaaaaaaaaaaaaaaaaa

SEQ ID NO: 8050 - DNA, 767 bp, Homo sapiens; identical to SEQ ID NO: 2815

SEQ ID NO: 8051 - DNA, 625 bp, Homo sapiens
gaacgtggtgaggcatatgctagtcgatagagcggctttagtatagtattgagtacatgtgtttgtctggtcagatctagttttatgcaggctgtttgtggcagatgtgtttattactgatttgaccttacctactatttggtttcttgctagccaaatcattgtacaggagtttcatatatgataaaaagtgttttgttgattgtttgtgctttcttggcaggggagaacccctaccattgtgagcagttactgtcactctggctgaatggacaaatagctgtgtaaatagcttctcataaaacgcttctactgatagctgtttgactttttcttcccgttatgaatgggaggaacatttgtaaacttcctttctgggtagctaccaagaaaacgtactggcttatggtcccatgtgaccttgtctccgttaagcccagaatctgagtgcctttagcaagtgttagcatttcacagagagaagagagacagaattattgctattaatcaccattcataaataggagcttggaataacaaaggtctgtgtgaattctgttctacgtcttttttttcccttttttaaataaatgtcgatttgatatcaagtaaaaaaaaaaaaaaa

SEQ ID NO: 8052 - DNA, 642 bp, Homo sapiens
gttattatttcctcatatgtgtaaggtgaaatttatggtatttgagtgtgcaagaaaatatatttttaaagctttcatttttcccccagtgaatgatttagaattttttatgtaaatatacagaatgttttttcttacttttataaggaagcagctgtctaaaatgcagtggggtttgttttgcaatgttttaaacagagttttagtattgctattaaaagaagttactttgcttttaaagaaacttggctgcttaaaataagcaaaaattggatgcataaagtaatatttacagatgtggggagatgtaataaaacaatattaacttggtttcttgtttttgctgtatttagagattaaataattctaagatgatcactttgcaaaattatgcttatggctggcatggaaatagaaatactcaattatgtctttgttgtattaatggggaatattttggacaatgtttcattatcaaattgtcgacatcattaatatatattgtaatgttgggaagagatcactattttgaagcacagctttacagatgagtatctatgatacatatgtataataaattttgattgggtattaaaagtattagaaggtggttataaaaaaaaaaaaaaaaaaaaaaaaaaa

SEQ ID NO: 8053 - DNA, 731 bp, Homo sapiens; identical to SEQ ID NO: 2818

SEQ ID NO: 8054 - DNA, 758 bp, Homo sapiens; identical to SEQ ID NO: 2819

SEQ ID NO: 8055 - DNA, 749 bp, Homo sapiens
aagacccagggtgatgacctgtggacctgcccagtccgccactcacggacaagagctggagacgttccgggaggagctcaagcaacttcgaagccaaaatcgagaagcacaaccactaccagaagcagctggagattgcgcacgagaagctgagcacgcagagagcatgggcgacggcgagcgtgtgagccgcaccgcgagaagcacgccctgctggaggggcggaccaaggagctgggctacacggtgaagaagcatctgcaggacctgtccggcaggatctccagagctcggcacaacgaactctgaaggcactggggggcccagcccggcagggaagaggccagcgtgaaggacctgggctcttggccgtggcatttccgtggacagcccgccgtcagggtggctggggctggcacgggtgtcgaggcaggaaggattgtttctggtgactgcagccgctgccgtcgcgacacagggcttggtggtggtagcatttgggtctgagatcggcccagctctgactgaaggggcttggcttccactcagcatcagcgtggcagtcaccaccccagtgaggacctcgatgtccagctgctgtcaggtctgatagtcctctgctaaaacaacacgatttacataaaaaatcttacacatctgccaccggaaataccatgcacagagtccttaaaaaatagagtgcagtatttaaaccaaaaaaaaaaaaaaaagggcggcaaaaaaaaaaa

SEQ ID NO: 8056 - DNA, 749 bp, Homo sapiens; identical to SEQ ID NO: 8055

SEQ ID NO: 8057 - DNA, 697 bp, Homo sapiens
cagcgttgaggagcgatctcagcagccctataaagagttcagcattggagagccccctgctaatggagtacagccgtccaggagctactcaggaaggtacgtctggtcctaaccagtgagcactggttagtactggtccccttctgggcaacatggccctaccagacactgctgctgccccgtcggcatgtgcggcggctacctgagctgacccctgctgagcgtgatgatctagcctccatcatgaagaagctcttgaccaagtatgacaacctctttgagacgtcctttccctactccatgggctggcatggggctcccacaggatcagaggctggggccaactggaaccattggcagctgcacgctcattactaccctccgctcctgcgctctgccactgtccggaaattcatggttggctacgaaatgcttgctcaggctcagagggacctcacccctgagcaggctgcagagagactaagggcacttcctgaggttcattaccaccctggggcagaaggacagggagacagcaaccatcgcctgaccacgccgaccacagggccttgaatccttttttgttttcaacagtcttgctgaattaagcagaaagggccttgaatcctggcctggaatttgggcagatatagcattaataaaactgtgcatctcaaactttaaaaaaaaaaaaaaa

SEQ ID NO: 8058 - DNA, 697 bp, Homo sapiens; identical to SEQ ID NO: 8057

SEQ ID NO: 8059 - DNA, 80 bp, Homo sapiens; identical to SEQ ID NO: 2824

SEQ ID NO: 8060 - DNA, 662 bp, Homo sapiens
aacgcaggctggtaccggtccgggattgcccgggatctcacgcctgtaatcccactgagtcggttgatcacctgagttgggattttgagaccagcctgaccatatggagaaccccgtctcgtactggatatacgttaattatccgggcatggtggtgcatgcctgtaatcccagtctactccggaggctgaggcaggagaatcacttgaacccgggaggcagaggttgccgtgagccgagatcatgccactgcactccagcctgagagacagagcaagactccgtctcagaggaaaaaaaaaaatatatatatatatatatataaaaatatatatatatataaaaatatatatataaatatatacacacacacacatacacacacatacttatattccaggcatggtggctcacacctataaatcccagcactttgggaggccaaggcaggattacttgagccgaggagttcaaaccagcttgggcaacatagtgagacccccctctctgcaaaaaaatttaaaattttcctgggtgtggtagcacattcctatatttccagctactcaggaggccaagataggaggatggcttgagcccaagagtttgagaccagcctgagcaacatagtgagaccccgtctctaccaaaaaaaaaaaaaa

SEQ ID NO: 8061 - DNA, 758 bp, Homo sapiens
  misc_feature (117)..(117): n is a, c, g, or t
atgccaaagtgtgtaaaccaaatactcgagaataataactgaagcagtttttgccctatttagtcaacaaactgttcagaaacaccatctcctcgtacatagacacagaaatcatgncatagtttctactctttaactccaagtattgctcagcttataacagatgtattatgaaacatggcaagaagcactgcaacaagaagagggtgaaaaaatttggtacttgatcatttgatatattcagacccaaaactatcaaacagggttcccaccaccagattgatccccacccaatccccacacccaagatttcaaagacaaatgtttaaaacatacaatagaacaggcactagaagaaggaagaaaaaagaaaatctttacaattataatttattggaaaaaatagattgatttttctggtacgtaagtaaattgcaaaatcaaaatatttgtctgttccttaccttgacaatattcaaagttcccttttttccggcagtcacctattactaaactcagtgctctccaagtgtttcttttgacagatatcattctccaccaatcgctctgctaatttcctctctccttttctgactgggacagagattatgttcaccagcccagagatcaatcttttctattgacaacaacaaagggaaaaaaaatgcatatatcacaaccagtctgaagtatcatacccatctgtttacatgataacactaggccagttttgttatgttttgtttaaaaaaaaaaaa

SEQ ID NO: 8062 - DNA, 767 bp, Homo sapiens; identical to SEQ ID NO: 2827
  misc_feature (141)..(141): n is a, c, g, or t
  misc_feature (178)..(179): n is a, c, g, or t

SEQ ID NO: 8063 - DNA, 687 bp, Homo sapiens
ataaagtcaaggctctacttatccgaaccaatttaggggttccctctaaggcatcgccacccaccctcacccgcacgtcactgagaattctggcgcagatacaaacagtgaaagaatgaatcggtaagtgggacttttctgtgttacataggattataatatcctcactggccacaatctgtaaaagtcgatactggcacttttttttgccccctcaaaggaaatatgctaatagacagcccctttgcaaatataattcctccttcccaacccttcaaattgctaaggccccactggtcagcaccttccctttcgagtccaggactactgttctgtcccccacatgcttgcttcctcccggacgtcctgaacactgcagctagctttctggacggcagacgagttgggagtttctggagcttggaattggggcgggggaggaggtccaagaagtcaagctccggagaggagcttcaggggaagtgcccagagtcgtggccggggaaccggctacaccaagttgacttggaaaaagttttgggaagtatccccaaccatcccttctatctgtcccaagccacaggtgcccggcgcggggtcgaggcgagcacgggagtgggacgcgggctctcccgcagccaacggcggggggcgcgagggctaaaagagcggcccaagcagcagcag

SEQ ID NO: 8064 - DNA, 711 bp, Homo sapiens
tctgttccaatttaaagtaaagaaactaattagtcgtattctgctactcgaacagatgagctattttggataacaagcatacccagtgttctgctagtaaaaccagctctttgtgtgggaagggaccaatgaaaaaattcccgatttgtagcactttgttgacttccatggtgtgaatactcccacatggctgatttcaggcttatagttggctcatacacttcctgcatatttaataattggccctcaccagactgtaggagctagctcccatgcactattgactgtacccttcatagcggggcaccatgttgcccttttaatagtcattttttaaatgggggttaataaactacttttgtgttcttatagtttttttaggtaattatagaagtgatgaatatatctggctgggcgcacgtggctcacatctgtaatcctagtactttggaagccgaggcgggtggatcacttgaggtcacggagttcgagaccacgcctggccaacatggtgaaacctcatctctactaaaaatacaaaaattagccacggcgtcatggtgcgtgcctgtaatcccagctacttgggaggtggaggcaggaaaatcactcgaatccgggagacagaggttgcagtgagctgagattgcactccagcctgggcgacagagggagactccgtcttaaaaaaaaaaaaaaaaaaaaaaaaaa

SEQ ID NO: 8065 - DNA, 699 bp, Homo sapiens
  misc_feature (147)..(147): n is a, c, g, or t
  misc_feature (648)..(648): n is a, c, g, or t
aaaatgaatctactggctaccacaaaattaacaactctgtacaagacacatccatgaaacaactaataagcctgctttgaaaaacttttaaaaccacccaaatgaatggaaatataggatcagaaaacaatattctcaagatgccancaaattgatcgatattagtaattccccaagaattctagcaatcttttcatagtaattaaaggcttattacaaatatatacggacgtgaaaagaacctagaatagccagaaaaactttgaaaaaaagaccaaaagttaaagggcatccattgatttcaagactgattataaagctacagtaatcaagagaatattggcataaggacagataatcaaaggaataggatatacactccagaaagagaaatgtattcatatgaatatgataaacttatttctaaaggtaccaagataattgaatgaggaaaagacagtcttttcaataaatgttgctaaaacaatctgatatctattttacaaacaaatgaactttgaaacttcactcatgccatatacaaacttaaaatcaaaatggatcatatgcctaaatccaagagctaaaaattagaaagcgcgcagaacaaggacaaaacctttgtgaccttgttaaggtaagtttttnaagaacataatgcatataaactgtaaaagaaaacttgataaactggatttc

SEQ ID NO: 8066 - DNA, 697 bp, Homo sapiens; identical to SEQ ID NO: 2831

SEQ ID NO: 8067 - DNA, 123 bp, Homo sapiens
caacttcacaaattatgaagaaaccacccttttacaaaaagttagaatattaaaataattatttcaattttaaatggcagtaaactatggcatccactcaaattatcacaaaaaaaaaaaaaa

SEQ ID NO: 8068 - DNA, 678 bp, Homo sapiens
tctaaccgggtgccctcctcttgcctttccgtgttgctcgtggttcctctcctaagcgtgtcaagtctcccatgcccatgcagatggcagctcaagtgtctatacaggaggcttggctgtttgggacctgaagggcgtggtgacttggcatatccaaagactgagatcagagtatgtctgtgtctttgtttgcatcctcggaggacatatttcggcttcagcacaggacctctcagactattcagggcctagtattctcttcgggcaaagacagtcagcccctgaccagggccacctgcatgctgctcatcacagtgtaactcccttgtcgccgagtctttgacccaggtggatactggccagaatgctaagcaaccgccaagaccttgcatgagttgccatgagagtgcgaggctgggctgtctcctcccaccaccagttgcttaagcctaggttggcccttcgtccctcgaaaatgggaatctctgcagaaattctctcttttagctccttgcgtccctcctcacacagcccccgcctcctttcatctcaccggtggctaagcgggggcgtgggtgtgcgcacccagggagagttgccctcgcagcggcgggggccagagcgctccgccagagccccaaactcttaacaagttcctggactccgcgcgcgcggagc

SEQ ID NO: 8069 - DNA, 712 bp, Homo sapiens
aacacagtggcctacacagacagaaatgtatttctaagtaagtctggctagtctaggatggtgggccttctctgctcaacaaggtcattcagggacacaggtttcttctatcttgttgctctgccttttcctggggcatttcctagactgtacggtcaaaactgagttgctagcatgtctgtgttctgtcttgcagaaagaggagaaaagagggagtccagtgcaaacaatttccttttaaccaagtgagacagaaattggacacatcctttatgctcttattccattgatgagaacttaatagcgtgtcgacgctggctgctagggaagctttgaaatgtttccagctgacaagctatgtgtgtagtaagaaggggagaaagaaatttggggggattcctagcaactatataacctccctcatactgaattttctgtatcgtaaaaccagtctgttttatgttttcaaattcaaattcaaatcagtcctgaagttgcaacaaaacccaacaggttcaaacacagccaaagccatgccataaccattacttactgcaagcagctaaagaattccttggtgccgggtgcagtggctcatgcctgtaatcccagcacgttgggaggctgaggcaggcggatcacttgaggtcaggagttcgagaccagcctggccaacatggtgaaacctcatctctactaaaaaaaaaaaaaa

SEQ ID NO: 8070 - DNA, 632 bp, Homo sapiens
ccagagtttactgagctcattatgatgttcctatccccctgctaatgctttttatccttatctcatttaaatcccctttacacccctataagtagttatcacatgaacatgtatttattatactaatgaagccactgacatgacacctgtgttatgcagcccccgaattcacaaactaggtatgtgtgaaagttgagacttctacaggcaacacttcaatgctcatagaaacactcatagccaattggtttagctgcttcttttggattgtaatccagacactctgaagctcagaattataatttgagttttgtcaaaggtttaattagcagtagtcctgccctttgtatgccacatttaaatagtgctactagagttccttaagggcagtcatttttattaggattatttgtcttgacccccaaatcaagacagtaatctgtccttttctggtgcagaaacattataaaagatgctattagaatttctgtatgtgtgtgtgtttcttaaactttgtgaagaccaatattttaagacaggaataaaatatgacagattcaacacagctgcttatcttggctcctctaagaaactcccctaaatggcaaaaagtaaattaatttttaaataca

SEQ ID NO: 8071 - DNA, 729 bp, Homo sapiens; identical to SEQ ID NO: 2836
  misc_feature (233)..(233): n is a, c, g, or t

SEQ ID NO: 8072 - DNA, 631 bp, Homo sapiens
tagggcagcagcatcagagtcttctcctcattcatatttagctcaggctttcaccaacacttcaaatattaaaaattaaccccctaaaccacactgcggtcacattgtcacatcattttagtttatatatttattgtccttagaggacattttctcatgcatcttcctaacccaagcatatctttacttgtaacatttgtgtgatggcttgactcaagtccacgtttcctgaggagctttgataagcacttctagaacatggtgatttctatttttcttattctctaattatacattgtcttaaattatgtggtatcggccaggcgcggtggcttatgcctgtaatcccggcactttgggaggccaaggcaggcagattacctgaggtcaggagttcaagaccagcctggccaacatgttgaaaccctgtctctactaaaaataaaaaattagctgggtgtagtggcacatgcctgtagtcctggctacttgggaggctgaagcgggagaattgcttgaacccaggaggcagagattgcagcgagccgagattacaccactgcactccagcctggcgacacagtgagactctgtctcccaaaaaaaaaaaaaaaaaaaaaaaaaaaaaaaa

SEQ ID NO: 8073 - DNA, 679 bp, Homo sapiens; identical to SEQ ID NO: 2838

SEQ ID NO: 8074 - DNA, 753 bp, Homo sapiens
  misc_feature (519)..(519): n is a, c, g, or t
tatctctatctcaattcagtggcccacttatgacaccattttctgtgtgatccagcgatagatgttccaaaatgagaacattatgtgtacacgagcccaacgatgccaagaaaccagaaaagggagcccaggaaattcaggaatatattctacttttccatgcaagaagataaatatagatgataaggatggggataaagagaagcctggaatagaacagaattcaaaatcacaactcaagcagcattttagattgaaccagaaggaatttagccctactacattttaagtttttaatcagacaggaaaatttaacgggaaatgtaatggcatgctacacctggcaacgctggccagtaaccaaacatcctggaagtatgtttatggaggttgctgtgtcttgaacaaagctgagagcatcttgccctttaatcagcataggcactaaccagagaaggcttcctacatgcaatttgcatagaaatcaaatgggaaaactagtcccaccagcttcttaanctgtgaaataccaggataattccaataatgtcttgcatttgtacagaatttgacaagttttgtaatcgtttccaagcattatcgtatctgagcctcccaacatccgttggggtaggagtgatctcagttttgttgaatatcttcaggactttatgctgatatgttttagggaagagatattggcttcattgtctcagttgatggcattttcacgccccaaaaaaaaaaaaaaaa

SEQ ID NO: 8075 - DNA, 101 bp, Homo sapiens
tgaacatgggaggtggaggttgcagtgagctgagatcgcaccactgcactccagcctgggtgatgagcaagacctgtctcaaaaacaaaaaaaaaaaaaaa

SEQ ID NO: 8076 - DNA, 683 bp, Homo sapiens
tgtcttcctgtcatgtgatgccagggaatgttcttcttccactccctggtacagtccttgctgagctcttagaatttcatcctatgacattggcttagggacttgggagaatccttaggctgattcttggttcctttttctgtaaacgttctcttctactacacattccagctgcttaacctttttgatttttatgtggttcctcagtgcaatgacaatgtctgctctctctgggattcctctctactgctgtcacggagaatctgggaataaagcaggactcattctggctccttctcttctcttgccgagcacagtcctgtgctgcctgatgttcagtacttcaaaaaattgtttcatatattttgtccagtttactattctttaactctaaaagtgtaactccagtcccagttacagcatcatgttctgtaactctactccttgttgcttcattctgccattgtctggtatgatctcccctttcccttctgtaatcaggccaagggcataatataatactagttataactgcacaggttgcctccgttgtgtaaaaaaatcactgagacttaaccgtgtccaacttttaatataagtacaactaaagctatattttggttaatatttgcattgcatgcttttccattaattactttcaacatatttaaaatatgaataca

SEQ ID NO: 8077 - DNA, 699 bp, Homo sapiens
gtaagaaaaaattaataagcatcctattacagaactccatgtttttaagtggtattttttaaaggataggtcttgctctgttgccccagtccggagtcagtggttacagtgagtgcacagctcattgtacagcctcaaaccaccaacccagctaattctgaaatattttaatagagatgagggctcactatgttgcacaggctggtcttgaactcctggcctcaagcaatcctcccaccttggcctcccaaagagctgggattacagggatgagacactatgctctgcctgaactcccttttagacagagcttaagcaccttctaattgatgcactgctccttcagtaatacagaaagtattaattcttttcatgatttactttcgtttatcatgctttccattatatactgcttcttgaactcttagaacttagcacagattatataccagggttaagtcacaaaacagtgcaactgcaaatacaaaggagtgttcctaacagctttatacataataaccaaactggaaacaatccagatgtccattcgataggcgtatggataaaccatgatgcatctatacaatggaacatgacttgcaataaaaaggaacaaactgccaatacacgaatgacatgaatgaacctcaaaaacattatgctgggtgaagaagcctgacacagaagagaactgttagt

SEQ ID NO: 8078 - DNA, 704 bp, Homo sapiens; identical to SEQ ID NO: 2843

SEQ ID NO: 8079 - DNA, 704 bp, Homo sapiens; identical to SEQ ID NO: 2843

SEQ ID NO: 8080 - DNA, 700 bp, Homo sapiens
acagagctcaaaacagcctggccaaacatggtgaaactccacctctactaaaataccaaaagtcagccaggcatgtagcaggcacctgtaatctcagctactcaggaggctgaggcaggagaatcacttgaatccaggaggcagaagttgcagtgagccgagattgtgccactgcactccagcctgggcaacagagcgagactctgtctcaaaaaaaaatacatatatatatatatatatatatataaatgaatcttttatccagttattaatggaaatatcatgattaaaagtataattttcctgcatgaaaagtttaatagatgggattaacagcagtgtggagactgcagaggaaaagtttagagtacttgaatacaggtgggggaaacctatccaattgtaaaaacagaaattgaaaggattggaaaaaagaacaaagcatcagttctaaacaatagaaatggtttaacatatgtgcaattgaagttccagagggggaaagagaaaaaaaaaatggaacagcaaaaaaatagggaaattgcagttgaaattttaccaaatttaatgaagaacctacaaatgaagtgagtcaagatctcaaaagtctacagatcccaaaagcttggtaagcccaagagaaccacccctaagcatgttacaagcaaacaacaaaaaaaaaaaaaaaaaaaaaaaaaaa

SEQ ID NO: 8081 - DNA, 721 bp, Homo sapiens; identical to SEQ ID NO: 2846

SEQ ID NO: 8082 - DNA, 712 bp, Homo sapiens
ccgggggaggactccaaaatggtagaaaagtctttcctacagaagaaacagagcgcaaatgtcctcagattggggaaaatttagaatattttaaaaactgatagaaggctagtgtgactacagccaaatgacagaggatgcagagaaactttaggttcattgagaaagggtcccagtgccagagttagcagtcttttagacaatggtaagaagttttaattttgagtattgattaatagattgttgttatgcaaagaaaaagatactatatgaaggatggcaggagtgagggaatgttaatctagtttctttagtgaaaaaaaaatcattctctaaaattccactgttttatctaattattgctagagatctttatgattagaaataatctgtaggttgggcacagtggctcaagcctgtaatcccggcactttgggaggcctaggtgggtggatcgctggaggtcaggagtttgagaccagcctagccaacatggtgaaactccatctctactgaaaatacggaaactagcctagtgtggtggcgcgtgcctgtaaccagctactcaggaggctgaggcgggagaatcacttgaacctgggtggcggaggttgcattgtgtgaagattgcagccactgcacttccagccaggcttaaaaaaaaaaaaaaaaaaaaaaaaaaaaaaaaaaaaaaaaaaaaaaaaaaaaaaaa

SEQ ID NO: 8083 - DNA, 704 bp, Homo sapiens
  misc_feature (132)..(132): n is a, c, g, or t
gcatcagaaagggacaggaaccaaacatcacgggatgtgacacagactgacaatcaagaaagttacagcaggatgggaaagcgggcagagaaagggggaagaaaggagaaaggagagttacaaagttgccanactccaccattacccctcctaagagaggctggagagaaagccacaaacattaagaagtgccggtcctgaataagggaggtggtgtttgagcttgaaggaggaggaggtcaagaaaggggggccacctctctctttgtagaatgagacccccctccagctcaggggcagcagcttcacagaccgtagacactttcgtcactgtaggcaatgtagagaaagaagtcttcttcatggtgttcctggtacagctgacccattgtggcactggtgggtggaatgacattgttgacaaagaaaaacaaggcatcctcagctcggagatgaattcgcttccggatcaagaagtagaactgaccaactgtgagatcagaaggcaccaggtatttctttttgtccaggtctcctatccgagctttgggagccttttctactatcaccggcacccggtccgggtatttctttcggatcttctcgccctcagagcggcgcttctcgaacggatgctcttctttgtacacgaacttcatcctcccgggaaccgggctggacagggctgggctaaaaaaaaaaaa

SEQ ID NO: 8084 - DNA, 781 bp, Homo sapiens
attctcactttccctcgtcgttcccatctttaactcctctcattcctcacgtcactgagaacccagggaagaacctctcagaaatcccactggatgccacttggaaggtgactgggcatcagccctccaaacagctcagtagtcagaggacccaaggtcaccctgggagacccaggttagagcttagtggaggctgggatccagctacaggatgtggggtatgaggtggggctgggggctggagtcagccatgaggtcaggaacaacagcaatcctaatgtctgatgctcattgagcattcactgtgttccaggtcttcttctaagctttttatgtgccctccctcagtcctctcatcagacctgcgtggataggtactattatctccgttataccaatgcggaaaccaaggcccagagaggtgagtaacttgctcagttacaagactgattagtgatagagccagggtctgaaatccaggcctgcagggacttgagcctctgttctgaagagccgtgcaattctgccatgaggcctccatatgtggacacttcacaatacgctgagaagtgataaaagcaggctacaaaaaggaatgatcagtgcaatccccaatcgagagaaaaattcatgcctgcccatgtgcatgtatatatatatatatatgaaaattaataggctatatttatatgcatttgttttataagcagaaattccctactgttatttataaagtttcacaaagggagtttcttaaatctgaacagcacaaaaaaaaaaa

SEQ ID NO: 8085 - DNA, 735 bp, Homo sapiens
aatctcgccaggtcccaaacgattcttcctgcctcagcctcccgattacccgggattacaggcgtgcgcaaccacgactggctaatttttttgtatttttagtggagagggggttttgtcatgttggccaggctggtcttgaacatctgacctcaggtgatccatgggctttggcctcccatgttttgttgtttttttttttttttgacagtcttgctctgtcccccaggctggagtgcagtggtgtgatttcagctcactgcaacttctgcctatcaggttcaagcgattctcctgcctcagcctcctgagtagctggaattacaggcatgtgccaccatgcctggctaatttttgtatttttagtagagacagagtttcaccatgttggccaggctgctcttgaacgcctgacctcaagtgatccacgggcctcagcctcccagaatgctgggattacaggtgtgaaccaccacacccagccagaattttgacttctaggaatctaccctgcagatattctaatatataacactggaaggatttaaaaaaaaaccttaacattaatgcctacctaagtgggatagaggatgaggtggaaaggactcagtgtcctctctgagtatatctttttatatttttttcatttttgaaccatgtaaatgttttccatattcaaaaattgaaacagaaaaagacaagcctgaaaaaaaaaaaaaaaaaaaaaaaaaaaaa

SEQ ID NO: 8086 - DNA, 702 bp, Homo sapiens
gcttccttccttgtattttttctcttttactaaacaatgcctgttacaaattgattactcaatgaagatttgacaagtaacttgctaaatcagttattaattttcttcttttactaattttcctttctccaggttaaattaactttagatcttcccgtggggtaagccaggcagaaattaccatctctatttttatagaattcagtaaaaacaagaaacatttctgtttctggctatgatattattgctggtattagctaaaaccttccaccaggaaatttatgaattaggtgtagggcttgggggagagaagcaaagtggttatttgaaagcattagaaagaaactaaagcaaccagacattaaggtccaagatcctgaagacaagtgaattgcattgaactgagcttggcatttatggctgctttttcccctcaggtccttgactgattcacatatcatggcagcaaagccaaacagaaagtggcagcctagagcctttggcagactcaccaggggtagggagacaaaacttggagttcagagctatcaagacagacatcatttgaggaagaaagatcccaaagaaaaggaaaccacagagaggtgaacctgaatggttgttgcacaatttctcctagagacattgtttactccaaagcaatgcatgtggcaggcagtactctcagaaaaaaaaaaaaaa

SEQ ID NO: 8087 - DNA, 716 bp, Homo sapiens
aaatttagataattaaataaataaaactcagtatttaggcatactagagacatttcaagtgctcagtgatcacatggaactagaagctgttgaatcagacagtgcaggcgtggaatattcccatcatcacagaaagttttgtggatagtactgctgtaggggatatctcttgctcttatccaaataatctattgattcacattttgttgaaacagtaagtttagtcatctgtgtttcaatttctatgtctaacgtcaacatggaagaatgtttcgtgccatgggtaatcaatggaatgatgaaatagtctttaataaagtggactttgcagcacattaatatgtcttttttttttggaagcacaagatgagtttttaaaaattcaaaattgatttctaaaatgtcacccaaggccaggtgcagaagctcacacctgtaatcccagcactatgggaggccaaggtgggaggatcacttcagcccaggagtttgagaccagcctgggcaatgcagggagacccttatctctacaaataataacaaaaaattagccaggcatggtggcaggcacctgtggtcccagatacttgagaggctgagtctaggaagttgaggttgcagtgagctgtgattgcgcccccacactccagcctgggtgacagagtgagactctctcaaaaaaaaaaaaaaaaaaaaaaaaaaaaaaaaaaaaaaaa

SEQ ID NO: 8088 - DNA, 752 bp, Homo sapiens; identical to SEQ ID NO: 2853
  misc_feature (101)..(101): n is a, c, g, or t

SEQ ID NO: 8089 - DNA, 145 bp, Homo sapiens
tatgtctatagtcccagctagttgggaggctgagatgggagaatagcttgaacctgggaagcagaggttgcagtgagctggggtcgcaccattgcactccagcctgggcgacagagtgagaatctgtctcaaaaaaaaaaaaaaa

SEQ ID NO: 8090 - DNA, 688 bp, Homo sapiens
ggtcctggcacgagttttgcctcctgatttggagtattggcctctactagagagtctgccagatgaggggacatttccttcacctggtagaaggatgggaggagtcagcaccttgacatctgccaccctaccccagaattcagtgccacccttcgccagcccaccccaaacctggtctcgtatatcatcccgcagctccaccaggatctggttgaagaggaactcagaggctcctcccggctcacctgcatcctcaaatacgccttctgtccagtcctaatctccagcccatcgacctccgctggaggaatgggggccagtgctggaaggcctgcatgttggtcacccagtttgcagtccacgtagagatgtagggcagggctgggtctggagggacctcggagtcgcaggagaactgtgtgtgtgcgcccatcagccaggcccgcttgctgtaggttcacggcgtggactttgccatcctcctgctggtatcgcaccagtactgcccaggaggggagatcagtatgggcgctatcccccaccccctgcctcccagctgagccttggatcaactctgctagataccacatctctagggcccctatccctaattctactatgtggctctcaacaccttgtatttaataggtacacaataaatgtttttgaaattgaaaaaaaaaaaaaa

SEQ ID NO: 8091 - DNA, 337 bp, Homo sapiens; identical to SEQ ID NO: 2856

SEQ ID NO: 8092 - DNA, 704 bp, Homo sapiens
cccatgggttcatgtcaaggctctcactgggcaaatatggtacaaacttggattatgtgaataattaacagctgtaagtgatggaaaccactcatgtccacaggaatatccagacaagagagaagggaaggggtaggtaggaaactcttctacagattgttgttgactaataaatacagaagaaagaacgtaaaatcatcattttgcaataataactaacctaagcaagaatcattaaatgcatgccaaagccattagttgaaaggttgctcatgaacagaatattcacacagtgccaaagtatcaccctggagatagattacttaggaaatgtaaaactaataatgcacccttatggtggagaacgctggcagtcacctccaagagacccaacttggcttcactaataatgggaaggctatgagtgaagtgggcttcacctagaactgacgtactccctgacgtgaggcaatatgaagtacccaataccaccactgaggtgttcttgccaaaaaatatttaatctgcatctaatcaaacctctcaacatatttccagtctacaggaaatataggagagaaaggaacaagttaaagcataacatgaggaaaccatcaaatccagaatacaggatactttacaaaacatctggctaaattcttacaaaagtcaattttctttaaaaaaaaaaaaaaaaaaaaaaa

SEQ ID NO: 8093 - DNA, 141 bp, Homo sapiens
ggcatctgagggtcctgtgctgtctcctctgctgacacccacctgcgcaccatctcaagggaatacacatacaaacacacaataataaaataatgaaatggcccacagaacctatctactcgttgttgaaatttttattac

SEQ ID NO: 8094 - DNA, 570 bp, Homo sapiens
tcagcatcatgtagacagctatgaccattaggcctagtttaggttgacacgtatagaatcaagtttgtactattaagtcatgtcctggtaccgtccggaattcccgggatgtgatctatcagacaaaggagtcaacctcccagaaccgctaaggtcctcatctcctctactatgttcgtcctttggcctttgggaaaccttaaagcctggacttggatcgcatccctcctttcgttcgaaactctccatggcttctagcgtcttcacagcgaatacacagcccccagcctgctcttccaggagaagcttcgcctcacacgttgttccctacaggcgcctgtggaccccaggttccatcctcccgggtctgtcctccaggccatagcccgcgccggtccctgtgcctgtcgctctccccaccgcatcccacaggtgtcagaaacaaggacctctcccgcgaacgcctcagtgtcccgacgccgggtccgggctgcagacctgtgaacagtcgccgctctctcgctgcttcaggattcgggttaggatgaggtgacctgagggcagggaagg

SEQ ID NO: 8095 - DNA, 639 bp, Homo sapiens
gcctaattcaagcaccacaaccttattgaccatctcgtgcctgaaacaattaacatgattaacatccctgatcctatcaattttactatccctagtaaatcccattatgatttcacacactggtccagggctccctcacgcaccagcagggcttctggctgactacaaggaacagaggttggagcttcatatgctgaagtgccttggatggagagttctttcctattttttctggagtcttttttccatcactttttacataatcggcaacaaagccctttggggcctcagcactttcccagttccccagccatccctcagttaactgccaataaaaattacaatctcactaacgctagtgagaatttaatgaactaggtaaattaaattttacctagttcaattcacctagtttacctagttcagggcccgcccctccaccactcattttatgactccaaattatccaaactgctctggaaggcatcaataaagttgttagctccttgactattttcagctctggaaaaacaatctggaggaacaatccaaggtaaaattatatccactcaaagtacaatcattaaaagcaggctacctggcaacatagaaaattttgcctcgggaaaaaaaaaaaaa

SEQ ID NO: 8096 - DNA, 739 bp, Homo sapiens
cgaaaactaccatcacttggtgagctaagaagtgggaagagaagacaatgcccatcaagtcagcttacgtcgtgtgctgggcaaacaatttaaattggaaaaagggataaaaaagaaggagaaaactctaaagtcagccaaaacagagggaagttcttaacgcaggaacagaaaacagcaaatactgtatgttctcactcataagtgggagctaaatgataagaacttaagaacacaaagaagaaaacaacagaccctggggtctgcttgaggtgggagggtgggaggagggagaggagcaggaaagataactactgagtactgagcttaatacctgggtgatgtaataatatgtacaacaaacccctgtgacatgcatttatgtaacaaaagttcacatgaactcctaaatctaaaataaaaattgaaaaaagagagggaagttcttgactctaccaagctgaacccatgtttatgagagatatttattgcgttttagcatgtagttagtgagagtataatatgtggctgacattatataagatgcgaggaaggatgcaagaataaatctactggattcagatatttgagcaggtagttaaaatattggtgattgcctgtggtaggaaaactgaacttactctaacctcactaaagaatgttgaaggacgtgactacttatgtgtactggatacactgtcaggggcagccttcagaggtactgataaaaaaaaaaaaa

SEQ ID NO: 8097 - DNA, 729 bp, Homo sapiens
ttgccaggtttaatgctaagacacactatctttttcagaaccatctgttaaattgtaattacaacagcgatgtaaaacgcaaatgatttaacgagtacaaattccctaccactaacagttgttaacataacaagccatattgtgaaagagtatgttgccttttccctgcctgcaatattttatgatttggcaactgacaacccaccattttttacagaatctcattctggtagagctaaaggtattaattagtattcttagagtacatcctcctgttattgctttttattaaatcgtaattccctctagcagcaaaaggattatatcagaaatgaaatgcataaggcccctttgtttccatctcccaccaaaatctttgaggtttcatatgatatcatctataattaattaccaggcatattccaaagcattgcaagactacttttggcttcataaacacaaatttctgctttcctggttttgaaatatgcttcccacactgtcattattttaaaagccatgagtactggtaattgttttcagacatcaataaaaatagcttaaccttgaaatttattttaattagggattttttcaaagccactgctgcaaatttgggtggattgtttataataaaaatgagcatcaacaacatagttgtacagaacatagaattaggcaaagttgtttaacttaggctcataatagcagtttaaagaaaaaaaaaaa

SEQ ID NO: 8098 - DNA, 627 bp, Homo sapiens
gatagtgtaatttttgaggaagaggatgactaagaagtgtttaataaagtaggtggtctactgtgtaggaagttgttggtagtcaaatttgatgagggaagaagacagattcttcagccctttggtaactggcaatgcaataagtaattggtgaccttcaccagagtcattacaaagacatgttgagtttggaaactttgactggagttgaggaaagaatgattacagatggatatacagtaatacagtcaatttttgtcatttgtggtaatgttcgtataaaatcaccacaaacattctcttagtgaatatgaaaccattgctcctagagaaatacagggttaggttcctgcaagcttctggttctttattgggttatgtgtgtttttgcacaaagacttaattcatatatattattgattcatgtacattgaacccaacagcactataactcatgcttaaacccaagatcctctaacacacatattttctctgtaaggcacattatagccttcttgcacttatgaatactatacagcaatttagccctatgcctgtgggccattttaaacagtgaaatcaccgaaaaaaaaaaaaaaaaaaaaaaaaaaaaataaaaaaaaaaaa

SEQ ID NO: 8099 - DNA, 686 bp, Homo sapiens
ctttctctgtctccctgccccttaagttagcttttctaaaccctacctggataaggataagaaatagaaggaggggacactttaggatgctacaaaataaaatacaacaacaacaacaataacagcagcagcaacaacaacaacagcaacaaaaggggaagaaacaaatctggccactgcacattcctccttgccaacaaaaagccgcggatgcaaaaagctgcccttcactgcatagacagaacagggcgcgctcgagctatgaatctcggaaattactcaaaccatcagcctctgcaagaagcaaagtggacggccgggcgcggtggctcactcctggaatcccagcactttgggagcccgaggtgggcggatcacgaggtcaggagatcgagactgttctggctaaaccagtgaaaccccctctctactaaaaaaataagaaaagcgaagtgcatctcccataaacgaggtactgcaggaagaaagcagaaaatgagacccgagtacacacatgcacgcgggcgcgcgcacacacacaccagaagaaatgaaccaagaggaaaggaaacattttcaaataagcatttggagatgggaaaaacaccttgaaacagaaattcataaagcacagaatttttttttaagttaaaaaaggaacaataatagacaaaaaaaaaaaaaaa

SEQ ID NO: 8100 - DNA, 82 bp, Homo sapiens
cgggtgtggtggtgggtagcaggtggcaggcgcctgtagtcccagctacacgggaggctgaggcaggagaatggcatgaacc

SEQ ID NO: 8101 - DNA, 757 bp, Homo sapiens; identical to SEQ ID NO: 2866

SEQ ID NO: 8102 - DNA, 680 bp, Homo sapiens; identical to SEQ ID NO: 2867

SEQ ID NO: 8103 - DNA, 745 bp, Homo sapiens
gatatctgagtataaggggttttgacaagccagcacttctgtatacttcaatactgtctcatgaatatataggaatatttttatgaaatgaaattatgtttgggaatttgtttgctaccctgattggtttctattgctctttactggatttaggatttattttagatacagttggcatatctaaatttagttgttgctgtctaagctgggaggtaggcacttcatttttctctttttggttcttccatcatcataaattcaaactgcagagcccagtattctgaagtgtggttactgcacagtatttcttcatcattaaaccatagttcttgcttttttgtagaaccgtagctctttctctgttggttatatagttaatgacaccggtgtatatgttatctgttacaaattgctattatctgtgctattaatggctacaagtctgtcctctaacttatggcttctatttgcttcttggagaaaaagtatgtactaagcatatggttatgggtcaattaatctctttttatatcacttgtatcttaataggttaatgaaattgtgatgcatatcaaacaaataggttcaactcttatcaaacacagttttttggataatacagcttttaatcatttaacttttaagtttaaaataatgcccaaatatgaaagagagccaaagtgttcccaagaactttataacacttgtctttcagagataaatcctatatgagataaaaaaaaaa

SEQ ID NO: 8104 - DNA, 593 bp, Homo sapiens
accgttatgggtttctctctcagcatgtttcagaagttccgtccatgtttttgccacaaaggaacatcctttttgacatacatagcctattaaaaaaattggtgcattgtctgtcatgaatactcagtgtaaacactgaccataactagaaaggaaacttaggtgcctatataattttccattccccgcctaatagtattcaactcagcctcttgaggtgggaataaaaactaaaaaaagattgatgttatagtaaaactgaacagtggcacagcaaggtgcctccctttaaggattttaccttcctgtgaagcaaacttcagagttcccatcttctcagcgtgatcacggaataggcaaacttcacaggaaggatgcctaaggatgccttttcctctctaagagttctcaggaagttgggtaggctgtgtatggactcccaactgctttaacctcctatctccatgtctcatttcccttcccctgcctgctctatcctcgcctctattttcctcagcaaacatactctgcggtcggtcccttgtccatggcacaccaccaacttttcagtagtgttaccatgcccacctctg

SEQ ID NO: 8105 - DNA, 740 bp, Homo sapiens
ggagttctgctggaagggttcctgaaaggagcagagcagatcttgagtgtactccagagaaagaaaagagaaggaagcactactagagggaagtaccagtgaagaacttcccacaccactaacacagagagtaaatatgctttatcctggcaattgtggaggtgttctctacttatgccccctaaaagaaggccatacattgacacgatctcttcacttccatggaagccagagtcagcccagtgacttgcatgagaagccagagaacagataaagagaggatccctatatcctaacattgcccttcgcacataaatgtgaacagttaacaaagattattagacatttgaggaaaaccaagaacatggattaacaggaaatattaagatttgtaaaaggcagaacatttattctgaagaaaagagatcctatcagatacagaaaaaagtttgaaaattcaagttagtacgcttcttagtgttgagagaattctgcctccataaaacaagaacatgctgctatgaaaaaggagcaatgatagaataagaaatattcttagaaattaagaatatcttactaaaataaaacagtgtattagaaagtttagaaggatatcacccagaacatagtaaatatacaaagaaatgtaaaatatgagggaaaacatgaaaacatgatgttaatctaggaacttcaacactattaatgagagtttaagaatgatgcaaaaaaaaaaaaaa

SEQ ID NO: 8106 - DNA, 700 bp, Homo sapiens
gaaaatgataagacacactttatgtaagactatcgcaataggagagagatactgagctcaaatctaagtgcagcaaagagctgaaaatttatagccagagtgagggggtaagtagatgtaaaattactaagaggagaagtgaaggacagaggcattgatattcaaccggcttactcttagcaggattcttattaaaggtagggtaacgacttagatgtcaatggtcagggatgagcaatctgatatatatcaagggtaggggactgtttcttaactgacttatcaggattcttgctaagactaagtcaaggtcaagacctagttgagaagatggctaacgactggtcaacgaggtcacctttgtcaccatagacactgttttttattttgctctgctcttttcttttaaccaatagcatctacccctaaaaattctttttctggctaactgacaaaaccagtatatggtggaaagagtaataatgataaggtatggtaaaatttacaagttttgcggactttggaagattttctaacagtttaaacacaataaaataatgtacttctctgatttctaaaatatttttaagaaaaaaagtttgttccctatgaaatgtcaaaaatgaaatgattgtcctcacatctgtcagaaaattgtaccgattttgatcttagtttatccacttcctgcacaaacaga

SEQ ID NO: 8107 - DNA, 697 bp, Homo sapiens
atccaaaaggtgataacttaagacagctcttataaaagatgtaaattggcaaccacaaatgtaaaacttataggagatacacaaaatgtgaagaaaaataaatgaaacccaaccgttacaagaaataacccaactaagaagacagccaagggaggaaaaaaaaaaaaaaagatctgcaaaacgaaggaaaaacaattaacaaaatgcaagttactccttacctatcaacaatgactttaaatgtgaacggattaaactatctaattaaaagacatagagtggcacaatgcataaaagatactcatcagtacatatttataagggagtcactttagatataaagatacatagaggctcaaagtgaagggatgggaaaagatactctacacaaatggtaaccaaaaaagagcaagggtatctatacttagatcagaaaaaatagacttgaaatcaaaaattttcactacagactaaggtcattatataatgataaaagttcacttcagtgggaagattgtaaatatatatccacccaacattagaacacctaaatatataaagttaatatcaacaaagctaaggggagaaatcagtaacactaaaataatagtagccaacttcagtaccccaaatacaataatggatagaacatctaggcaggaataaaaaaaaaaaaaaaaaaaaaaaaaaaaaaaaa

SEQ ID NO: 8108 - DNA, 650 bp, Homo sapiens
ctgaggccaggaagaaatcatatgaagcccaagggtttgaagctgcagtcaactatgatcacacactgcgctccaacctgcatgacagatcaagaccttggctctaaaaaataaaaagcaaaaacaatataaagctgcagaacagtgtaatatgcttcacaaagaagggtgggaagaccatgaaaatacgcccagttgatttttattgaagatgcaaaagcaattcagtggaagaaggtttgatagccttttcaacaaatgggactgaagcaactgtacatccacaggcaaaaaaatgagcctcaactaaaacctcacaccttatacaaaattaactcaaaatggatcacagacttaagtgtaaaactataaagcttttagaaaaaatataaggaggaaaatttttggatctagggttaggccaaagagttcttagacttgacaccagaaacatgatccattgaagcaaaaatttgattaattggacctcatcaaaatcaaaaaattttgctctgcaaaggatctgttaagaggatgaaaaaacaagctatggaccaagagaaaagatttgcaaatcacatatcttataaaggctagtgtctagagtatataaagggctctcaaaactcaacagtaaaaaaaaaaaaaaa

SEQ ID NO: 8109 - DNA, 681 bp, Homo sapiens
agacgatcataatactggtgtcggacaaagaaagaagaaagaaaaagagccagaatagccaaaccattctgagcaaaagaccacagctgaaggcatcatctatctcacttcaaaatgtattagaaagctataataacaggattgttaaggatatacaaacagacacatagaccagtgaaacggaataatgacaccagaattaaattcacttatttatagccaactgattttcaataaaggtgccaagaacatacactggggaaaggaaattcttcaataaatagttttgggaaaatttgaaattcacgatatgcataagaatagactgaacacctatgtctccccatacacaaaaatcatctgaagatggattaaagacttaaatgtaagacctgaaacaataaaactgctagaaaaaaaaataaagagaaaaaacaaaacatcagtctaggcaaagatttcatggctaagacctcaaaagcacagacaaccacaacaaataggcaaataggattatattaaactaaaaagcttctgcacagcaaaagaaactatcaagcagagtgaagatacaacttacagaatgagagaaaaatatttgcaaactattcatctgaaaagggattaatatccagcatatacaagaaattcaaacaactcctccatttaaaaaaaaaaaaa

SEQ ID NO: 8110 - DNA, 679 bp, Homo sapiens
aaaacacacacacaaaaactggacatttttaaaaaggaattatctggatgtgtaaaagagatcacgagaaagctgaaacacttaaaatcactcaaaaatcagattcactattactagttttttttgttttcattttaatgattttactcttaaagaaaaaacccagcatatagaaaaagaaagtcaacatttcaaaagtatattctagaaatgttagctaaacccaagataattttccataaaacaaagtataaatggatccttgacgcataatacctgagccaggcaagggaaaatatctgagagtgtcatccatctccaccctcgatcagagacaactcgcatctaccccgccatgagtatgggattcctttctgaagcatcaggccatttggggcctgctgctactctcacagaagtatatcctttgacacatatatttaggggattcagagcaggtgattctatgtccaagacttgataaatccctctccagctcctgttctgaaaaggatatctaagagtccccagatagcgagtaaaatggaacaaagaaaatgtttccacgtctactgtaaacatcaagcctatagagatttctcctgatttgagaaaactaagcaagtaaatacatttttagattagcaaacacctatagagcaatacaaaaaaaaaaaaa

SEQ ID NO: 8111 - DNA, 659 bp, Homo sapiens; identical to SEQ ID NO: 2876

SEQ ID NO: 8112 - DNA, 746 bp, Homo sapiens
cctaagaattcatgaagataaagggctacatctgtgtatactgtcctggttagttttgtacaacagacttaagacccgttcaaattatcttgctgaatccttctaaattctaagaaggcaactgcgtaaccagtggatatttaatcttctttatcatatcagctttaaatatcagatttatgatacaggatgttattgttcttgtggtttttgcaatgtaaaaatatatcttggtctctgcatgatgatatattaacatctataccatggaacttttaaaaggaaaattgtgtggtataattagaaagaatattgcatgttatagagaaacttcacctgttgatttagcaggtgccattgtgtagatgctaagcaaatcttaatatgtttccttggatttttgaaatttgaatttgttgtgtaactttgctagttaaaagatttagagggatttggctgggcgcatggctcacgcttgtaatcccagcactttgggaggccgaggtaggcagatcacgaggtcaggagttcgagaccagcctggccaatacagtgaaaccctgtctcttctaaaaatacaaaaattagctgggcctcgtggcgggcgcctgtaatcccagctacttgggaggctggcaggagaatcacttgaaccagggaggtggaggttgcaatgagccgagatggcgccactgcaccccagcctgggtggcagagctagactctgtctcaaaaaaaaaaaaaaa

SEQ ID NO: 8113 - DNA, 647 bp, Homo sapiens
aataacacagtgttccttgttctacgcagtctcctaacttcagcccaggcaaaccaagtgcaggtcaacactggtggaaacttctgcctgttttccagcagagggtgtgtttaccaggacctctgcaccctaccagagcctgttttgttgttttgatctcccggagctccatcagacattccagtaatgggagggggctggagtgtttttaaacaggagccttttatgggacaatctgggctcataaacatgcctgctctcctctcaccatatatttaaccacgggagaataaaatgacatatccttttgaatatcaccaaacgggtgtgactcctaatggcacaaccttaggagtagcagtagcagtttgagcattcggcttgaggtcaccaaggccccgacataggtctcctcactcagaaacgggaacatcaatgcccccccactaccctcctcacaggccagctctgataataagatgttcaccatgtaaatgcaaagcattaacaaccaaggagaaacacaacacaaatttccacgaaataaaaatgttgtcttccagcaattcttgtagcctcacagcaaaagaaaatcagtcacctattacggtcctactgagcaaaaaataaataaaaaaaaaaaaaaa

SEQ ID NO: 8114 - DNA, 726 bp, Homo sapiens
  misc_feature (110)..(110): n is a, c, g, or t
atggccaaattaagaataaggtaatttttcgtaggcacttacaaataccaagagtagtagtaaacacttacatacattaccagtatctcacgcctgtaatcccagcactntgggaggctgaggcaggcagatcacctgaggtcagaagatcaagaccagcctggccaacatggtgaaaacctgtctctaataaataatacaaaaattagctgggtgtagtggcgggcacctgtaatcctagctacttgggaggctgaggcagggggaattgcttgaacccgggaggcggaggttgtagtaagccgagatcgcgccactgcactacagccttggcaacagagcgagactgtctcaaaaaaataataataaaaataaataaataaattacagtatctcatttaatgcttataatgattctatggagtaggtattatccccattttataatcagaaaattcagagatttctgtttctgatgggagtatacttactttcccttattcctcttgctaagtacaaataaaaaccctagacatgctacagaaaacaagcataaaactctgaaaggtgtagtgaagaagcagactggctagggaccttgggcctgcggaaggcagggtagtaagttccctggaatttatttttgctttatatatcccagtctgacagttcaagaaatcagccaactggaaacaccaactgatgtagaccaaaaaaaaaaaaaaa

SEQ ID NO: 8115 - DNA, 673 bp, Homo sapiens
ctcttagagaagggcaacttcaagacacataattgtcagattcaccaaagttgaaatgaaggaaaaaatgttaagggcagccagagagaaaggtcgggttacccacaaagggaagcccatcagactaacagctgatctctcggcagaaactctacaagccagaagagaatgggggccaatattcaacattcttaaagaaaagaattttcaacccagaatttcttatccagccaaacgaagcttcataagtgaaggagaaataaaatactttacagacaagcaaatgctgagaggttttgtcaccaccaggccagtcctaaaagagctcctgaaggaagcactaaatatggaaaggaacaaccagtaccagccactgcaaaaacatgccaaattgtaaagaccattgatgctaggaagaaactgcatcaactaacgaggaaaacaaaaagctaacatcataatgacaggatcaaattcatatataacaatattaaccttaaatgtaaatggactaaatgctccaattaaaagacatagacgggcaaattggataaagagtcaagacccatcagtgtgctatattcaggaaacccatctcacatgcagagacaaaaataggctcaaaataaagggatggaggaagatctaccaatcaaatgcaaaaaaaaaaaaa

SEQ ID NO: 8116 - DNA, 663 bp, Homo sapiens; identical to SEQ ID NO: 2881

SEQ ID NO: 8117 - DNA, 692 bp, Homo sapiens
gtccagtctccacagtagctagagggagtttatcacccatacaaccaacattgcctctgctcaagaatcctccacggctcccacctcacttagagtaaaagccaaagatcctatgaggccctgcaagatgaatacctcatcccctctctgacctcatttccacccccttcccctcactcactcttctccagctgcactggccttcttgccgcttcacagacacacaaggagcagtcctgccccaggacctttgcacttgctgttcttgctggctggactgttctttccgcagatatcctgaaggcttgctgtccttaccagcttcagatctttgctcaaatgtaccttcctcctaaggccttccttgaccacacccagcatgccttctccacctttgcagcactattttcactgtcagcagaacttaccaccctctggaatttatgcttttccttctttttcttcattgcctcaccagccagaatataagttgcatgaaggaggaatttgtgtcagttttgtttgcagctttctggcacatagtaagtgctcaataaatcttggttgagtgaatgaagtacaaataaaaaaaagaattgagtgaagtggtcctgatggagggcgacagggagtggtggggactgtggcaaacggggagcccttgccccatctggaaggagcaactaccgctt

SEQ ID NO: 8118 - DNA, 703 bp, Homo sapiens
cccctcccctactgagctcgtggcctcctcccgtaccccccattccttctgactacctggccctgcagctgcccgagcccagtcccctgaggcccaagcgggagaaacggccccgcctgccccggaaactcaagatggcggtgggaccccccgactgccctgtgggagggccgctgaccttccctggccggggttctggggctggggtcgggacaaccctgacccccctcccaccccctaagatgcccccccccacgatcctgagcacggtccctcggcagatgttcagcgatgcaggtagcggggacgatgccttggatggagacgatgacctggtgatcgacatcccggagtgaccgtgacatcacgccatgcccaccacggccccgcccggcgccctccccgtgccagcacacacgagtccagcttcctcggaggtgtttattgatgcccagctgccatgctccggccactgacacaaccagaaaaggcgtaaacatgcacgggtgtcccccaggagggtggcaggggccctgccttcaaaccccggccccctccaggggacagttatttaaacgagtggccgggagcatctgccacctgctggggaggcagagaccctgcaatggccacctctttaaaagggcagctgtacagggctaggttttttcaatgaagtttctgtattaaaaaaaaaaaaaaa

SEQ ID NO: 8119 - DNA, 714 bp, Homo sapiens; identical to SEQ ID NO: 2884

SEQ ID NO: 8120 - DNA, 730 bp, Homo sapiens
caatagtttatactcagtaaagtaagagaaggaattaagcaggtactggcgcttagaaccagacccgaaaccagcctggctgcctgactaagcccggtagttaaagatcgaccctgacgtaaccggttatgttatctatggattccagacattatatggaaaggcattgtaaaaatccctgtcctgttctgtttcgttctgattaccggtgcatgcagcccccattcacagtaccctctgcttgctcaattgatcatgaccctctcacgcggacccccttagagttgtgagcccttaaaagggacaggaattgctcactcggggagctaggctcttgagacaggaggcttgccgatacttccggccgaataaaccccttccttctttaactccgtgtctgaggagttttgtctgcggctcatcctgctacagaacctgggaggcagaggttgcagtgagacgagatcacgcgccattgcactccagcctgggcgacagggcgagactccgtctcaaaaaaaggaagagtgaataaagaagaaacccaggccagcagggacagtgactctcagcagtgtttaaagcttctctgctgattgtgatgtacctcagccacatatacctcgctctcctaaaatccactggcccaagaagcatctagaaagattcaccaaggataaaacatttaaggtgaactttaaaagatgaataattcaccaaaaaaaaaaaa

SEQ ID NO: 8121 - DNA, 623 bp, Homo sapiens
gtttaccacacatgccagcatgtttttctgcatttgaaagtcttggaggattaatagcagattagcatgatagtcatttgcccgtcaagttatttactgttaactatctgtatagatgctgtaaatttttatcgtcgtatactgagtacgaaagggttttcttaaatgaagaaccatgttgtgcatgttttaatatttcattcagctgcttggtgtagagttgatggcaaacatgaaactgatcatatttaagaagctctacatgtaaaaagggagaatttttctatttcttgctccttagaaatgggaagggaggctgggcgcgtggctcacgcctgtaatcccagcactttgggaggccgaggcgtgtggattgcttgagcttgggagttcaaaaccagcctgggcagcatggtgaaaccccgtctctactaaaaatacaaagaaattagccgagcgtagtgccgcgcgcctgtattcccagctactcgggagactgaggtcaggagaatcgcttgaacctgggaagcggaggttgcagtgggccgagatggcgccactgaactccagcctgggggacagagcgagactctgtctcaaaaaaaaaaaaaaaaaaaaaaaaa

SEQ ID NO: 8122 - DNA, 700 bp, Homo sapiens; identical to SEQ ID NO: 2887

SEQ ID NO: 8123 - DNA, 358 bp, Homo sapiens; identical to SEQ ID NO: 2888

SEQ ID NO: 8124 - DNA, 726 bp, Homo sapiens
tgatttcttgcccgccgtctctgtcttgggattcttttggtatttaggaagactctaatctctattcgaagtgtattattaagccgaatatctaatattagtatcgttatgtccgttaatagcttttgtgggatactatctatgggctcctactataaataattttgaatatctctctaattttcctctcccaaacatctaatatgaagtaataactttttatgttcctgaaaatacctataggacaatcagtaaatatattctattttacttgcattatctcccttcttgcattttcagagaaatgtgctttagttacattgtcagacttataactatagaatatatattttatgatctcctttatcatgtagctctagttctcttcagtaagaagttttgttctgcaaaggagtatcagttagtttgagagttcacagggctagatcaccccagcactatccaacctttctgaagtctataaagttgcctctcagttttagctgctctcaaattgatctctaagtgttctacaactaatgagacctttagagatgatcaggatgctggcagtctgatatctggattctctgagccctcccttgctgataccatgctagtcttgatgctgctgctgatttattttacgcacttgtattctggagttcacaggtgttgtataataaagaatttgactgggctttgttgctggttaaaaaaaaaaaa

SEQ ID NO: 8125 - DNA, 708 bp, Homo sapiens; identical to SEQ ID NO: 2890

SEQ ID NO: 8126 - DNA, 438 bp, Homo sapiens
actttattatacttttcacacacacacacacacacacccacacacacacacataatagtctatcctcattattcacggtaatgatgttctataaagttgctgtgaaagctgaattaattaatactaattgcttttagaggcaatacaggtttagattcctgcaagcctccagtcacagtattttcatcaatgaattgatatatatccttgttttatgtgtgtttctgttgaataacacacgtggacatttccacttgtgtttatttaatatgtattgtcaattcattaacactgccatgacattataactcatgcctgaacaaaactcatctgacacatgtattttcttcataaggcacatctcagccttcttgtgcttaggactacccggctttgtccccaaagaataaaaacacctctctaaaaaaaaaaaaaaaa

SEQ ID NO: 8127 - DNA, 690 bp, Homo sapiens; identical to SEQ ID NO: 2892

SEQ ID NO: 8128 - DNA, 708 bp, Homo sapiens
taaatcataatttatgctgaaatattctgtgtgtgagcagagggctgggaactgcgcttgcaaaataagagctatttgctatgaaattatatattttggggggcatttagatacaggaattacttaaatagtttagcttctattgaacttttgtgtatggggtatgagatggtaggaaaggccatttgcaactatctttttaaaaatcataaatgcaaactaagctatttctatgaaattatatattttgggaggggcatttagatacaggaattaaatagcttagctgctattgaatttcttttgtgtatggggcatgagatggtatgaaaggccctttgtaactatcttttaaaaaatcatttttattgagtctgaatattgtaataatattttgcactacagttgctagtgctgggtgaatgagagcctgcagggccagtagttatcctgcctgtgctgtgcaggaccctgtcatgagaatgaatccaaattgaagttcgaagaggagagaaagtcctgatgacattgtttgaacccctggaaacactcatgcataaagtcagcacaactcttggacatttcagatacatggaccaatgaattccctaattcaagttgtgtttctgttacttgcaacaaaaaagccccaatgaaataaatcaatggataaatgagcatataacccagacttgaaaaaaaaaaaaa

SEQ ID NO: 8129 - DNA, 667 bp, Homo sapiens
ctggtaagttgttaagacctataccaggctgggcacggtggcacatggcttgtaatcacagcacttagggagctgagtgggaggatagcttgaggccaggagttcaagtccagcctgggcaacgtggtgagacgccatctctacaaaagtatatatataaaaattagccaagtatggtggtgcacgcctctggtcccagctactcgacaggatgaggtaagaggatctcttgagctcaggaggttaaggctgcagtgaaccatgatcactcaccccactgggctccagcctgggccacaaagcaagactgtctcaaataaataaataaataaaatttaaaaactaaaaacggccaggtgcggtggctcacacttgtaatcccagcattttgagaggctgaagcaggcggatcacttgagcccaggagtttgagaccagcctagacaacatgacaagccccatctctacaaaaaaaaaaaaaaaaaaaaattagcctggccctgtggcatgagcctgtagtcccagttacgtgggaggctaaggtggaaggatcgcttgagcctaggagatggaagttgcagtgagctgagatcgcgccacttcactccagcctgggtgacagatcgaggtcctgtctcaaaaaaaaaaaaaaaaaaaaaaaaaaaaa

SEQ ID NO: 8130 - DNA, 763 bp, Homo sapiens
tgaaacaagtattgattttgaaaaataataacctacctacatagtattattctagcacctggttccaggaggtaagacaaatgatatgtaagactggaaaattggatcaacacttctgcagcacatatctagtgaaactttgccttttatttcttggagcataggtcacacgccagaggcttttgtcattctggagaagagcagaggttagtagcatgcgctgtgaaagctccacttggaaaaccatcacaagaaagagatgcattcagaaagggagggccagagtgcagtcagcaatgttaaggaagagagtccagaaattctccactcggcacggttgcagtggaaagaaccggcatgctaaggcattactgagatgaaagtggcccagcttacagcaacttgtccatcagcaagaaatacaggtgttaaagcactgaaactttaagactgttacgccactcacatgaattacactgactcaattttctatatatgtactagtcacagcaagtagaaagtgcaataggggaaaaaagatcccagtcacagtaacgagaggaacagaaagcctagacatgcagctgacaagaaatgtgcaagaactgtatccaaacacctgtggaggttcccaaggttcccaaacttgatttgcatattcgatgcaatcctgaccaaaattacaacagtatgtttttagaacctgacacactgattcccacattcatctggcagagtaaataaatgcaaaaaaaaaaaaaaa

SEQ ID NO: 8131 - DNA, 152 bp, Homo sapiens
aatatctgctagagtttatcaacacagaggtgtcttaaatgaaagttgaggggtgctgaaaccagactgggaggcatgacaagtaaagaaagacagaggacgaataaaatcaatttattataaaagtttcaccgtttaaaaaaaaaaaaaaa

SEQ ID NO: 8132 - DNA, 705 bp, Homo sapiens
gacaaataaattgtatatatttatggtgtacaccatgatatttggaaatatgtatacatttgtggaatggcttaagtatagctttgcattaccttacatgactaattttttgtgtgatggggacacttaaatctaccctcttagcaatttttaagtatacaatacattgttattgtcaccatgttgtacaacagatctcttgaacttatttctcctgtctaaatgaaattttgtatcctttgaccaacatcttcccaaccctttcccctgcttagcccctggtaaccattattctactctattttttagttcaacttttttagaatccacattttgttgtaaagaaataactgaggctgcataatttatacagaaaagccaggtgtggtggcttacacctgtaatcctagcactttgggaggccgaggtgggtggatcactcgagctcaacagttcgataccagcctgggcaaacacgttgaaacccttgtctctacccaaaataccaaaaaattagccaggcatgctcgtgcatgcctgtggtctcagctacttcaaggctgagatggagaggattacttgaccccaggaggcagaggttgcagttagctgagatcgtcccactgtactccagcctgagtgacagagtgagacctcatctccaaaaaaaaaaaaaaaaaaaaaaaaaaaaaaaaaaaaaaaaaa

SEQ ID NO: 8133 - DNA, 548 bp, Homo sapiens
  misc_feature (520)..(522): n is a, c, g, or t
  misc_feature (530)..(531): n is a, c, g, or t
ggagccccaaaagaaagggagggtaagtgtagttcaagcaaaagcctggatttggaatgtcccagggtagctgagctggcaggcctcagaggactcttctcctcctcctcagctaccaccatccagccaagcagctctaggcaaggccagaccctgaaaagcagccttatcctcacagccactgtggtggcctctgggctgcccagctgttgaccccaacccttgactggccagggataaggtgggaggttggccgggcagcccaggcctgcctggagcccagggtaatgataggtcaacagagcaggcctcattatgtggagcaacttcgtgatgtggctgttttgttttacttacattttttttttcttcttgaaaatgagctgagaaccttctttacccaagattacaagttgggttggtgatgaaaggtctgtcctgtgcagaaggagccctaaggcaggaatttgcaagtccttttgttgaaaatggcttgttctattggcctaaaaaaaaaaannnaaaaaaannaaaaaaaaaaaaaaaaa

SEQ ID NO: 8134 - DNA, 746 bp, Homo sapiens; identical to SEQ ID NO: 2899

SEQ ID NO: 8135 - DNA, 678 bp, Homo sapiens
ccaggacagctgacgtacctgagcatggacgggcccaccgccagaggtgcactactggaggagcagtgtccacactgaagggaccaaagttgcagcaggagcttcaaggagctcagcacccttctcccaccctcaggcccccccagagaaataagcccctgctggcatctggagaatggccctgtgcccgggacaggggagggccctcctcttggacaccccacccagagcatggtcccttgggggcctcgagctgaggtggaatgaggaggagccccactggcagtgctgaggagaggtactccagctccaggcctggagagccttcccggcatcgcctgcggaccccacctcagtccagccccctcttccaggatgagccattgtagatcatagaaggtcttccttgagaggttgagccagggttcgggagagcccttgtctctggtcagccttggagcatgggctcgtgggaaagaggaaggggacggggcacagggcaaggatcagaggcccaggcttccagagatctctccgccttagttcagagttgtgtgtcaggaaattcctcagagagctcagagcccctaccctgtatttttatacctttttacaatgttaacagttcaaaactgttttctgtgacaagaagacctccttttctaaaaaaaaaaaaaa

SEQ ID NO: 8136 - DNA, 647 bp, Homo sapiens
tgtaaatgtggtctttagtgtccaggctctgtttatgggtattgtgtttctttttttttttttttggaggtactgaggctctgcccagctaacttcgttttaatgcatttgataatgtaaataatctcttcttcccaagcataggctttactttagttcgctgtaggcccactttgcgtttcaccctctgtttcttgtaagcccctgaagttcagtgctagtagtaggaaagggatattcacctgggactgttaatttgagattcatctgggaaaattgatttttaagttgtctttatttgtgaggcatgatgggtccaaggaacctattgttatttaatttgtccaccatttttccagtttttcccactatttaacattttcttactctgttaatacacatcagggtggtttttcttaaacatagagccatattgactacttgccaagacacaagcttagggataacacattaagagtaatatctacttttacttagagttatagttctaagagtgtacaattcccagcatgtgtgtattcaccatgaataaaataacgttaatgcacaagttggtaaattcatttttttttttttttatttttgagaccccatctcaaaaaaaaaaaaaaaaaaaaaaaaaaaaa

SEQ ID NO: 8137 - DNA, 159 bp, Homo sapiens
gccactctgggtcagagagctctggtctgttgtatctctagtcagttcagtaggagcattttccctacaataatggcaccttccccagatgaacatttttgaagatcagaaataaccttagaatctcaggaacatcttctgacattcccaacttccctc

SEQ ID NO: 8138 - DNA, 634 bp, Homo sapiens
caagtgagaaaggcaaaagagtagaaaagatggaagaaataaaggtagaagttctatcaaggagtaaatatgtattaggagagaccatcttttgtgttttgtggaactgataatggtaataaaccccaagcgtattatagacttttcttcaaacatatttctacatgtttctttaacatgttttcttcaaacattatttctaacaaaaaaggtatattaaaatttttaggattacagttatgattgtgaagtgtgctatttaaaaaaattaacaaatactattggccaatttaaaacataagatgttaattgccttcctaatctagtatcccatttttttttttttgctgtttgtacactaaacacaaaaggtaaactctccattttatcaattcccaaatgataactcattaaaaaaaaaattagtgcaaggggaaaaagagggagaagactttttgtatgtcaacagaaaacctggtactttaaaaactgtattgtcacttaatcccaaagcaatctgagtactgaagtggcttttagcaatccacttgcattagtttatattcacgtacagcaagccaacttctttagcagttaaagattaattggtaactctggaaaatgaaaaaaaaaa

SEQ ID NO: 8139 - DNA, 710 bp, Homo sapiens; identical to SEQ ID NO: 2904

SEQ ID NO: 8140 - DNA, 701 bp, Homo sapiens; identical to SEQ ID NO: 2905

SEQ ID NO: 8141 - DNA, 1015 bp, Homo sapiens
ttcttttttttttttttttgttttttttttttttttttttttttttttctttttttttttttttgtttttcttttttttttttctttttttgctttttttttttgtttttcttttttttttcttttttttttgtttttttttttttttttttttttttttttcttctttttttttgagaagcgccagaaacgagagaacgatcagaggatctctactggtttctctgtgcccgatactcttaatccctatttgattttttgttctagttcttttagtttttcgttctatgtccatattgatgttgtagtgagtgatgtttgctgtgatttgaaatagatttggtttctcacatcgtttgttcatgctacaccattttaagatacagcaatgtttatataactatatttataatgttaagactctagagaaaattagggttcaaatcaatcgaactgagttctaaagacagctgaatttttcctttaactgcttcttttcacctcctgttagcaaaaatcaaaagtacagaaaaggaaacagacaagagctgaataaagcactttagtgctcatttcttgtcttataataatactattaataattaataataataatacagcctctgcattgacaactggaaatagtgactcttgcccttctggaagcagcagcttcacatcacagcagtgaacttcattataacttggtgattcttgggcaggagctaaggatcacccaagtgtaaatgctctgtgaagagccagttgcccttatgttggaatacttctagatattaactcttctaaaatatctaccagcaaaaaaaaaaaaaaaatgaagcatcagtaataaaatgaaataaattctgacttcccaggagcagtcaagaataaaactatcatgtttaacagaggactagaggcataatttcctgctagctactgatttagctggatcttactcatagtaaatagtcttaccttagtaaattagaaacatcctcaacctagaaaa

SEQ ID NO: 8142 - DNA, 178 bp, Homo sapiens
acttattagtgatgtgggaactatttaacagataggaacttcagagcttattggaaatatctcagttagtgacagatgttgttgatcacaaaagttcttccagatcgcttgcttcattggtcaaactcaattttagaaaggtgccgattcaccaacacagtagttttgtattatggcc

SEQ ID NO: 8143 - DNA, 647 bp, Homo sapiens
cagagttctgaatcactggcctgaattcaggcttgtggagccacacaccccgctgaaagctccagggaagattcatttcttgctttttccagcttttctgtccgcctttgttccttggttttgtagctccttcctccatccacaaagtgcatcacctcaacctctgcctctgtctctgcagtcacttttccttagaaggtcacactcacagttccagggatagcaacttggctatctttgggggcctttattcagccgaccccatcgtagaatacaaactatgaaatgtgaccacgtccttattaaaaaccagtcgggtgtggcgtcttatgcctctaatcccaacactttgggaggccgaggcaggcggatcacctgaggtcaggagttcgagaccagcctggccaacatgatgaaacaccattgctactgaaaacacaaaaattagctgggcgtggtggtgggcacctgtaatcccagctagtcaggaggtggaggcacaagaattgcttgaacccaggaggtggaggttgcagtgagccgagatcatgccactgcactccagccttggcaacagagcgagactgtgtctaaaaaaaaaaacaaacaagtaattctagggcagtttacattttatttaaatttct

SEQ ID NO: 8144 - DNA, 662 bp, Homo sapiens
cacacacactgctactttgtgagtaaagaaaacaaggtatcatttaaagtggaaacgtgtctttttttattttttttttttgagacagggtctcactctgttgcccaggactatggctcactgcagcattcgcgtccccctcttccaggctcaagtgaccctcccacctcagtctcccaagtagctgggactgcaggtgcatgccaccatgcccagctaatttttctatgttttgtagagatgggatctcacaatgttcctcaggctggtgtggaactcctgggctcagcgattcttctgcctcagccacccaaagtgctggaattacaggagcgaggaaacattttctaccaggaatctttatgaaatgtgtttgtaaataacaaaaaacattttcaaattgttggaaatttctcagcagttagtgcacttaaaaaaaaaaaagtttcaaccagcatgtgtttcctcatcttaaacaataagtagcaatgtttggaaaatgtttgttatattatctctctaaataaaagttgatagttcccgtaacacttgtaacaaacatttctgggtgacaaaataatttgcctttcaggtcattcccaagtaaatttatttttaaagcatttatttgcagctgcaagggctcccaaaaaaaaaaaaaa

SEQ ID NO: 8145 - DNA, 130 bp, Homo sapiens
attacctacatagaaaggtgtttgagaaatactgttaattaaacgagacgggtgcatctgcgtgaacgtaggaaggaagcgtagccggattatgaaatgcacgacaccctgggaggggtgagctttccca

SEQ ID NO: 8146 - DNA, 750 bp, Homo sapiens; identical to SEQ ID NO: 2911

SEQ ID NO: 8147 - DNA, 210 bp, Homo sapiens
aataagcaggctggtaccggtccggtaattcccgggatacttgccacctcagcctccctagcaactcgggaggctgaggcgggagagtggcgtgaacccgggaggcggagctcgcagtgatctcggctcgcagcctagatcgcaccactgcactccagcctgggtgacagagcgagactccgtctcaaaaaaaaaaaataaaaaaaaaaa

SEQ ID NO: 8148 - DNA, 157 bp, Homo sapiens
gagacccaggcatacttgaaggagccctttcccatctcagcagcctccttctcaaatttttcaatggttcttttgtcgatgccaccgcatttatagatcagatggccagtagtggtggacttgcccgaatctacgtgtccaatgacgacatgttgat

SEQ ID NO: 8149 - DNA, 649 bp, Homo sapiens
tttgatagcgaagatactgtttttactaattgtatgcttctgatacttcaggagaagctgacacaaattttggggttagatgtgagcgtccctccaccgatatcaaatgctgccattgacacagtagcagtagaatgtgacaaaaccaaactttctgtggttgtctgagacacacataatattcatttggaaataataactaaaggcttttgagaagaaaatgaacgttgacaaaatatagaattttccataacgatggcgggaaaatgttatttgcatataataaaaatgtagaaagatttggatacaaaaattatacccagagaagagtataaaatagtacaagtgtacttgcaaaaagttgtgagacataaggtataaatatacggtaatcacatggcagaggacttgctgccagccagtctaactagttcaagcttaatttgctagtcaaggaaaaacaagatgtattaagtagaagaatgaaataattgaagctttatgaaaacagcatttttcaagaccatttggtgcaggttaatataaattagcagaaaaatttggaaattatttcaatagcccaaggaaaaagtgtaaaaagcttgacctggggcaattacatacaaacaaataccagggaagggacaga

SEQ ID NO: 8150 - DNA, 695 bp, Homo sapiens; identical to SEQ ID NO: 2915

SEQ ID NO: 8151 - DNA, 764 bp, Homo sapiens
acttttgagccaacagagtaagaatcacacgaagagatctagagtaacccagacctcccttctgagaagtttccgctccccaaggtcacaccaggaatggcaatgcaattcaaaggtaagtagatatgtgttagtgtttacctttccagaatacagcctatacccatactaacaaagaggtttgagaggtattattttttatttgttttaggcaataatttgtagctcagtatttgagtgctcatacatgctaaactctgcagtgaatgagtaaaaagtcaagtcctacctgccaggaatagctagtctctgaagcttaccactgcagattctcatctttggcctcaagaggaaggagcaaccaaaacagagtagtaagaagacaatacccagagctcaatccagtatgggccttttaaactatttgtttccccaaagacaaggagccaccccagggtcaagtttctcactgttgcagtccataattcacaaggagagaagaggcaagccctgaaatacagagcccaaggatgtctcttttcagtgggaaagagtatgggatggcagatgggagccattctttgtgttatcattgatgggccagagagaacacaacaccagttacactcattgataaggatatacccttggtatttgatgctaaactagaagtcagaggttaggaagtttattagttaccaacatttgaaaaatggagatttcacataaaaatctgagtttctggcctttccaaaaaaaaaaaa

SEQ ID NO: 8152 - DNA, 728 bp, Homo sapiens
ctacagctagtatgcaaagttcacaatgtacacaagtgagataagtcagaaagaaggtaagtgactttcagactaatcaagtggagtggatgtaggatgacattatctgccttattaagctccagaaattctgaaacagctgagaccacttgtaactgagctaacagttcagtttgacttgaagttaggtctttcttaggtcaaagagctgttggcaaaactatctcagatctgtggcagcagatgtaacagggaccatgctaacagaaaaagaacttctataaggagcccttggggaggcacagctagctgctggcctggacatcttcatctgggctgcaggatgatggcctcccaggcccattggttctctctaattcaattagctctctttagcatacgtctttatgctggaatgctatacacataatataatggcaatatgaaaagaagccttcattcaaatgtgccacaagttggcaatggtgggagttgccatggcttccttatttaagttttggcaaatccatggccaggaatgactatggaagacattttgtcctatttctgttacttttcctatttcttacaatcgtactgtgatataagaatctcaggctggtcgacattccatgctgatttatatcactttgagtatgttctcagtttcaaaggtgttatacttactgcatatttcttaacctgagcttgattaaaaaaaaaaaaaa

SEQ ID NO: 8153 - DNA, 721 bp, Homo sapiens
aagcaaatgtacatttcaaacttgttcaaccatatattgggctcacgtaggcagagttggtggttttcatccgtgttgcaagaagtcaaggacctcaacagaggaccggctgaagaacctaccgacatgtgatgtctcctccggacgcccagctttgaaaatttctctcttttgtactctgtccctttatttctcaagctggccgactcttaaggaaaatagaaaagaacctgcgtgaatatcggggcaagttcccctataacgccggttgcttttccttgtccttaacagcactcttgccctgttagaaatccacaggggtggatgataatccttccactgaccgtggctaagattcctccattagcgctctgtggagtccatctgtctatttcctttccggcattgcctcattccttcttcagtagcttccttactcgtatactttatatcatttgcgtagtgtgaaatttaacaagtgatgttagagataataaatcccacaactgctatttctgtttgaaaaccatgacacagtgtggtgtaagcgccaaatagtctggggtttgttcttgtttgcagggctttttcttcgcatattttactgtcagtttcttgacatttttgtcagctcaggactggagggcataggtgctggcggcaggtctgaccacatttttattctccgttgcattttcagagactacgaaaaaaaaaaaaa

SEQ ID NO: 8154 - DNA, 480 bp, Homo sapiens
tgaggattgtcgtgtttgactgactcggagctcacctagtacagaccgcctttccttgaagggagtatttatcaaaacaatcagcaacaaatgatggattaagattgcagctaccagaggcagtacataatagttaagccaagcaataggctaaccagaacacttaaaagaaaaatctggggaattaaatgttcataaggggttctaaaacactcttacatattccttggaacctggacctttatgcactgtgccttatatataatttaaaatatggtttatggtgggactagcacattcagaagctcgatagcaacacgtgatagcaggtgatactggataacacagaaattccaccatctcagaatgatagtccaagttctattggacattggtggtttagagagagatgacttgagaagagaagagggggatcaggaatagtaaaggagcctttgaaagttttctgaattttaaaaa

SEQ ID NO: 8155 - DNA, 752 bp, Homo sapiens
gtccttttgggctcagtcagagattaggaaatagtatggattgtaaagtcaagaagggcaactcagatggagcaggttagtctcacagttgctgtctattaatttaattagtgccagatgtattccatttttaaaaagtaagccagagtgagtcaaggcatatacacactttctcacaaacttcctaaacagatttgggggtttaatatgtccaactcctcatgaaatatattcaatccacttaaatatattccatctttttaacataaaatgtaaagcttagcacccatcattaatttatgtctctgttttatccagtggttaaaaaaggattctgcctctttagtcctcactgttaaataaaacccaatcatagtaagtgattaactagcaaaaagtaaagctatttatagcaaatttctagatcattagaaaagcactggtagttgtacaatatcagtgttgactttgaacttctttaacgagatcatgaattcttttcccttagccaaaacatgaaatatttaacctagttgtctctaaaagttttgtaatcatgagttagatatatgtcatctcctattcattgcttttatgtgatcaataaatcttttacaaacccaactactcatttccttcctagtaatactttgcctttttcactgtgtatggaatgaaacatgtaaagctgtcacaatcaatgtttttatctgataatattaaatattttttaacttaaaaaaaaaaaaaaa

SEQ ID NO: 8156 - DNA, 752 bp, Homo sapiens; identical to SEQ ID NO: 8155

SEQ ID NO: 8157 - DNA, 722 bp, Homo sapiens
  misc_feature (69)..(69): n is a, c, g, or t
atgaaggacactaaagcctttattgtagaactatgtttgtaagtctatagcttaagcactttaagccanaaaggtctttcaaactgaagctttaatcaacttattttggagatgttctcttccctgatctcatgcgtcatccctgaaataataagatacatgggatcaaatagcccttgccttttcaacacaaatcagttggaaaattatggtttgagtcctgttgctgccatggcttctgtttctcagaaatgagtgtgtatgaacataccaatctatgtaataggctacctttttttgtcttctttggaactttgtacacaaaccaagacaatatcagggtgacaggtgaatgaacttaaattctcagtcttgtctattcaccaaaaaagtatactgcctgttttttctttaattattcaaggttgatgacttttaggaacatgttttatactgtattttttaattaaagcaagtgccttgatgtaattccatgtaaatcattgcttaaccctcttatgggatgaggatgagttattaatgtattgcagcctactggaaaggagggggagttggttaatagcagatacttttcttctagaagcttatgttttatgctgtttattatgtaagatcctgtatgtgtgttgagatttagaggtttcatttgttttgtctgctaataaattgttactctaataatacaaaaaaaaaaaaaaaaa

SEQ ID NO: 8158 - DNA, 401 bp, Homo sapiens
  misc_feature (44)..(45): n is a, c, g, or t
  misc_feature (55)..(56): n is a, c, g, or t
  misc_feature (77)..(78): n is a, c, g, or t
  misc_feature (86)..(87): n is a, c, g, or t
aatatggctattgttaatttcttgttgtgcaaaaatggtttctnngcctagcttnngtcattctgttttttgttgtnntgttgttnnttgttaaacgttactttaatggcaattgttcccctcaggcttcttaaaaaaaaagaagcttcattgagctataattgatatacaacatctgcacataaagtgtaaagtttgattaaacatttgtatatacctgtgaaatcaaatcaccacctcatcacaatcaaatttcaaaaagtttcacctagtttatcatattgttgaatgtgaatcctttccttatggccagtggattttatgtcttgttgaaacgactttgtcctgctacagtgataaaaatggtcttcacgcttgcttccagtaaaaaaaaaaaaaaa

SEQ ID NO: 8159 - DNA, 98 bp, Homo sapiens
tcttctattcccttcttccaaatatgactttacccttgactttgctgaaatttgctgatgaaacactgacctcttgtctcaaaaaaaaaaaaaaaaaa

SEQ ID NO: 8160 - DNA, 708 bp, Homo sapiens
cacttggggaacggctttggcagacagtaacgtcagttgatgctggaacatgacagcttcatcaggtaggtactctcaactctggatgagttggtcctttcagcttaaagggggtggaagggattgtttgagaatagcaaatacgcatgttgattgcgagtgtgtggagacaaaggcagttcccaccacagttaggtcctggccgttgtgttgtttcctcgcctgcgatgctccttgtacgtcctcaccctcctctcccgcctctgccttctgctgggtcaaaggtggcctttttctctccagccttgaattgttccctgttggcttcccaagggcccatctgctggtacagtccacacttccaaagccaagacccgagagggctttcactgccccaagcctctctcctgtgaccttgggattctgtcttggcagaatcctttgtcagcggctcttgctctgtccttcctgtttggccacagctctttcaatcaatgggtattctagaaccgcaggatgtcagagctggaagggacgcgataccggtttacacaaggggaaactcctcgaggctctgggagggacggagggttttggtgacagagcgagagctaaaattgaggattcctgaatccagatcttgcctcccatcagccatctttctcccaataaatttttgttttgtgcaaaaaaaaaaaaaaaaaaaaa

SEQ ID NO: 8161 - DNA, 625 bp, Homo sapiens; identical to SEQ ID NO: 2926
  misc_feature (2)..(2): n is a, c, g, or t

SEQ ID NO: 8162 - DNA, 703 bp, Homo sapiens; identical to SEQ ID NO: 2927

SEQ ID NO: 8163 - DNA, 85 bp, Homo sapiens
caccctttccagctcatgcactcttctggctgacagcacaagagaaactcctagtttagacaactggtaagccagctcctcacca

SEQ ID NO: 8164 - DNA, 659 bp, Homo sapiens
gtggtcttctcagggggccccagggatgaagaaaggtagctagatgggaggatggttctcctcattccgcagatgatgaacttgaaaccagtgacagtgagtgagttttcaggtcacataactatgtagggccagggcttgattgtaaatctcattctagctgtaactctttccagttacaatttactagtattcaaacgatatgtaaaaaataagcaaataatgaaacacagcattttgcaagacataagggtaagattgtaaccacgtctctgcaattctcgtggagactttggtatttgccctggccacctcctgttcctacccttctggccctgattgggcactggtgaaaaggtgtctgtgagcatctaccacacttgcctcccccattacacagactggcattctctctatggccacagtcctcagggtaattaaggttgtggagtaacaggaaatattttattcagtaagattgtactcatttgcttattcagttgctgaactatcttccaggaatacatcagaaggttttaccattctatttgcctgccttagttgggagatctgaaggaaatgagtttaattcacccttcacatttctaattaaaactttttacatttcaagctttttgacaggaaaaaaaaaaaaaaaa

SEQ ID NO: 8165 - DNA, 619 bp, Homo sapiens
gttgccaatggacatttgaggaaaactaagattcgggttaaataattgcccaagattacagaggtaagaagtcctggaggtcctctgattctgatgtctaatgcttttgccacgaccctgattccgttcatgtggaatatgttggaaaaggactaggacatctgaggttttaaaaacgcttttatagactcttagaactgtactaatccaggggattttaaactgagtactcaagctctgaggtccacagactatttgaaggacagagtcaacaggaccccgagatccaccctccacgttcaaatcttgtggcaatctaatctggcatgtctcaggattctaagtaaaattttaagaaaatgattctgctaagagaataaaattgtgttctaattgatctctcctaaagtgaagtagctatggctcagagagggtctagttaacagcaggcttaaacccaggcttatacccaggtgttcccgcttgttactcaaggctcttaccagtgaatcgtgctgtatgcttactaacagatagtgaggcgagaaagggagaagcaacagggaaaggcaggagaaagatagacatcaagcagaaagatggcaaaaaaaaaaaaaaa

SEQ ID NO: 8166 - DNA, 589 bp, Homo sapiens; identical to SEQ ID NO: 2931

SEQ ID NO: 8167 - DNA, 161 bp, Homo sapiens
gacagcatgtggaggcttggatggaaacacggtaaaaattacaacattgtttctcacacttgttgcaccaaagtgatacaaatcgcagagctgaggcacactggtgtttctgcgagaatggaatggaatgtggttgaaattttgtgttgttttttaaatat

SEQ ID NO: 8168 - DNA, 623 bp, Homo sapiens
ctatgagtttgactatttaggttctacatataagtgagattatgcagcgtttgtttttctgtctggcttatttcacttagcataatgtcattcaggttcatccatgttttcagacatggtagattcctttgttgtatggctgagtaatggctaagtgtccattgatggatgcttagattgttttcatatcttggctattttgaataatgctgcagtgtacatgggggtgcagatatctcttggggatggtcattttctttctttttgggggggatatatagccagtattaggatttctggatgattttgtagttctatttttaattttttgttgaatctctatactgtactaatttacatccttaccgaatatataagggtccggttttctttacatctttgacaacactaatgttttgactttttgataatgactttctcttgtgtcaagctctacttgaatctgatccttaccctatgataaataatacaagagtggtggatttggctcatttcaaccagataatttatatttctaaataatatgtaattacctgtagtttatagatatgagcataagttgtacaaggaaagaaaagctataaaatagagtgataagagct

SEQ ID NO: 8169 - DNA, 447 bp, Homo sapiens
  misc_feature (403)..(403): n is a, c, g, or t
caagggggttgccgcaaagtcttatctgagacaaggtaagtctgagcctttaaagtcaaaagcaagttagttacctcctagatacaatgggagtataggcattggataaatacagccattccaaatggaagagattagctgagacaaaggggctacaggctccatgcaagtccaaaatccagcagggcggtcaaatcttaaagctccaaaataatctcctttgacttcatgtctcatatccaggtcacactgatgcaagactactatcaggggaaggagagaagagggcagtggttgaaaaactaacacttgggttctatgctcagaacttgggtgaccggatccttcatacaaacctcagcaacaaacaatacacccaggtaacaaacctgtacatctaccnctggaatctcaaaaaaaaaaaaaaaaaaaaaaaaaaaaaaaaaa

SEQ ID NO: 8170 - DNA, 726 bp, Homo sapiens
ctgtccgggatggacacacttcccatagaccgtgtcaccccgcacagggttgcaaccaggctgggtgccactgcctgcaaacagactgggatctgtttttgtttttttgttgttttgtttttaagacagagtttcgctcttgttgcccaggctggagtgcagtggtgcgatcttggctgaccacaaccttcacctcctgggttcaagtgattctcctgcctcagcctcccgagtagctgggattataggtatgcgccaccatgcccagctttttgtatttttagtagggacggggttttctccatgttggtcaggctggtctcaaattcccaacctcaggtgatctgcccgcctgggcctcccaaagtgttgggattacaggcatgagccactgcacccggcctcagactgggatctgaaattagagagaatcccttgtggactggggacaggacaagactgctctagattggcccatggtgccaggttagttccttctgtaagctccacctcctccaggggcacccgctaattggctccctcagatcctggctagccagtacaaggcctcagcagtgcacagatcccatctccagccagtccaggtggcgctcgcatggtagggtgcatgaacctgtgttggagtacaggccttctttgctccagttgtttcccaataataaatgttataaaattaaaaaaaaaaaaaaaaaaaaaaaaaaaaaa

SEQ ID NO: 8171 - DNA, 614 bp, Homo sapiens
tgactgctgtagttcagaagaggtttggctttccagagggcagtgtagagctttatgctgaaaaggtggccactagaggtctgtgtgccattgcccaggcagagtctctgcgttacaaactcctaggagggcttgctgtgcggagggcctgctatggtgtgctgcggttcatcatggagagtggggccaaaggctgcgaggttgtggtgtctgggaaactccgaggacagagggctaaatccatgaagtttgtggatggcctgatgatccacagcggagaccctgttaactactacgttgacactgctgtgcgccacgtgttgctcagacagggtgtgctgggcatcaaggtgaagatcatgctgccctgggacccaactggtaagattggccctaagaagcccctgcctgaccacgtgagcattgtggaacccaaagatgagatactgcccaccacccccatctcagaacagaagggtgggaagccagagccgcctgccatgccccagccagtccccacagcataacagggtctccttggcagctgtattctggagtctggatgttgctctctaaagacctttaataaaattttgtacaaaaaaaaaaaaaaa

SEQ ID NO: 8172 - DNA, 614 bp, Homo sapiens; identical to SEQ ID NO: 8171

SEQ ID NO: 8173 - DNA, 732 bp, Homo sapiens
gactgtcagctctcgtaactggggcttttactagtgtgggctcttttcactgtagacactatctcggagacccagatttaattttctgtggttgttacagaataagtctaaatcaaaggagaagtttctgtttgacgtttgagtgccggctttctgagtagagttaggaaaaccacgtaacgtagcatatgatgtataatagagtatacccgttacttaaacaagaagtctgaaatgttcgttttgtggaaaagaaactagttaaatttactattcctaacccgaatgaaattagcctttgccttattctgtgcatgggtaagtaacttatttctgcactgttttgttgaactttgtggaaacattctttcgagtttgtttttgtcattttcgtaacagtcgtcgaactaggcctcaaaaacatacgtaacgaaaaggcctagcgaggcaaattctgattgatttgaatctatatttttctttaaaaagtcaagggttctatattgtgagtaaattaaatttacatttgagttgtttgttgctaagaggtagtaaatgtaagagagtactggttccttcagtagtgagtatttctcatagtgcagctttatttatctccaggatgtttttgtggctgtatttgattgatatgtgcttcttctgattcttgctaatttccaaccatattgaataaatgtgatcaagtcaaaaaaaaaaaaaaaaaaaaaaaaa

SEQ ID NO: 8174 - DNA, 732 bp, Homo sapiens; identical to SEQ ID NO: 8173

SEQ ID NO: 8175 - DNA, 449 bp, Homo sapiens
cccaagccccgaatggcaaggggcatatgccaaggcaggagtgtgcaagcagtgactttagacctaggcaaaggagccgtggggactcaagactggcaagtggtaggggtggggcttctcgaatttatgtatttcaacagaaaattataaatcactactcatattaatatataacttaaaattcttaaaaattagctcagtgctttttgcctttaagaaatattttaattaaacaaacccaatttgttttaaaacttcacagaacgaggttcagaaagtggcttttgttgctgcgcaaagttgatgcctacggatcatctattcctaaagttgtttagaatgggttatttctctctctctctctctctctctctctctccccctttctctcctggcacaaggaagttttacaccatctacaatccctccgttagattaaaaaaaaaaaa

SEQ ID NO: 8176 - DNA, 723 bp, Homo sapiens
aatgcagtttatgagaacaaagcagaaagaaagaagacaattatactaattacagatgcaaaagagtacaatcctgaaaaacgataacattatctatattagtacacattatgtactgacatggacaatacagttaacagtaaatgatgataatcttacttttgcaaagccatctccttctgctgatagagctcattcagaatctccactttctgcctcaaggttttgcattcatcttccagtccagctttggcagcttgtagtgagttgcggtcatcttccaatttctttacctggtctgtaaaggataaaacatttgagttccatatgtgtgcacaagaacttgagaacttggttgggggctggtgctgagagaaatgagaagtatgaaagcaggaagccgctctttatctttctaatgcaattttgtatctttccaatatatagcaatttcttctcaagaagcaacctaccttccaggttacatttagtggacacggaggctcttagcttaagctgtaaaagctttagatcctcttcaactaccgatattgcagtctgtgtctaaaaattgcagaagagacaagtattcataaaagtgaggcatagtaaaagtattcacaggcaattatgggactctaaaaacgattatacccgagagacatccatcatctgcttaatttgatttttcatcttctcattccggtcacctaaaaaaaaaaa

SEQ ID NO: 8177 - DNA, 741 bp, Homo sapiens; identical to SEQ ID NO: 2942

SEQ ID NO: 8178 - DNA, 396 bp, Homo sapiens
  misc_feature (1)..(2): n is a, c, g, or t
  misc_feature (77)..(77): n is a, c, g, or t
nngattgcaattacttcccaccaggtccctcctacaaaagtgggaattatgggagtacaattgcaaggatgagattntgggtggggacacagagccaaaccgtattattctgcccctgactcttcccaaatctcatgcgctcacacttcaaaaccaataagccttgccaacagtcccccaaagtcttaactcatttcagcattaactcaagtccaaagtccaaagtatcatctgagatagggcaagtcttttctacctatgagcctgtaaaatcaaaagcatgttatttactttctagataaaacaggagtacaggcattgggtaaatacagccattccaataggcttcatagtatatctctgtccccaaaggattaacaattaaaaaaaaaaaaa

SEQ ID NO: 8179 - DNA, 84 bp, Homo sapiens
tgtgtaaacccgtctctagtaaaaattcagaaattagctgggcgtggtggcggttgcctgtaatcccagctacttgggaggctg

SEQ ID NO: 8180 - DNA, 196 bp, Homo sapiens
ataacctgtctctactaaaaatacaaaaaatgagctgggtgtggtggcaggtgcctgtagttccagctactcgggaggctgaggcaggagactggcgtgaacccgggaggtggaggttgcagtgagccgagattgcgccactgcactccagcctggggtgacagagcgagactccgtttcaaaaaaaaaaaaaaaa

SEQ ID NO: 8181 - DNA, 744 bp, Homo sapiens
  misc_feature (714)..(714): n is a, c, g, or t
atgaatggagagagtgctgagcgataacatgttccgctcataataacagtaggcataaggaggggggtgtggaaaggccacagatttctgtttacccatggaaatgtttgacgtttttgcttctgatgaaatgtgctaagaagagggggaaaaaggagcattgtagcaggggaaggaatgaatgagtaaggaaaagaaggaatctggcatcagggaaggaatgaatgagtaaggaaaaaagggaatctggtgtcatgtgagacatgtgaagccacgaagggccttaaatcccagccctgtagccatctattggcagagccttaagacctcaaaccatagagggagccccccttttctgtctttttaaatttaacctatatttgtttagagccaagatctctgacatggcttggctgacttttctaaagatgaactgaggccaggcacagtggctcacgcctgttatcccagcactttgggaggccgaggcgggaggatcacctgaggtcaggagttcgagactagcctgccaaacatggcgaaacccctgtctctactaaagatacgaaaaattagccaggtgtggtggtgggtgcctgtaatctcagctactcgggaggttgaggcatgagaatcacttgaacctgagaggcggaggttgcagtgagccgagatcgcacaactgcattccagcctgggtaacaagagcaaacntccgtctccaaaaaaaaaaaaaaaaaaaaa

SEQ ID NO: 8182 - DNA, 743 bp, Homo sapiens
tgcctgcttttcagagttctgttggagatgacgcttgagttgatgaacactgagtgcctcaaaggagcagctcccagactggtcttccacatgggagggatggaatgcagctttttaggctctggagcctctcaccaccttagataaatgacttagcttcattttcttcatctgtgaaaagtggtaattatagtgacattgcatggttgatggaataatgtgagcaagttagctggtacttggcaaatctccctaaactatgtgatcttattctcgaaacagaaacaatggctacagttccataggttttaacttctgatcattttcacttcctttgtcctatctccacaatctgctgacatagggggtatgttttccattaaatcaatggagaacagggggactggaatctcacttggacccttctctcttgccttttcttccccaagttgagaaagctcctcagctttagaaaaatccatttggcaccaataagtaaggcagggaggggagccacacagcagaggggaagtgtggacttaactcattcttggctgccgtacctttcagggacataaaatagagaccgaccccaacaactttgctctgaaacacagagggtacctgaaatggtcctcttaagaactaactggctccacccaatgcagtacagggtaactttcataaagactgaggcagctaacctgggcacatagcaagatcccctctctaaaaaaaaaaaa

SEQ ID NO: 8183 - DNA, 728 bp, Homo sapiens
gttgtgcagtgggggttgtgggagtggagctcatttttacaagctcaggcagatttccagggatttcagagcacctgctagtctggtgtcagcagccctgagttgccccacctctcctgtggcagacatcttggtgcaggggacccactctacttcaagccaaggaagacttcttggcatctgaagaacacactctcctgtattaggagattaggccacctctcattaatgtgcagagattttggggctgaggaggttcctcagctccatgcctaggcacatctctgagtgcttggtggtgacccatgggattttctctcactgaaagtgcttgtggctgccatcaggggacctgtaggcagaactgcccagtctggccccatttatcactgtccacaacaatgcagggttctgcagagggctcagttcactaaacattctagtaatcagccaattgcctgaggcaacagagagcttctgccagtaaacaataatgtatacagaactgcgttggctgcagccagctcttacccctataagtactctctgctggctggtacattgaactgcacagaccaatataaaacctgccaaaagaagtgcatggggctatagaggcaaagccaaaggacactacccagcattctctacagttgtacccctagggaggggagaaaagggaatgggaaaaatattgttataggggaagaaataaaaaaaaaaaaaaa

SEQ ID NO: 8184 - DNA, 758 bp, Homo sapiens
aaaaaaatggttttttcgaagagagagttcattcccagtgccaggcagagtgcaggggcaccatctcggctcactgcggcgttacctcccggagcctggtgattctcccaccatagcctcctgagtagctgggactactgatgcatgccaccatgcctggctaattttttatttttagtagagacggggttttctgtgttgcccacccaggctggtctcaaaactcctggactcaggcagtccgctgcctcggcctcccaaagtgctggaattataggtgtgagtcgctgtgcccgaccttttttttttgttgttttttttttttgctttgcatacattgaggttcactctttgtgctacaaagttctttgggtttttgacaaatgggtaatgtcatgtagccacccttacagtgccgtacagaatagtttcactgcctaaaatatccgctgtgcttcacttctttatcctttccctccccatgctgcacccttggcaactactgattttgttcttatctctgtatcttttccagaatgtcactgaattggaatcatacagtatgtagacttttcagaatggcttcttttacttagaaatatacattgaaggggtcaggcacagtggctcatgcctgtaatcccaacactttggaaggtggaggtaggaaaatcacttgagcctcggagtttgagcccagactggacaacacagtatgaccccatctgtacaaaaaaaaaaaaaaaaaaaaaaaaaaa

SEQ ID NO: 8185 - DNA, 554 bp, Homo sapiens
cttgctcaggggcccaatccctgcagtcctcagacatctcagagctgtcttctgagttgttttctctaacagtccacataggtctgcaaaggaatcctgcaggctcttcctgtagccaaagaccttgacctcatcttacctgctccccgccagtcccccaccgtggcccactggcaactggtcctcttctgcccaggagacctggggacctcatctccctcccgctgctccaacaatgcattctcaacccagcaggtagatgggtttctactttaaaatatgtaggatgaaccagtctggtgatccgatgtacaacaggaggaatgtaggtaataaaattgcactgttttgggagttcctgctaaatgactagacttcagctgctcttgccacaaaatcctaaaagtggttgactctgggaggtgatgggaatgttaattgctcccctgtagtgaccattttgctatctgtttgtactttgtaacatcacgttgcataccttaaatatacacaatgaaatttattaaaacaatgaaaataaaaaaaaaaaaaaa

SEQ ID NO: 8186 - DNA, 498 bp, Homo sapiens
  misc_feature (269)..(269): n is a, c, g, or t
gttagaaggagccaacaatgtaagctaatgggctagctgtactgacagcagtgagtgttcatagcagtagcattcataattacaaccattcaatgccccgaagctggaaaccgacgtagcaaattatggtgtattcacataatacaatatgtgaaagatgtatagctgcgacataagaatatgaatgaatctttgctctgccctggcatggtggctcacgcttgtaatcccagcacttgggaaagctaaggtgggcagattgcttagcncaggagtttgagaccagcctgggcaacatggcaaaaccccgtctctacacatacaaaaaagttagccaggcatggtggtgcatgcacctgtggtcccaattactcgggaggctgaggtgggaggatcacctgagcccagggggtcgaggctgcagtgagctgtgatcacaccactgcactacagcctgggccacatagtgagaccctatctcaaaaaaaaaaaaaaaaa

SEQ ID NO: 8187 - DNA, 420 bp, Homo sapiens
tgttggccaggctggtctcaactcctgacctcgtgatacgcccgctcagcctcccaaagtgctgggattacaggcgcgagccaccatgcccggccagtgtcctttcttatacacgtacatacatgatgatggcttgagtcagctgcagggcagtgggcttaatgagagggatctttgtaaagacagctcttcacttcagctcagtagctttggtcataggcaagtttgttttccattatcataatttgatgattcttgtgatgaattcaatgctagttcttaaagaactcttttatttctgtatgtggagctaatgtttaccttggaaattttgcaaaatacatgtaagaaagaaataaaatatattttgaaaataaaaaaaaaaaaaaagggcggccggccaataaaaaaaaaaaaaaa

SEQ ID NO: 8188 - DNA, 738 bp, Homo sapiens; identical to SEQ ID NO: 2953
  misc_feature (42)..(45): n is a, c, g, or t

SEQ ID NO: 8189 - DNA, 698 bp, Homo sapiens
  misc_feature (59)..(59): n is a, c, g, or t
ttctgtattagaacagagtacagactacgaactgttagattctccaccatcacttaagngttgtcccagaagcaacaccagagaattacagacaacgcgcttttgctgaactgtccattttggtggttgtgtttttcagtcaaatataagcaggatgggcgatagagatatatttatatatagatacatattctatatatctaatgcctaaatatgggtattaaagggaaaatttttaaagtctgattaaatccaatatgacatgaaattaaatgtatggattagtaaggaaaaatgttaaaaagtagagaggataccaagaagattaaactggactagccttatttgcaagtgaaggatctggtgctgctttcagatgtttatcttttatttttttcccttaagctttaatcttcgtcattgtcttaaagtcaactggtgtttcttgttcattgactttggtacgatggtgctttgcaaggatgtatttatgttataatggccaacatttggtcagcccttgtccacttattcacttccctccttttgtaaaataagtgctttaattataaactgtataaaaataccttgtataaaccccttttttgattattacaataaataagctgaattgtaacaaatgaaatttgatttttgtaataaaacagtggaaaagtaaaaaaaaaaaaaaaaaaaaa

SEQ ID NO: 8190 - DNA, 645 bp, Homo sapiens; identical to SEQ ID NO: 2955

SEQ ID NO: 8191 - DNA, 586 bp, Homo sapiens
actggggagaacactcagccgcctgcaatcaggtgaatatacagccttgttgtctcacacaaaagcctgttttggtggtttcttcacacggatgcatgtgacatttggtgctgaagacccaggacaggaggactcctttgggagaccagttgccctgtttgtcgccctcactccgtgaggagatccacctatgatctcaggtcctcagaccaaccagcccaaggaacatcttgccaatttcaaatcggataggagtgtcaggcctctgagtccaagctaagccatcaaatcccctgtgacctgcacgtgtacatccagatgacctgaagcaactgaagatccacaaaagaagtgaaagtagccttaactgatgacattccaccattgtgatttgttcctgccccacgctaactgataccatatattcttcccccgcccttgagaatgtactttgtacacctatcccaaacctataagaactaatgataatcctaccaccctttgctgactctctttttggactcagcccgcctgcacccaggtgaaataaacagccctgttgctcaaaaaaaaaaaaaaaaaaaaa

SEQ ID NO: 8192 - DNA, 750 bp, Homo sapiens; identical to SEQ ID NO: 2957

SEQ ID NO: 8193 - DNA, 82 bp, Homo sapiens
taaagccaaaaatacatgactatctgaccttttacagataaagctgctaactcctgatctaactgatgaaaatttctctcca

SEQ ID NO: 8194 - DNA, 729 bp, Homo sapiens; identical to SEQ ID NO: 2959
  misc_feature (313)..(313): n is a, c, g, or t

SEQ ID NO: 8195 - DNA, 729 bp, Homo sapiens; identical to SEQ ID NO: 2959
  misc_feature (313)..(313): n is a, c, g, or t

SEQ ID NO: 8196 - DNA, 713 bp, Homo sapiens
tccctggtggaacacaattcaagccgattctagttctgcctggagtgctgttcaggtcctctatcagccatgcatcaaaagcaggaagtgaaacttgtcagcttgtgggaaagtgacatcagcgtccacccgctaaccggccctcggcaacctgcttggagctgctgttgatattgtcaaagagtaatgccaatctgccgttcatcccgttcgccgtgtgaattcctttcaggtggcctttttgaagatgtaactattagagctgggcattctcctcccccggcagacagctctcaagcaggagcacaccgaggccagcagtcagctcaggaggcatcaattagcaaagacaagaaccagagctatgggataagagcattgcattgaagttttaagtttacttgtttgcatgtattctctaagagaagagttaactttagatctttgaaaacccaggactgtgaagaaagtcatagtagcaggttgaggcaagtgtagaagttacatctctatttcccacagacaggaatattcacatatgtgcagtgtcagcaccacctggaaggttattacctaatggagatccatctgtcctgtgtggaatccagtgaggaattttattggtggaactgaatgttaactgctgtaaatcctaggaaataaacttttaaagagtttctcaggatgatttaaaactaatttaaaaaaaaaaa

SEQ ID NO: 8197 - DNA, 606 bp, Homo sapiens
ataggagaccagttgaacaaactgtgaatcttctggataatgaagtactaagcagctacgaaaaaattgaggataactgttacgaatgaaaatgatttctaaatctttttttgctttaaatggaaaagcaaagtgcaagcgagtacctatggtatgttctcttttatctaaaaaatatggaaagctaaaaatacatgaatatagagtcatagaagtaaaaactggcaggattcacttatgggtaaaagtgactatagagagtaattgggggcagggtgtggtggctcacgcctgtaatgccagcactttgggaggccgagacgggtggatcacaaggtcaggagatcaagaccatcctggctaacacaatgaaactccatatctactaaaaatacaaaaaattagccgggcatggtggcgggcgcctgtagtcccagctactcaggaggctgaggcaggagaaggatggcatgaactggggaggcggaacttgcagtgagccgagatcacgccactgcactccagcctgggtgacagagcgagactccgtctcaaaaaaataagtaaataaataaattaaaattaaaatttaaaaaaaaaaaaaaa

SEQ ID NO: 8198 - DNA, 607 bp, Homo sapiens
tcgcctgtggcgtgcccctgtagtcccatgctatctcagggggctgaggcaggagaatggcatgtacccgggaggcggagctggcagtgagccgagatcacaccaccgcactccagcctgggcgacagagccagactccgtctcaaaaggtaaaccggaacaagcagtgaatgtggatctaacgaaatcacaacgtaactcaatcaggaggaagagaagggcagagagtttctgtgtggtggggacagggagaaccaaaatgagctacatcctcattgttcacagtgaaaactcaatagatttatctcaggctgggcacagtggctcacacctgtaatcccagcacttcgggaggttgaggccggctgaccactggagtccaggagttcgagaccagcctgggcaacataggaagaccccgtctctacaaataattttaaaaattagccaggtgtggtggtgcatgcccgcggtcccagctactcggaaggctgaggtaggaggatacctgagcccctggaggtcgaggctgcagtgagctaagatcacaccactgcactccagcctgggcgacagagagagacctgtctgaaaaaaaaaaaaaaaa

SEQ ID NO: 8199 - DNA, 356 bp, Homo sapiens
gagggaatccacaccggcctctccgcgcctctccccaaagtgccggggaattaaccaggccgtggaagcccacccgggccccggcccccaaaaaggggaaactcttgtgggaggagcagaggggctcacatctcccctctgattcccccatgcacattgccttatctctccccatctagccaggaatctattgtgtttttcttctgccaatttactatgattgtgtatgtgccgctaccaccaccccccccatgggggggtggagaggggtgcaaggccctgcctgctccactttttctaccttggaactgtattagataaaatcacttctgtttgttcaaaaaaaaaaaaaaaaa

SEQ ID NO: 8200 - DNA, 356 bp, Homo sapiens; identical to SEQ ID NO: 8199

SEQ ID NO: 8201 - DNA, 736 bp, Homo sapiens
tccaagtgacttctgcaaaggtttggccagggcaggctgccccacaacaagggtgcactgagtgtcgtggctgctccaaatgccccttcatgagcttattatggaccgtcattgaggggtaactcctcccacaggaaccccagttgacagtttaaaagcactttcacacctctcctcgcttcctcaaaaagatcacagagggaggagctctgagaacagtctccttcaacagctcggccaagcagaactgctgtacctctgaccacttgtgttaggaaaactatcggctccctgtataataaatcaagccaggtcctccaagtggtaattcatgaaaaatatccccactaccaccaccaaggggaagaaaggactcagaagagaggacttgaggccatgaggtctggcctcttccctccccatctggagactctttctcccttgctggctttgggcccaagtttgatgtttatgaggatgattgctggtttcccttacacatagcagagctcactcagttctcacagtagccaaatgaagcagttatgtgttgtccagttttccagaccaggactgaaatccagagagggtcaggaatttggccccatgatgaagccaaatctgaacccatgtcctcacttcaaggttatcaatcttggattgtgatgctattggtacttgagaataccccttatctgagtataaagaatccttgagttttaaaaaaaaaaaaaaa

SEQ ID NO: 8202 - DNA, 729 bp, Homo sapiens
aagagcccacctcccatgtggctttagacaccacgtggctcatttagccccagcgtctgtgccggctccaggtgcctgcctctgggtgtgtgagtgggagactttgctcctggcctcatcctagagaggcccctggtgcctagtgctgaggcctctggggctggaaagcctcagcagaaaggaggcactactgagcaactatgcattgtcattgtcgggtttggggctttcggtggttccttggtgactgggaattgcttgtgtgcatgtgttgggtgcatgcttccgggtctcagctgccccaggcccgcacaggcaaccccttcccatccaaagccattggtggagcttctctggaatcatttgccaaaagcccaaggcagaatccaagggtccaagaccatttccatggagctcatgtttttcttttctgtaggaacttttttttaaccagcacccaccataattccgaaggccacgtttcatctttcctggatcactacagtgaagtattacagttgtacagttcccagtctggccttggcttgctcggataaaactttgtatgtattttgtatggcatagattctatattgtaatgatgtcctatgcaaaaagaaaaattaacgaaattgtaaattttattgttttaacgtgtatgcatgtttagtgacgtttacattttgaaataaaatttatgattcattaaaaaaaaaaaaaaaaaaaaaa

SEQ ID NO: 8203 - DNA, 722 bp, Homo sapiens
actgtgctgtcgcagagcagaaggggagaacagtgtgcagctaactgatgtgtgtgttggagtctcttccatggcaaagggacaccacagggtagtgaacattcaggaactgaggggcatatggcctgatcacacagttctaagcttttcaaaacttcaggttatcagagaccttcctgtgggcctctcttgctggctaagaaccggtttaggggagtagttctcccctggatgagtgcttacagtttctgtggctcagttaccagcagtggggttgagacctgggtcgatgctctttacaggcctgcccagagatgggaataaacagggatccacagcgtgactatgtgtttgtcattttccttttatttccttgggaatcgaaaggtgtcccagtacatttccctgcacttacagaggtgcatgactaaatacattgtccctcgatgcccctgaagatcacggaggcagtcagccaattgcctggcaggtggtagatgttattttcagggttgccgctgagtgtgcaggatgtgctgacaccatccagacaaagactcggtatgtgcccagacaggtgatggagtcatgcttttgctcagaatgacaaggtaaaggaaaaacatctgaggtatgttgtaggcctgttctgacagcaaaatgacaaatccagccagcaaaaataaagtgtggagaaagaaaaaaaaaaaaaaaaaaaaaaa

SEQ ID NO: 8204 - DNA, 744 bp, Homo sapiens
tccgatggctcctccagaatcatgaagagcaatgtgggagtagcctcaccttcaactgtgtagagaggcaagtaggccgccagagtgccttccagtacctccaaagcaccccagcccagtcccctgctgcaggcactgtccaaggaagagtgccctcgaggaggcagcagcgagcgagcaggggtggccagcgccagagtggagtggtggcctctctgagatttcctagagttgctcaacagcccctgatcaactaagttttgtggtacttcaccctcttctgccctcatttcatgtgacagccattgtgagactgatgcacaaactgtcacttggttaatttaagcacttctgttttcgtgaatttgcttgtttgtttcttcatgcctttacttactttgtcccatgctactgattggcacgtggcccccacaatggcacaataaagcccctttgtgaaactgttctttaaatgaaacacaagaaattggccactggtaaaactctgcagcttcaactgtacttcatttaatgccattaatgcaaatatacttcctcttctttttgcatggttttgcccacctctgcaatagtgataatctgatgctgaagatcaaataaccaatataaagcatatttcttggccttgctccacaggacataggcaagccttgatcatagttcatacatataaatggtggtgaaataaagaaataaaacacaaaaaaaaaaaaaaaaaaaaaa

SEQ ID NO: 8205 - DNA, 715 bp, Homo sapiens
  misc_feature (13)..(13): n is a, c, g, or t
gcagcaacgcccnttcacctggctgcagagcacgcctggcaggacatagcagatatgctcctcattgctggggttgacttaaacctgagagataaggaccaccccagtgatccctctgggaagagcttgtcctttaagcaggaccatcggcaggaaacacagcagctccgttctgtgctgtggcggctggcctccaggtatctgcagccccgtgagtggaagaagctggcatattcctgggagttcacggaggcacatgtcgacgccatcgagcaacagtggacaggcaccaggagctatcaggagcacggccaccgaatgctgctcatttggctgcatggcgtggccacggctggtgagaaccccagcaaagcgctgttcgagggcctcgtggccattggcaggagggacctggctggctggagtacaatggcgagatctcagctcacggcaacctccgcctcccgggttcaaatgattctcgtgcctcagcctcccgagtagctgggattacaggtgcatgccatcacagctggctaatttttgtatttttagtagagatggggtttggccatgatggccaggctggaaaattgaaacataatttcacaattattcctttttccaccttaaataataagagtagaatactttctgtgtttttatcttatacacatgaataaatgctatggcttatcacaaaaaaaaaaaaaaa

SEQ ID NO: 8206 - DNA, 682 bp, Homo sapiens
tgagagatgggtccagcttcgccatgccaaccgtccacaacccatgcaagatgagttatatcagggcaggggaatatgggctcatttctctcctggcagtttctaccagcattctcagaggccctttgggacacagcacagccacgagatcatacacagagatggcgcccaggatgacccacgcggaccactctgggaggtacttgatgaacactagggccatgagcgcactgatcatgatgaggtaggcctgctgcagcaccagagggcccttccagtggatgcacaccatgcccactgccccgaagttccagacagtcagcaagagggtggggtagtccatggccacattgtaggtcttgagcacttccccaaggtagatataggtgaagaggaacagcagcatcagtgaagacatgatcaaccagccatggatgaacttgtagcagcggtacttgtagagcaccaccaagaagatggtcataaccacgatgacgctgatcatgatgagggtgttcagcacggagttgaggaggcgctggcccaccgagggtgtgtcctcatgtgaatggcgtgtagatgagctgtccattcttctctgtgtagaagcgcacagacttgatggtggctaccaccacgatcatgcacagagtgacaggcacaaacagcatgatcacgtgct

SEQ ID NO: 8207 - DNA, 725 bp, Homo sapiens; identical to SEQ ID NO: 2972

SEQ ID NO: 8208 - DNA, 673 bp, Homo sapiens; identical to SEQ ID NO: 2973

SEQ ID NO: 8209 - DNA, 726 bp, Homo sapiens
gtattcctcacaagcctgcaagtgcctgaaggacagctatctttaggcagttatttccaatgcgaagagccatgggaaccatgagaaaagtggcaccagttggcccctaatgtcctggcaattgctgcattttttccatttctcacctctcaattaattacctttaataactgtttaaaaattttcttctaaggtcaatgacctgggatgctgatctggagatattatttccagaactatatttgacccatatataaagaataaacagagagagtccctaccccttgaggtaaatatcatcctctgccaggcctctctttggcccttttctttccaaggcctcctttccagtaatgtaggatgatctggaaaccccagtgtagagcaggattactcctggaacctggaggcaaaagggggcagaaagagcaccccaggcgacatacctttcttttagccaatggagaaacaacatctataaaagttgaacccaggatcagatcagccagccatgagactcccagatgggagacagaagagaaaccagggacacacagggacagaggggagaggcctccaggaacatgtacatgtggttccatgtggttgcaagttgaacagggctaccaatccctttagctttcccttaccaagctctctttgaaaaaagggaagaaggcttcatctcagaaaaggaacttacagccaatgaacaaaaaaaaaaaa

SEQ ID NO: 8210 - DNA, 662 bp, Homo sapiens
ccaacagataaatataacccctgggaagaaactccagccggagctcagcttcaggttttagaagacactggcatcccaaggccttcccactgtcagatcaaacacacactaatatttccctgatattttcccagtgttcgcccacaccatagaaagaacaggctttcctttttaatctacttaccacactgtgggtgaaggcctctaatttcacagcacagagataacacaaataattcatatgacacattagtgaaatattgacagggaaaacatctagtcagagctcaccgaaaacaacagggagctcagtgatggccacagagggcagagggatgcctttccaacagggcagagccccctcccgccacactacttgagttgaagataaagtcagcctatttggatccgaattgttttaaggcaacaggtcttcataattacacaacatttttctggtccctcgatgggctgcaacatcatcaacctccttcccaggacttccaggggctgctgcgtatgtgaaagtccctagaaaactgttaagtgccatcaacttgcagcaatggcaatcccacccagtcataaccaaggtcagcatccgcctggccaaacacttggtgcatttctttttctcttcctgatcaacttaaaaaaaaaaa

SEQ ID NO: 8211 - DNA, 643 bp, Homo sapiens
tgcacccattaccccccttacacacggcatacgtgcatctcatctcctcctgtgtcgctaagaagctacccatatgtctgtcattaagtctccagaatccttggacacacccctctgcagagctttctaacaggaaatacaagtctcagatttttttttaagttaaaattgagtgcagcactcatacctttcttcgagcatgaaccgtcaatcaacactgcctcatgagctactgctctcctgctctttgaaaagaccaatccttatttctttgtagtgatccagaaggcagtgggaagaatgacaggtgcttggttatcttcaatttaatctctacctttcaatggggctagtgcaagctagggccattttactgcacccaaaggaatttaagacatttctattatctctaaagaatccagattaacatgccttcttggtgggcagggagaccagctatgaattctaggatctcaattcaaatgcttttgaattcttcctgcttgttcagttaattacatatatgtcaccacaatcttgcttttttttttctatgcttctaattttctctgaaactataacattattttaggggttaataaatttgtaattggaaaaaaaaaaaaaaaaaaaaaaaaaaaaa

SEQ ID NO: 8212 - DNA, 751 bp, Homo sapiens
agtagtcacgttcgtcaagtccgttatccagacccacagtaagagcagcttgtttgactacacagtggcctcatgcagagggaagagagctgtagcaaccattaaatggatctttcatcttttactcagaatttgcaaaaactttaaatcatgttccattagcccaggtgttatggactaaattttgtcctcccaaaattcacatgctgaagcatataacagcccatgtgagtgtattcaaagatacagcctttaaggaggcaattaaggtgaaatgtggtcattaaggtggggccctaatccaataggactagtgttctttggttgttttattttttttattttttatttttttgagacagagtctgggtctgtcggtccaggctggagtacagtggcgcgatctcggctcactgcaagctccgcctcttaggttcacgccattctcctgcctcagccccctgagcagctgggactacaggcacctgccaccacgaccggcaaattttttgtatttttagtagagacggggtttcaccctggtctcgatctcctgacctcatgatccgcccgcctcagcctcccaaagtgctgggattacaggcatcagccaccacacccagccaggactagtgtccttttaagaagaaagcaagagacaccagggatgtgtgcacccagaaaaaaggccatgcaaggacgtcaacccaacacaggcatgctcataaggaaaggttaaaaaaaaaaaaaa

SEQ ID NO: 8213 - DNA, 705 bp, Homo sapiens
  misc_feature (2)..(2): n is a, c, g, or t
tntgagccagcattaagacctgctaagtctagccttaacaacttggtccatctgaaagtgtcaccaatccctaacttctgttccatcaagacacccctaactcttaatgagccatacacaaactctctgttctagaatccttcagttcttacacgtatcagtgagttttacagtttctgttaacagaaggactattttttgttgtgtaactcttattgcaaaagtgtgaaacgtagatgtggtaggatagctctggaagaatgggaggcattgggagtagggttgagttctactttgatgctgtttttacagcaactatttcaaagcccattggaaaaagaaaaaaaaataataatcagaaaatctgtgtctaattttagattgagaaagccgtgtgagtttcaccaactgagctcacctatctcacttaattttttgaatacgcaaaatgagggaaagggacaaggagatttctaaggtaatttctagtcatagaattatttagagtggatataatttattatattggtaatttccacgtttatacattaaaaatgggtttctgcaccaaatacttaggcaaaatgtctctaaaaacatttgttgaggcgcatgggttcatgtggcttaatgttatagaaagagactgttctattcatttagggcattgattagttactgacttgacacaaaaaaaaaaaaaaa

SEQ ID NO: 8214 - DNA, 687 bp, Homo sapiens
ggttcaagagatctcctgcctcagcttcgagagtattggggattataggcacctgcctctacctcatatgttgaatactaacttctaatttttactaaggttatctttgaaaaagcacttcatgtctctatcttgctgctgggatagaaagcccacttctgtgtcctttgatttaagactgtggtttctatgagccccggactgggctggttccaacagatgctctggcaggaataacattccccagaccctcccgagagcctcattcaggtatgctggggtggagcccagaaacctgaatttttagatagctcctcaagatcataacatactattaacattatgttataaatgtcaggtgatcattgaaatggatggtttccccagtttactgcttcctgaatgcatcttttgatacaatctcctttcatgagaatatacttatatataatgtatgatcaatacatcaaaataatagttcatataatagagaatagttaatataatttataacttggaaatgccttatttccaataaaaattaaaggaagctaacatataacacatccaataagaccatcagaatagaaacaaaattttagacaagaaacactatatcaaagcctcaaaacagtaggcttcatgagtagctgagtttcctagtagcaaaggcaaaaaaaaaaaaaa

SEQ ID NO: 8215 - DNA, 740 bp, Homo sapiens
  misc_feature (95)..(95): n is a, c, g, or t
accagtggttaaggtggtgaattttaaactgtcatgaaatactgtaatgcgcacctttgctaataaaggaaatggttctcccctttgaattatgnggaagtttcttggtctgtggatatgggggtgtctgtgtacatatatgtatatttccttttttaatacaggataataatatggggtcttgtccttcaccttttaagttcagggaacagtttgtcctgaccacacatatgttatcagtgtaatgctttatgaagctttagaaatgagctcatgactcattaaaaaataataaacatgatgctattttaatattttcaaataaataatctgaggatgtgtttcatactttagcatcaacgctgagttgtgccttgtagaattgcattgtctatacatgcaaaagactattaagttaggatgaactagattccctaattacagtgaaattctatcttgcaaatgctatagaataacttgcattttaaagtgtatttgcacattttacatatgctatgtggttgcctttgggttttctgtacagattgtttttgttattaaatggaaaaggcctgaattatgctcttatgtgaagtaaattgatataacctattgactgtattctgtgtattattctttattttgggaccttctgtgtaaaagaaaatattacctaaattggttagatacaaagaaatcattaaaattattaatgtatatatgaaaaaaaaaaaaaaaaa

SEQ ID NO: 8216 - DNA, 547 bp, Homo sapiens
tgccttctacatattccattctattttaaggcccaagtaagtgttctcctggcctcctggttctatacgtgaatacacagaactctgctcagacggacgtcagggatagaagagatggccagtgattgaatatgtctgacatatgatctagtaatactacaaccaacggtgaaaacatagtttacatgtgtttggatgccttctgcatatgaggcattgtgctcaatgcttatgcaaatcatctcatcagacctttatcatagccccattgaatgcaagtgatactatcattaacccatttttcagatttaacataactgagacttgaaaagtgagagattctctttgtatctctcactttttaagtctcatttttttaaatcaaagaggagaacaacacacaccggagcctgttggtggggtggggtggggcgaggaagagcattaggataaatagtctaatgtatgtctgggcttaatactgaggtgatgagttgatagatgcagcaaaccaccaagatacacatttacctgtgtaacatacctg

SEQ ID NO: 8217 - DNA, 682 bp, Homo sapiens; identical to SEQ ID NO: 2982

SEQ ID NO: 8218 - DNA, 742 bp, Homo sapiens
ggagtgctctatggtcctggaaagacacaaccaaaccgcgttcacgtacccacatccggcaataaaaaaccgcaacctgtatcagcgttgcggttagggatcacaatgctaaaaatgtagacgttttcttgaagttcagcatcacgcctttatcgctgatgccatcctctttccagttgtacgcatccagattcagcgaactttctttgctgctgtacttcacgccgacgcttgtcaggctattgatgccgccgcccttctgaccgtcatcgacgttaaagtgctgactgcctgcgcctgccaggcttgccgtacgctggctcttcgcgtagctcaggttcggcccgccttccagcgtagcgctagcgctccagccgtctttacctgcgtagtccagtttcagcccgacgatgctgtccaccgccgtttcgctgccactgttcatattcaggttaaagtctccggcattgcgctcctgatagccaccttccagtgtgtgacgcagttttacacccgcatatggcgtaaccttcagtccttcgctcggttcgaaagtcttcgccccttcgctgcggaactccaggtactgctgtttcacgtcggtatcagccgttttgttcgtgttgccaaatgcaatcgagcggctgctgtcaaggttgtgaacgtcgtaacgcaaggcgttattccagttcatgccgttatcgaacgacatctgatgtttcaggccaaaaaaaaaaaaaaa

SEQ ID NO: 8219 - DNA, 714 bp, Homo sapiens; identical to SEQ ID NO: 2984

SEQ ID NO: 8220 - DNA, 753 bp, Homo sapiens
gctgaattgcccatgctggagtgttataccatggaattgtaaatgctacaaacaaagctttagtttccagagagctggttgttaatgtttaccagcccatcacaacaccaggctgtgtttgctgctctccagctgaaatcccattgaaatgagcacatcacattcccctctccctggatacttgctgccagattctgttcagaaagcaacaggaaacattaagaaaatatgaccgtcaataccctgtcactgagcattaaccacaaagtctatccacatgtgctctgcataggaaggagggctcaaattcatcctctgctgatgttcagagccacgcatcacctgaggtcaggaactgttggtttttattcactgttgttcccactgttcacactgagcaagagagtcttgaaggagagtgagaaaagtaggcgcatgaaaaagataggattgaagctttgcctgtggcattgcaaatcatgtaagaccaggagaggtggccaaacctcactctgcaggctgtttcctttctcattggaatgacaccacagtaagagaaaaggctcccatgtgggaagaagaccaggtctgactccacctttgacactgactcacagtgtgacctgcaaaagtgttcaattgtcctcccaggatactgtgattctagtgattttcatagaacctaccacttgtggaagtgcttaggggataatgcaaaaacaaacaaatagaactacatctaaaaaaaaaaaa

SEQ ID NO: 8221 - DNA, 769 bp, Homo sapiens
  misc_feature (129)..(129): n is a, c, g, or t
gagtagctagagtacaggcgttcactatcagctggctaattttgcatttttgtagagatgggtttgccatgtgcccaggctgtcttgaactgctgagctcaagcaatccaccttcctcagcctcccaancgttagaattataggcatgagcaactgcacctggccaggtgtacaaccttctttccaagtgagaaaactgatggtcagtgaggtaaagtgcgtgctttattaaaagcttgtcaagctactgcatgcagagtccagaccagaaaaactttctgattctgggttttgtgttcttcatacagtatcagataaagttgctgaaaaacttaaaacacttcaaaaactgtcaaacactgtcgactttagtccctccaagcaagacttttgtcataaattctttgtatgcccccccattacccggcacacagcatatgctcaatggggagccatagactcagtgtttttcccctgggtcatgttgcgggtgttatggggacttgctttttccatgctgtttttgaggagctcttattttcctaaagacattacagctataccagaactgggcaaggccatactttagtacttctgtatataggagtcagggaagcctgcttataaatcatgttgctaccatttaggatctatgtgagcttgagaaagtcatttcttctacctgagactctttatttttgtttttaaaatggagagaatcatgcctacctggacttcgtgtgtgtgtaaggttgaaaaaaaaaaaaaa

SEQ ID NO: 8222 - DNA, 672 bp, Homo sapiens; identical to SEQ ID NO: 2987

SEQ ID NO: 8223 - DNA, 723 bp, Homo sapiens; identical to SEQ ID NO: 2988

SEQ ID NO: 8224 - DNA, 560 bp, Homo sapiens
gccttccaatgaaactcccagttccctcactgcctgtgtgagccaccccaagcaaggacagcagctatattccccacactcttttcagagccctggctcagggtaggtgctcagaaaatcatgaatgaaaaacataactcaagcaaaatcttcactgacctagggacactccctggaggctcctcccaaactttcctacggtcccagacaggtggttgtagcaggtggggagtgcagcagtcctgccttggatgcagagctttacctcttagcacatcttcgactttaggtgcatccctcatcctctcaattccaggggaacatattgaagatcaaatgaaatactgccctgaggctaggggcggcttacgcctgtagtcccaggacttcaggaggccgaggaagacggatcacttgggcccaggagtttgagaccagcctgggcaacatgggaaaaccctgtctctacaaaaattaccaaaatcagccaggcatggtggcatgcacctgtagtcacagctacacggaaggctgaggtgggaagacagcttgagcgcggg

SEQ ID NO: 8225 - DNA, 802 bp, Homo sapiens
tccagcggcaaagtgtttgagcctttccagcagttcggggacagcaatagaaggggacctgcgaagactggccactggcaccataacatggggccaaatacccagaggacatcgtagattaagagtccgcccagcaggatgcagccagtgcggacattgttgaggtgcaggagctctactccattaagggagaagccaggccaaaaaggttgttggcaatccagtgcttcctcagcaggtaccagacgccaacgatgctgctcaggcccaggcacaccaggtccttggtgtcaaattcataattgatgatctcttccttgttttccccagaaccctgtgtgaagagcagctggtactgtcgatttggaaagctggctggaaaaaactttattcatgaaggggctggtgcctgctagacatctgctaaaatgcttgctgaatgactctgaatgcagacttttgtagcaggcagagattcttcctggcccttgatggctcatgtcaaacgtaaaggtcattgcttcccactgacaagccacatcctggtgcccttctcccctgatggtgtgggacagggccaggattcccagcacgaagaaatacatggacagcaggaggttgatgtactcctgggagaatattttgaaaaagaggtagagccccaagagtgtgcagctggcgatgatggggaagcgggcggcatcccggctggtgattgtttcaggcatgtctgaagcattcttgccgcgggcgcagcgtacggagcgcagggcgccgaagaagatgggcagcagcgccatga

SEQ ID NO: 8226 - DNA, 714 bp, Homo sapiens; identical to SEQ ID NO: 2991

SEQ ID NO: 8227 - DNA, 709 bp, Homo sapiens
ttaatacagcgttttattaagtagcttattgattgttcatagttgcttctcagcaacttaaatcctcatagaaatgcataattcttaaaggcagctaacatctccattttttcaagttattaagaatggagtgaatacacagtagcatggggtacccttggcatgatgccacgggtgaatgcagaatgcatcacgggatgactaatcccatttctttatcctaaggttcactaactgtggttaatattgagccaagtttatttgtgcagtttttgaagaggccaagacattaagattccttagaataaacatcatctgggcatcacctgcacacctaaatggatttattgccaatgagtaatgctgtgccttcgctgcacagtctacacagaaaatgtcgagaactcaataaaaacagtgcaacagtcttctgattgagtttgtattaaggtctctttattggattaatccggttcttttctcttcctttcctcatctgaatgaaacatattttaagggccattcattttagatgaagttgaggaaagtattttaaaaaaggaaaaaaataatgtatttgcagttaggctcactcctttaatcccagcactttgggaggccaaggtaggtggatcacttgagcccaggaatttgagaccagcctgaacaacacagcgaaaccgtatctctaccaaaaaaaaaaaaaaaa

SEQ ID NO: 8228 - DNA, 484 bp, Homo sapiens
ttgagttgctctagatctactgtccttttgttgtcttatattgtagttcattttgttaattggtatttttcaaggatgttgtccgatttaatcctatgttgtcacatttatgtggcacaaagatgttcataaatattttctgttgtcttctcaaattctgtaggatctgtagtgatatcccctctttcaatcattggtgatttgtctctctttttcttgattagtctgatgagaggtttatcaacattttttgtacttctccaagaagtagcttttggttgtattgattttatctaatgtttctctaatttttatgttgttgaatttctgctctttatctgtttctttcctcctacttactttgggaagacaacagaaaatatttatgaacatctttgtgccaataaatgtgacaacttggattaaatggacaaatccttgaaacataccaattaacaaaatgaactaaaatataaaaaaaaaa

SEQ ID NO: 8229 - DNA, 706 bp, Homo sapiens
agaagttcttgaagcttagttaccattcttacctgctatatgtgaataataaatgcagagttgctgcatgtagaagtttgtcttcatcatgtgcttcagcattcaaagatatcttgacgctctctttaagggattatctgacagggattagatgcaattttaactcctgtcccatagataaacacctacttagagcattatcattaaataattttcacaaagaacaagtaatttttaaaagatactattcaaaacatattattaaccagagaagtctttccaagaaggccttaacctgattatttggagaccacattttcttaatgtatgtgtccattttacccacacttccagtaataaagatactcgctctctgtatctctctctctctcactcacacacacacacacacacacacacaatcacatgcacacattatacacccttaggcagaaagaacaagcagagggaaaaaagagtatatgagtcttcagttctcatcatttagctcccacacagaggggaacaacagacactggggtatattgcagggtggagtgtaggaggagggagaacatcaggaaaaataactaatgggcactaggcttaaaacctgtgtgatgaaataatctgtacaacaaacccccatgacacaagtttacctatataacaaacctgtgcatgtacccctaaaaaaaaaaaaaaa

SEQ ID NO: 8230 - DNA, 145 bp, Homo sapiens
tttagatcagaaaggagagcagattttctttgggagttttaaaaaactatctttagatttagagatacaaagtactactacaatctcacagaagtccactaaagttcaccaaaaagctgacttacttcagctctcatgaggccaa

SEQ ID NO: 8231 - DNA, 734 bp, Homo sapiens
cttcatggccaatgggatgctgtgatggtcagttcccggggtcaattggcttggctactttcctcagtctgtcaattaaacactaatataggcattgttgtgaaggtattttgtagatgtgattgaagtataatcagtgattttaagtaagggagatatccttgataatcctggtggccctgattccatcagctgaaaggctttaagaacattgctgaggcttccctgaagaagaaatgctacctgggattgtggcatcaacttttgcccaagagtttcagcctgcccttcccaaatagctcgtcccacagatttcatacttgccctgaatcaatttaccatttaattacaatctcataagcgagttccttgcagtaaatccgtataatatttacctcttaccagctctgtttctctggttagaccttgattgatgcagttgccattgctgaccttattcaggagagtttcaatggagttatagggcaagtctgaattacaggaggcatgggcctctctacttcactttcttccaagttcttcttgcatgaggataaggcacagggagtggtttcttgagctgttattagtttgggtcccggcagcatccctagtcaacaggtaaaattgagcaaggcctactagctagagtctggagacagaagccacctaaatcagtttaggaggttttctaaaagtaaaatacatttagaaatcgtctttgaaaaaaaaaa

SEQ ID NO: 8232 - DNA, 700 bp, Homo sapiens
gcagttaattttgtatttttagtagagacgggtttcaccatgtgggcaggctggcttgaattcctgacctcaggtgaccctcctgcttgtcctcccaaagtgttgggattacagggcatgagccaccgtgccagccccttttcccattttagaattggggtctttgtggggtattgttgtttctgctattgttgttgagttataggagttctttatatatactagatattaatcccttatcagatatataattggcaggtattttctcacatcctgtgggactctgttgatggtgtcctttgatgcctaaaaattttccattttaatgaagttcaatatacctataccaaatctaatgtcataaaattttctcccatttgcttttaagagttttatagtctgggcacagtggctcaagcttgtaattccagcactttgggaggccaaggtgggcggatcacttgagcccaggagttcgagaccaatgtgggcaacatggtgagatgccatctctacaggaagcaagaacaaaagttagctgggcatggtggcacacatctatagtctcagctactcaggaggctgaggtggaaggattgcttgaacctgggaaattgaggctgcagtgagccatgatggtgccactgtattccagcctgggtgacagaacaatactttgtctcaaaaaaaaaaaaaaaaa

SEQ ID NO: 8233 - DNA, 730 bp, Homo sapiens
aaacagagaagcctctctggaatggcacagcattctcttaccagccaaatcaaccagccaatggaaggcaattaatgtccctaccatcggtcacccacccattcccgaaaagattattcagtgtggctgctgaggccaagagcagaaagggacatccacccagctggagaacatatgatttgggctcacactttacccaagtcgtattcttaaatatgatttatttcgaggtctgaatcagcaggggaaggctctcttgctgttctgacttggcacattctaccatcagacaagtctaaattcatctgttgccatttacatccatatcttttttttttaatttatttttcttggcctaggaatccttttagagttggtaaaagacatggacctgacacaaaaggattcttgctggtgtagagttagatgttacagatttaaggatttggaatgattcaacccctttggaaaactggcagtttctcataaagataaacaggcatctaccctacaactcagcaattccagtcctaagtattacctgaaataaatcaaaagatatatccacagaaataatcatttaagaatattcagagcagcaccgggcacggtagctcacgcttgtaatcctagcactttgggaggccgaggcgggcaaatcacgaggtcaggagttcatgaccagcctggccaacatggtgaaaccccatctctactaaaaaaaaaaaaa

SEQ ID NO: 8234 - DNA, 749 bp, Homo sapiens
  misc_feature (84)..(84): n is a, c, g, or t
ctagcctagggaaccacgggggcacaaccataatgatcagtatgaacctagcacccgagattctatgtgtagatttacgaagcntagcagttctaacagataggaatgacctatggcttactgaatggtgatactttctgtggggctcggaactacatgccctaggatataaaaatgatgttatcattatagagtgctcacagaaggaaatgaagtaatataggtgtgagatccagaccaaaagtcatttaacaagtttattcagtgatgaaaacatgggacaaatggactaatataaggcagtgtactaagctgagtagagagataaagtcctgtccagaagatacatgcttcctggcctgattgaggagatggaaaatttttgcaaaaaacaaggtgttgtggtcttccatccagtttcttaagtgctgatgataaaagtgaattagacccaccttgacctggcctacagaagtaaaggagtaaaaataaatgcctcaggcgtgctttttgattcatttgataaacaaagcatcttttatgtggaatataccattctgggtcctgaggataagagagatgagggcattagatcactgacagctgaagatagaagaacatctttggtttgattgtttaaataatatttcaatgcctattctctgcaaggtactatgtttcgtaaattaaataggtctggcccagaagacccactcaattgcctttgagattaaaaaaaaaaaaaaaaa

SEQ ID NO: 8235 - DNA, 675 bp, Homo sapiens
  misc_feature (154)..(154): n is a, c, g, or t
ttgggggaatatgtcaacatcgagacgcctgtgagaagaaccgcttgccagaattgtgggactgtgtggccaggccatgctgggaagccacgtgccgatgtgcctcagggtttacaggagaggactgccagtactcgacatctcatccatgctnttgtgtctcgaccttgcctgaatggcggcacatgccatatgctcagccgggatacctatgagtgcacctgtcaagtcgggtttaacaggtaaggagtgccaatggaccgatgcctgcctgtctcatccctgtgcaaatggaagtacctgtaccactgtggccaaccagttctcctgcaaatgcctcacaggcttcacagggcagaagtgtgagactgatgtcaatgagtgtgacattccaggacactgccagcatggtggcacctgcctcaacctgcctggttcctaccagtgccagtgccttcagggcttcacaggccagtactgtgacagcctgtatgtgccctgtgcaccctcgccttgtgtcaatggaggcacctgtcggcagactggtgacttcacttttgagtgcaactgccttccagaaacagtgagaagaggaacagagctctgggaaagagacagggaagtctggaatggaaaagacacgatgagaattagacactggaaaatatgtatgtg

SEQ ID NO: 8236 - DNA, 84 bp, Homo sapiens
attgcactccagcctgggtgacagagtgagactctgtctcaaaaaaaaaaaaaaaagtgaaaagtccagttcagcaaggcacac

SEQ ID NO: 8237 - DNA, 695 bp, Homo sapiens; identical to SEQ ID NO: 3002

SEQ ID NO: 8238 - DNA, 152 bp, Homo sapiens
ctggtatttaatgctgatctactataaggtattctatatttatatgacttcagagatcgcgtatgtaataaaggacgccctccctccagtgtccacatccagttcaccccagagggtcgggcaggttgacatatttatttttgtctattctg

SEQ ID NO: 8239 - DNA, 720 bp, Homo sapiens
caaggtcacatcccagaacatttaaagcgaatctctaggagtaggcttaagtatgtgctggtaaaagtttaataaccagctctctggaaaaccagtgttcatgtatacatgtagataaatttattataattttactgatgaaaaggatgtatggtatacaacttacaaataataatgagaatatacaatactctttattatagaatgctctcctgcaacttgagtctcaggtaatgctttcctgcatttttgctgaactcttttgtctgtagttaacctagggctgcaattcaaccatgatttgacaaaatcagtctacaaataaatgcttgactactgtccaaattcagtcattgacccatgaatgtagtttcaacatgaatgttggttgatattttcatttacattaacagataacatgaaagtaaaacaatgaagatgtatgttggaattttacttgttcattaatcacatgagagacttctttgctgatgaggtaatagttttcaacactgggagaatattttctcaattttctgtgctatttataatgtaatagttacagacacaatgtacattaagtttaatttgcattattaacattttcttaagtatagaccagggcttggcaaagtgttgcaataaagggtcagatagtaaatattttatgctttgtggaccacaaatgatgtcttcctcctcctccttcaaaaaaaaaaa

SEQ ID NO: 8240 - DNA, 727 bp, Homo sapiens
attatacctcaagctttatcattctttgtgttaggagcactccagttcaactgttaagttatttgaaatatacataagtattgttaactatagtcaccctattggctaccgaatactagaccttattcgttctaacggtatttttgtacccgttaaccatagtccgtcggtatatcgtccctccccactacccttcgctagtgctccagtagccatcattctactgttctctctccatgagttcaattattgtttagctgagatatgagaaattgagtgagaacatgtgatagttgtcttttcatgcctgatttacttcacttaacatgatgtccttcagttccatccatgcttttgcaaataacaggatttcatcatttgtatagctgaaaaatatttcactgtgtatgtgtaccacagtttaattatccattcgtccgttgatagacactttggttgattccatatttggctatttgaatagtgctgaaataaacatgagagagcagatatctcttcaatatactgatttcctttcttttggatatgtacccaggaatgggattgctggattatatagtagtactatttttagttttttaaggaaactccataatgttctccatagtggctgtaccagtttacattcccaccaagagcatacgaaggttcccttttatccacatcctcaccaacattagttaggaaaaaaaaaaaaaaaaaaaaa

SEQ ID NO: 8241 - DNA, 82 bp, Homo sapiens; identical to SEQ ID NO: 3006

SEQ ID NO: 8242 - DNA, 693 bp, Homo sapiens; identical to SEQ ID NO: 3007

SEQ ID NO: 8243 - DNA, 689 bp, Homo sapiens
tcgtttcacgtttaagggtcctctgaacggagttcaaaggctgctggccaagctcagtggggagcctgggctctgagattccctcccacctgtggttctgactcttcccagatgtcctgcatgtctgcccccagcacccagggctgcctgcaagggcagctcagcatggccccagcacaactccgtagggagcctggagtatccgttccatttctcagccaaatactcatcgtctttgagactgaaatcacactggcgggaatgaagattgtgccagccttctcttatgggcaccgtagccgccttcaccttcttcctctacccccttagcaggaatagggtgtcctcccttcttttcacaagcactgttgactctgcatatttattttatttttttaagagtccttcatagagctcagctcaggaaggggatggggcaccaagccaagcccccagcattgggatgcggccaggccacagctgctgctcccgtagtcctcaggctgtaagcaagagacagcactggcccttggccagcgtcctaccctgcccaactccaaggactgggtatggcattgctgggccctaggctcttgcttctggggctattggagggtcagtgtctgtgacgtgaataaagttccattttgtggtcaaaaaaaaaaaaaaaaacaaaaaaaaaaaaaaaa

SEQ ID NO: 8244 - DNA, 636 bp, Homo sapiens
ttgtgggtaccactgctgcgagtctccaccggaccaagcagctgctcctcctgtgcccaggcccagcccatgctctgtggccatgcacctagcaggcacctagcgggacagtggcgtctgcttcagggacatgagcaccgagcgcaggcgggacacatctttgcactgcttgctgctcttggggttgaagtcacatagctgggccaccttctcccactctgtgcctggggtctcctccttggattccttcacgaaagcctcctcggatgcccggttgttgatcttgttcttctctacttgttcactctggcgctggttccactcctccaggtccttcttggccttctcccgccattcctgttccgtgaccttagatgcagcatccagctcttgcagccgtttcctctgctcctctcgccacttgcggatgctctcaggctcctgggtcagcctgtcagcctgggcaatggctgcgtagccatcagcaggaccgttggcctcctgaaacacatctccattgactgtggtccccatgtcctcaagaaccagccccactcgtggggcccggctgcgcgggggccgcatggctgccggcaggtgccccgaagccctcgtcgttctctatgcctgcaatct

SEQ ID NO: 8245 - DNA, 727 bp, Homo sapiens
aaagctaagcccttctaactttgagttgatggaatagattcaaagattgaatgaatgatttaacctttatcctccgattcttacagtgcccagttctcctgtgctatctttgctttgtacaatagtgcatcttccactttctagagagaaagcatgcacttgttatttggaaaactgggctaaatatataacagtatccaaagttataccataataatttattgtaattgtgtattacatagctttgtttacccagatataggtgcgttcttttttttctgttagtcatctgtgacttttgttctggaatacaggtttttaaatatatcttaacagtctgactaacttaaaataatttattcttcccttaaaacatttttctgtgtttttgtgcatcaaatattgtagagttgaaatcttagagattgcttatcgaaatataaatttaggggaagttaaaaatcgattggcaaatttgtagcatttattcactgattaaatcttttccacttttgtgaaaaccataccagtggtttacatcatattgtaatgtgttcatctcattcttctttttatccctaaacctagctaaaagttactgcaaagaaatctttggctgccacaagtagatgctctctactaccagagctggatttccattactcactcttgctcttacattaaagttgttgattaaatactttttctctacaaaaaaaaaaaaaaa

SEQ ID NO: 8246 - DNA, 693 bp, Homo sapiens
atcttgactttggcactggaagccctagtacagctgcgtggaagattgacatcccaagattgggagagggttcatctgatcgtggcaggtggttatgacgagagagtcctggagaatgtggaacattatcaggaattgaagaaaatggtccaacagtccgaccttggccagtatgtgaccttcttgaggtctttctcagacaaacagaaaatctccctcctccacagctgcacgtgtgtgctttacacaccaagcaatgagcactttggcattgtccctctggaagccatgtacatgcagtgcccagtcattgctgttaattcgggtggacccttggagtccattgaccacagtgtcacagggtttctgtgtgagcctgacccggtgcacttctcagaagcaatagaaaagttcatccgtgaaccttccttaaaagccaccatgggcctggctggaagagccagagtgaaggaaaaattttcccctgaagcatttacagaacagctctaccgatatgttaccaaactgctggtataatcagattgtttttaagatctccattaatgtcatttttatggattgtagacccagttttgaaaccaaaaaagaaacctagaatctaatgcagaagagatcttttaaaaaataaacttgagtcttgaatgtgaaaaaaaaaaaaaaaaaaaaaaaaaa

SEQ ID NO: 8247 - DNA, 761 bp, Homo sapiens
atattgagtgaggaatggacctcgttttgtccctaagggatatgaattgtttttctgtgttatattctgcttggtgattagctggacaaacctggggctgacacgcgtaagctagggcctgcaaagcgagaagagagccggtggagtgtacttgtccctgacaggctgacctacctgagtctctgagcttttcagtccaaatctttgcaaggctcaaaatgccacagaacctctcctcttctccccactccccatggcagggaccggaccatccctacatgcaacatgctgttcctccagcccctcccattgccatggcaaaacaggtacctttggggcatgggggcattacatgggatgcttgtgtaatcgaccacctagccttctctctcccctcccgtcctcccccagaatcacttcctaggacacccgagctgcttgcccagggtcctgtttccctgctaactccagagaagcatcccagggctttgtgacagtctctaattcccttcccttctcgttaagaatcatattgtatagtagctttcagaccatacagtattcattgggttactcctattattatcaagtagctggaattgtgaaggtcggagtagttagatctttagcttttattccttatttttttgtattactctccatgtgtataaattattgatcatgttgctggcttttataaactctaagcgaaggaggagcactgcctcagcctttgcacatggtaatgaagcactgttttt

SEQ ID NO: 8248 - DNA, 746 bp, Homo sapiens; identical to SEQ ID NO: 3013

SEQ ID NO: 8249 - DNA, 705 bp, Homo sapiens
  misc_feature (1)..(1): n is a, c, g, or t
ntatttctttcagtttatagatctgtgcaacatttttgtactgtatgtcttcaaacctggcagtattaatacccttcttactgacatatgtacttttagttttagaaaacttttatatttatgtgtcttatttttatatttctttatttattacacagtgtagtgtataatactgtagtttgtattaatacaataatatattttagtatgaaaatttggaaagttgataagatttaaagtagagatgcaattggttctcctgcattgagatttgatttaacagtgttatgttaacatttatacttgccttggactgtagaacagaacttaaatgggaatgtattagttttacaactacaatcaagtcattttacctttacccagtttttaatataaaacttaaattttgaaattcactgtgtgactaatagcatgatgctctgcagttttattaagaaatcagcctaaccatacaactctcatttccttagtaagccaaattaggattaacttctataaacagtgttgggaacaatgtttaacattttgtgccaatttgttcctgtattcatgtatgtaagttacagatctgactcttcatttttaagttccttgttacatcatggtcattttctagttttttaccagactcccatctcacaataaaatgcatcaacaagcctgaaaaaaaaaaaaaaaaaaaaa

SEQ ID NO: 8250 - DNA, 659 bp, Homo sapiens
tattcctttaccattaagccaggcttgttgccggccgcttgaatgtcccagtctattcgggagtctgagtatagagagaatggcttgaaccccaggagccggagcttccagtgagccgagattgcaccactgcactccagctgggcgacagagccaagactccgtctcaaaaaaaaaaaaaaaagtgtaagtggattaaaagagaaacttggtctagttcataatatttttaatagggctttccctggctgctggaaaacttaggccagtaagcatctctttgtttaaagtcctacaagacaatttgaaataattcattgttcatgccaaaattctaagtactgtttttcttagcaagtgtaacataatcaggaacaatgggtacaagtaaaacattctttggatgatattcaaagccttattagcactgcacctgaataataggtcattttgcctcactcatttgccaaagtagccatttctaagttaaggaagtttttagataggctcatagccttgtatttcgttttagattgtaagctcaatggcagggatactatattggtaattatgttttcatatagcaaccaccacagtatattcttggtgcttaataaatgtttataattgttaaaaaaaaaaaaaaaaaaaaaaaaaaa

SEQ ID NO: 8251 - DNA, 574 bp, Homo sapiens
tggaccttggtgctgggggtggggaggcctgggggggacactccccactcccattccccttcctttgtcctaatcctggaattaagtacaggggtttataggttctatttcttcccaagagccctgcaaagaaccccagtttcctatttggatgcccctacactgttgtgtttcagtggaatgtattttcatttaaaaacaactttgaatggggcactttttctttcctgttttaaaaattgaaaaattcttacagtacaaacaggactgtcagggtgggggtgttggtgctgtaagaggtcactcttgagtgcattttggcactgggatgggatggctggggtgggaagacccccatccccacccccaacttcttttctaatatttaaggagtgttttgtaggattcaacaaccaccacaacttgaatttgtatcatgggaggtgggagggagtggcttagaggtgtctgcctatgcttaaagccaactgtggaagttttgttttcccttttttgtataataaagtgaaaaacaaaggtttgaaaaaaaaaaaaaaaaaaaaaaaaaaaaaaa

SEQ ID NO: 8252 - DNA, 720 bp, Homo sapiens
ctgtctgtgtttgaaatgggagtttctgcctgcaatcaaagtggagagttctctcaggtcaggtctgcagcagagctcgagacagggatctgaatgcacttggtttattgttgggggtgctctcagaaggaacctgtgaaagcctttatcagtcatttattggctgtgagaagttctctgggagtgtgggtacatttgaaggcaagtgacttcagttgagggcaagtctctggaaaagaggctgtaggcatctggcagctaccatgcatggtagtgtgttggggttgggggtcctgggcactggctgtgtgaagggatctggcagggcaccacagcgccccctactgaaccatcagcatgtcagtggcatttaaagccatgcagctggaggggccactgagattgtctctgagtattactgagaagcaacagaaaagagccatggatggagcccttgggctctctgggaaatgggaaatcagccaaaggactgagaaggagttaccttaaggtcagagaaaaccaagagagtgtggtgttctggaagctgagctttctttattcaacctcattcccttctccaaataagccacttgtgtagttgggcccctccagggttgaaggcaagaggagaaaggcacagcgtttgggaaacaagacttttcctgcaatagcctgggaaggaataaaaggatagagtgttaaaaaaaaaaaaaaaaa

SEQ ID NO: 8253 - DNA, 715 bp, Homo sapiens; identical to SEQ ID NO: 3018

SEQ ID NO: 8254 - DNA, 718 bp, Homo sapiens
  misc_feature (157)..(157): n is a, c, g, or t
ctgctttgccacagcaaggctgtcggggtcaagctggaaaggccagcagccttcccagtgctttctcccaacactcttggggaccatatatacttaatggttaagggacttgtcccaagtctgacagccagagcgttagaggggccagcggccctcncaggcgatcttgtgtctactctaggactgggcccgagggtggtttacctgcaccgttgactcagtatagtttaaaaatctgccacctgcacaggtatttttgaaagccaaataaggttttcttttttcccctttcttgtaataaatgataaaattccgagtctttctcactgcctttgtttagaagagagtagctcgtcctcactggtctacactggttgccgaatttacttgtattcctaactgttttgtatatgctgcattgagacttacggcaagaaggcattttttttttttaaaggaaacaaactctcaaatcatgaagtgatataaaagctgcatatgcctacaaagctctgaattcaggtcccagttgctgtcacaaaggagtgagtgaaactcccaccctacccccttttttatataataaaagtgccttagcatgtgttgcagctgtcaccactacagtaagctggtttacagatgttttccactgagcatcacaataaagagaaccatgtgctaaaaaaaaaaaaaaaaaaaaaaaaaaaaaaaaaaaaaa

SEQ ID NO: 8255 - DNA, 195 bp, Homo sapiens
  misc_feature (93)..(93): n is a, c, g, or t
  misc_feature (109)..(110): n is a, c, g, or t
taaatcaaagtaatacttttcccgaaacacacattggtactaaaactatgaaacttcattaacagaaggacaaacttagggaaacttgataanaatatgcacaaaattnnaagcacacacttttttttgtttttttttgagatggagtctcactctgtcacccaggctggagtgcagtggtgcagtcttggctca

SEQ ID NO: 8256 - DNA, 571 bp, Homo sapiens
gaccagtttaaaaatataggtactaacaaactgaattctttcatgggagaacaaagtaatacattctagagcaatagtatttctttatatcctttaggtagcaggacagagctaggacatagtaaagagatttacgatgtaatgaataatttgtttctacctaatgctataggggtattgctatcatttgaactaagaaagaacaattttaaaacttgtttataatgaagaatcggcatttccttaccacatatatactagatgtaaatataaggatcttctctaatagtctgtattccttaatccctatctgtacaaattagcctgcatattcaggaatggaacaaccagtaaactgttacttgaagaactaatttaaatgatccatttaagagaaatgcagtcaaaataaggcaataaccatcagcctatctgtacttttcttctgtgcctactcagtaaaattgagaaaataatttttgcccacttctataaaaatatcaccccatttgctacctagcatatgagagagacaagactagcctgtcacgtttgtctctaaaaaaaaaaa

SEQ ID NO: 8257 - DNA, 633 bp, Homo sapiens
aaaagggtggttctgccccacctaggggaaaaactgtatataagctttggggtaatgaaacttttagcctaggatttgtttgctaaagatcttctataaactttgtatttttgaatttaaagggaaaccttaaaagaaaggaaaaaaaggaccctgaagacatttatcaagattatctgttcttttaagatattgggccatatcttaaatgcatatatttgtaaaatattattcccaccctgactagtcattttgttttactcttaatatgttaaataaccatttattacttttttcaggcttactctaagaatttcattagtataaagttcccaaagttttaaatcgctttttaatcctttcctaaaaagctgtatttaacatctgctaaaaatacaggcactagatgatcaatgtatatccaaaatggtattttatcccaagtgactatacaatataatctatatctaagaagtaacaaattacaaatggttagcattaattttgtgtatttaactcattgaactttacatctatttttcttcatgatattctatacaatccattaaaaaggaagtccactaaaaaaaaaaaaaaaaaaaaaaaaaaaaaaaaaaaaaaaaaaaaaaaaaa

SEQ ID NO: 8258 - DNA, 715 bp, Homo sapiens
ccccagtttaaagtggctgaacagactcagtctacctccagctgaactttggtttttcttgtcctgtgtggaccccagaaaaaaaaaaaaagatgctctgagtccagacaggacagaaatccggaaaaaacattcacttcttgttttttccttaataaaagggaggatctggaatatggttctcccctctcttggttccactagaaatagagagcccacgttgtgtatcagtgggaatggaaggggaggtcctgtggtagcttgagggtcaggaagccaggccaagaaagccacaaagattggattccaagtagaaggggaagaccaggcgcagtggctcatgcctgtaatcccagcactttgagaggccgaggtgggaggatcacttgaggtcaggagtttgagaccagcttgggcaacatggagaaacctcgtctctactaaaaatataaaaattaactgggtgaggcagcaggcacctgtaatcccagctacttgggagactaaggtacaagaattgcttgaacccaggaggaggaggttacagtgaactgagatcatgccactgcactccagcctgggtgacagagcgagactccaactcaagaaaaaaaaaaaagtagaagtgcagaagagaaaggtcttaaaaaaaaaaaaaccatcaagaacaatttcaagacatgaaatgttctgcactgattaaaaaaaaaaaaaa

SEQ ID NO: 8259 - DNA, 729 bp, Homo sapiens
  misc_feature (350)..(350): n is a, c, g, or t
ctcagtttatttgttttttttgcttgggaattgaaaagtactgaaattcaatgtgacagttaagaatgcacaatttgtcctaatttatattggaggtatgacaaatgcagcttagccacgtgaggcataatactatttttttgaaaatacttttctcttggagtattgtaaatttcttaaactcggttgtaaaattagagaaagctggggagttaacacataatggtgtgcggttaccagtttataaattttttcattccttcctcatgcatatcaattaggcacatgttttgtgaaaaattttccaaaaaaaaggttctctaactctgaatggctctaaccagggaatnttccaaggccctgttgggtggaatggttaaggtaatttaacccataaggggaggtggaagtgggaggttaatgggtttccattccaatagagtattgctgattatacttgagtggaatcctttcctcacgtactcccacagacgtctgggcctggaaattttttttttattttattttattgtttttttttttagaaaaacaccacttttattatgtacaataaaatatttcattagcttgaattgtatagatttttaaaaattcaatgaaagcatgttgtttaatttctttttaaaatcactgttgggctttgaaagcattgagaatataatatgaaattatgacaaaaaaaaaaaaaaaaaaaaaaaaaaaaaaaaa

SEQ ID NO: 8260 - DNA, 535 bp, Homo sapiens
  misc_feature (101)..(101): n is a, c, g, or t
  misc_feature (109)..(109): n is a, c, g, or t
cctcccactaggaccctgtggggactcagcctggtccagcccccgcattagggggagacccccatctcccctaatgagcgctcacggggtcttccccggcngccccccnctgagtctctctagtccccgggggtctaattgcgctgagccttgagcacacgtgggccagtggttattcagcgttttttagggaatccaggggccagggcttggaggccaaggaggggccagcagccaccccgcgccaggcctgtgtggctagaggtgtgtggggttctccaaagaggggtccgtcttagtcatgtgcaagaccacggtgggagccttatagtggcagtgcgtgccacgtccgtagctcccgggggcgcggcaggccttggcccgggcccggccagctgctatcttgcggtagcacaggctctgccaggtctggaaagtcttggagctccacacccagacgccgctggtgatccccaccaccagtgacatgaaaattttgagcatgaagaccgccacggtgggcaccgagcccctg

SEQ ID NO: 8261 - DNA, 448 bp, Homo sapiens
tttttcagggggttgggagaattggctagccatgtgcagaggattgaaactgaacccctttcttacaccatatacaaaaaactactcagctataaaaagaaatgaaataatgacatttgcagcaaactggatggaattggagaccgttattctaactcagggatggaaaaccaaatattgtatgttctcactcataagcgggaactaagctatgaggacataaaggcataagaatgatacaatagactttggggacttgggggaaagagtgggagtggggtgagggataaaagactacacatttggtacagtgtacactgcttgggtgatgggtgtaacaaaatctcagaaatcaccactacggaacttattcacgtaactgaacaccacctgttccccaaaaacttattcaagaaaaaaagagctcactatcaaaaaaaaaaaaaaa

SEQ ID NO: 8262 - DNA, 632 bp, Homo sapiens
  misc_feature (184)..(184): n is a, c, g, or t
  misc_feature (426)..(426): n is a, c, g, or t
  misc_feature (428)..(428): n is a, c, g, or t
cccggccaaccaaaaccccggctatttttgtaatttaagtagagacagggtttcacccgtgttaaccaggatggtctcgatctgacctcgtgatccacccgtcttggcctcccaaagtgctgggattacaggtgtgagccactgtgcctggccttcctagctgtcttggtgaaacgataagtcnaaaccctactgcagtgagttttccaaactgaagggagaagcaatgtacagaatgcctgacttgcccttacatcttatacctggtgttctggcatgattattaaccacactctttgttcacgtttgaaccatgtcctggtttgcatggccagcttccctgcagaggtgatagaaactgacttgaggccagtttctttctccatgccttagttagatgaccctcaaaggggcacagcagatttncnctggctactgatacaccttaacaagaagcttgtgttttttatgccctcaaaagtgttttacttatactttcctagacataaaggtggaaaatgggcctaaggtctgtcaaaggtcttggaaaagaagattgtattaaaattgctgtccgtcttcattaaataatactagatcgaaaaaaaaaaaaaaaaaaaaaaaaaaaaaaa

SEQ ID NO: 8263 - DNA, 679 bp, Homo sapiens; identical to SEQ ID NO: 3028
  misc_feature (639)..(639): n is a, c, g, or t
  misc_feature (648)..(648): n is a, c, g, or t

SEQ ID NO: 8264 - DNA, 697 bp, Homo sapiens; identical to SEQ ID NO: 3029

SEQ ID NO: 8265 - DNA, 360 bp, Homo sapiens
  misc_feature (86)..(86): n is a, c, g, or t
  misc_feature (92)..(92): n is a, c, g, or t
  misc_feature (201)..(201): n is a, c, g, or t
ccagacacaggcctgggtaaccatggtgagaccctatctctattaaaaaaatataaaaattggctgggcgcggtggctcacgcctngtaatncccagcactttgggaggccaaggcagccagatcatgaggtcaggaggtcgcgaccatcctggctaacactgtgaaaccccacctctactaaaaatataaaaaattagcncgggcgtggtggtgggcagctgtagtcccagctactcgggaggctgagtcaggagaatggtgtgaacccggaagtcggaggttgcagtgagccaagatcgcaccactgcactctagcctgggtgacagagcgagactccgtcttaaaaaaaaaaaaaaa

SEQ ID NO: 8266 - DNA, 731 bp, Homo sapiens
tacaacacctgtggactctacatgttgcgactctacatacctctctgatctcatgcttgccttcttttcttattcactccagcaacacaaccatgtttttattcccttgaacataacaggtatttaacctttcaaggtaatactttcttccagtgcctgaaagctttcctgcccagttatctgcatagataccattttacttcctttattctacaactcttacagtttaaaattagttgatagcagacattaaatggtagaagcaagaaaagaatgatgtatgttgtaatagtagtagagggaaatatgggagcataactgggggcctgttccaagactaaggataaagaaagctctccttgatggtgtcataccagtaatactttgctgagaagataagatatcaaagagacaaattaatttctgataacttttccaaatggactctagttcaaaccagaaattccctagtgtatgtctttactaaattgggagaagtagagcttatatgcccctatttggcgaacttgccgtaacctaaattgtgatctggggtacattttgaaaccgtaaacacttttcttctaggattatgtttatcccttccaagaatcattatagaaaatgagagatgtaaatgatggggttatgttgtgtttgtgaatgatattgaggcagaataaaaataaaagagaacaactgagatgtgctaacctaaaaaaaaaaaaaaa

SEQ ID NO: 8267 - DNA, 148 bp, Homo sapiens
cacaagtgttgtacacaaaaagcaggctggtaccggtccggaattcccgggatcgagcggccgcggccgctcgcctttttgtttccttacagacacccataataaaatatcatattaaaattcaaaaaaaaaaaaaaaaaaaaaaaaa

SEQ ID NO: 8268 - DNA, 703 bp, Homo sapiens
gtcctggtttttcggggcaccaagtaagacagactcttggccaccttgtgttctgctgaagtctgccacgtgttctgaggggaagtgccctcgccagcgtcgcgccctggaggcggggtctgcaggacgaggatggctacaggatgaagtttgcctgctactacccccgtgtggagtacggcttccaggttaaggttctccgagaagacagcagagctgctttccgcctctttgagaccaagatcacccaagtcctgcacttcaccaaggatgtcaaggccgctgctaatcagatgcgcaacttcctggttcgagcctcctgccgccttcgcttggaacctgggaaagaatatttgatcatgggtctagatggggccacctatgacctcgagggacacccccagtacctgctggactcgaatagctggatcgaggagatgccctctgaacgcctgtgccggagcacccgccagcgggcagcctgtgcccagctcaacgacttcctccaggagtatggcactcaggggtgccaggtgtgagggctgccctcccacctccgctgggaggaacctgaacctgggaaccatgaagctggaagcactgctgtgtccgctttcatgaacacagcctgggaccagggcatattaaaggcttttggcagcaaaaaaaaaaaaaaaaaaaaaaaaaaaaaaaaaaaaaaaaa

SEQ ID NO: 8269 - DNA, 703 bp, Homo sapiens; identical to SEQ ID NO: 8268

SEQ ID NO: 8270 - DNA, 668 bp, Homo sapiens
ctcaggccaggcctgcttggaccccactggctctatgttgaggactcaggtggagctctgctgggctcagtggctttcacagccggggtccacagacccgggtcctacgggcagtactgtgctcacctagaggccacggtccatgccctgtctccagcaggcccaagtcacttgtccatggcgaaggcccggccttgcttcaggccccgggcgcgctccccctgctccccctgcccaccgtttcttcccaggtgacagaggcgggagagcaggcgagccacgtgccgggcgccgcagcagggggcactccaggctggcgcccctctgcctctccgtgggctctgacctttcttctccctgcctgggcagcctccttcaggttggggagtctttggttgacccctggattaaagtcctaatcaggaatgacccggaagaggtcttatgaggctttcctcaagagaagaaaatctgtccctgagtatcaggaagtggcccctttccctgcaccgcagtcttctgtgaccagcggctcacacagcgaaggaggggctggcggcccccacaggccactgccccgaggccgccacgagagggcaggagagcccttcctgggagctctgtgccacggggaaacgcagccccgccaagcacagcatggatgtttc

SEQ ID NO: 8271 - DNA, 657 bp, Homo sapiens
gtttttatcttgtacggtcactgttggtgcgagacttgttttgcctgtagcaggataacaggtcttacgatgttatgagtctgattcaggtatgacgtggacctccgtgacacacggaggctctgtgacaagggaaacctgcgtgtcaagccccacatggtgcactgcagtcttctggtacaactacctgcctgatgggtcaagtgttgtgctggttgacgtagacgactactcgctgcacggggtgctgcctggtcacgctgcggcaccatagtggattgcctacaactggattaatgtggacctccagccgagcgtcggcaagcgctgttccaacaggagatggcccgccttgcccgagaagggggcatccgactcacagtcccgagtgggctctggaccgggccttccgcgatgcgcgcgtggaactctgagggaagagttagccccggttcccagccgcgggtcgccagttgcctcaagatcaggggtccggctgtccttctgtcctgctgcagactaaaggtctggccaatgtcttgccccaccccgccagccgcgatacggcgcagttcctatattcatgttatttattgtgtactgactccatctgccccgtcaaataaaaaaccacaaggttcgaaaaaaaaaaaaaaa

SEQ ID NO: 8272 - DNA, 716 bp, Homo sapiens
  misc_feature (541)..(541): n is a, c, g, or t
gcagttgtgaaagcaccatcatcatagaggatgatgtaattaaaatggtcagtgtgccaaagaaaagaactgcttgcattctgtatttcgtgtctcataattgtcaaaaccagaattaggtcaagttcatagtttctgtaattggcttttgaatcaaagaatagggagaccatctgaaaatatcttaggttggagatgacagaaatatgattgatttgaagtggaaaaagaaattctgttaatggttaattaaagtaaaattattccctgaattgtttgatattgtcacctagcagatatgtattacttttctgcaatgttattattggcttgcactttgtgagtattctatgtaaaaatatatgtatataaaatatatattgcataggacagacttaggagttttgtttagagcagttaacatctgaagtgtctaatgcattaacttttgtaaggtactgaatacttaatatgtgggaaacccttttgcgtggtccttaggcttacaatgtgcactgaatcgtttcatgtaagaatccanagtggacaccattaacaggtctttgaaatatgcatgtactttatattttctatatttgtaactttgcatgttcttgttttgttatataaaaaaattgtaaatgtttaatatctgactgaaattaaacgagcgaagatgagcacccaaaaaaaaaaaaaaaaaaaaaaaaaaaaaa

SEQ ID NO: 8273 - DNA, 716 bp, Homo sapiens; identical to SEQ ID NO: 8272
  misc_feature (541)..(541): n is a, c, g, or t

SEQ ID NO: 8274 - DNA, 587 bp, Homo sapiens
cactcgtatccctcctcacttgccctgccactttgcatggtttgattttgactctggtcccccatcgtgtgttagtgttagtggcatccatttctgatgtatgcattcatcctacagagttatttattgttctgtagatggataaatcacaccacctgacaggccttctgggcctcctaatctccatccttggggttccccctccctgtgtgaaatgtattatcaccagcagacactgcacgggcctcccatcccgggggcactgcctgtaaggtcgagtgtgggcatagcattagctgcttcctcccctcctggcacccatctgtggcctggcatcgcatcgtggtgtgtcaatgccacatatcgtgtgtccgtggaaccagtcctagccgcgtgtgacagtcttgcattctgtttgtctcgtggggggatggtggacagtcctgcggaaatgtgtcttgtctccatttggataaaaggaaccaaccaacaaacatgccatcactggaatttcccaccgctttgtgagccgtgtcgtatgacctagtaaactttgtaccagttcaaaaaaaaaaaaaaaaaaaaaa

SEQ ID NO: 8275 - DNA, 587 bp, Homo sapiens; identical to SEQ ID NO: 8274

SEQ ID NO: 8276 - DNA, 697 bp, Homo sapiens; identical to SEQ ID NO: 3041

SEQ ID NO: 8277 - DNA, 732 bp, Homo sapiens
  misc_feature (171)..(171): n is a, c, g, or t
ctctaggccccatagtcacagcagctctgagccagattaacaggaatgaagaactgtggcctaattggaaagtggccagcattccagacctcagagataaatctgaagaggcttctcctgttttatatattatgtgaagaatttagatcttatattggtttgcacaagttnccctggagaaaaaaattgctctgtgtatatctcttggaaaataagacgatagtatttctcctttgcaatagcagttataacagatgtgaaaatatacttgactctaatatgattatacaaagagcatggatgcatttcaaatgttagatattgctactataatcaaatgatttcatattgatctttttatcatgatcctccctatcaagcactaaaaagttgaaccattatactttatatctgtaatgatactgattatgaaatgtcccctcaaactcattgcagcagataacttttttgagtcattgacttcattttatatttaaaaaattatggaatatcatctgtcattatattctaattaaaattgtgcataatgctttggaaaaatgggtcttttataggaaaaaaactgggataactgatttctatggctttcaaagctaaaatatataatatactaaaccaactctaatattgcttcttgtgttttactgtcagattaaattacagcttttatggatgattaaattttagtacattttcaaaaaaaaaaaaaaa

SEQ ID NO: 8278 - DNA, 732 bp, Homo sapiens; identical to SEQ ID NO: 8277
  misc_feature (171)..(171): n is a, c, g, or t

SEQ ID NO: 8279 - DNA, 689 bp, Homo sapiens
gacgtcaagggagttgttttgcacctaaatcgacgggactttccaatgttgtaacaactccgccccatgacgcaaatggcggtaggcgtgtacggtgggaggtctatataagcagagctcgttagtgaccgtcagatcgcctggagacgcctatccacgctgttttgacctccatagaagacaccgggagccgatccagcctccggacttagcctaggccgcgggacggataacaatttcacacaggaaacagctatgaccattaggcctatttaggtgacactatagaacaagtttgtacaaaaaagcaggctggtaccggtccggaattcccgggatggccgccctttgtttttttttttttttttttttgctctgaaaacactttattacacaaattacattcagattctgaaaatagtgttctaacagtgtaaccatctaaaaataagacatcccaaaaacacaccaactgaagaaaatttaaaaaagaatttaaatagagacttttttatttccttcattgcaatataatgttagtgattttaaaaaaataggagatttagcagctttgtcgtcatgtagcacaaagtttctctttactgccacaggctaagaatgctgaacaggaaaggcaccaaagaaagacactggcaatgaaagtgctattgggaaaaaaaaaaaaaaaa

SEQ ID NO: 8280 - DNA, 171 bp, Homo sapiens
agataaaccagaaagtgtattgccaactttgttaagtggctcagaaaataaattagccatggaggatgctaaaccattgagatatgaagattataaattaatccacatatgaaagtgtacatatcattaagcattggctgaaaatcacttaaatggagatccagtcgacct

SEQ ID NO: 8281 - DNA, 754 bp, Homo sapiens; identical to SEQ ID NO: 3046

SEQ ID NO: 8282 - DNA, 711 bp, Homo sapiens; identical to SEQ ID NO: 3047

SEQ ID NO: 8283 - DNA, 775 bp, Homo sapiens
  misc_feature (167)..(167): n is a, c, g, or t
gggacctcctggagcactgacccgtctagagcattagttctggtctggagttgtttcaaattatgaggtacaattgatcacaatactgcaaatattaaaagtataccattgatcagttgtgacttatgtatacagctgtgaaaccatcatcataatcaagaaaatanacattgccatctcacccaagagattccttatcatcttttttaattcattccttcttccatcctaaccccagacagtcatgaagtagctttttatcactgtagcttttctgggacttttacaaatggaattatactgggtgcactcattttaacttaactcgttttaactcgttttttttcccttgttattaatagtatgtcgaattacgttgattggtttttcaaatatttaaaaacaacttttcaatctttagaggtctatagactgtactggtgatgtagtatgttgtcttatttatattacatacaattcagttcttacttagtataatgatcttaagaattacccatgtttattgtatttaatattattattattattattattattattattttgctgagtaggattttaacacatagctacaccaaaattttttcatccattcaccctattagtgggcatttgtgttacttccaggttatggcatctataaagccactataaacattcatgtctacattttggtttgtttggttgaatacctagatgtggaatgcatgggttatttggtaggttcatgattaacattaaaaaaaaaaaaaaa

SEQ ID NO: 8284 - DNA, 93 bp, Homo sapiens; identical to SEQ ID NO: 3049

SEQ ID NO: 8285 - DNA, 335 bp, Homo sapiens
gaagatcaattaaactttgagtcatgaacctccctggggatcaactccagataagaactgctctgggactgtaatttgccagattccatttcatgttaaatacaaaagacttggggattttctgactttgtattaccccttctcttttcctaattaacaaggaccatcttctatcccaccaaaaataagcactcctagcccaatatttatttctcatataaaactgttagaaacctccacattcttaggcggaggttgcagtgagccaagatcacgccactgcactccagcctgggcaacaagagcgaaactggtctccaaaaaaaaaaaaaaaa

SEQ ID NO: 8286 - DNA, 623 bp, Homo sapiens
gattctatagttatctggatttacctaagtttactttttaagtgcattaatagggcattttgtgttttgagttccctcattcttattaccagtaagagcttgcaaatatgttttactttcttggcactggaagggtagttctggaaagctactttgttgagagtctcattcttgccctggagttaatagagtgagttcacaatctttggggttttctcctcagtcaaaagcatttgcttaagtgcctatctaaaagcaagttaaagactgtgtctgccctttagaagctaagaatttgattcatgatgcaaattaactagataatttgcaaagtacccttgagattgaattttctctattatatattttcccatatttcaggtgaataatttaatttaaatgacaaaaccctatctagtcaactgggcataatgacattttctttaaattagactctattttgaattaaaagagttttattataaaccgtgtgtttttggtttttctaagtatatagaaagcttgtataattcagatttatcaatttcctgatttaatgtagactttgacttttttattaaaaacctttgtattaaaaaaaaaaaaaaaaaaaaaaaaaaaaa

SEQ ID NO: 8287 - DNA, 577 bp, Homo sapiens
gctcccttccggtacatgaacgaagcctttgcatccctgggatgtaaggtaccacctccgggccctctatgctctgtccagcctccagctcctcagacctcctggtgggtttgtgcttcaggtggggtttggaagcttctggaattcgtgctggtctcccaggtgaggcaagccatggttgctgggctgtagggtgagtggcttgcttggtgggacctgacgagttggtggcatgggaaggatgtgggtctctagtgccttgccctggcttagctgcaggagaagatggctgctttcacttccccccattgagctctgctccctctgagcctggtcttttgtccttttttattttggtctccaagatgaatgctcatctttggagggtgccaggtagaagctagggaggggagtgtcttctctctccaggtttcaccttccagtgtgcagaagttagaagggtctggcgggggcagtgccttacacatgcttgattcccacgctaccccctgccttgggaggtgtgtggaataaattatttttgttaaggcaaaaaaaaaaaaaaaaaaaaaaaaaa

SEQ ID NO: 8288 - DNA, 711 bp, Homo sapiens
attctcaaagaaggacccaggtgggaattttggaagtatctgccaacctgaggttcaatttgtgaagttctgggaggccagaggagcccattgaaagtcatcaggcctgacatagcagctctggttagacaagtgatcataaaaagaaagaggatctatgagaatgccattgcgtttctaatagaacagagaaatgtctccatgagggtttggtctcattttaaacattttttttttggagacagtgtctcactctgtcacccaggctggagtgcagtagtgcgttctcagctcattgcaacctctgcctttttaaacatgctattaaatgtggcaatgaaggatttttttttaatgttatcttgctattaagtggtaatgaatgttcccaggatgaggatgttacccaaagcaaaaatcaagagtagccaaagaatcaacatgaaatatattaactacttcctctgaccatactaaagaattcagaatacacagtgaccaatgtgcctcaatatcttattgttcaacttgacattttctaggactgtacttgatgaaaatgccaacacactagaccactctttggattcaagagcactgtgtatgactgaaatttctggaataactgtaaatggttatgttaatggaataaaacacaaatgttgaaaaatgtaaaatatatatacatagattcaaaaaaaaaaaaaaaaa

SEQ ID NO: 8289 - DNA, 702 bp, Homo sapiens
cgtttgccctttggtctaaaaaaattgcaagatagttaaaggcactaagtttacactcactttatagagcaagatggacacatagaacacactatttgtaacagccaactctggaagacatttggacaaactcaatcaaattattaggcacaatgaacttccatcttgtaatgctacaattcagaggcatttaggccaatatgggtgttctgtgatattatgtattgtgaatatgtggggaagtcttcttaaaggaagattagctctttacgatggaaaaattaatttatttgtgcataaatatggtgttatttttagtatgtaatgaattccactgattgtcaaaaagaatattctgaatgaaatgatatatggattgaaatagataaaataatttttacaggttttaaaatttttaatgactttttagaattcctaggcttgtcaattaagtcaagaaattgctgagttctgcttattggcagccttcttttaaatgtgataaattattgtttacactgaatttgaaggtaaaaatgttctgttccttttgttacaaactgtgattgaattagtcatgaattaagttgtatagtttggattttggttaatctctaaaatctaattttactgtatttttttccttacctcaagtgtaattttttaaaaaataaaactcgaaacaataaaaaaaaaaaaaaa

SEQ ID NO: 8290 - DNA, 706 bp, Homo sapiens
atctaattatctgggcatgttggcggttgcctgtagtccagctactcaggagtctgaggcaggagaatcgcttgaacctgggagcagaggttgcagtgaaccgagatcgcaccctgcactccgcctagcgacagagtcaagattctgtcttgaataatgattatctattgtatatacaagtgggacgtaaagtagtaaaggaatgcaaaaggcacaatgatgtataagaatttgaagacatccgtgtccctccccctccttgctccatctctggacttgattttaagatctttgaagtcaaaggatcttgacttgctcacctatgaacctatcccccaccctctcccagtgcctagcatagtacctgactcaataaatacatgttggtgcagaatatagtcataggaaaaagaaaaaggaaatccagaagcataccaaaagatcagagaagcagctatacaaagagagccaacttacagatgaaacatgtgttaaagagtgggatttaacagatgtcttcatgtaaaccagaggctatgcttagatttttcttttaaaatatttcatttgtgggccaggcacggtggcttatgcctataatatcagcactttgggaagccaaggtgagaagttcacttgaggccaggagttcaagaccagcctgagcaacatagtgagaccctgtctgtacaaaaaaaaaaaaaaa

SEQ ID NO: 8291 - DNA, 625 bp, Homo sapiens
aaccgtaacttctgatttctttgcaaccctctgcattccatctctatgagccaccattggattacacaatgacatggagaatgggaccccgtttcactatgctgttggccatgtggctagtgtgtggatcagaaccccacccccatgccactattagaggcagccacggaggacggaaagtgcctttggtttctccggacagcagtaggccagctcggtttctgaggcacactgggaggtctcgcggaattgagagatccactctggaggaaccaaaccttcagcctctccagagaaggaggagtgtgcccgtgttgagactagctcgcccaacagagccgccagcccgctcggacatcaatggggccgccgtgagacctgagcaaagaccagcagccaggggctctccgcgtgagatgatcagagatgaggggtcctcagctcggtcaagaatgttgcgtttcccttcggggtccagctctcccaacatccttgccagctttgcagggaagaacagagtatgggtcatctcagcccctcatgcctcggaaggctactaccgcctcatgatgagcctgctgaaggacgatgtgtactgtgagctggcggagaggcacatccaaca

SEQ ID NO: 8292 - DNA, 706 bp, Homo sapiens
aatgtacatagtacataggtgatcaattcacaaggccatcttagacagttggtgtaataaataatctggtctttgaaaagaccgtgctggcgcgtggctctcgcctgtaatcccagcactttgggaggctgagtcgggcagatcacctgagatcgggagtttgagaccaagcctgaccaatatggagaaaccctgtctctactaagaatactaaattagctgggcatggtggtgcatgcctgtaatcccagctacttgggaggccgaggcaggagaattgcttgaacccgggaggcagaggttgcagtgaggtgagatagcgccattgcactccagcctgggcaacaagagcaaaactctgtctcaaaaaataaaataaatgatggagctccgaatgtgcttaagtggaaagatatctatgaaatatggtggttttttaaaacacaaaaattatagaatatgggatcccgtgtgtgtgtgtgtgtgtgtgtgtgtgtgtgtgtgtgtgtgtgtgtttgaatgaaaaatgcttatgtattgacagaacacttctagaatgatacccaaactcctggagtgggagtggggaatgccttctacgtacacactgttctactgtttgaattttttaatatgagcccaaattgtataatctttttttaataaaggggagaaaaatcacttaaaaaaaaaaaaaaaaaaaaaa

SEQ ID NO: 8293 - DNA, 714 bp, Homo sapiens; identical to SEQ ID NO: 3058

SEQ ID NO: 8294 - DNA, 727 bp, Homo sapiens
  misc_feature (130)..(130): n is a, c, g, or t
gtttaattccccacctaatctctcgctttgttgtcaaacacccgttcatcatccatcttaattggcataaggacatatctacgttgaatgtactaccacagtttacagttaatgtgggaaagaccagctntcagtatcctcttcagctaggattgccctaactttgaactttcacagtttcctgattcatatttgcccaggctctgatgccttgaattggttttggctctcttttttggttctgtttttgttgttaaacatcataatgcagtctctcattaatttttaccatcatttaccctgataatctgcctcttctccatttctccttcccttactacctttctttgaattactgtaactgattggtcccaccaaaattttaaagtacatgaagtatcttcattggttcatcctcttgccccctccagatgtcaaaaaactttatcctgccccctagctgaccacccaggttcctttatttcagtggcccatgtgagtctaccttcccctaaggagtgccctaatccagccctttttttgtttcttatgacccatatctttaggctcttcccatttctaggtgggagataggtaagtttcaaatctatgccagtcttatgaatattacattagggtaatgtgctataatgaagaaataaaaaatacagtgcttaaaagaaaaaaaaaaaaaaaaaaaaaaaaaaaaaaaaaaaaaaaaaaaaaa

SEQ ID NO: 8295 - DNA, 695 bp, Homo sapiens
cgtgtcggctcttctcccctcacaaatgttgattctgaagtgctctgtaatcgaaatcctgcattccagaccccacctcagagttcactccccgagagcccaacctgcaacacgtcaagcagactgccaccctgtcagtccatggctgatggaggacagatgacaagatataccctgggctgctgccagtagcagcccctcaagccttggtagggtctggagtcagactcagccgccactgacctagcccctactccaagttgaccatcttcagagccgggtactcactggatcttcacacactctttgttagaggaatgactcccccaggtttcggatggagaaactgaggtcccaagaagggtggtcacagaccagaagccagcttccagcactttctcccagcgttaaccccaggggaggtgagggatcacccatctttccccctccctcttgggaacagttgattcacccagcagcactaggaagagaccccatgccctggccactgggctagctcctgtccaggccccattgtaatcgaatcccaaatcaggagccttccccagctccatggtgtcggggaggaggaggaaaggtcaggggccagctgggtggtgccaatccattggccctaccttaaagacaaacatctcgccccggaaaaaaaaaaaaaaaaaaaaaaaaaaaaaaaa

SEQ ID NO: 8296 - DNA, 721 bp, Homo sapiens
ctcagttatatcattgctccatgcattgataataaaaattcagtataattttttctgatcttataagctttataggagttttcttttctctgtataaagtgtttcaccttatgtaaaacacaatgcctgcttgcatattggaagatgttgaaattagttttagacaaaagtggtccatcaatttcagacactctgcttggatgccttacccgttttcattagtgcattctttgcttctgaaacttggcagaaactcgttagccagtccactgcctttctgacaatgtgtggagtcacgtatgcttggtatatgcctttactacttttaaagttctacagtttattacttgcccaagtgttactaaatccttttcttatgtgtactggatggagaaaaaattatagccagcactttgagaggaaagttttcagaaacaatattaactggcactactaactgaaggccacaggagatgctatcaatgttatttgtaatctgaagattgaacaaggctgtgaggctcatttcaaactattttgaggtgttaaaatatatatatgctgtttctcagctgttccactcaaaccgtgttaggactctcaaaggtaaaatgtcacaggggcttttcagttgttacagagctcagcagctgtggttgcccctgttctacaccaatttcagttcaataaaaatgttaactttgcaaaaaaaaaaaaaaaa

SEQ ID NO: 8297 - DNA, 720 bp, Homo sapiens; identical to SEQ ID NO: 3062

SEQ ID NO: 8298 - DNA, 682 bp, Homo sapiens
gcagactcctgcggccgcactgggtggtcaaggaggggaccagattgtggtgccaccatctacttgacaaccgcagtcggtgaggtgacccagctgctgaacaccatggggcaccacacggtgggcctgaagctgcaccgcaagggggaccgctctcccgagcctggccagacctggacccgtgaagtcttcagctcctgcagctctgaagtggttctgaacacaccacagccatcagcactggaatgccaagaccaggaccaacagaaggaagccagcagccaagccggggcagtttcagtctccaccccaaatgcaggactgtagaagcggccaggaagaaaaccaccccctcttaaggttgtttttgtgaccgttctttggagcattgttctaaaaatgggaaattacatattgctgtgccaagggcaacaaacacctgcagttaaaggaataccttccgcgaggcggcttttcggagcatgcatgtttatagctccagccaggccagaccgagggctgctgcataagccctgcttggtgcatttctttacttgcaaggggacagagtgtgggcttaggtttgggactagagggggctttggcaactatggtgctcaggtgattatccttcgctcgtttatccaataaacatttatcaagcatcaaaaaaaaaaaaaaa

SEQ ID NO: 8299 - DNA, 682 bp, Homo sapiens; identical to SEQ ID NO: 8298

SEQ ID NO: 8300 - DNA, 629 bp, Homo sapiens
tcagctgcgttcactactgacggtctcaagaggtcaaaatcaagttattggcagaactgagattttatctggaagttcttggggaataattctgtgtccaagtttattcaggttttttggcagaatccagtcccttgtggttgcatgtctgagattcttgtttccttttggcctgtcattcagaggctgctctctgatcctagaaattaccactatttcttgttcatgtggtcccttccatagtcaataccaacaatggcacatcaactccttctcacactgaatctctctgacttcctcttccacatgtttacatttggcttacccagacaatccccagattgattaacttaaggtcaactgattagtaaccatcatcaagattactaatatcttttgccctgtaatgtaacaaagtcagggcatgatatctcatcatattcacagtcctgagaataaatatggcaaatttcaggggcaaggaagaattttagtactctgcatgccacaagtgagaaaagaaaccttgtttaaaggtaaataattatgactgatttcttataggaaaaaatatatgacagtagacaataaaaaagtacctttaagacagaaagaaaaaaaaaaaaaaa

SEQ ID NO: 8301 - DNA, 707 bp, Homo sapiens
cagcatcaggatgtttattgtttaaaaatctcattatggattgagtccagcccagctctaagagctaagaaggcccatatgggagacttcagtctcattattattgcctttatccagcagtgcttatgaagccccgctagcctgtcccattccagaaaccataagactcaggcagttcttgattctggaggcctgcctggtaagataagatagtataatttggaactgagaacataccagaaacagcagaacgagggccagagcagaaaaatgaaaataagtggagacacttatggatacattggtgcaataaaagccacggagcccatactgggcttgatatgactttgaggggacagcagattaatacttaatgagggttaaacctgaccagtctttctacagtgacaggccacactgcatgaatggggagaaccaatgaatccattgtcctctgcctattttcctgtgcacagtcacattccctccttaggaatcttccccttccaccctttacattaaacaagggaacactgaatctttcaagggaattacacgtttgggttaatgtttcagtatatcattttcatactgtaaattattttgtaagagagatttactgctatcccaggatgttcggacttggtgccccctgtgcatttggaaatcaataaactattactggaaatgccaaaaaaaaaaaaaaa

SEQ ID NO: 8302 - DNA, 753 bp, Homo sapiens; identical to SEQ ID NO: 3067

SEQ ID NO: 8303 - DNA, 768 bp, Homo sapiens
tttgtgttgtatggaggagggctggtctacaagttctagagtatgttcttatgcgggtttcctaaaaattctggaattaggcctatttgtctcttttgtttctctattgagttagcttattcaagttttgtccaggatggccctgacaagtatgatcatacatgtatacgtgtatggtccttgggtccatgctggcaactcctgtgcacccccgacctggattctgccttccttgaagtgagccttggaagaaacaagtgctcatgctccctgacattattagctgccacgatgaagcctcagtcccaacaccccagcttcctgtctaactcaagagctaatcctgtgtttaaatcttaagagtgtttagatcttaggccatgccatgaattcccctggttgactgcatttgtgaaaatgagcttcccattattggctcttaagtaatggagatgagggggagtcctgctacacagataagtgcatcataaagttacataattaaaataactgagctctggcctatcaacaggcccatcagcagtccagaatagagtctagaaatggacacaaattaaatgagcagtttgaaatatgataaaggtagcaacgttgaaattagtagagagatgactgatgtactcaaataaatagtgttggacaaactggacaaatatatgggaaaccaaattggatttaattactctgtcaaaatcccgataaagcaaggatttaaatgtaaaaaatgaaataaaaaaaaaaaaaaaa

SEQ ID NO: 8304 - DNA, 719 bp, Homo sapiens; identical to SEQ ID NO: 3069

SEQ ID NO: 8305 - DNA, 736 bp, Homo sapiens
tggtatgagagcccagagcagtaagttcaaccttcctggcctactttcctgatgtgtaatacggaatacttcacagtagcatgacagtataagacaccagcagtagatacaactatgatgacattccatgagttggtatttttagttctaactgctaaatttgttctctttacgggacagatttctaataaagtgcttggtcttaaaatacatggttggacagaggtgccctatcccttaactatgagcaggtgctaccttttgggatatttattttaaattttaatactttggtactcaattgtcagtgttccatggtgtgtatttttatttttgggattagtgggggttctaaagggagaagaatagtctctaattactacctcttaacctaaagcaattattttgttcctggagcaagttaaatctttgttggaaggagctttggccatatattttttagcatgcattgtttctgtgccctgaaagtacctgaaaggttttaagcacagactcaggaaaatgtgccagtagaacaggccatctccaggaaattggctctatttgggtcctgaccttcccttcctcccaaattagcaggcttgttctttcgcaaggaatacacatcttgccttttttttttttttttgccatgttttccttttcttggtcatgtataagcaataaagctgttttttgttcttcaaaaaaaaaaaaaaaaaaaaaaaaaaaaaaa

SEQ ID NO: 8306 - DNA, 729 bp, Homo sapiens
tcatttactgggagtgagttcattgaccagtcacgccttgcatccagctggccacaagattgaattccgtctctgtgttgttttttaagatgttttcattgtttcagttatctatccaagcactgtgccatgtcagcaagtcatatttcataatgtggattttccagataattattgaatacagctattctatggctacttttagtgtttttgtggtatgtggtgtgggagtgtttatggaattaccagtatcttaaattttcaaaggaaccttggaagtctatcactctaaatgaaagtctgtcactctacatgaattatgtgctcaaatttgaccaactcagtttaagacaccaaacagtaatttgaagaaggaaaaatgaagagagtttctagtttaatgggttaaatttttgttgttgcaatagtaagtttagtcttcttataatatttctaaatgaaaaatcataggtatttgttaccatgtgtgaagattagtttgttaaaagcaaaagtggtcgtgtgatatgctaaatgttaattactgattttatatgtttaaatcacgccaaacaaattatgtctgtgccatccagggtctgttgttaatctttttctgagtacttggattgggataaagggcttgtactatgcactttttattaatgaataaatagaaacgttagtaacaaaaaaaaaaaaaaaaaaaaaaaaaaaaaaaaaaaaaaa

SEQ ID NO: 8307 - DNA, 788 bp, Homo sapiens
gaacttggaatatttgccattagtgattaccgagtaaacatatgacattgaaatggatgcaaaagttttctaaagactgggagcaaactagggaataaatgagattctctgtaataatagatatcaccccctaacccacagcaaacatacctagttagtaaaatactgaaaatattctctttcaaatcaagaatatgacaaaaaatgattgctattgtgttttcttgttatcattatataggaggccccaaaccgtgcaaaaaaattaagaaaaaataaaataaaatgtttaaggttaaggatgtaataaaactattattgttcaaaacctaattttctacatagaaaatctaagagaatattcacaagttgtttgttttattgcttttagtcatgtccaaattgtgtcaatttcacattgttttaactaagatagcttcataaggagacttgatttccagtggaacaaatcactctttctggttctttctcaacattgccatttttcattctttgcttttccataaaaattttaggaaattgatattaaaaatcaggaggcagggactttgggaggccaaggcaggcggatcacaaggtcaggagttcgagacctgcttggccaattagctgggcatggtggtgtgcacctgtagtctcagctattcagaaggctgagacagaagaatcgcttgaacccaggaggtggaggttgcagtgagccgagattgcgccactgcactccagcctgcgcttcagagcaagacttcgtctcaaaaaaaaaaaaa

SEQ ID NO: 8308 - DNA, 88 bp, Homo sapiens
caatgcgtctgatgtgtcattaagtgcagaaataactaagacacaaataacctttgcaaaccttcaagctgtgtaatattccaatgtt

SEQ ID NO: 8309 - DNA, 88 bp, Homo sapiens; identical to SEQ ID NO: 8308

SEQ ID NO: 8310 - DNA, 634 bp, Homo sapiens
acattatgacggaggtgaaatgtacagtttaggttaatattgaaatgtgtaaacacttcatgttagcctacagagatgacaatgtcgtggtttcaaaactaattgtactatttgacatgaattaacaggctcacctagacatgtgttctttgcttacaattgtgacttcctataatacaggcttccgattttatgtgaactcaattaagtttttatttgtaatgttgatcccaagatgagagatctttacacacacacacacacacacacaaacacataaacacacaatatatatgtaattctagaagaaaacaggactccacagaagactgtctataagaagaaataaataataaatggcaagtaaagcaaacaagtgtgtaaaatatgttcaatctaaacacgaaagaatcagattagaactaatataatagcagatgtcagcagaatggttgatcagtctaagcttcctaaggtccttgtattgtttggaagaagggtaaaatattggttatcaatatcttgttaactttgctggttaaaatttccataaaaacccctaaagaataaagagaaataaagcttataacttccaattaatggaggggaaaaaacaatgactcaaaaaaaaaaa

SEQ ID NO: 8311 - DNA, 210 bp, Homo sapiens
tggatcccactaacaaagccctgacaggttctgtaatatttgggcaatgactatatttttactttcttcttgagtaatcacaccatttcatacttcaactaattaaagatttaaaaaagtgtctcttgtttctccaacgtgcacagtcaatgagttggagtttacctaaatttaccaacagctgaaggatgccaacaactaaaaaaaaaa

SEQ ID NO: 8312 - DNA, 701 bp, Homo sapiens
ttaagaatcagttattgcccagtccacatagggaatgacatcacctttatggcaatagtatctctctctggtcatgaatatatagatgtataaagatcaactctgaagcaccagaataattgtgggtcttcctatctacaaggaaggtattaatagggaagataaagatcatcatcgattcgaactaatgtgtgtccttttattgggggaaaatcaatttgtgtgcccatcttcagattttgtcacaaggaaaggttgtttgttaagcttgtactgcagaagcagtcaagtcgtttcgttagcacacagtatgtggcatatattagacatgcagaaatattttctgatttaggagaacaattttaatgtcacttgtctctataactacagataacatctaaattgttaatgcaaattgtctttattcaggtcttaataagaagaaaaacgtaaataaaaatattaactatgtactcagtgtcaaataagcaggcagatattgtacaatgcatggctttgtatcaccttttctttaaaggaattgcttgatttagattaaacttgaaaaagaattcactagcacagtagttgacagaggaaagctgacttctttcttttctaacaataattcacacctgaagacaaataataaatcaagtaggtaaatccggtgttcaatcccaactaaaaaaaaaaaaaaa

SEQ ID NO: 8313 - DNA, 642 bp, Homo sapiens
gtgttgtattacatgcttagactagactggactgatgaaagggagaagtagaggatatcagggagaggagagtccctgtggttattagaagcccaatagtgcttctaatagtgaagcaccctgtgtctgcagcttcatactcgagattcacatgggattatccctggtgaggaaagttaagtagaagaagcacatcagaccccactgcaatcacacatgtcaacaatccttactgtaaaataaattcacagggcttgcaaaccctgagctcaacttggagagctggaaggaattcatgcatctgtactgcacaagattaggtagaaaaatctgtattccttgcccaccacccatcccattagccaaaatgctatagcctgtcacaactttgagaccagagacacttctggagggtgcccttctttggggcagtagtcattgcatgtctccacactgggcctctgtttccattccatcaaacacacaagtgggtaaaggccaaaatatctagctgcacaaagcctagagccaagatcccctttggctctggtgttgcccagcaggaaaccaacccctgaacagggcaataacaagtcacaaattgaagcattaataaaaggtcttccaggaaaaaaaaaaaaa

SEQ ID NO: 8314 - DNA, 426 bp, Homo sapiens
attagagggactctgggtgagaggctacagtgtgtatattatctcttgctctaaatgatatgtgtgctcatcgcgcccatgttgtatgacacatataggtgagggtctccacatttacttaacacttgtgggcgcaaatctgggtttttcttcctttccagaactatgactcggatcataaaatctgttttgtttgcatgcatgcccaaaacaaccctgtaagtagaacattgtcattatctctgttttagagatgaggaaacaggctcagagaagctcagaaatttgttcaagatcgcacagctagtaaatggcagaagtaggattgtgaacccagggaatctccagagcctctgtgtaaccatgatgttatattttttttcctctttaaaaacaaaatttaaaaccttgaaaaaaaaaaaaaaa

SEQ ID NO: 8315 - DNA, 737 bp, Homo sapiens
tatgaacgaaataggcaggcacagaaagacaacttggcatgttttcactaatctgttgagagctaaaaattaaaacatcaaactcatgggagataaggaggtagaatgatggttaccagagactgagatgggtagttggtaggggtgaattgtgggggtggttaatgggcacaaaacatacttagaatgaataagatctactattttataccaaatagaatgactaaagtcaacaatttattgtacatttaaaaataactaaaagagtataattggattgtttgtaacacaaagaatggataaatgcttgaggtgaaggacgccccatttagccctgatatgattactatgagctgtatataccatgtactctataaatataaaaaccacaattttttttctttctttttttttttttaagacagagtctcatctgtcgcccaggctggagtgcagttgtatgatctcggcacactgcaaccctctgcctcctgggttcaacaattctcttgcctcagcctcccaagtagctgggactacaggtgtgtgccaccacacccaactaatttttgtattttttagtacagacagggtttcgccacgttggctagactggtctcaagctcctgaactcctgacctcaggtgatccacccacctaggcttcccaaagtgctgggattacaggcatggcccaccacacctggcccctaacaaaaatttaaaaaaaaaaaaaaa

SEQ ID NO: 8316 - DNA, 143 bp, Homo sapiens
ctacccgggaggctaaggaaggagaatcgctggaacctgggaggcagaagtctacagtgagtctgagatggcaccactagcactccagcctgggtgacagagcaagattccatctcaaaaaaaaaaaaaaaaaaaaaaaaaaa

SEQ ID NO: 8317 - DNA, 714 bp, Homo sapiens; identical to SEQ ID NO: 3082

SEQ ID NO: 8318 - DNA, 771 bp, Homo sapiens
acctaccggtacaggcaaaacgaggaatcatcaagaataaggtatcatactgtttgaggtctactgtattgatacaggatcagtcctaatctattggagaaaaggaaaagtaattatcccctgagagtcatccgaagaacaaattttttgtgtgtgacagggagggtcttactctgtcacccaggctggagtgcagtggtgcgatctttgctcaccacaacctcgacctcctgggctcaagcgatcctcccacgtcagccccttgagtagctgggactacaggcgcaccaccacactcggctaatttttgtatgttttgtagagatggggtttcactatgatgactacaagctgatctcaaacttctgagctcaaaagatcctcccgcctcagcttcccaaaatgctgggattacaagtgtgagccgtaacacccagccaagaaatattttaaaatataaatagatctttatataaaagatattcatatttataataataaatcagaaaccttcctatatgtctgacaatagtgaaacagttgcaaatggaatattgagcatagagtagaaaggaatgagaatgaggcagaatattatgcagccattgaaaattcatgctgatggtggggcacagtagcgcacacctgtcatccctacactctgggaggctggggaaggtggctcacttcagctcaggagttcgagatcagcctgggcaacatggtgaaaccctgtctctatattataaattaagtaaaaaaaaaaaaaaa

SEQ ID NO: 8319 - DNA, 94 bp, Homo sapiens
cctggagaacggacaagccataccctgagggtcatctcctgaggctcttcctgctgctgctctccctggacgaccggcctcgaggcaaccctgg

SEQ ID NO: 8320 - DNA, 131 bp, Homo sapiens
tttttcttttatcatgagatgtaatctacctacagaaaagtgcccagagcatagatgcatgaagcgaacatctgggtggttagcattcaagttaagaaataaaacactgcaccccgaaaaaaaaaaaaaaa

SEQ ID NO: 8321 - DNA, 727 bp, Homo sapiens
  misc_feature (693)..(693): n is a, c, g, or t
acatagtgagacctgtagctacaaaaaggaaaatttttaaccagtggagttgcatgccctgtagtcacagctattcaggagctgagtcaggaggatcacttgagtccaggagtatgatcatgatagtgacatagcacttcagcctagcctaggtgacagaggtagaccctatcttgttaaaaacaaacaaaaggatgtgctgctatgtgtacataatgaatacaaagttgtgtggtatactccttctctcaggagtcacagtgtgaaataattcaaactcctttctaccttagtgtcatacatatgatttcgcagtctgaaagctgaatcacaattctactatcttctgttgtctcattctttctcatcctttggatctcagcttaaatgtcacctccaaagagatatctatgcagactaacccctaacacaaacagttagccctaattctcaagatctcatttatttctttcacagtgcttctgtttacacagtcatgtgtgtgtgtatgtgttatttgctttcactactaaactgcaagagggctggaaacacatttttcttgttacttatatccccagttcctagattaatgcctaacatttagtaaacactcaaaaatatttgttcaataaatgaacagagatacagtgttgaacaataagaacacatctttcacttaggaaaatattntaaagtgagaaacaaatataaaaaaaaaaaaaaa

SEQ ID NO: 8322 - DNA, 708 bp, Homo sapiens
ttcccgagaatttcaactggggagtaccaagtgcttttgagtcacaaacttgagcaacaacactgaaaatgactgaggccacccagttgatactgggatttttaacactgcctttttatgctttcaaaatcaacgtttaattaccagttgaaattcagcccaatttgaaagtgtgcagtaattggtaggtaaacaagtccaaggtgaagatttttaactactgaatgctataaataccaaattaaagctgctggggagagggtgaattctatgcatttaagctgatgaatctccaccgcctagaaaagtgtttaggaatctgataaacactaaatatgtgtttgttgacttaacaagtggtctaacccttttctccggagacttggtgatctgctgatcattattaagttgaagtgtgaagcaactagagcttcttagtggatgtgcagcagaaagtaggtacatggcccagagaccagtggaagtacacaaaaaaatacccaccaaaagcactctatgtgaggcggctatatttaatgaagaatcaaggccagaagaggtggctcatgcctgtaatcccagcactttgggaggccgagaggcaggaggaccacctaagcccgggagtttgaggctgcagtgagttgtgattgtgctactgcactcagcctgggtaacagagtgagacattatctcaaaaaaaaaaaa

SEQ ID NO: 8323 - DNA, 185 bp, Homo sapiens
gttagattagcagaacgctcttgaaacaagtaatgactggtttagtctgcagtctccgagacggggacgccatgactagcccgagaccctgcaccaccgcaccgggcgattggaacacagagagcgagacgcggagtccccgagtctccccggaaactgccgaaaacttacgagaaaaaaaaaaa

SEQ ID NO: 8324 - DNA, 603 bp, Homo sapiens
gtatcatgcagagagttctagggaatggaggagtaatcattgggtcattcgtctgtggaaagggcagtaactcgtggtgttgccatggcgatagtaatattggacatggcacactggtgggtcctgtctcatagagaagccgcttccggctgagcgcagtggctcacacctgtaatccctagcactttgggaggcccaggtgagtggatcacctgaggtctggagttcgagaccagcctggccaacatggtgaaaccccgtctctactaaaaatacaaaattaggcaggtgtggtggggtgcgcctgtaatcccagctactcgggaggctgaggcaggagaatcgcttgcacctgggaggcagaggttggagtgagctgagcttgtaccactgcactccagcctggccgacagagcaagactctgtcttaataataataataataataataataataataatagaaagctggccgggcgccgtggctcgcgcctgtaatcccataactttgggaggctgaggcgggcgaattgcgaggtcaggagatggagaccatcctggctaacacggtgaaacccagtctctactaaaaaaaaaaaaaaa

SEQ ID NO: 8325 - DNA, 733 bp, Homo sapiens
cccgctgacttgttccaggagctggagttcagaaacgaagcggagttccctcattcagggcagtaaaccgaatgtctccaaggtgcaatatgctgctagaattacgacagattctccacctcctatgcattttacaaacagagagaatgaatagggtgcttagaagaaagattaaaaggcaaaatttttaaatatctaaaagtaagttacaaaaatgatgaccctattaatgaggttgggagtttgcagatcccaaatgttcgatatggcaagaaaactaccagtctctacctcaacatcaaaacctcataattcaagaacatattttctctaaatcaatgttcctgttcctgaaatataagagagtcaggaaataatattctgatataaattaacagcttgtagataattgtaataacaaaaatgaataattgtgtgcttagggtttgactggctgggcttcacttgtaaggttagacttcactccccctcctctccaggctcacgttggacgctatttagactttgcagttgctgtggccgcttcattcaagaacctacatcatggtgttcatttcttcgctatctctcttatgagataaattaacacgatgattacagaattgtttacttctcctggaaaaactaaaggaggcctaatgaaaacaactgtgcctagactcaaaaaatgctaattgttttttaaggtattttaaggaaaaaaaaaaaaaaa

SEQ ID NO: 8326 - DNA, 615 bp, Homo sapiens
cacttgccaggggaaggagtccctgcagtcatcaggcccaccctgaagggcatgtgaaatgttacgaccaccgttcttgagtgtggattttgtaaatgtttttggttttgtgatattcccgtctcctcatcttcatgttgtctctctgacgagtctcagatcattttcagtgattcctcagcctccacagattccaagattatgtccactctgatggctctcgccacttttgcatgacaatgatactggactatgtctccatcgccaggtcttgcccttagcttcggacccatattttccatagccaacaagatggccaggtgtcttgtggacacggaacattaaaaatgtgctctaatctaggccaggcgtggtggctcacgcccgtaatcccagcactctgggaggccgaggtgggcagatcatgaagtcaagagatcgagaccatcctggccaacagggtgaaaccccgtctctactaaaaatacaaaaattagctgggcatggtggtgcgtgcctgtaatcccagctacccaggaggctgcaggaggagaatcgcttgaacctaggaggctgaggttgcagtgagctgggattacgccactgcactccagt

SEQ ID NO: 8327 - DNA, 640 bp, Homo sapiens
caggaccaaattcagcgtcatacatgtgggtataaagacatggatatatctactattcataatgtggctggtaatactgtctgtgaaataatgtaagaagcttttcacttctaaatgcattactttcacttaacactagacaccaggtcgaaaattttcaaggttatagtacttatgttcaacaattcttagagatgctagctagtgttgaagctataaatagctttatttatgctgaattgtgatttttttatgccaaattttttttagttctaatcattgatgatagcttggaaataaataattatgccatggcatttgacagttcattattcctataagaattaaattgagtttagagagaatggtggtgttgagctgattattaacagttactgaaatcaaatatttatttgttacattattccatttgtattttaggtttcctttgacattctttttatatgcattctgacattacatattttttaagactatggaaataatttaaagatttaagctctggtggatgattatctgctaagtaagtctgaaaatgtaatattttgataatactgtaatatacctgtcacacaaatgcttttctaatgttttaaccttgagtattgcagttgctgct

SEQ ID NO: 8328 - DNA, 94 bp, Homo sapiens
gttgcagtgagctcaggatcgcaccactgcactccagcctggtgacagagccagatcctatctcaataaaaaccccccaaataaaaaaaaaaaa

SEQ ID NO: 8329 - DNA, 126 bp, Homo sapiens
tcgaacccagggtgtgcgtctggccatctatggggtaccccaagtcggacagaaggcccatgaggggaaggtgaggtgtgagggaggagacgtgaggcaactgtggcagggaaaaaaaaaaaaaaa

SEQ ID NO: 8330 - DNA, 710 bp, Homo sapiens
ctttaaagcagattagtaattgttaatgccaaatggttacaactaagttacaacttaaaattcgtggaagatagatgttagatcctagagaagatctagacctaccacacatggtcaagagttatttttagacctgaatgagtcaacacagcttttgccagaagtgatgttcttgattgacttgtaattggttaatggaagagaaggcaagttgggcttgcccctacatgatagcctttgctcagacaaaagaggcagctttctgtgacaactgatttcagaggtggcagacgactcatttgctagtaactcccttaccgtcttaccacggggcgaaatcctatttctaaatattattaagaaatacaaaatagctcttgtaacgggtgacacattaacccagcttttctcaaaatatattccatagaacatatattcagcatggtttgataggcattatgtaaacaaagataaacaggtttgtatattgaaagacctaacagagctcttaataggctaatgtatgtttcaaatctccaagttagattcgtactgtataagatttcccaggcttttaccatgggatttcctcctctcccgctggctggtggctcacacctggttgaggcaggaggagtgcttaaggctaggagtttgagatctgcctaggcaacatcatgagatcctgtctctacaaaaaaaaaaaaaaa

SEQ ID NO: 8331 - DNA, 686 bp, Homo sapiens; identical to SEQ ID NO: 3096

SEQ ID NO: 8332 - DNA, 654 bp, Homo sapiens
tcattccattcctctgacaggaacagaaagtctgagtcataatatagaggcctagccactagttagattttcggatttgtcatttctgtggagccattttaagaactgatatatatttaaaaccctagacatttaatgtctgatgtttttgaggaatatgtgtgtgtgtacctttgtggattcttacatgagttgaatctgtgtttttggtggttcatactcttcaaacacttcaatctgaagcaaattcaccccctgtaacatatcctggcctcactaagaaaggcaaaatcactggataaattatttttgtttttctgtgtcctgtctcagtgctcaagttttctacttaattagtcagcggctggattttatttatctggcaaggaaaagtcaaacatcaaacatttaattaaaagtttatctaagcagatacttatactttgaattcaaatgtacatgtggcccttttgcaaactatggccatctgagtacttgaccttaagtgtgaaatacttaagctttcctatgcataaccacaaatttatacatacctgcagagtcagagagatgcttttaatacatagaaagtcaaccaataaagctgcctatttatctctgtttttgctattgtccctccctttttttagtaaa

SEQ ID NO: 8333 - DNA, 178 bp, Homo sapiens
taagggggatgcacttaggtggtgaatgtgactaagaagcctggggagcagaggagctgacagctctggagtaaatggttggctctacgggcttcaccaagtgaccatgggcccctcctagatacatacaatcttggactttctccattacccagagtggaaagagctcagcatttaa

SEQ ID NO: 8334 - DNA, 749 bp, Homo sapiens
ggatggctaccagctaagcctggcctttgatccggacacaaaccttctagcttggaaatgaatatgctgcactttacaaccactgcactactgactcaggaatcggctctcgaaggtgaagcgagaggaaccagacctcatcagcccaacatcaaagacaccatcggaacagcagcgcccgcagcacccaccccgcaccggcgactccatcttcacggccaccccctgcggcggacggttgaccaccagccaccacatcatcccagagctgagctcctccagcgggatgacgccgtccccaccacctccctcgttcttctttttcatccttctgtctctttgtttctgagctttcctgtctttccttttttctgagagattcaaagcctccacgactctgtttcccccgtcccttctgaatttaatttgcactaagtcatttgcactggttggagttgtggagacggccttgagtctcagtacgagtgtgcgtgagtgtgagccaccttggcaagtgcctgcgcagggcccggccgccctccatctgggccgggtgactgggcgccggctgtgtgcccgaggcctcaccctgccctcgcctagtctggaagctccgaccgacatcacggagcagccttcaagcattccattacgccccatctcgctctgtgcccctccccaccagggcttcagcaggagcctggactcatcatcaataaacactgttacagcaaaaaaaaaaaaaaaaa

SEQ ID NO: 8335 - DNA, 707 bp, Homo sapiens
tgggagggagccttgcttctccaaatcactgttgctgggtcaaccagcctcacagcttctagtaaatcctggcagatcttgccttgtcagagatgcacacaccttgcttcacttcgtgccctacccagaatggggagcaggaaaccaagggatgaaatgtgcttgggtcccgtggctgcctcgttgcccatggctgagaagttctggtgggaaggaaccatggagggcccatctggatatccttcctcagctaaaactgcctccttctcaggtaggagaatcccggtgatccaggcaggtggcctttcctgtctaagcctcaggtttcttgggggcgatgctgccagcccctcacagggctcatgcgcagcacccatgcatgcttggagggtgagaacataattgaaaattaaaatcccacattttttgtcctctgaaaattttggtaagacggccaggtgcggtggctcatgcctgtaatcccagctcttggggatgccaaggctggtggattatgaggtcaggagttcgagaccagcctggctaagatgacgaagccccgtctctactaaaaatacaaataattagtccgggcgtgatggtgggcacctgtagtcccagttaattgggaggctgaggcaggagaatcacttgaacccgggaggcagaggttgcggtgagccggtatcacaccactgcactccagc

SEQ ID NO: 8336 - DNA, 673 bp, Homo sapiens
aaaagtagccaggcatgtggctcacacctggatccactactcgggaggctaagcaggagaatccttgaacccaggaggctgagcttcagtgagccaagattgtgccactgcactccatcctggggcgacagagcaagactctgtccaaatatacaaagtttttttttttggcttggaattaccgggcgccctgcccccacacctggctaatttcgtttttttgttttttttaggagagacggggttttcaccatgttcaccagactggtcttgaactcctgacctcaggtaatccaactgcctcagcttcccaaagtgctgagattacaggcgggagccactacacctggccaattaaaaggccgtttcagtcttcaatctgttttgagcttggaggctttagtcattcccagacccaaaatctcaatcagaccctcttccaccactttttgtgatagatcaataaacattttgtcttatgggaagtttaactaagagtatctttagaaagttttggacaggcgctgtaatcccagcactttgggaggccgagatgagcggatagcttgagcccaggagttagagacaagcctgggcaacatagtgagactctgtctcaaaaaaaaaaaaaaaaaaaaaagaaagaaagaaagaaaagaaaaaaaaaaaaaaa

SEQ ID NO: 8337 - DNA, 765 bp, Homo sapiens
cagactgccgtacactgtgggactttgtgggtactattttttgaccccttttctcttctatcatgagataataggcctactcatatgattataagcattcccctctgtgtatgcacgtaaagtttgtacttggagaaactaactcaccatgtgacaaccatgtctaagcaccatagaatatagtttgtgtgtcacaaaatttggtattcattcagaataagtatttgaaaagtgagtaaattctatgcaattatagttattaaatgacttataaactgtgtttctcttccacttcttgctacatgtaatcttctaggtgttcagatatctttggagattataggcagcaataaagctaaggcagctaacctttcgaacattcttgtgtcaggctaatattttggtgaaaggaattcttgtgtttctcaaagaactagagctgaagcagaaataagttccaatgagcaagtgtccattggaccattgaatgaaatctagtgttttaaacaattctgatgtttcaatgttttgttctgttttcttttgatcttgtgagcagtaagacatattttatgtgggtggtaaaggaagaaatcaagtaacagaatgaggaattgttcccaggaagagttagagttgggacaaatgggttgttaactttgatttttagatcttctctgaagacattaaacatggaatggtcatctttagaaaaataaaagactatgcaactccaaaaaaaaaaaaaaaaaaaaaaaaaaaaaa

SEQ ID NO: 8338 - DNA, 674 bp, Homo sapiens
gcaggcagaaagccagtgggagatcttgggccaacacggaagctgctcatcctccatcccccatccgctgctgctggctccgcctccgctgcttggcagctactagcattatctgtggctgctcttgcctgggagtcatggctctggtgtttgccatcaaggcggaagagcggcataaagcaggccggtccgaggaggcagtgcgctggggggcccgggcccggaaactcatcctggccagctttgctgtctggcttgctgtcctcattctgggtcccctgctgctgtggttgctctcctacgccatcgctcaggctgagtgaccctggatggcctctgctgagagccagccgagacctcctggatcctgcaatgcggcattgctaaggtcctgtgacagcagtggttggaaggatcctggttggaaggatggggactctctcaaggggctttggaagagctcttctagccctttataaaaggagggcagcagctgagactgatgagaggagggcagcctgctctgttctttcagggccccccacccccatctcccctaccctagcccaccctagggcctctacccagcgggaggggttgaagaccaggcctggttttattagaattcattttgtaataaaagccttttttagtggtgaaaaaaaaaaaaaaaa

SEQ ID NO: 8339 - DNA, 758 bp, Homo sapiens
accgaaccgcatgggagtctaagttaccaaataagttttaggcattttgtaatagtgctaagcatttttggaaccgtaaagaggttagatagtgtggaatagaggctgacagcagttttcagatgtccgtgtgttcatgcacgcagtatggcccaggtaagttcaaaaccttattcttaggctatttcgatcaaccctgccaggcaattttaaattcttggtgatgtagggcagggacactgtggatggctgaggaaactctgggctctgctggctaaccagcttcgctccactctgcagaggctgtctcatcttttgtgatctgcaaattcttgctttggtcttcatgtgaactctcagggaatttgagcagttcagtctgttaccagtgttgtgagcctacctggtcattttagctgttgcttttgtaacgtaggcttttggttgttcctcagttagaattgtgggactttcctgaaccttctgttcttgtttcttccttgaaagtaactgaattctgggtattacacaggatttgccatagcggatcaagcaattggtctatcaagtatgctgtcttgtccccggcagtggctaatgcttcttcttcttgtcaggcaaacaggagatttcacaatttagcactgagatctaaagatgtaaccaggtctcctagtttacccttcagctttgacgcagactacctaatttcctaaggtcttagcatccacctgaaaaaaaagaaaaaaaaaaaaaaa

SEQ ID NO: 8340 - DNA, 711 bp, Homo sapiens; identical to SEQ ID NO: 3105

SEQ ID NO: 8341 - DNA, 773 bp, Homo sapiens; identical to SEQ ID NO: 3106
  misc_feature (135)..(135): n is a, c, g, or t

SEQ ID NO: 8342 - DNA, 739 bp, Homo sapiens
gggagccgagcggtgatcacttgaggtcaggagttcgagaccagcttggcccataaggtgaaaccgtgtctctactaaatacaaattagtccgagcatggtggcctgtgcctgtaaacccagctactcaggaggttggggcagaattgcttgacccagggggcagaggttgcagtgagccgagattgcacccctgcactccaggctgggcaacagtacgagactctgttccaaaaaaaataaaaaagaacagcctttttaggccacagtgacctgcgcaatgtttatatgctttgacctactaactttctcctaactaaatatttgattttaggagagtgtttaaataaattacagtatgtctatatgatgaaatgttattttgccattaaaattttgtttacaaagataatttttattgacataaaaataactttaatgtaatttatgttgaaaaagctgaatacaagtctttatatagagtaatatttgagctgtgttcaaaaatacataggaaaagactgataaaatgaaatatggcaaaatgttaatagttttccctggaataggataataggcaattttaaaacagactcctttaaaaaaacaaacaaacaaaaaaaacatagacttctttatatcttttgagctccctcccttttattatgtaatgaatatgtgttgcttttgtaataggaaaataataaagttaaaatttcaactgcaaaaaaaaaaaaaaa

SEQ ID NO: 8343 - DNA, 739 bp, Homo sapiens; identical to SEQ ID NO: 8342

SEQ ID NO: 8344 - DNA, 711 bp, Homo sapiens
attgcttttgagtatatgagacttcctccactacaaaaggggatctaccaccaacactggtctaagagaccctttcaacccctttgagctgactaatcatgctgttctgcttgtgggctatggcactgactcagcctctgggatggattactggattgttaaaaacagctggggcaccggctggggtgagaatggctacttccggatccgcagaggaactgatgagtgtgcaattgagagcatagcagtggcagccacaccaattcctaaattgtagggtatgccttccagtatttcataatgatctgcatcagttgtaaaggggaattggtatattcacagactgtagactttcagcagcaatctcagaagcttacaaatagatttccatgaagatatttgtcttcagaattaaaactgcccttaattttaatatacctttcaatcggccactggccatttttttctaagtattcaattaagtgggaattttctggaagatggtcagctatgaagtaatagagtttgcttaatcatttgtaattcaaacatgctatattttttaaaatcaatgtgaaaacatagacttatttttaaattgtaccaatcacaagaaaataatggcaataattatcaaaacttttaaaatagatgctcatatttttaaaataaagttttaaaaataactgcaaaaaaaaaaaaaaaaaaaaa

SEQ ID NO: 8345 - DNA, 499 bp, Homo sapiens
taatgaaataatataatataattagcagggcatggtgtctgtgtgcctgtggtcccggctactcgggaacctgaggcgggaagatcgcatgagtccgggatgttggaggctgtagtgatccataatcactccttctgtaccacagcctcgatgacagaatgacaccttgtctcaaaaacctatacttactgacacactcaaagacagcactctgggtgcgatctgcacgtgctgggtgtagtggaacaatcgtttatcatttccggggtgctgtgctgttagtaatgcacctttggcagcagtcacataattaagttttaggtcacctaggaaccttagtgaaaaaacactggtctttgagtaaaagaatgaattctagggctaagtgtagaagctcatgcctgtaatcccaacactttgggaggctgaggcgggaggatcatttgaagccaggagtttgagaccactctgagccacaaaaaaaaaaaaaaaaaaaaaa

SEQ ID NO: 8346 - DNA, 769 bp, Homo sapiens
  misc_feature (136)..(136): n is a, c, g, or t
gttcccgacctgacccaccccggaccctacagaggcaatgccaccatgatacaggggcagagtgtctcctctggcagctctgagatcaaatccgatgacgagggtgatgagaacctgcaagacacgaaatcttcgngaggacaagaaattagatgacgacaagaaggatatcaaatcaattactaggtcaagatctagcgataatgacgatgaggacctgacaccagagcagaaggcagagcgtgagaaggagcggaggatggccaacaatgcccgagagcgtctgcgggtccgtgacatcaacgaggctttcaaagagctcggccgcatggtgcagctccacctcaagagtgacaagccccagaccaagctcctgatcctccaccaggcggtggccgtcatcctcagtctggagcagcaagtccgagaaaggaatctgaatccgaaagctgcgtgtctgaaaagaagggaggaagagaaggtgtcctcagagcctccccctctctccttggccggcccacaccctggaatgggagacgcatcgaatcacatgggacagatgtaaaagggtccaagttgccacattgcttcattaaaacaagagaccacttccttaacagctgtattatcttaaacccacataaacacttctccttaacccccatttttgtaatataagacaagtctgagtagttatgaatcgcagacgcaagaggtttcagcattcccaattatcaaaaaacagaaaaacaaaaaaaaaaaaaaaaaa

SEQ ID NO: 8347 - DNA, 682 bp, Homo sapiens
acaccaaaacatggcattataatcttaggggaccaccatcgtacatgcagtccatcactgattgaaacatcatgcaacatataaccatatatgttaatggctgttcaattaaaacttcatagtcctaatgtaaatttaaaaagacaaagaagaaaattaagaaacaggcccagattcaacttttctatgaaaaatagaaactgtcatgttgagtcataaaataaaaaaactagcaaatccagctctatgctcagagaattaccagaaaataaaattacatgaagcttgaatatagggagatggaaagatattagacaaatattaaagaaaatctgggccaggtgtggtggctcacacctgcaatcccagcactttgggaggcccaaggtgggaagattacttgaggcaaggggtttgagaccagcccgggcaacatagtgaaactctgtctctttaaaaaagaaagaaaagaaaagaaagaaagaaaagaaaatctcagtgagtgatggtcagaatagaattcaacataacaagctcattattaaaatatttgatctcactgtgtacaattctgaagacactcattcatgtacttcattaaatatttctagtttgctaaaaatagaattacccttcaacccagcaatcccattactgggtatctaccaaaaaaaaaaaaaaa

SEQ ID NO: 8348 - DNA, 746 bp, Homo sapiens
tggcttgtgttaatgaaagttcagtttgattaatagactccattccagtaatggtatcactgttgacccttgtggaagatatgattagacttcgttagtaatgttcacttttcacaaagatggtgagtgccatcttaaacttactggagattggttttatatttagatttatataactggttatgtgaatatatttaaatactggggaaattgcttcactgtcttagaaccacagcaagattcacctgtgttttgtgttcatgttcatttgcctcttaaaggcaagggttgaagataaataaggtagcaatgtctatagttttggccttaactatgccaatctaattataattccctgtatttaaaatggtttcttttacttattgaaaggcattttagtgtggtttatgtgtaatattaaagattattcaacacctctcacatcttacagatctataaggtcacatgcttttaaaatagtagcaagttaaacttcactcttgaattctttacaatctaagtcaaactaagttataatttaggattgtctttaaacagccattcagaaacaaaactgtagaactgtgtatttgattgggaatggtgcttttgccaacttaaaaggattaaagtaacggagatatacacaaattttaaaattatgtgtgatcacaagactaaagataattaaaaagaaaaccacagataaaaaaaaaaaaaaaaaaaaaaaaaaaaaaaaaaaaaaa

SEQ ID NO: 8349 - DNA, 715 bp, Homo sapiens
gccgagataaaggcaccgaacagcgttgaattaactttagattgactggacactatatatatatatacacacacacacacacacgatatgttacgatataaattttgaaaatctggcttgttacaggcgagaaattatgtcaaaagaaaagcaaattaaagaagaaagacaaaaataaatataagagtcttactagaaatttggcatctagaaatcttgctccacaaggatctcaccctgtcacccaggatgaagtataatggatctagcttgatgcttaataaaggagaaattcagaaaatatatttactgagaagttaaaggaagacagtattcctgctcctcgctctgttggcagtattaaaatcaactttacccctcgagtattcccaacagctcttcgtgaatcacaagtagcagaagaggaggagtggctacacaaacaagctgaggcacgaagagcaatgaatactgacatagctgaactttgcgatttaaaagaagaagaaaagaacccagaatggttgaaggataaaggcaaaattgaagaagaagagaggaaaaaaatagaagatatgaaagaaaatgaacggataaaagccactaaagcattggaagcctggaaagaatatcaaagaaaagctgaggagcaaaaaaaaattcagagagaagagaaattatgtcaaaagaaaagcaaattaaaaaaaaaaaaaaa

SEQ ID NO: 8350 - DNA, 789 bp, Homo sapiens
gagacgaggtctccagatacgtgaaggctggacaagttcgtcctgcctatgagcccgtgttggccattggtactgggcaggattggcaacacccccacaggccaggtaagtacacgagaagctccgaggatggctgaagtccgacgtctttgatgcggtgggctcagagcacccgtatcatttatggaggctctgtgactggggcaacctgcaaggagctggccagccagcctgatgtggatggcttccttgtgggtggtgcttccctcaagcccgaattcgtggacatcatcaatgccaaacaatgagccccatccatcttcccgtacccttcctgccaagccagggactaagcagcccagaagcccagtaactgccctttccctgcatatgcttctgatggtgtcatctgctccttcctgtggcctcatccaaactgtatcttcctttactgtttatatcttcaccctgtaatggttgggaccaggccaatcccttctccacttactataatggttggaactaaacgtcaccaaggtggcttctccttggctgagagatggaaggcgtggtgggatttgctcctgggttccctaggccctagtgagggcagaagagaaaccatcctctcccttcttacaccgtgaggccaagatcccctcagaaggcaggagtgctgccctctcccatggtgcccgtgcctctgtgctgtgtatgtgaaccacccatgtgagggaataaacctggcactaggaaaaaaaaaaaaaaaaaaaaaaaaaaaaaaaaaaa

SEQ ID NO: 8351 - DNA, 716 bp, Homo sapiens; identical to SEQ ID NO: 3116

SEQ ID NO: 8352 - DNA, 629 bp, Homo sapiens
gttcccgagtcgtcaccatcatgtattggaaattataaatggcacctatactggcttttagaatatttttggatatcattgatgtgctgtcacactatatattgatgtgactttctgacactgattgatccaggacatccatagcccgataagcttttgtctaagttgtcatcgtacttactcacaaaggaggggtaaacgttattttcatagctgcttttagaaatgtagattgtaacagcctccttggactacattgtgagtctgttttaacattaatatactcttacaacctaggaatctcctgggaatctatccctaaggaataaaaagcgccagcacttaagattatatgtttatctaatgtatattgtattttttggtaaggaccaataaacaaacaaaataagaccatcagtaagggaatggatgtataaattgtggtaaaaacataccatggctgaatggtatttccttgaaaagaatgtgtgggaacaaactccaaacttctctaggtcaaatgaggaaagcaagaggggagagagagagtgtatgtgtgtgtgtagcagtttttataaaataaagataaacccttataaaaaaaaacaaaaacaaaaaaaaaaaaaaaa

SEQ ID NO: 8353 - DNA, 609 bp, Homo sapiens
cttgactcaggctgtagtgttgtaacctgctgcacggatacatgggaataactgttcgtttgaggggtggggaaagacagcctgtacaccatgtctagtggcacactagttttggcaatgttatgcaccacttcaatttccccattgtgacccctatcacttcatttgatatccctttttgacccacccatctccttcatatatgggcatgtccatagattgacaaagaaagtttacacttttgaataaagatgcaaagtatgcaaaaacattaatactgatgcgaaaaaataaaaaataaaagagaaacaaggcagaggaagaaggtgtttaagctctcctcgacctgttggaatggtggttaacagaatgatttgagatgggatctgtggggaggggagaaaaaaaaaacaacaaaatttggtgcttaaaaaaaagtaaaataaaaaaagacatctttaaaatcaatccctggttgtagacaagttctccaaaaccagtacctggcaccactccaacaaacaaacgggggagaaaagttcttcgattatctcacaaaagcttgctcttttactctgccgcctccgctgggggggcttctggactgca

SEQ ID NO: 8354 - DNA, 680 bp, Homo sapiens
aagaagccccggaagagcgcgaccaagagattcaaggggaagacaaggaggagccttcgatgccatcctgccagctggtggcaggcaaagagccagccaatgtgggcgtcactaaagcaaaaacagggggtgctgtagaccggctgacggacaccagcagatacacgggctcccacaaggagcgcttcgatgagagcggcaagggcaagggcattgcgggacggcaggacatcctggacgacagtggctacgtgagcgcctacaagaatgcaggcacctacgatgccaaggtgaagaagtgaggcttgggaagaccgccctgccaagtgcggctgcccctgccagaggctcaggcctgggtctaaggggcacgtggagcaagagatcctggtcccctccctgctggacctgccacccagagcttcctgcctagtcccactgggctggcccaccaggcctctgacccaggctgctctgcggccccttcctcctcctcttcctgctccaacttctgtccacctggggacagtctgtgcctgtagcctcatgaccccaacccagccccaggcatggctaacccctgactgcttgcctcatatttaagctgctgctctggccaagtgcctaattttaacccagacctcaataaagacaccttttgtaccaaaaaaaaaaaaaaa

SEQ ID NO: 8355 - DNA, 647 bp, Homo sapiens
tctttatgcgtaatgaagtcttatgggaactgagggaaagatggggagagaagggcaattaaactcctaagataaatagagctgaagactgagagctaatcagaagttctcagatgaaactagattcttgatattgctacaaaaggtttctttctgatctgccatcgcagtaaccgttgtggacgatcagcctgtactgcctggccaggcacagctcctcctgccgctgccttacaatcttctgcgcttctgggggcaggccgttggggtcccgggaaaacacgaaggagtagctgtcagcacaggtgccatcgaggttcaggaggcggcaggagtactgcacggcatacgtgtcgtagtctgtgtcgacgatccagtggtcatcatttcctttctggagaaaggaggctacgccccagtacttcatcttgaacttggcagggtcctcggtgtctgtgaaggtgcccaccatgtctgcgcacacgtcccagttattcaaaagacggactcggcccttggctgtggcgctcatctggccggtctcgtccacggagaactccgcgacgatgttgtcctgcagaaagaggccctcggggtccttcttggccatggcgtaccaggtcccagagaagcgagccttgtcgaag

SEQ ID NO: 8356 - DNA, 574 bp, Homo sapiens
cgtgcccgtggttagagatgttgagtgcgccgcactgtgccccaagttctagccccgccagaagctgccagagccgccgccgtctcccctgtcccagggatgctctttgtaatatcggatgggtgtgggagtgaggggttacctccctgcgccgccaaggttccagaggccctaggcgggatgggctcgctgaacctcgaggaactccaggacgaggaggacatgggacttgcgtggacagtcagggttcacttgggctctctctagctccccaattctgcctgcctcctccctcccagctgcactttaaccctagataggtggggacctggggggtagggacagggcaggcgggcccatgaagaaagcccctcgttgcccagcactgtctgcgtctgctcttctgtgcccagggtggtctgccagcccactgcctcctgcctggggtggcctcggccctcctggctgttgcgacgcgggcttctggagcttgtcaccattggacagtctccctgatggaccctcagtcttctcatgaataaattccttcaacgccaaaaaaaaaaaaaaaaaa

SEQ ID NO: 8357 - DNA, 745 bp, Homo sapiens
  misc_feature (119)..(119): n is a, c, g, or t
atcagattcaaccagctgcaaacagggaaccgtctctatagatagaaaattactgtcatgtgctcatgcccgtagtcccagcttcttggaggctgagacacaagaatcgcttgaacctnggagatagaagttgcagtgagccgagatcatgccattgcactccagcctgggtgacagaatgagactccgtctcagtaaagtaaaaaagctttacgctgaattattccacataatggtcagctatttttggttgcataaaagatgctatataaaagttaaaccaaatctgccaccatggatgcactttgaagtctaaagatttgtactttaaatacgtgattattctttcagaataatactgcaaaaatttagtattttatcaccagaatcaggaattataacaaatttattttgcattttctagcatcctgacatcactgttatttttcttattgaaaatattaccatgagccatcacacctggccaaaaaaaaaaaaaaatcttatttttaaataaaagatttgttttgggttttagcaccaaaaataagaaagaaagagagagagagtgagagagaaagaaagaaaagaaagaaagaaagaaagaaagaaagaaagaaagaaagaaagaaaagaaagaaaggaaggaaaggaaaggaaaggaagaaaagagagagagaaaggaaggaaggaaggaaagagaaagaaagaaagggaaaggaaaggaaagaaaaaaaaaaaaaaa

SEQ ID NO: 8358 - DNA, 740 bp, Homo sapiens
aaactgaccaggtccagctattcacagaaaagacgtgcttttctaaccaatttgtggtgcacactgtacagttcctcaaccgcttttctacagtttgtgaggagaaaactggcagacctttcacttcgtatccaacaaattgaaacaactctcaatattttagatgcaaagttgtcatctatcccaggcctagatgatgtcacagttgaagtatctcctttaaatgtcaccagtgtcacaaatggagcacatcctgaagccacttcagagcaaccacagcagaacagtacacaagactctggactacaggaaagtgaagtatcagcagaaaatatcttaactgtagccaaggatccaagatatgccagatatctcaaaatggttcaagtgggtgtaccagtgatggcaataagaaacaaaatgatatcagaaggactagacccagatcttcttgagaggccagatgctccagtgcctgatggcgaaagtgagaaaactgtagaagaaagttcagatagcgaatcttcttttagtgattaagcttaattttgataagaattacatatgcatgcataggggtacatttacattctgtaagagattgagcctgaactctcttagtcataaaaacatcaaatggccacatgtccactaccaagcttcttctatgttaaaaaaataataataaagcagttttaacctgcaaaaaaaaaaaaaaaaaaaaaaaaaaaaaaaaaaaa

SEQ ID NO: 8359 - DNA, 624 bp, Homo sapiens
aagtccaaagatcacatttacaggagtttggaagaaacggattcccaccctcatggatggcttggaggactcaggacttcagttggaggaagtaactgcagattgtggtggaaacagcaagagaagtagaattagaagtggacgcctgaatatgtgactgaatttgctgcaatctcatgatcaacttaacggatgagcagttgcttcttacggatgagcaatgcaagtgatttcttgagatagaatctactcctggagaagatgctgtgtattgttgaagtgaccacaaggatttagaatattaaatccacttagtggataaagcagcaacatggtttgactccattttgaagttctactgtggataaaatgctatcacacagcatcacatgttagaaatatttcgtgaaaggaaaagtcaatcgatgcagcaaacttcattatcttatttaaagaaatctgacagagccatcccaaccttcaagcagctaccatcctaatcagtcagcagtaatcaacatcaaggcaagaacctccacagcaaacgattatgtgttaatggctcagatgaccatcagcattttgtagtaataaaatactttttaattgaaaaaaaaaaaaaaa

SEQ ID NO: 8360 - DNA, 740 bp, Homo sapiens
  misc_feature (302)..(302): n is a, c, g, or t
tgctggttcccactcagacttcccgagctgacttcactgtacctcctctgttcaatcatgggtgtattcaggagctgacgatgtttagaagccaggaagttaaacatgtcaaatgcgtgacttcctgggccacaaagattaaaacatatgtagagaaatgctttaataaagcagtaaaggatgatggcattaaactggaatctcaaagggtatgtgggaagatgacagtgtcatgagataagaaatcgagacccatactgctgacagaaaagaagggaacttgcctgaggtggacttcagcnctggctgagccgtgagggttcaaggggggttcattggcctcctctggcttgtggaaacggaatttgtaatttcgacagtgcttggcaccagacagctgctcaatgaggaacacaactgcatcatggagaatccccagcatcctcaaaccgttaacacctagaagaatcagaagcaccagggaagtgaggagcgcagtcaacaggaaacagcatggtcctacagaaatgcctatgctatagtcactctgccagaggctgctccagggtgaattatagtacatattagctcgaaattagcatcagatagccattaaaatgatgctgatacagatctatcaatatggaaaatgtttgtgatagacggctaagtgaaaaaagcatgccacccaaaaaaaaaaaaaaaaaaaaaaaaaaaaaaaaaaaaaaaaaaaaaaaaaa

SEQ ID NO: 8361 - DNA, 718 bp, Homo sapiens; identical to SEQ ID NO: 3126

SEQ ID NO: 8362 - DNA, 768 bp, Homo sapiens
aagacattgacttagctattagtgacctatgacagtttgtcaaaaagtctgctgtaccgtccggattcccggatagcaacctcgggacagatgtgggagaggaaggtcaactcgaggagcacattttaggaaactgcccacggagccagtttcgattctcctacctcgtcagcatgcagaggctccctgactcggcagcaaggagggcctcaccagccgacccccatgcccggcacccccttcaccaggtcctgccaaactccagagagcagtgccctgtgcattataacacagactgcgcccttgtactcaggaggatgcaattctctctctaaagtcgagagctcaccaccccgggcgttcgtcactgcagacatcactgcagacacagagacggccattagagctcaccaccccgggcgttcgtcactgcagacatctactgcagacacagagaaggccattagagctcaccaccccgggcgttcgtcatctgcagacatcactgcagatcacagagacggccattatgcagcctcacgtggtcactcctgggggcggtaggatattttatcgctaaagagaaaacactcttaaattctcacatcagccacccccatggcgactcttaacaccttaatgtagcaccttccaacttttctcctgggcatttatgtacaaagttgtaataaaattgggttcttactgcatacgctgcttgctggtttctaaataaaattgggttcttactataaaaaaaaaaaaaaa

SEQ ID NO: 8363 - DNA, 778 bp, Homo sapiens
tatttaaggaattaggccccttcagaccaagaatttgacaactcacaagctggaaagaaactatccgagggaagaatatgattcagactctgatgatgattagagctcaataattctgttgtaaagttgtctgttttgttctgcttcagatttaaatgtgtttttaaaattctattaatgtctatacattggtcacctagatactcatattctcgagttttatacagttgtatcacatcgaaaagtgtctttactgttttctgtgtggccatcatgtttaagttgaggaaaactcagttcttaaattatctgggaagggtctggattctctatttttgagattgactttatcacaatatgattcttacatcgtttataccatttacaattgtgttttagatctacagagttagaaattcgaaaactattccaggactaattcttaatcggcattatttatacaagaggtcaagtaacatttactagcgcaatactgcacttgtaaatgaattataaacgctcttctggaatatatttaaataaccattaaagaactgcttattcattctggacactgcatgttgatgttgaatcaactgatgccagcagaaagctattttgatttgtgaacatactgccttatttaaagggtcctgattgcttgtattttaagacattcattaaaaagaaaccaggaaacacttttgaaataacagcataaggaacttcactgtctctgctcaataaaatacctgtaactggaaaaaaaaaaaaaaaa

SEQ ID NO: 8364 - DNA, 759 bp, Homo sapiens
cgcaatcgggggtccccgatacgagaacaggatgagttctggtggatgaatttggatgccacagatcctgcttcatagattgcatcattcaagcatatcgtgtaaaacaacacatattatgggactaggaaatatttatctgtccaatgtgccataacagatttaggtttctttcctttctttgaaggaaagtttaattacagttgctcttttattttttccagttaagagactcagttgcttgggaaatgctttcttcgtactaaaatttgattcctttttttcttatgaagaaacgaactcagtttaaaagtatttttagctcgtatgacttgttttcattcattaataataatttgaaataaaactaaggaaatggaatcttaaaagtctatgacagtgtaactctacagtctcaaaatgacctgataaattgataagaccaagatgagattattggggctgttcatattatgattcagaatcattttctattgtggtattataggttggttaaagtgatggcctttttgatgggttttgttgtgtcttgtgaacaagtcgttactgtgtccattattggaatggaattatcactactgtatcatgagtgggtattttgattctatggttccctcagtattacatcttgacttgtaatcaattatgaatatttcttgatatttaatgtataggacatttatttatactcaataaatatttttcaaaaggaaaaaaaaaaaaaaaaaaaaaaaaaaa

SEQ ID NO: 8365 - DNA, 703 bp, Homo sapiens; identical to SEQ ID NO: 3130

SEQ ID NO: 8366 - DNA, 715 bp, Homo sapiens
agaacctcataccccaagacttctttctcagctggaaatggcaaatgaaaaggtagctgagaatgaaagctaattctagagcatcaagaaaaagccacagacttcaaaggcgtctaagtcaggcagaagagagagctgcttcagcttcccagcagctcagtgtgattacagtgcagagaagaaaagcagcctccctgatgaatctggaaaatatttaaaaatattcatagttcactcacagaactttagagttgggaaagcagttggactagaagtgtattgaaatggtaaagcctgcaaagtataatagttaaggcttgtgttatttcgcgtaagcattgttgttctgttttgagggttattggaaaacagagcagtgaccacttcctgtaagtaaagaaaatataatcctatattgagcttcagtggagaataaaccagctgagaagaactcattgccttcatcaatgtgtctgttttttaattcctcctttttcccttgaaaggacataataattttcaaactatgcaaatttctctttcataagaaagagtttttaagaaaattctagaatttaatatttcagtttccaagatttgagaattttacatctaattgttacttctaactcatttttaaagttcctaagtatccattttattatgaactcataaatgtaataaattgtgcactttctaaaaaaaaaaaaaaaaa

SEQ ID NO: 8367 - DNA, 748 bp, Homo sapiens
atcttgacatcagcttcaagcagattatagtgaatagaatctggacaggataatgagtaaggatattgaatcaagtgataaaaagtcctctgtcaaagaaaagtccaagatgagatggcatcaatgctaaattctatgaaacatttaaagaactaataccaatgtttctcaagctcgtcaagaaaattgaagaagagagaacactttcaaactcattttatgaagccagcatcaccctgataccaagccacacaaagactacaagaaaagaaaattacaagctaatagccctaatgaacatagatgcaaaaatcctcaataaaatactagctcactgaattcaacagcacattaaaaagatcatacacaatgatcaagtgggatttatcccagagattcaaggatggttcaacagacacaatttaaaaatatgatataccacattaacagaatgaaggtcaaaaaccatataatcatcttagcagatggagaaaaagcacttgacaaaattcaacatcctttcatgataaaaacactcaacaaatgaggtatacaaagaatgtagcttaacataataaagatcacgtatgacaagctcacagctaacattatactgaacaatgaaaagttgaaagatttttctctaaggacaagagccagacaagtatgcccactttcaccatttgtattcaacgtagtactagaagttttagttagagcaaataggcaaaagaaaaaaaaaaaaaaa

SEQ ID NO: 8368 - DNA, 664 bp, Homo sapiens
catgggctggtgtgtttaaagattgtgggagcttcgctggacgttaatgtgtaagtaaagcacctcctggtattcccacttgtcgtagtcatttcggttctgatcttgtcaaacccagcctgaccgcttctgacgccgggatggcctcgttactagacttttctttttaaggaagtgctgtttttttttgagggttttcaaaacattttgaaaagcatttacttttttgaccacgagccatgagttttcaaaaaaaatcggggttgttgtgggttttttggtttttgttttagtttttggttgcgttgcctgtgttgttgttttagtggggttggccccatgaagtgggtgccccactcacttctctgagatcgaacggactgtgaatccgctctttgtcggaagctgagcaagctgtggcttttttccaactccgtgtgacgtttctgagtgtagtgtggtaggaccccggcgggtgtggcagcaactgccctggagccccagcccctgcgtccatctgtgctgtgcgccccacagtagacgtgcagacgtccctgagaggttcttgaagatgtttatttatattgtccttttttactggaagacgtacgcatactccatcgatgttgtatttgcagtggctgaggaattcttgtacgcagtt

SEQ ID NO: 8369 - DNA, 664 bp, Homo sapiens; identical to SEQ ID NO: 8368

SEQ ID NO: 8370 - DNA, 746 bp, Homo sapiens; identical to SEQ ID NO: 3135
  misc_feature (125)..(125): n is a, c, g, or t

SEQ ID NO: 8371 - DNA, 160 bp, Homo sapiens
ctttttttttttttttgttttttttttttttacttttccttcctttaatcttatgcaaaagagaaaattaacttatgtggactgtaaatgttttatttgtaagattctataaataaagctatattctgtaaaaaagaaaaaaaaaaaaaaaaaaaaaaaa

SEQ ID NO: 8372 - DNA, 595 bp, Homo sapiens; identical to SEQ ID NO: 3137

SEQ ID NO: 8373 - DNA, 630 bp, Homo sapiens
aatatggtattgtgccagacccttgatggaggatacggagattcacaatacaaggtcagcccttttggctaaaagggctagtgggattactgctaagatttgtatagaactttagaccactgtcagaaaagattataacatgattaattgtaagattacatatatagagtgcccatgtgaaataaatttctgtctcttgctgagaacttgattgaagtaggaattcatgggtcctcaagtcatgaccgtcacactggctagctccgtaatgaatgttgtcttaaaatcaagagaactgtgagaataaggactttgatacaaatagtaaattcagtaagatattgtttagttctaaataagggcacaaatgggaaattttctcctagccgggcacggtggctcacaccggtaatcccagcactctgggaggctgaggcaggaggatcacgaggtcaggagatctagaccatcctggctaacacggtgaaacctgtcgtgtaataaaaatacagaaaattagccgggcatgttggcgggcacctgtagtcccagctacttgggaggctgaggcaggagaaatgcgtgagcccgggaggtggagcttgcagtgagccaagatctcaccactgc

SEQ ID NO: 8374 - DNA, 753 bp, Homo sapiens
  misc_feature (428)..(428): n is a, c, g, or t
  misc_feature (656)..(656): n is a, c, g, or t
gaatactaggattaaagtatataatgtatgtctttaacttctttctttcccattgataaactggcacccttcttttaagtacctgctctcccattaccacctatttccagctgctttttgaggttttttgcttgcctgtctcttgcttccttcttaacctctaccacttaagagagtttgttataatcaaatttgacttcctagcctgtggataatttactattaagtaaattattaccacagggagccagtgaggtcccagtagtctaaaacacgttcatgtgttcaccaaaattgcctgccccggcagagattatgcagtaagataatttaactgaataatactatgtgcatgtatcttgcctcagatatactcatgcaaatatgaatatacctctgatatggtttggctctgtgtccccacccanatctcatcttgaatgtgtactcccataattcccacattttataggagggatccagtgagagataatttgaatcaagggggcggtttcccccatattgttcttgtggtagtgaataagtctcatcaacgatctgatggttttatacaggggcttctgctctttgcgatcctctcttcactatttctctttgctgctgcccagtaaaggaggtgcccttttgccctcccnaccatgactctgaggctttcccagccatgtggaactgtaagtccaattaaacctctttttcttcccccaaaaaaaaaaaaaaaaaaaaaaaaaaaaa

SEQ ID NO: 8375 - DNA, 609 bp, Homo sapiens
agtgttctaatttgagttttgaaaaaaaggttaactgtaaaacagcctcagttttacagttctttgatttcgtttcatcagagtttttatagtttctgtttaataggtcttgtacctattttattagacttacagctaagtatttcattttggtggtgctaatgttaatggtattatatttttaatttcaaattacccttgtttgttgctgttattccaggaagtattattccaagaggtattttggaagaaggcactgttaccatagaagatgacatctccatgcatactattgtccctgaaaaccttctagtgggacaagatgtggaggtggtagtagacagtgatattgatgatcctgaccctgtgtaggcctaggcaaatgtgtgtgtttgtgtcttaggtttttttttttttttctagagatggggtcttgctatgttgcccaagccggagttcaacagctattcataggtacaatgatagtgcactacaaccttgaactgctgggatcaagtgatcctcctgcctcagcctcccaagtaactgagactacaggccccccccacaacacccaggtatgtcttagttttcaaaaaaaaaaaaaaa

SEQ ID NO: 8376 - DNA, 116 bp, Homo sapiens
cctactcatctgctcccatcggatgaccctggtcttcaatggttagcagaagggagaaaagaaagcaggaaaatgtgctattgagattccagtggtgacttcactgatatttagtg

SEQ ID NO: 8377 - DNA, 116 bp, Homo sapiens; identical to SEQ ID NO: 8376

SEQ ID NO: 8378 - DNA, 624 bp, Homo sapiens
caatactggagcctgcccaccataaacccagcatcaggcagaccttagggcctcaactccaggccgacacctgtgaactgagcttctagacccaccccagcaccagagacctgcagcccctataacacagatttgagttctggcctgcatcactgccagctgactacagtggccttaggctatgaataacccacagcaacaggcaggctctcagcagccaagagcttcaggtatatcccagtgctgtaccagccttggtagccatgggcttagcatgctaagctaccacagctacagcaatctgaggattagggaccagaccagacaacctgcctagaaactctgaacaggcttacttttgaaggaggttccaaaacaaagccacaaaagcttacaaagactggaataagtacctacttcttcaatgtacagaaggtcaatgcatgactacaaggatcagggaaacacgttgtcactaaacagacaaaatgaggtactagtgactgaccataaagagacaaagatgtatgtactgcctgatagagaatccaaaatagctattttaaaggtgctcaataaacaattcaatgaaatgagaaacataataagtgaccagaattagaa

SEQ ID NO: 8379 - DNA, 544 bp, Homo sapiens
aacggtcttgcctgttcccctgcactaacgccaacctgactgcttttcctgtcagtgcttttctcttctttgagaagccagactgatctctgagctccctagcactgtcctcaaagaccatctgtatgccctgctccctttgctgggtccctaccccagctccgtgtgatgcccagtaaagcctgaaccatgcctgccatgtcttgtcttattccctgaggctcccttgactcaggactgtgctcgaattgtgggtggttttttgtcttctgttgtccacagccagagcttagtggatgggtgtgtgtgtgtgtgtgttgggggtggtgatcaggcaggttcataaatttccttggtcatttctgccctctagccacatccctctgttcctcactgtggggattactacagaaaggtgctctgtgccaagttcctcactcattcgcgctcctgtaggccgtctagaactggcatggttcaaagaggggctaggctgatggggaagggggctgagcagctcccaggcagactgccttctttcacc

SEQ ID NO: 8380 - DNA, 674 bp, Homo sapiens
  misc_feature (85)..(85): n is a, c, g, or t
tatgtttgcacgctggcctatatatcagggaccacattattattattattttttgtgacaaggtttcgttttcattcctgtcgcnccaggctgcagtgcagtggtgtgatcatggctcactgcagccttgatctccagggctcaatcagccctcccacattagcctcatgagtagctgggactacaggctcacaccaccatgcccagctaattctttgttgttgttttttctatagagatgaggtttcaccatgttgcccaggctggtctcaaactcctaggctcaggcgatctgcctgcctcagccttccgaggtgctgggattgcaggcatgagccaccatgcctggcccacaactacgattaaaaaaaaaaaaaaatgtggccaggtgtgatggctcatgcctgtggtcccggcactttgggaggccgagggcggggcgggatcacctgagatcgcgagttcaacatgaccaacttggtgagacactgcctctactgaaaatacaaggtgagccgggcgtggtggcgcatgcctgtggtcccagctgcttgggaggctgaggcaggagaatcgcttgagcccgggaggtggaggttgcggtgagccaagatcatctcaccattgcactccagcctgggtgacagagcgagactccatatcaaaaaaaaaaa

SEQ ID NO: 8381 - DNA, 176 bp, Homo sapiens
aaaaaaaaaaaaaaaaaaaaaaaaaaaaaaggccgcccgcgcccctgtaatcccagctactcgggaggctgaagcaggagaatcgcttgaacctgggaagcggaggttgcagtaagccagatcagccctgcactccagcctggacacagagcgagactccgttttaaaaaaaaaaa

SEQ ID NO: 8382 - DNA, 164 bp, Homo sapiens
atatactttcactggaagatcattgtaattcaaatccattcagtgctgtttcacttttgtaatttgttagctaagtttaagtagtgtatcctgcacctactttaatgatatagcacattgataacatttttttccttatttaaagcaatgtttacccacagcgc

SEQ ID NO: 8383 - DNA, 708 bp, Homo sapiens
ctgggatagtccttatcagcagcgtgaaaacagactaatacaccacacctatagggagtttatctgaggatggctcatgatgcacgtgttttccaccatttcgtaatcaacttggtccggtttcacagggtaaaaactttccaatgcactcccttagacagggcaattgctctaagacagctctttgaatcaatgaactaaagtttgtctggcgatacttctttagtagacattcaggcaaaatcgagtttaaagactgattttatgaacccaaaagactaaattgatcaatgctaactatacacctcagtgactttcggcaagaaactgcatatgatgctgccaaagtgccaaatctggcactcggcagtcatccactaagatgattctttgtgccattgtttagaaatcaatagactattttttggccaggtgcggtagctcatgcctgtaatcccagcactttgggaggctgagtcacttgaggtcaagagttcaagaccagcctcgccaccatggtgaaacgccgtctctactaaaaatacaaaaattagccgggcatggtggtgggtaatcccagctacttgggaggctgagacaggagaatcacttgaacctgggaggtggaggttgcagtgagctgagatagtgccactgcattccagcctgggtgacagagagagactccatctcaaaaaaaaaaaaaaa

SEQ ID NO: 8384 - DNA, 714 bp, Homo sapiens
aaggacagtgtacaaaagcagctgtacgtcggattcccggatggcgtttctgtgttcagagtagtaagatgctttattcagagattatctaagctcttaaactgtgtgttctccatggtcataggccttctctgaaaatgtatgaacaggtatcctattgtctaatgtaattaggattttaaaagcaatttttgatagtttgtcttttaaaaagtaaaattcagcactgtgacttgaacccccaatctttcacatacaggtgaaacattaagccacaaatataaaataatgaacaagaaagaagacaagatcctaattcctgtcattagtgacctaagtaccccatatcagaaactttgcaaaacagatctagggacagaagggctttgaaagacatttttctttggggcaaatttcgtgtgccagaactacagtttaaatgtttttatgagcaagggaaggtagcattgattcccatagctttctaattagatacatgctgtcatggatgtaagccttaaaggagttaatactaatcttgtacatacacaaattttcctcaggtttttttattttataaaaatgatttgttataaagtactgtctgctagacccttgcctttgagtggctttgaaacttaatatagtttttaaaaagtgcaatgggatgagattatgctattagtatattaaaagcatgtttctgttttactc

SEQ ID NO: 8385 - DNA, 572 bp, Homo sapiens
caggagaatttgacggaataagtatctcggaagaggtacgaaattgagaagatcccacaacctttgagaatggacgctgcatccaggccaactactcactaatggaaaacggaaagatcaaagtgttaaaccaggagttgagagctgatggaactgtgaatcaaatcgaaggtgaagccaccccagttaacctcacagagcctgccaagctggaagttaagttttcctggtttatgccatcggcaccgtactggatcctggccaccgactatgagaactatgccctcgtgtattcctgtacctgcatcatccaactttttcacgtggattttgcttggatcttggcaagaaaccctaatctccctccagaaacagtggactctctaaaaaatatcctgacttctaataacattgatgtcaagaaaatgacggtcacagaccaggtgaactgccccaagctctcgtaaccaggttctacagggaggctgcacccactccatgttacttctgcttcgctttcccctacccccccccccataaagacaaaccaatcaaccacgacaaaggaagtt

SEQ ID NO: 8386 - DNA, 724 bp, Homo sapiens
ccaaaatttcattcaagactgggaagtcatgaaatgccttgtttgggagttgcccacatagaaacagaaagaaaaaaccgtatcaagaggattaaagagagagagagagataaaacaaagaattccaaggattgtcacaatctgatctgcataaataaaagataatggcttcagtgagctggccaacctttctgtggagtgatcggtctgtagagagtcatgtctaagaggctgcaggtcattatggcaagataaagcctatttctcatttatattaaagaatcttgcctgttaagggcttgatatggatttcagacataaatgtgcacaaggctccacaccttgttaagccaatttctacgtatgcattccctccctaatacacatgcagattttatcattcacaactcaactattacacctaacatacttttcttgatttacaaagggtaacatttaggtagatcagaagtactcaaattgggggaattggatcataaaattttcccttgacaaagaaattattttttaattttgtacagaaaaacgaatttccttccttttaaacagggcttgctacatcaagagaagaaggttaaactgtttccatttttttaatatgtttgattcactttattataatatctggttccaggcaaatggattgttccaagtcagcaactggaaacctaagcaatggaaactttcacattaaaaaaaaaaa

SEQ ID NO: 8387 - DNA, 687 bp, Homo sapiens
cggcctggttgtttggcatctgcactcctgatgtccttgggccaacgccaaaacctaacttggcattgggcaaaaagtgcatcatgacctaacgaactcaggaaagcaccggaaaagtttagcaagaacttttcacagctatgtttgcagcaacaatctaagaagaaatgatgttcaaaaactgttcaattctgtaatgtgctttaatgagtcgcaggaatgagaacaggctgtgaaaggtttttcctgaggtatgtggcctcaggaatggtggcctggcatgtgacctctgcggcttgtatctgccactctcacatctgtggccactttcccctccagccgcctctagactcctctagcctcagctcctccaatagagtcagaatcttgctattgattcagctggctgagggtggagaaaagcactgacctttgtggagtacatcccttgttcttccttttcatcctgattctttcaagggaaatggggcactatgatcaatcttggtaggtatccacagagttccttcagagagcaccagttttgaacagagccctcagttgaggtaaactactaggactataactgatgtccaaagcaccctgttcctattcttcaaaattacaaaacaaagcaaaacaaaaacaaagaaaccaaaaacccagatctagtaaaaaaaaaaaaaa

SEQ ID NO: 8388 - DNA, 774 bp, Homo sapiens
catcacatctgctgcgtcgatctcctggtgctgcagaccagactggtcttatcagccatctggacaagacccaaaaatgttcatacccacaacactttctccactctatatttgtattgccctacccatattttctggtcccattgcttcttgttcacttggtcttaatttctgctatttctctgtatctatgcatcagcctggactcacttcttaagtatgtaggaaagtcagtgtgtcttacccagtctgtccaatttaccctataataagagtaccgaagttattaaaaatctctgagattccaactctgatttccttaagccactctgcctgggggtttttggctccgtctggtttctttctgaagtcctgaccatatgggtcatttgttaatgtgactgatgtaatttacatcctgttcaaaaatgacaacatgttaaaacttgccacgtgttttttttttaaacaattaaaaaatgcttgaaagtttatcatgcaatttgcagccatccaaacaacattttctagccattacaagcatgacaaaacacattttttagatcatctttgatttttgtgttccttctaaaaagctaattacacaaatattcatggttactatgacacattattaagggacaactcacatcagagaataggaacatgaaactctgagcttaggggtagaattaaaggagactgtttatcaccaagatcaatgtttgcttgtacttcagtgtgagagtaaggaaaaaaaaaaaaaaaaaaaaa

SEQ ID NO: 8389 - DNA, 605 bp, Homo sapiens; identical to SEQ ID NO: 3154

SEQ ID NO: 8390 - DNA, 735 bp, Homo sapiens
gaaggactgaggggtagaggggtgggacttcagccccagcacccatgacggcctagtgtcctccgacctgtcatccacgtctagtcagggaccgttcccggtgcttccatctcgtaatgcctcttgacttgggcatcgtgtccttgtactcgtgtcccgaaggccgctgtctccggctcggttccgttgactcccggtgcggcactgagcttcgtggtctcctatcggagtcgcgcgtctcctcgtcccgtcccaggtacactcactctattcgccttaggcatgtgcaagtcccaggcctcgccaccatccactcccagcctgcctcattccaagcatgtcacgtcacgccccagccaagtgactgccgacctgcttttctgctccttcactactaactgttgagacgtgcttcccatcagacacatgggctccccctggcccgggcgtggtggctcatcgcctgtaatcctagaattttgggaggttgaggtgggtggatcacctgaggtcaggggtttgagaccagcctggccaacatggtgaaacctcatctctactaaaaatacaaaaatttgccgagcgtggtggtgggtgcctggaatcccagctactcaggaggctggggcaggagaatcgcttgaacccgggaggtggaagttgcagtgagctgagattgtgccctgcactccagcctgggtaacagagcaaactctgtctcaaaaaaaaaaaaaa

SEQ ID NO: 8391 - DNA, 125 bp, Homo sapiens
ggaggctgaggtgggaggatcacttgagcccaggagatcaaggctgcagtgagttatgatcgcaccactgtactccagcgtgggcaacagagtaagacctgtaaaaaaaaaaaaaaaaaaaaaaa

SEQ ID NO: 8392 - DNA, 75 bp, Homo sapiens
tatagttaataaccaatatatcgtgtatccgaaaattgctaagacagtagatgttaagtgtctttatcaccccca

SEQ ID NO: 8393 - DNA, 663 bp, Homo sapiens
gagcacatggatgtgaacacctctcttggattgtggttcgccgcacaagccccatcagagttcttacgggtggagtgtggggcccagaaggggctcaggtcttaggggtgtcatgctgttttcctgtagatgtttgatggacaccgttttctaggagccctctgcatggccactttctgcctcagctcttctatagcatcttcttctgttcccctccaactggggtaacccctgatctctcttcccccaaactgagtcacagagttggactcttgttatctctgtgctctactacttcacacattatagataatatgatccgagacaaaaaagccgatgccttaccttcttaggaaggctaaccttggcccaggccccattggctcacgccctgtaatcccagcactttgggaggccaaggtggccggatcacctgaggtcaggagttcgagaccagcctcaacatggagaaaccccgtctctagtaaaagtacaaaattagctgggcgtggtggtgcacgcctgtaatcccagctacttgggaggctgaggcgggagagttgcttgagcctgggaggcggaggttgcggtgagccaggatcgcgccgttgcactccagcctgggcacaagagtgaactccatctcagaaaaaaaaaaaaaaa

SEQ ID NO: 8394 - DNA, 432 bp, Homo sapiens
gcttagccactcagatggtgatgcatgacccaagctaatcagagacacttcaccctttgaaaggagtagcatgactgcttatttcttttctgtcctctttttaagatagaaatacatttcgtacttcatctacatgttttaagacaccttgtttctgttttgatgtacattattttccttgctggataagttgaagcgtaatcattcatcgtggctccctcttaaagtgtagagtgtttgctttagaagcatctcatttctcagagagaccatgcaggaacagtgactaattttgttacccattttttaatgtttttgtcctgtgtagatatttacttcatcaacagttcttttattattagtgtccctggcccaatgataatggcttgggatattcatgtttccacaaatcaagacaagcttaaagccctc

SEQ ID NO: 8395 - DNA, 664 bp, Homo sapiens
ctgatgaatattcacacatctcaaagtccaccatggcaagctctgaatagctgtcagtttatgtcttacattcactaggataatgcgtgctaataacagtagtataggcttcgaggtcaggctgtagattgattcaccatctagagtgagcaggctcagaacaaatgcatccagtcctttaacctcactgaattgctggaaccaaacagatgaccaaaagtcctgagggtgtaagtcaacagggggccccgtccagttgctctgaaccaaaagttgcaaactgctcacaccaagtagaaatatcaactgttgtctttccgttgtgtccaaatctgttgagtaatccaggaatgttactacctgcttctccaggtagctatcaatcttttcttcagcggttcttgttgaagttaaaaatattttgagtcattgaatttaagaatatgtgcttcatagttcccttccagcagcaacttgtagtgagaagatcaccctctctgtgcccccgacacccctccccggttcccatgctgccgctcagcctccattggggaatccccctcagaatttgccagctccggggtccacatcaccccagacaccgctgcagccaaaacaggctcccacgagggccacacgggagtcaacaaaaaaaaaaaaaaaa

SEQ ID NO: 8396 - DNA, 684 bp, Homo sapiens
  misc_feature (103)..(103): n is a, c, g, or t
  misc_feature (124)..(124): n is a, c, g, or t
  misc_feature (155)..(155): n is a, c, g, or t
  misc_feature (177)..(177): n is a, c, g, or t
  misc_feature (223)..(224): n is a, c, g, or t
  misc_feature (274)..(274): n is a, c, g, or t
tggagagacacttcactgctccaaggcttttgagacacaagggaatctcaacaaccagggatcaggagggtcccaagccgacattcccagtcctgtgagctcnaggtgacctcctccgcagaangagagatgctgcttctggcccctgggagctngaatgccaaagcccacgggttntggctcctgtaaaccctgaggaccgcccacctctgtcccacgtgcnnttgcgaccacgcctccattctatgttaacctttgctgctcagatgcctcnagatgctataggtccagtgaaagggcacagtagtaaagctgcctgccctcccttccctcagaccgtcgtccctcataattccacgagaaagggcatcttctgtccttctttaagacacagacgtaaggcgtggagacagctccatcccttatccctctttctggcgttggggcccccgacacactctagatgctctttccccacggttatatgtgtgtccctcattcctttcccaccaagaatccatcttagcgcctcctgccagctgccctggtgctttctccaagggccatcagtgtcttgcctagcttgagggcttaagtccttatgctgtgttagtttcgttgtcagaacaaattaaaattttcagagacgccaaaaaaaaaaaaaaaaaaaaaaaaaaaaaaaaa

SEQ ID NO: 8397 - DNA, 626 bp, Homo sapiens
tgtatgctagtcaaacctttggaagcacgtttcaggacccccattctcagatcccttcctgtgatcatatcggcactaagtgacattgagataaccagtgaattacacaggggaaacagaaatcaggcacagaaggccaagatgaggctaagagataagctgatgaggaattagatgcaagaggtgggcatatgacaggcatgaggcttgactttggattccaagacgctggggcagcagagccagaccagggtggtaggcaggcatcaaggatatgaggttcacaaagtccccgcacatgtgtttaatactcatagaccagatctacttaagctttaaaccacccaaattccaccacaatccagtaagcataagaagcctaagaggaagggatacagtaaaggagcttgtggaaagcttacagcagtatggatgggactctgggagtgaaccaaactctggagccagacctcctaggttcaaacccttattctaccaactaccaggtctaatattctaccaactaatatgtctctatctcaggtttctcatctgtaaatgaggacaaaacagtgttattgcctcaattccacccgccaacactatatgtgcctcaagaaaggaaa

SEQ ID NO: 8398 - DNA, 652 bp, Homo sapiens
taacctgaggagatatgaaaattcagtggaatgtttggaataagaagacattagatgatgctgaaagaccaagactgctctagtttgagggatgtagctcagcttttggctagcccaggcttccctaagatctgctttgttctatttctcccaagccaatcctcttaaagaccctttgctatgtagtctcatggtctagcatgcatcttgtagagacaaggcattgctgcgcagatttgcagggttgagatgtgtttatatctggttctatattttaaaagattctgccagaaaataaaaccagaccttgttctaaagcccagggttatggaccaactcagtgcttcaggtcttaatgcctccatacctcttcctcaccaactttactagtagctgagatttaatgggcacctattatgctacatatcatgttaggtaaatctgacctgacctctttccccaccctcctttgttgctgcttccctgaatgagtattaccccaggatgaggtctgccatcagcttagttagccattgatgcaaatactagggaaagactaggaggatgagccagggttgctactaaggactaagtgtcgcaccaggtttgccttttgtatttgcataaagaaaggagttggagctgggtgcgt

SEQ ID NO: 8399 - DNA, 684 bp, Homo sapiens
  misc_feature (207)..(207): n is a, c, g, or t
gatgttaacagtcagacttggctttgattcacacaaagcttgcttcacctcccagactgttgctaggatataggggatatcacactcctgaatacatggcggaaggaaaagattttcctcctccttacaatgccattccattcttgctctgcttttcttcaaggccaactgagaacaaagaatggggttaccagtatgaagtattcnacataaaagtcagaaaccagaggcaccagtgcctgactgggaatggggatggggaggtcctgtgggagagaaagttttgcttgtaacagttgtgaggtgatcactatgtggaccagatccagagccggaagggtgactgtgtgcctgtgtgcacgtccacctgcatgagcacgtgcattgcagggaggagagggtattacaatcaacaagactgaaacaccccattcttctctgtctaaagtccataagtcagggaagggagctctagaatctattaagctttgagcagcttgaggccctattaatatgtaaatatgggatctggaaaggctagcatattaaagggttatccactgtggtaggttttcaatacatccacaagttttcgatactccccccttcaaaggtggagcccattcctcttttcttaagtgtggattgtatttagtgactcacttctagctgaaaaaaaaaaaa

SEQ ID NO: 8400 - DNA, 682 bp, Homo sapiens
atcgccagcctgctgcccgtctggctacacctgcaacggtgaaggctcgatcctgtcgagaaggaagtgttctctgcccagcctgccaccttcctggcccgtagccctcacgtgggtgtgaaggacgtggagtgtggggaaggacacttctgccatgataaccagacctgctgccgagacaaccgacagggctgggcctgctgtccctaccgccagggcgtctgttgtgctgatcggcgccactgctgtcctgctggcttccgctgcgcagccaggggtaccaagtgtttgcgcagggaggccccgcgctgggacgcccctttgagggacccagccttgagacagctgctgtgagggaccagtactgaagactctgcagccctcgggaccccactcggagggtgccctctgctcaggcctccctagcacctccccctaaccaattctcctggaccccattctgagctccccatcaccactgggaggtggggcctcaatctaaggccttccctgtcagaagggggttgtggccaaagccacattacaagctgccatcccctccccgtttcagtggaccctgtggccaggtgcttttccctatccacaggggtgtttgtgtgtgtgcgcgtgtgcgtttcaataaagtttgtacactttccaaaaaaaaaaaaaaaaaaaaaaa

SEQ ID NO: 8401 - DNA, 719 bp, Homo sapiens; identical to SEQ ID NO: 3166

SEQ ID NO: 8402 - DNA, 761 bp, Homo sapiens
cggagatcacttgaactgaagctggagttgcatgaccaagattgtggcactggactctagcttgggcaacagagcaaactccatattggggggaaaaaaaacagccataaacaacgaaattctcaaattaagaattgatgaaaaagaactttaaatgtagccttctcatgattcaaagagcttctggacttacatttagatgacccaggctttcaaatgaagtaaactatttttattcattgaattcatgttacattatcggtaaaataattttttccttaaatggaagacttctgtcatcaaagtgatagttaaaattgtaagattcaaaaaagattttatagatttaatttaaatatccttaaatagtctttcttgaatatttaaatagccttaaatagcttttcttgaatattcccatagtttcaaaaagttcttatgaaaagaaggaagtttcttatgaaagaaggaaaatcaagaggctacacttataaaaattaatttttcagttctagcttagtcattcatttactgagagcctattctgggctggattctgaagcaatggagaatgtggaagagacagttttatcaacaagttacttcaaaccaatgtgacaagtgctttaatggagacacggaggaagtcaaaagcatagaagcaaagagtacaatgatagttgccagaggctggagggtagaggcatggggagatactggttcaaataaaccaacaacagaccaaccaaaaaaaaaaaaaa

SEQ ID NO: 8403 - DNA, 625 bp, Homo sapiens
tgcgatatcgaaaggactctcttcattgccgaggaatttcaacatcatacatgcatagtacttacacacaagtcaacattgtagtaacacactttggtggagtcaaatttgcaaaagtgcataaacaaattcggactctctatgagtctccacgcaatttctacctccagtattggaaatgatgccaagatgaatacacagccaatagtataaaaaaaaataataataataatgctgaccacttaccgtcagtaactttgctggctttttcaggccaaagcagctttaaattcagttaaaagcttccccggtaatgtcaatcaagcttggaaagggaattgcccaattgaaaggccaaattgaccttccattttttaaactgatgtttttgtcgttgtcatttttgcatgaccaacaactcatctggattgtccaccaaatgcattggcctaaatagaaaaaccaactatttggtaacatcttgaaattcaattttaggagccttgatcgtacctaattccaaatcagtcattatggtttggagatgcaattgaaatatattttctctgcaaagtccaccagtctttaaataactacttataaagtgtttcaatttttccagtca

SEQ ID NO: 8404 - DNA, 743 bp, Homo sapiens
  misc_feature (707)..(707): n is a, c, g, or t
ttaacacattctactgatatagaagaaggaaatcatagaatgccatagatccatgttcccgcagataaggattgctttcttgggacccatttcagctcattacatttattaactcaactaaaatctttcctggcactggttcagaatgcacaaagctgttgtctacaaaacctactttagttaccacgtgggtgttttcccaggtaggggtgattttaaagggaaaataagaaaatggaaaattccattttgcagatttaggcttaccttctgaaatcttgagaatgctgggtgagatttaagacagactctgtcgttctatcatcagagaaatgcaaatcaaaaccgcaatgagatactatctcacaccagtcagaatggcttttgataaagagtcaaaaaataacagatgttggcgaggctgtggagaaaagggtgaactgatactctgttgcaatgtaaattagtccagccactgtggagggggcagtttggagagtttggaaagaagtgagagttgaactgccattcaaaccagcaattccattactagataggtctggatgtctggaaaataaattgctgtaccaaaaggaaacatgcacctgtatgttcactgcagcactattcacaatagcaaaaacgtggaatcaacccagttgcccatcaacagtggaatgaattaaaaaaatgtggtacatgtacanccatggaatactatgtagccataaaaaaaaaaaaaa

SEQ ID NO: 8405 - DNA, 786 bp, Homo sapiens
atttgcctggcctaccaggccgctcacaccctccccaggcttgtgcagcatacccccacccctgcgcctttgctcacggtgccttgcccacccgtgcacgaccaaatcccactgatgcccatcatgcctcagaccttctgggctctgcccgctgggggcctgaagacattcctggaggacactcccatcagaacctgcagccccaaaactggggtcagcctcagggcaggagtcccactcctccagggctctgctcgtccggggctgggagatgttcctggaggaggacactcccatcagaacttggcagccttgaagttggggtcagcctcggcaggagtcccactcctcctggggtgctgcctgccaccaagagctcccccacctgtaccaccatgtgggactccaggcaccatctgttctccccagggacctgctgacttgaatgccagcccttgctcctctgtgttgctttgggccacctggggctgcaccccctgccctttctctgccccatccctaccctagccttgctctcagccaccttgatagtcactgggctccctgtgacttctgaccctgacacccctcccttggactctgcctgggctggagtctagggctggggctacatttggcttctgtactggctgaggacaggggagggagtgaagttggtttggggtggcctgtgttgccactctcagcaccccacatttgcatctgctggtggacctgccaccatcacaataaagtccccatctgatttttaaaaaaaaaaaaaaa

SEQ ID NO: 8406 - DNA, 727 bp, Homo sapiens
  misc_feature (49)..(49): n is a, c, g, or t
acacatagacagttgtacaaaagcagcctgtaccgtccggaattcccgngatgacatactttgagagttacagtttaaaagaaaaacaaggtgtaattatttggttattagtagcatttacatatgcttgaaaacttctgctatatatacagtaagattaatttattctaacaatgatcttgataattcccctgattcccagactccttggaatagctccacagctatcggtggttctgccacaggttcagagccttcccagtactgccttcttatttgagaggtgtgctaagagctataaagcggaggcttcaattgtacacagtttggaagtttaggcaaaagtcatttcttccctatattttgtcatgcttatctcctgtctctttctgttttacagattagcaataaactccttaaaacccaaaggtttgggcttctgttcctttcacttgcagtcagacatggagttagtggtagaagaaacagaaggggtaacctgcatggtgacagctactgaggggatggataggaaagcaggctgagtccctggggccagtggttaccaaagccaaggagagagcaaggggagcccagtgggcctggccatggactgctctggaattccgagtgtgaactttcagccaagaaggtagtgtgaaaatattactgtgaggttttaaaagtacacaaataacattgttttttgtaaaaaaaaaaaaaaaaa

SEQ ID NO: 8407 - DNA, 760 bp, Homo sapiens
gtcccccgtgccttgctggcctgcacacagagagttctgagaagatttggacaggtgtactatacatgcaactacagcctcctatgtgtaattgtgtagatgaagtatgtgtgtgtgtctatgtaaatagatgtacatatattcatgcgatatatttgatgataatgtttttgagggagtaggaaacacttgttattgtgttagtgatactgatttatttaatcatcaagtgagatcacaggagcctctttcctaaagcaaggatttcatattttctatacttccattcttatattttccattttagagtgactcagaccacacagccacacacagtggattcttacatactctttccacaacatccttagggagggaatgaatgcttttatcttcttcactggaaagacgggagatgaaggccaaggcagctgaaaggctggacaagttgtggaggtgtggatgaagtgcaggtggttggccttgcgccggcagcatttgccccctgggtaatagtgaagagcgatcagcattgagtccaggggacatcgtcatcaccccctctttatttacatcatagtcttgggagggattattcctttgaacattttccatgtttgttctgcattcaaaaggacgggaaagatacaattcaatgaaaaaatgttttctgttttgcagctagatgggaggatgggtgtgtgtgtgtgtgtgtgtgtgtgtgtgtgtgtttgtgtgtaacctacagaaaaaaaaaaaa

SEQ ID NO: 8408 - DNA, 658 bp, Homo sapiens
tagagggacagaagtgatccgcgggctgtgatttgcagaccctgtctaaaggctgaattggcatacccctggtgaagatggaggtatgagttagtaacgagagtaaaggggggtctctgcagtgtaaggtccttagcaaagtctcagaaacacataaagattgagtctatttgggaaattgaggtcgttgtgagagtgaggcctggggtccggatcgaaactggaaaagtcaatagtcaacagtttttatatgcccactgttgaacacatcattattttaaaatattactacataaaattacaattaaataaattacatttaaaagaaaactggccgggttcagtggctcacgccataatcccaacactttgagaggccaagataggcagattgcttgagcccaagaccagcctgggcaacatagcaaaacctcgtctctactaaaattacaaaaattatccaggagtgttggtgtgcctgtagtccaagctacttgggaggctgagctgggaggatggcttaagcccaggagatgaaggttgcggtgagctgtgatcacgccactgcactctagcctggacgacagagaagaacctgtctcaaaacaagaaaacacacacacaaacaagtaataatactcaaaactcaaaaaaaaaa

SEQ ID NO: 8409 - DNA, 706 bp, Homo sapiens
acagagtgagacctattcaaaaatataaaagctctgaagtcaccatacatgaacaaatgatcctgtatcatttgagaacacaagtggtattctgtatactctccttactaagtttgggaggtataccatacctttaggaaggcgtccattcattagaggaaaagaagagtagttcattaagacctgattggttaaatggagatattgccatataaagagaaatgctttagaagaaagttgggtgtttccatttattcccttgttagcaagttcagtggcattgtggttgaaatttttgataggtgtgaaagatgaagggctgattgtgctttatgaatctgtcctgtgagtgtgaattttcattttctgctctgacagtgcctgtctttccctctaggtgtgtgggaatgccctcatgaagcaataccaggttcagttctggaagatgctaattctcatcaaagaggactactttcccaggtatcaggcttgttgagcagacagcaggggattaagtaactcataaccaggcctcagatacccaagggtgctattacctgctggttttgattcaagttaaaaacacctgtactaagtatgacatctttcctactccagtccctctcgttgatatttgaataaatgcttttgaaccttaatgagagtctgtcttaaatatcattgcccaaaaaaaaaaaaaaaaaaa

SEQ ID NO: 8410 - DNA, 602 bp, Homo sapiens
ggattaatctacgggtacgtggctgaacagttcgggtggactgtcaaatagttatggccggatttgctttttcaagtttgctgacacttcctccatggcccatctatcgccggcatcctctcaagtggttacctgttcaagaatcaagcacagacgaccagaaaccaggggaaagaaaaattaagaggcatgctaaaaataattgaggttttcatgattcagcacctgcttttgtttctgtgagatgagctaaattgctttcataccccagataagagctaaaaccacctaatgctcttatggcacagctgtgtatagatttagttctctttatacttcatttctagcccagttgggttttgatttatataagtagtttagaccttctcttcataatcttgctctgagatggggaacagaacacacaagtatgaagtttctttcaggtgtaaataatgaaaaataaatgcctcataaatgatagtacaatgtaactatcaaagttttataattcattatgagttaaccattttaatgtttcccaattaaacctcatagtgcaaaaaaaaaaaaaaaaaaaaaaaaaaaaaaaaaaaaaaaaa

SEQ ID NO: 8411 - DNA, 690 bp, Homo sapiens
tccgggactcctccccgccaccctccgcgcatagggtccttggtctggaccctgccccccaaaagtaggcccttgctcctctaccttgctctgagcacggagagccctgaccccaccagtaggctcgcccccagaagggcccaagtggccgtctaccgtcaccttccagactcccgcccctaacacccagtggctacagtgcgcctgtcggggcacctggagcgctcacctggttgaattcaaagtcccagaaggccccgctggcgtgaagccggccccttacattttgcgaagtgcattatagtccttgtttttctctccctcgtgggggcaacgacccctcccctggcagtaggggtggggtaggtgactctcgctagatccctccaaagcagaccggtggcgatgtcagcggatgtcacgagctcgttagctgcgttcggggaaggttggggcgtcagggagctctcggatcacagcagcccccgccctctcctaggcctggcccggcagagcccccagagtggaccccccagcgactggggtcttctccccactcctccctccttctggtctgatgcggcagcgcgggggctgcggggcctgtttgggacgaacagagctctcccttggtaagacttattttgttaataaatggaatacttggctatattcaaaaaaaaaaaaaaa

SEQ ID NO: 8412 - DNA, 717 bp, Homo sapiens
tagcgagggaaagaggtgtctcagatgagaaagcctgatagcaaggattagtgtattgtcaagtggggcacatggggaagagtttagattttattttaaagtgcaatgggaagttattgaagaatgttaaggtgatagaaaagttatttaatcatatttgtgctttcaaaagaagagtttggctttcatgagaatagaggaaaaagactcaaggtgggagccaagagtaataacaaagctgttctcatgaagggaagagataactgtggcttggactagaactggaccatggaggagacaagaagtagagagatgtgagataaattttggggtaggagcagcaagatttgctgatgagatcaaatatgagggcacatacaaattacatttgacccccaggttgcaactttgagaatctggatagattgtggggctatttattgagacaccaaagaccagaggaggaatgactttcaggcataaaatcaataaaatcctctttacacactctgttaggtcattcttgcattgctacaaagaaatacctgagactgggtaatttataaagaaaagagatttgtctgggctcagtggctcatgcttgtagtcccagcactttaggaggtcaaggctggtagattgcttgagcccaagagcttgaggaccagcctgggcaaatggccaaccccacctctacaaaaaaaaaaaaaaaaaaaa

SEQ ID NO: 8413 - DNA, 691 bp, Homo sapiens
ctaaccacaccacggagcatctgttgattccacagaaccacaagagacttgacctcctggaaatgaattaacccagattaatgaaaaagattaaggtcatgtgccggtaaaaatgtccctcactggatgaactgtgacaaagtagggtactgcgtggtctccccagctgaccctctccatgggtcattctttgcttttatcactacctggcacaaatctttacgtatttgtttttcgtcttccctccaccagtagttaggtgtttgcccttgctgtatcccctgtgcctagaacagtgcccaacattggcaggtggccaataattgcaaaataagcaaatgtatgaatgaaccattagatgctttgtgttgtatacttactacctgctgggcacatttatttaatcctcatgacagcccctgaagtaggtgttactttttccttcttacagataaagactctgaggtttggagaggtgaagtgatttgatcaatgtcacatggtagtgagtgaggccaagaatcatagtttcattttattcgagaagttgggggccaggtacagtggctcatgcctgtaatcctaacactttgggaggccagggtgggaagatctcttgagcctaggagtttgagaccagcctggacaacaaccatggtgagactccatctctacaaaaaaaaaaaaaaaa

SEQ ID NO: 8414 - DNA, 269 bp, Homo sapiens
gaatacccccatggataccaggccagtgagaaaaggggccctgcctggtggtatctgaggtgaccacatcccagctgacaccctccctgcagcctgtgacaggctcctggctggggacccagcctcctaactgacagaatctgaggtgataaatgttgtttcaaattactaaattgtagggtagagagacgctgggtgacctgccagcccagcccttctcagtgacagctccaacacagcccccactttaaggaagagtccacggtgct

SEQ ID NO: 8415 - DNA, 676 bp, Homo sapiens
  misc_feature (494)..(494): n is a, c, g, or t
cagagtggtttgagaacatagtgtctagagtgtaaagaattataatggaatggtaaacatactgtgattctatctggtcatagaatcatagagaccagcacattcctgtctatcctttggggtgaaaaactagggaacctgacccctttcccttaaaagagatctgccttacgatgttcatatgtttcactgtgtgggataagcaagttgacatttagacataactgaggccaacctggaatttggctcttatcccttcctttataagcccttgtagacagggctctttgggggatggaggtttaattgtaatggcagtcttttaagcctgggtcatggaacaaaatagggcttaatagatgaatgttaagataagtcagcttcccttatgtaactgctagccctatttcttgtgatattaagatgtgcttagtatatttttgttttaaaatttggaagttcttactaagataatcatgttgcagtcatgccanactgaattgcctaaaaaggaacctgttttgacctctatgactttaaaaatctctcctttaatcaagcttccctggctctctcctgaggatttatcggaagaactctattttggctaacatgcagcagtgaagattagctgggcttatgtgtgaagttagtcaaattaaaaaaaaaaaaaaaa

SEQ ID NO: 8416 - DNA, 508 bp, Homo sapiens
  misc_feature (307)..(307): n is a, c, g, or t
ttagtggttagccatagatcattcctttcaactggaccccttcacggttctccaatgagtagaagagtttccctgagacatgagcttcctactttcctctacctgcccagtccccagggtacctcctccaaaccccagggttccctggaacatagttcgatgttgatgctcttgcagaaggaactaccatttaatatttcttggggtggaccaggcgccggtggctggcacctgtagtcccagcactttgggaggccgaggtgggtggatcaccttagggtcaggggctggagaccggcctgaccangatggtgaaaccccatctctactaaaattaccaaaattggccaggcgcggtggcgtgtgcctgtaatcccagctacttgggaggctgaggcaggagaattgcttgaacccgggaggcggaggttgcagtgagccgagatcatgccaatgcgctccagcctgggcgacagagagagactccatctcaaaaaaaaaaaaaaaa

SEQ ID NO: 8417 - DNA, 630 bp, Homo sapiens
agaaaaacgataggttaggagactgtatatgtgatgtggatgcatcctttgagaactatataaggaactgctaacatgcaagagcacagattttcagaatggtacgtatatgtgcttaaaattgctggtgcgctatacttaatttttattctattttaaagggtcattcatttatcttttatagaccattttcacagcttatcatgaatccctagagctgctatgattaagtcaatacatttacataaatagtatgtaaatgtacttaagtatttaagtatagtgttcttgatatagcctaaggtgttttatgtgaatatatccaacattttgctttttgaaggagaaaaatgtatttttatgcttcatcacacatacagtaaatatcctttatgcttgtagattccccccttgcttcacatcatccctttaattttttatatatgccgcattataaattcatgttgctaaattccaactttgtaagagtctgacccattgtaagtgaatttcatatctttctctgtgcttcactgatctggtcagaatatggacttccttttatattaatgaggattttgttctgtgtttgaagccatgaaatcggatgagaatgtgggaaataccaga

SEQ ID NO: 8418 - DNA, 90 bp, Homo sapiens
catgcaataataaaaacttactgaatacttactatgtatcaggcatctgtgctgaatgtcttatatgcattatcttttataatcttcaca

SEQ ID NO: 8419 - DNA, 731 bp, Homo sapiens
tattattaaacgggtgatgaactgacagatatgttcttgcttcttttttttgtggagacaggtctcactcttgtcatctaggctgagtccagtggcataatcatggtctccctgcatgtcgacctccttggctcagtcagtcctccccctcagcttcctgagtgtttggactacaggcgcgcaccaccatgcccggttaacttttgacgtttttgtagagatggggtctcacctatgttgcccacgcctgtctcctactcctggatgcaaccactcctcctcgcctcggcctccctccacagttctgtgattacacacacgagccaccaccaccccctatgcttctcatttctacactactgagtatataatataaaagaatatatatatatataaacgctataatttatatacaccctccaaatattagatattgtattccctcctttatttttgatggataaatttataagacatatgtgtttaactggtttggctgccaagtctgtttacagaaatttgctgttaatttctcagttgttcacatgaacttatctgatttatagctttggccagcaatttacaaagaaacttcagtctgtagggcttcctgttgctctgagtgggggctccttctacccctgttcacttcagtcagcccatggtctatagtatacctctcacaaggtccttatactgcagatcctctctgtctgcagatgcttgggctt

SEQ ID NO: 8420 - DNA, 589 bp, Homo sapiens; identical to SEQ ID NO: 3185

SEQ ID NO: 8421 - DNA, 782 bp, Homo sapiens
atgtttgtaggaccaccgaatataatcgattttaatttgtggttatttactcatgtgccttcaattttggtatttcggttattttctgatgtacccttttaaaaaaaggagtcttacaaatgatttttttttaaaggccagagaaatcttgtagtgctaactgcccttgagctgccattacctatttctgagaatttggtgactcttattggtaatgatggcatttacaacatttggcatttcccctttttcagctcagttaccatagaatacttccaagctttactacttcctctgtaagtcatttcagttatgccaggatatttgatgattttgtttatgtagaattaggtaacaagcccattatgctatccttattattgaaggattaatcttatgacttcaacatcaagctttggttatatttgggtgtagtctttggctaagtacccacttaagagctatgtatgaccaacacctctgtgagaggtgtgctcatacttggactgggaaaacctgtttccaacctttggaaggaaacccaaattaattgcgaaggggactcagggtggccagacctgtgaccttggcctcatttgtatcttgttttcactgacgtgatcagacacttagtaccctagaaatggactggaattattgaatcttcttctgtaacatcacaatcttcctggttttcagaataaacgtttttgtgcttttgatataaatatatactctataataaaatgtttgactaatttaaaaaaaaaaaaaaaaaaaaa

SEQ ID NO: 8422 - DNA, 444 bp, Homo sapiens
cctaagatgacattacatgaaataggacacgttgctactggaaatgcaagaaaaatagaatattactcttttttataccctctatattatttgaattattaaaaccaacatgcattgcctttcaatgcatgtttcaatgcatatttgttttaattgcttttcaagttatatgtcaaaaattatttaaacatgcaccactaccacgtatgtacatgggtaccaaaagtgttgttatttttaggtgaatgtttaaatttcctatattataataatcattgtaatcattctgctgaaaagattatattcaagaggctggatactagttacatgattcttatttacaaccccagaagaaaaaaaagaaagtgtatgggtttcaggaaaccaagggatatttcatgaaggctctatttccctgatcttctgattgccataaaaaaaaaa

SEQ ID NO: 8423 - DNA, 723 bp, Homo sapiens
ccagtgtccgtcctctcgggttaactttgcactcactgggctgtccaatggcaatgtttgccacatcgtgccatggactaccagtgccctctttaccactggaactggagtccttatataaatagaagacgtatataactttaaatatacctatttttagttgtatatttataaacatacatatctgctgtaaggttctgttcttacagaaccacctccaataccaaggtctttatcattcagggttcaatcagagaaacaatcagtagtgttctgaagtcaaatcccatagtgaactagtgagctatataaaacgtatgtgcgtgtgtttatactataaatatataaatacatatacatacatacatatacatactcgtacatatatagagggacatatatgtgccttagtccatttaggctgctataacaaaatattatagaccagctactttataaacaacagaaatttatttctcacagttctggagattgggaagtacaatcaggtttggtgtctggtgagggcccatttcctcctagacagccgtcttctcactttaacctcacatggcagaaggatcacagaggtctcaaccctccctccccctctctgctctctttgataaaggcactaatccctttcaagaggactttgcccccgtgactcaatcacttcctaaagcccccacctcccaaaaaaaaaaaaaaaaaaaaaaaaaa

SEQ ID NO: 8424 - DNA, 657 bp, Homo sapiens
  misc_feature (15)..(15): n is a, c, g, or t
gaaggcatcttgatntttagccttctgacctccattaatgtaagaaaaaaaaatgtgttgaattaggtcaggaaatacgtggtaattcattataataataaggaaatgataattattattgtaataatagggatttgtcagcatttattttcagttgccctaacatgttctaatcctaaaaattctgctaatcccaaggtcaggattctgtggatatggataaaagttacagagcaaagaattctcagtttctccttgacctttttgaaagcaacattaaatctcacagagactgtttcttaaatttatcaaaaccttcagtatctcatgataactgctacaaggagccagggaagcctcagcccagaccaggccttcattaaaactcaacaaatttggctacgtaaagattggccttggcttttaggaagtcaaagagttattcacattattgctttttcctctgtatactgcgttgttctcctattaccttgacaaggataatacttttaatatgcactggcagctttgtaaaaagcctactatttttaaaaaattatagttctggaatgtggataatattttgtgaacatttgtattctagtttatacatccaaggcaggatacaagatgcatcagtatctgttaaaaaaaaaa

SEQ ID NO: 8425 - DNA, 627 bp, Homo sapiens
cggcggcttcgaagccaagtgatgtttggggcatggtggcacgtgcctgtagtcccagctactcgggaggccaaggcacaagaatcacttaaacctgggaggtagaggttgcagtgagccgagattgtgccactgcactccatcctgggtgacacagcaagaatctgtttcacacacacacatgcgcacacacacacacacacacacacacacacacacacacgaggaggccaggcaaggtggctcgtgcctgtagtcccagaactttggaaggtagaagtgggcagatcgcttgagccaaggagtacaagaccaccctagacaacatagtgaggcctcatctctatttcaattttatttccaaaatgttatttaggccggacatggtggctggctcacacctgtaatcccagcactttgggaggccgaagtgggtggatcatctgaggttgggagttcaagaccagcctgaccaacatggagaaaccccatctctactaaaaatacaaaattagccgggcatggtggtgcatgcctgtaatcccagctattcgggaggctgagacaggagaatcgcttgaatctgggaggtggaggtcatggtgagccgagatcacgccattgcac

SEQ ID NO: 8426 - DNA, 578 bp, Homo sapiens; identical to SEQ ID NO: 3191

SEQ ID NO: 8427 - DNA, 555 bp, Homo sapiens
atagggtgccagctgctgccccgtgctggtgccattgccccatgtgaagtcactgtgccagcccttgtacctggtctcgggcccgagtaggcctcctttttccatggctttaggtatcaccactgtaatctccaggggcaccattgaaatcctgggtgtccgcaatgttgccagtgtctgtctgcagattggctacccgactgttgcatcagtaccccattctatcatcaacgggtacaaacgagtcctggccttgtctgtggagacggattacaccttcccacttgctgaaaaggtcaaggccttcttggctgatccatctgcctttgtggctgctgcccctgtggctgctgccaccacagctgctcctgctgctgctgcagccccagctaaggttgaagccaaggaagagtcggaggagtcggacgaggatatgggatttggtctctttgactaatcaccaaaaagcaaccaacttagccagttttatttgcaaaacaaggaaataaaggcttacttctttaaaaaaaaaaaaaaaaaaaaaaaaaaaaaaaa

SEQ ID NO: 8428 - DNA, 737 bp, Homo sapiens
  misc_feature (233)..(233): n is a, c, g, or t
tgagccagatctaggtcagacaccagcagattggtgtctgatgagagcctgcctgtttacgtccaaggatgcacgttgtgctacattctctagaggggagaactctgtgccttcttcatctggcaaagggatagaagggcaaaaataagggccaactccctccgtgaagccctgtttataatgacattaatccatttgtgagggctttgccttcacgacctgaacacctaccnaaaggccctacctcccagcagtactgcattggggattaagtttctaatacatgaattttggaggacacattcagaccccatagcaggattcagtttcgttttgtttttaaatatggataacaaactgtcccatacgttactaaaaaaatccatacttccttcaatgattgccattcacttctgtcatgtattatattctcatttatgcatgatctatgcctgtgctctctattggtgtgtttatttatatgccaacacgttatctttataataaattttgtatgttagattaagccttttgacgttactcctctttagacatattttggcccttcatgcacttttgatcttctattgaaattttatttggggctgggcacagtggctcatgctataatcctatcattttgggaggctgaggtgggtagatcatttgaggtcagaagttcaagaccagcctggccaacatggtgagaccccgtctgtactaaaaaaaaaaaaaaa

SEQ ID NO: 8429 - DNA, 697 bp, Homo sapiens
  misc_feature (92)..(92): n is a, c, g, or t
gttgccttggactccagcacctggggccgagatcacagtgatggcatctgtttgaatgtgctgttgaccgtgtcttttcgagcccagggatncaggatgaacccccaaaagttcggggtgagaacttctcttggtggaaggtgatggaggaagacctgcaaagccagctcctccagcggcttcagggatcctctgttgtcccacgtgaacagatagagaggctggaggaggtgacagggagctaggcagccgtgctccctccagtgcggacttgtctccctctgagggaggcaagaggctggcgatcagggatcttgttgcattgggagcaggggcggctctcctggtccccaggagagatgctttgaggagcattcctctagattgcacaagggacagtgcctttaaccaagcgaggagtccaaagctcaggacctgactaccctgagggcacgctgacgcctctccccagggggatggggagctttctgcacccccagtggcatctcctcatcacgttctgtgccgtccttgggaaaggcctgcattctgatccttccaggcccttcgagcatggaggggcactggggaaggtcccccgagggaggagcacgttgctgagtaaagaggtgttactcaaaaaaaaaaaaaaaaaaaaaaaaaaaaaaaaaaaaaaaaaaaaaaaaaaaaaaaaaaa

SEQ ID NO: 8430 - DNA, 697 bp, Homo sapiens; identical to SEQ ID NO: 8429
  misc_feature (92)..(92): n is a, c, g, or t

SEQ ID NO: 8431 - DNA, 663 bp, Homo sapiens
aatttgtttttgtgttttaagaatttttctggggaaaagaacgttgtacacacaaacctggtgtaaattggcaaatgactcaagactcacaagaaccttataactttcacactcatagctgtagattacgtgaaggaagagaagtgtcaatatcctggtgttaacctgactcatcgaggtgagactagagttgtcacagcccacccgtggccactaacgtgtctttgttttcacagactgttgtgatcaagtaaatgtgctgtagatctttgcctcattcacagcggaggtgagagttagaatttatacctattgttcatgccacgtttctcctcatggatgcacgcatcccctgattatttgtttcttttaataatgtcacgagcaccaatgagcttactacccaacttcaaaactaggactctaacaataacttctgtcatatctcatcctgtaacgcccccaccttcgctccttccgccaagataattatcactttaaattgtgtgcgtgtgtattctcatttcttatgtgatggtaaaaatgcctttattttgtttggttttaatgcatagaaaggacatcaagctgtatgtaataattcagtaattatgtttatataatattaaattgctaatatttgcccataaaaaaaaaaaaaaa

SEQ ID NO: 8432 - DNA, 663 bp, Homo sapiens; identical to SEQ ID NO: 8431

SEQ ID NO: 8433 - DNA, 760 bp, Homo sapiens
  misc_feature (86)..(86): n is a, c, g, or t
gggccagggcgggccggacgagggagagtccctgacagcccgagcacaaggcgtgagagcctgccagcggtctgagtgtgagtccnactcatgggcttccagggcctgcctccagtcacccctccacgcaagccctacatctaagccagagagagacaggcagctgggccgggctctcagccagtgagatggccagccccctcctgctgccacaccacgtaagttctcagtcccaacctcggggatgtgtgcagacagggctgtgtgaccacagctgggccctgttccctctggacctcggtctcctcatctgtgagatgctgtggcccagctgacgagccctaacgtccccagaaccgagtgcctatgaggacagtgtccgccctgccctccgcaacgtgcagtccctgggcacggcgggccctgccatgtgctggtaacgcatgcctgggccctgctgggctctcccactccaggcggaccctgggggccagtgaaggaagctcccggaaagagcagagggagagcgggtaggcggctgtgtgactctagtcttggccccaggaagcgaaggaacaaaagaaactggaaaggaagatgctttaggaacatgttttgcttttttaaaatatatatatatttataagagatcctttcccatttattctgggaagatgtttttcaaactcagagacaaggactttggtttttgtaagacaacgatgatatgaaggccttttgtaagaaaaaaaaaaaaaaa

SEQ ID NO: 8434 - DNA, 760 bp, Homo sapiens; identical to SEQ ID NO: 8433
  misc_feature (86)..(86): n is a, c, g, or t

SEQ ID NO: 8435 - DNA, 759 bp, Homo sapiens
gttgacggttcataaatggctgatttataagcagtacttggcctgtatataatggcatatattgaactaagattgtatatacagtatgtcagcatttcttagtaacttctcgtgaatccagtttttgatatctaatagtgtacagttggggagtacattcttcaggccaatactatccagactatataaatttataaaataaattgaaaaattcattcccctgtattcaagaccaaagcacataaatgctaatgtagggctcagaggggaaatacagttctcctgcatatttgagaaaatgtgaagtcctttcaagaaaatctaataaacataataatcatagcctgctgacactaaggaaaaaggacctcattcactctttcttttatgcagtgatttactggtccctactgatttccaaattggatcacgatagtaaattatccatgctggtacctgtgaaagtaagccctgggatccatatttgttttgtgttctgcttaaatcagcaagaatgataaatttgatggtgtgaaattggaagtatcaagggctttctttggtgattgagggaaataatgtctctacttgtaatttattgtgaccctttttcactgtatatgctttgtatgtctaatatttatttcaatgcaaattcaattgttccttcatctgtattgttatatctaagattttattgatgttaaaatctaattgtggaataaaaatctctctggaatttaaaaaaaaaaaaaaaaa

SEQ ID NO: 8436 - DNA, 731 bp, Homo sapiens
gatgcccaatggaggaaacaggaggagccagatgtacacctaccccagccctacgcctggtggcccgccgggagggccctgggaggctgcaggggcttgctggggcctcagctgccagctactcgagcacgcagttcgactctgccggcggggtggcctacctggatgacatcgcgtgccatgccctgccacactggcagcatcaacagcacagacagcgagcgctggaaggccatcaaatgcctgagggcagctgccagggcctgtggaggacaggccagagaggaggccagcaggcccagagtccccaggggaggaggaccaggtcaagggacgttctgtgggcagtagccctgtgtggccctgttcccaccatgagtctggaggccccacctccctggggctcccaatcccctttgccatctctgctctcactggggaccctcctccccttcccacctgctctcatactgctcagtgacatggcccaggctttccttccagggccatgcttggcaaggttggctgagggcaccctccttctctgcacccttggcacgagggcagggctggctctcccaatgcctccatcccatccccatggtgctttggcctcctcaaagcatccaccatggtggatggactgaagtgtgtatattttcttgatctattttttaataaaaaggaaaaggagcagaaaaaaaaaaaaaaaaaaaaaaaaaaaaaaaaaa

SEQ ID NO: 8437 - DNA, 731 bp, Homo sapiens; identical to SEQ ID NO: 8436

SEQ ID NO: 8438 - DNA, 390 bp, Homo sapiens
ttgtgtgtgtgtgtgttttttgttgtgttttttttttgttttttttgttttttttttttttttgttgtttttttttgttgtttgttatatcaaacacatttattcttaaagtgagagctcatcaaggatagctagaggagagtgaaatatttacagtagaaaagtatggatgctagccaaacttcaaattctgtcactgcagagttattccgatagtacttttccaccactggcacatcacacatgttaaaattaactgcattcttgtaacacctctcaatggttgtgcacaataatagaagcaacattctgggactctttttcttaagatcctacagaatgaatttatgcacacacaaaaacagtataatacaaaacattcaaaacaag

SEQ ID NO: 8439 - DNA, 533 bp, Homo sapiens
ccgatccgtgttgatggcgatggaggatggaggaggagcacacgttgcacattctccggatgtccagcagcctgttctggatttgctgcagagtcctatggagtagtaagtggcgaattcgaatatgctgaatagtgctttggcttgtcgaatgagcgtaggtaatgttctgtgagttatctcgtgataagtgggactttcagaaagtgtacgtataatcttaagtggtaatagacattttaggccagatggggtggctcatacctgtaatccctacactttgggaggccaaggcgggtggatcactttaggtcaggagttcaagaccagtctggccaacatggtgaaaccccgcctctactaaaaatagaaaaattagctgggcatggtggcacatgcctgtgatcccagtctactcgggaggctaaggcaggagaatcacttgaacctgggaggtagaggttgcagtgagccaagatctcaccactgcattccagcctgggtgacagcaagactgtgtctcaaaaaaaaaa

SEQ ID NO: 8440 - DNA, 705 bp, Homo sapiens; identical to SEQ ID NO: 3205

SEQ ID NO: 8441 - DNA, 649 bp, Homo sapiens
  misc_feature (426)..(426): n is a, c, g, or t
atttacattcaacttattgtaaattttgagattttatttagaaatgaattgtctaattaatttatgtagagtccttttttcccaagagctcaaaacactacatccacattattgacttttggaaaccaaccaaattacttaagaaatggaaaagtagtcacagagaaatttagtaatttgccaaagccacaacagtagtggaagaattaaaattcataaagtctcatcattctgttggctaaaataatgctctttacaatatgctggctaccaaatggtcttactcttgaattttgcttttggttcatattttggttcttcatattctagtatgttttgttcctgctgaattttacagactcagctaaacaataagttattagtagtcacttgttttcattatcataattgaatttccaagaacancttgatatcattcagctgtccaaaaaataataagagcattcattaaatactgattttcttaaacttaaatgttgtatttcatatttatttatataatacaaatggaaatcaaaactgaaatagcctccctttagaatgtcacatttttcttagaaaacattttggaattggttaaccttattgggaatggataatttagaaacaaaccaaaaaaaaaaaaaaa

SEQ ID NO: 8442 - DNA, 709 bp, Homo sapiens
cccttgtgttttatacttcatctgacatccaggtgtaatctgacctgcagacttcatttggagtttgaacccgttttggttgcagttcattttggagaacttgattgaacgtgagattgcccattgaaatgccaggtcccattttctgttagatgtcatgccttgtttaggtaataagagatattaagtaattggctttagattttgtgatttgttttccctgagttcctgctagatttcgtattctagtagtccatgtattttccgtgagaatgccaaaatattccccttatctttgacccgtattaatttttgagatcttactgcttgtcacttgaatcccgtgattgtcatacatctctggtataagccacatttgatttttgaagtgtgtagaccatctcttcatattttcacagatgtaattttacatttctgcatttttaaaaccgtttggccataatcctagatgcacgcttctaattcatgtacctgcacatgtgacctttgtgaacccgaaatttgcatgtataatttgtgtttacttgtaactttctggttatatactgcttatatctgtggattcacagttactgaagtgaatacccataaaaagaaaaccctaggccatgttaattggttatacctgtttggaatgttaacccaaaaaaaaaaaaaaaaaaaaaaaaaaaaaaaaaaaaaaaaaaaa

SEQ ID NO: 8443 - DNA, 709 bp, Homo sapiens; identical to SEQ ID NO: 8442

SEQ ID NO: 8444 - DNA, 675 bp, Homo sapiens
tttagatgggacttactgagttgaataacttatatatttctgttttcattcccagggagccatgtctggagatagaccttgaatttaataaattttaggcactataccatttcagtggagaaaattgcttgggaaatttggggggatggatatataagggggaggaagtcactggccacgtttgaggtgcttccattggtctgggtaactagccatttcttcctgattgtgcctagtatatcccagacagtttgtttctatgcagaagaattttatatgaaattttcatttctttgcaaaaacttgttccttctttcagttcatgacatcatccatgctaaagtctgagtcatctgcttccatttttgttattccccacatccagtcttcagctaagtcctgtcagttctacctcaagtctttcccgtctttcttcctcacctatgtaatttcagtagtctctcagcttcacttaacctcttactccagcctactttatacacaatgttagattcatcttactgaaacatagttctgaccatgtattccatgtatgtgttctctctcccctattagactgtaagctccttatgggcaggatctgtgtctgagtcatctttgtatcttgcctagcacctatcaataaatacttcttgaatgaaaaaaaaaaaaaaa

SEQ ID NO: 8445 - DNA, 224 bp, Homo sapiens
atggagactgagctgcatggtagttggggatccaaaatatgtgaccttaatgagatttttatgattttctaaagtaaccataaaagcacgtttttagagttgagttcccgagagggccgggccatggcagtgacatgtttgtcattttaataataaataacatctattgagtgcttaaaaacaaaaaaaaaaaaaaaaaaaaaaaaaaaaaaaaaaaaaaaaaa

SEQ ID NO: 8446 - DNA, 731 bp, Homo sapiens
cgctctgtcgccaggcttgagtccagtggcgcagtctcggctcgtggcgacctctgactcctggttcggcgattctcctgcctcagcctcccgagtggctggcatcaccacgcccagctaatttttgtatttttagtagagaccggggtttcaccatgttgcccaggatggtctcgatctcctcacctcgtgatccgcccgcctcggcctcccaaagtgctgggattacaggcatgagccaccgcgcccggccccaatcatctgtttttaaacaatcgtttttgagcagatagctattcattccagattttcgtgtacccattctgtttcaggagctcttctaggtaaagctgagatcacaggaacagcaggtgacaggcctagctatagttaggaatacacaagccgtaaaatcgagtccttacagccataccacaaggtacgtccatttggactacaagaagagcttcctttaaagttcctatttcagcataaagaggctgtccttttttttgaggaatagtttggaccttgtgcctcctgtgggaggctgaggactgcaagaggagagctagcagatatgcctgttcacccctctctggtacttgtggcttgctagtatgtttttatgataatctcgggcattgtttgcttgtgtttattaatagggttttgtttttgttgtttccttttttacagtaaaggctgaattacataaaaaaaaaaaaaaa

SEQ ID NO: 8447 - DNA, 731 bp, Homo sapiens; identical to SEQ ID NO: 8446

SEQ ID NO: 8448 - DNA, 690 bp, Homo sapiens
  misc_feature (387)..(387): n is a, c, g, or t
gatacttcctggaggtgggcacgctccgctcggtcatgatgctgatccacttgggaacatcagttcctgtcctcttcactccagcgtcatagagatcccgagcatcttggtcatcagttcataatcaatgacagagccatcctctgctcttctaccctttgccagggcaaccatcagcttgcggaagtcaccagatgtgtccgaaataatgtccttctccagatcagtcttgtacatttccttgtagactctgttaatttcctgcagctcctggttggttctggagcagatgatctcaatgagagagtcctcgtcggttcccagccccttcatggaagcttttagctcagaagcgtcatactgagcaggtgtcttcaataggcccanaatcaccgtctccaggtggccagataaggctgacttcagtgctgatgcaagttcctttttggtccttctctggtaggcgaaggcaatatcctgtctctgtgcattgctgcggttggtcaaatgttgacatggtgacctcatccacacctttggtcttgatggctgtttcaatgttcaagcatcccgctcagcatcaaagttagtataggctttgacagacccatatgcacttgggggtgtagagtgatcaccctccaagctgagcttgcacaggatttcgtgaacagtagacattttgaagga

SEQ ID NO: 8449 - DNA, 615 bp, Homo sapiens; identical to SEQ ID NO: 3214

SEQ ID NO: 8450 - DNA, 746 bp, Homo sapiens
accgtccgttatgggagggagtagaactttgactctaagagtttctggctgatctgtggctttgcctcccaccatccctggaccacctctcatcacagctttgtgtgtgggctgagtgctggccttaaccctaggcgtggaagagaaaatgtgaggttgtttagatactcatcaggacctcacaggagctgagacttatcagccagaatgtgttcttcggacagtcgtacacatcttacagaaaaccctccttgtagagttggttgtggtatgtgtttgatgctataaagctcatttttaatgtgtacacctgctctagggacgattcgtttgaaagagagtaagatgcattaaccagaaactatcctgggattaggtgaaaaatgtctagcaaaagaaacaaagtctttaatagagtggcctctttcgctcttcgattatgactgctgcagttttaccccagcacgtcagctgtctttgtcaaccatacgtttttggagattgggtctagcaccactgtcaccccttgtcccaccttgttttcaaccattcttggtttaagggggccagattttaaaatgtagttttgtaatgttacatttaagcatgataaatgattagactaccagatgttactagtgctaactttgtattcttagacattaaaatgattgacataaactctttgtgccttgaaaatgaaacaaattataaaaatgtttaaatggaaaaaaaaaaaaaaaaaa

SEQ ID NO: 8451 - DNA, 676 bp, Homo sapiens
accatggaattgtcaacaagtacaaactgacaggtgtgtatatgtaatttaaagacttatttttagactcacagctctcacctagactttggagagcagtctgttttctgtaatgtctgatactagaaactaatttgcttattttagttgtattcaagatttgaagatgtattttatagacagttctgtttttgaactttgtggaactgttccatcaatcgatttcccagttatgatgagtatttacattatgaatgtataacccagacatgatttgtaaagccgacagtatgtttctattacacgacactttttgatacagcgtctcttgtcttcactgatactggagtctccgttgtctgcttggtcccttcgagtttctagttacagacacaatcatactgtgattttatttttaatatggatatgctatcaaactgtgatacacttataattcactggtcctgcatcaggagatggagtggggaaaactgtatttaatacagtttgtatctgaataatctgtatggtttatacagtttgtgttgttcagagatgtttaaagtttgatctttgtttttctaaagattaaaaaagcacttgccccactgtaaatatacagcatgtaaaatttctatagtatataaatggcagcaatcacaaaaaaaaaaaaaaa

SEQ ID NO: 8452 - DNA, 614 bp, Homo sapiens
gtctctaggtgatccacaaggctcagataaggcagctaagggcacagtctgctggagtcagacgtcagacttggcttcataccccacatctttctagccactgtggacttgagcatgtcacttaatctctcagatttctttctcctataaatgaggataaatatggctgggcgtgtgtggctcacacctgtaatcccagcactttgggaggcccaggcaggcggatcacgaggtcaggagctcgagaccagcctggccaatatggtgaaacccggtatctactcaaaatacagaaaattaggccagacgtggtggtcccacgcttgtaatcccagcactttgggaggctcaaggaaggcgggtcacgaggtcaggagttcgagaccagcctgaccatcatggtgaaaccctgtctttattaacgaatactacaaacttagccaggtgtggtggtgtgacgcctgtatattccagttactcaggaggaagaggccaggagaattgcttgaatcctggaaggtggaagtcgcagtgagccgagattactgccactgcactccagcctaggtgacagagtgagactccatctcacaaaaaaaaaaaaaaaaaaaaaa

SEQ ID NO: 8453 - DNA, 741 bp, Homo sapiens
cggtgctagccatccttgtcaggagctgaccccggccctatgcaccaggtgccttccagctcaaggcaccccagagcccaaccatgcagcctgagctgggacccatctctgaggcccaaggccacagtgaactcacagaagcaacacagctgggaaagactcgatggaagagctgggaaaagccaacccaccacccgacccacagccaacctacccagcctggacccaggcccggagggaatgaggaagcaaagaagaaggcctgggaacattgttggaaacccttccaggccctgtgcgcctttctcatcagcttcttccgagggtgacaggtgaaagacccctacagatcgtgacctctccctgacagacaaccatctctttttatattatgccgctttcaatcccacgttctcacactggaagaagagagtttctaatcagatgcacacggcccaattcttgatctgcagcttctctgaagtttggaaaacgaaaccttcctttctggagtttgcagagcttcacgcactatcgatagggcaccgcgtgctgatgggcccagagtgacaacgcatacacaactacttattactcctgtagaagtctttgctttgttgatctgagccttctatgaaagctttcaatatgctcaacgcattcatgaatttcccagtgttccagtaaatagcagctatgtgtgtgcaaataaaagaatgatttcagaaaaaaaaaaaaaaa

SEQ ID NO: 8454 - DNA, 741 bp, Homo sapiens; identical to SEQ ID NO: 8453

SEQ ID NO: 8455 - DNA, 671 bp, Homo sapiens
cagtgcccttcggccttgggattcagagcgaagttggcgggactttcagagatccgcctccgtgcccttcccccgcccccggacggtcacagcacccaaaccgcaggccctgctctggcaggcaggcaaagctaggcagaagaggattcccaggatcctgggtctgttccctgccccagtgctgcagaacggacttgggagccctcctttgcctgctcccgcgggtcacccagcgagtgctgagacccccttttctgtcgaggcgggccgagtcttcccttatccccagacgcctagcgggcagggttgggctgaatcaaatgggagccctccagacataaggaggccagaggctgcaaggagcggggtcgtgaccgcttacaccccttctccacagcccggcccgacctggagggcccccggggcactgggcggtgagccacctcctggcaactctcggtgccgtcccctgccctcgctcgaggcctcttctccccagcaccgctgtggtgtgccgggatcctgagcctaggcctcccgatgttcccacccgcatgatcccttcccgccacacgatgctccgttttcttccgttgtgaatgccgcgtcctgtcctggtgacaggagaacaatgttggtgaacgtcaaaaaaaaaaaaaaaaaaaaaaaaa

SEQ ID NO: 8456 - DNA, 671 bp, Homo sapiens; identical to SEQ ID NO: 8455

SEQ ID NO: 8457 - DNA, 625 bp, Homo sapiens
gagcggaatgtattttagaaaggatggactggacggcagagttgatagtgacgagttgatcgttctggctggctatttcatccatggagtagaataagatgccatgagggcctgaacccgacagggaggagtagatgaattcaagagaggataggggaggttagactggagatgtgattacagggcatgagggctatgggagatttcttgttttctggcttggaaggctgagttgacggtgttgccgttgaccttgaatgggagtatttggagggaggatgagtttggcacgggaagataatgagttcactttcaggcaccgtaattctggtgtacttgccagaaccaattcaaccggagcgaccaccgttaagggccatttggagacttgggtctggagttctggagaaaggtctggactggagatgtagatttgggtgttaggatcctggtgagggattagtgaagccaataatccatataagatagtccagaaaggttagagtgagagggaggagtttgagagaagggctgagtgtggagccctgggggcaccagaaggattggccagggagaagaccctacagatagaacccagaaagaatcatcaaaaaaaaaaaaaaaa

SEQ ID NO: 8458 - DNA, 619 bp, Homo sapiens
caggcatctgtgccgctgctgaaagctctgcgcgacctctgaggccatcgtgaagtttgttttgctccacctttggtcattcctgctcagatagtactgtgggaatgctgcccatggcataggcacctgtggttaagcttcccctgaatctgtcgggaagattcttgtaggtgtatgcttactgcagagttgtttaagtggttctagcttttgggaaaacgtgcttcccttaccttatggggatctacttggaggaatgggatttgggaatcctagcttggctggtgctgtggctcacgcctgtaatcccagcactttgggggatctgaggtgggtgggccacttgaggccagcgattcgagaccagcctggccaaaatagtgaaaccctgtctctactaaaatacagaaattagccaggcatggtagtgcaggcctgtggtcccagccattcggggggctgaggcaggagaatcacttgaacctgggagacagtggctgcagtaagccagattactccactgccctccaccctgggcatcagagtgagactccatctctaaataaataaataaatataaaataaaataaaacaaaaaaaaaacaagctaaagaaataa

SEQ ID NO: 8459 - DNA, 694 bp, Homo sapiens
agatttttcatgcgttcccgtatatttgtctcgtacctacagatatgtgcacgttgctagacagcctgctttctgatttctgtgcactaggcacgtaacctgcaatgtcgcttacctacggtctctgtcaaggagttacctggctaaagaatctccagctagaccaagtagaagtgtctgtgctctggcagttgaatatattgtatcaggctcaaacagcacctttcaccaaaggatgagacttcacaaccacttagatcttcttgtatttggtttttattaattaaaaattgttaacacaccattgctaacttgaagccattagatcttcttacccccaataccacaaaagtttagtggaatcaggggtataccaaggcaggtggagtaggggagctgggagtggtcagcccccagggcaggcaatgagggattgtgaatctgtgaagaattttaaagccatgatacagctctaaatgccatgtactatcctggacttagcctggaaaagaaaaagatattagtggaaaaactggtaaaattcaaataatgtctgtagtttggttaatagtattataccaatgttaatttctgtgttttgataaatgtaccatggttatgtaagctggatgaaagatatgtgggaaatctctctactatttctgcactctcctgtaaacctaaaaatgtttca

SEQ ID NO: 8460 - DNA, 588 bp, Homo sapiens
agtgtgcggttttcagaggcagcttttgctctaaggtcactgagaataggagagcgtgaattgctcaggttgtgttccttatggagatggagagtgttgttgtaacaggaaatcagtagcacagagttagcatagtcgtatgttttgaggaaaggatagtagatagtagcatatcccggacatcccgttacagattttctggccttagctctgtgtatgtgtaatttgatagccgacccagaagccctcacatcagtggatgcttatttgatacatgtgatagaagtattaatcatgaatacatatctaggttcaagtgcgccagaatgcaatgtggagtctgttctgaagctactcaagagacaaggtttcttaaacacttaataaacattttttgagggcctactgtgtttccactgagtgctcgttactggggatatgaagctagacaatgacataatcccgcctttgacctgtcaaggaactcagagaacagtatcagagccaaacacataaatggataattgccatgtagtatggagagggctatattacaaaccccaagtacagtgggaacagagtagagaa

SEQ ID NO: 8461 - DNA, 652 bp, Homo sapiens
gtcggtgttgtgtgtgtgtgtgtaagcttagttacatataacccagcgattccattcctactatatacccatagaactgaacacacatgttcacaccaaatttgcatataaatgtccacagcagcattatccacaaggtagaaatcacccacatgtccatcaatggatataccaaatgtggtatatccactttcatggaatattattcagccatatcccaaggtagaaaccacgcaaatgtccatcaatggatacaccaaatgtgatatatccatacagtggaatattattcagccaataaaaagtaacgaagcactgacatatgctacaacatggataaccttgaaacattatgctcagtgaaagaagtcacgtcgtaaaaagacaccaattgtatgattccatctttatgaaatgtccagaactgggaaatctatggagaccaagactattggttgcctagagctggggatcatgggaatggggaaagtgagaagtaactgctaatgggtatatggtttcttttttggagtaatgaaaatgttcccaaattgactgtggtgatggttgtaccaatgccaaaaccctaagtactattaaattgtatactttaaaaaaaaaaaaaaaaaaaaaaaaaaaaaaaaaaaaaaaa

SEQ ID NO: 8462 - DNA, 772 bp, Homo sapiens
  misc_feature (317)..(317): n is a, c, g, or t
ggctctttgtccggtacccgggacccccagagaggggccttacttaagtaatgatctgtcgatcgttcaccctgaggctcccctgttataatgggagatgatgacatttcttcagtgtgtaaggttcagatcagttgcaggcctctgtttctgctctgaaagttttccagagaggagggatggagatgtatactgagaaggcctgaagaaggagggactgaatagagggagaagcctgagaatggctaggaactggagtgcatctttaaggagaggccctatgagtggcccagactttactgcagcacagtggccanaatcaaggactttagaatcagaatgtcttggttcaaattctacctccaccacttactagttatatcaccttgggtaaattacttaacctcagtttcattgtttgtaaaacaggatcatggtggtattaacctcacagggtttaagaaggtgagtagggctgggcacagtggctcacccctgtaatcctagcagtttgggaggccaaggcaggtggatcacttgagctcaggagtttaagaccagcctggacacatggtgaaaccccatctctgcaaaaaaataccaaaaattagccaggcatggtggcacatgcctatagtcccagctacttgggaggctgaggtgggaggatggcttgagcccaggaggcggaggttgcagggaacagggatcacaccactgcactccagcctgggtgacagagcaagactctgtctcgaaaaaaaaaaaaaaa

SEQ ID NO: 8463 - DNA, 600 bp, Homo sapiens
tatagtttctttagatatcatttactggtgtttctgagtaagtaaataacataaggccactgtaaaatgagataaggaagatactataatataaatatatatgtaaaaggatgtttacagtgctgggtgtaggggctgaaactaaagggaaacattgaaagcaagttaaatatctgttgaatagggaaattattgaaaccactgcggttcattcatacaatggaacatggaaagcatcactatacggtgactttcctgtgttgatggtgtagctcccaggctataagaattccccacctgtagtaacagccattaaattcatttttttgggtgattattaaaagtaatgagttaaatctattatcttttgacctggaataatgtccacataaagtgagagaagcatgctgcataaaaacataaaaacataaaaacaaagcaaagaatcctttatatttcataaatgattgtagaggtttgtattagaatgataaaaggtatagaaatatacacagcagaatgttaaattggttggtgggcatgaagaggaggtagagacggtaaggagatatagagttttttaaaatatgaaaaaaaaaa

SEQ ID NO: 8464 - DNA, 617 bp, Homo sapiens
tgttccctgaaatgtttctttcgaaaggctagacatgatgtactaggcaaaggaactatcgcattgataatgccagctggccccagaccaatgaacgatgatagtgacctactttctacctcacgcccagctctctctatttaaaaggaccaggaaagagcaagcctagccagatgtaagggcttttaggactatatatactccaggccaataccacagttgataacgtattcggtaccccagtatctataccagctaaaggctgatttggaagtctattcttgccacccttgccagcctgccaggatggtgtcagaaaggccatgtagaaagcagagtttcatccccactgagtggtgagaagattttctcaatggatatcatatgaagagtcagaacttcaccatgtcacccctcaatttggcagtaaagaagtacctgtcccctctcagcagggtagtgtcagaagaagcctactggagagtcaggactttcaccaccactctattgccacaggccacccccatggtgtcaatagaggatgagtggggagctggaaaccccgcttccacccggcaataatgaggttccctcccctccccgacttgagtgtcaac

SEQ ID NO: 8465 - DNA, 707 bp, Homo sapiens
tgggctggtgcagaccgttccgtaaggaggacaaactgtgatgtgggtacaaagttccacatgccagaaagattggccttgtccttaaggatattatgttgattgatttctctcaacgctccttcagttgtgtttagcacttattaagaattaagtgacattcacttggatgaagtggtaataaaacaagctgtgagaatttctagtgatttttgatacccagccttgtatcactgttgggctttcatgtgtgtacttgacaaccaacatgtaaatttgttgcactggtttgaagattttaatggtgaaagccacctaatcagttatgagtaccacatcgagaaaccacccttggaaatatgtgattatgctcttttaaaatagctgaaaagaaagatgggtgtggtggctcattcttataatttcagcactttgggaggctgagtcaggcagatcacctgaaggacaggagttcaggcctggccaacatggcaaaacatctttactaaaaacacaaaaatcagctgggcatggtggtacacagctgtaattccagttactcaggaggctgaggcaggagaatcctttgaacctggaacttgaaggcagaggttgcagtgagctgagatcctgccactgtacccccacctgggtgacagagggagattctgtctcaaaataaaaaaaaataaaaaaaaaaaaaaaaa

SEQ ID NO: 8466 - DNA, 696 bp, Homo sapiens; identical to SEQ ID NO: 3231

SEQ ID NO: 8467 - DNA, 646 bp, Homo sapiens
gtattcaatagaaatcaaggtgttcaatacagtagaatcccaggactgcattttaaaatcgcctcacagatcacactcgctggtggcaaatatcatcatcgttgctaaaggaccagaaatactgatgtgtgttttaactaactggtatattagatcccatgggaggctgcacagaagaccctgcggccaggaggggcatttgtcccgtggctgcttctcctgagctccacgccgttcattgcagctgcatgttcgataccatacacctgcttcacagccccatggacatccctacaggtactgtcatgtgaagccttgcctagtagttctctccagggcaaatgaagctcacagttttgcaaggtggaaacctcttattcacatttgctttgattccccgatggagtagactgcctttgttccatacaggccaagtaaggatattttaatatcatcctacttcttattagcatttcatttgtctatgtactgtatttcatttgtatgtctcctgaaacatcccaatagagaacataagaaccctttatgtaccatctggaaaaaaattacctgagaaatccattaaagatttttccccttttctgaaaaaaaaaaaaaaaaaaaaaaaaaaaaaaaaaaaaaaaaa

SEQ ID NO: 8468 - DNA, 693 bp, Homo sapiens
  misc_feature (530)..(530): n is a, c, g, or t
agttttcttgaagccgagatcatgccttgcactccagcctggacgacagagctaactccacctccgttgtgaaaaaaatttttttgatatttccagaaaactggaaccacatcatggagaatacatttttggtattttacatacctgctgcaccaaattcatctcctcgattttaatctgaaatccatgtagcaactgtcctttactaaaatgactttgctctgaatcaaacccactgatgccacaggagcttgaagcctcacttgggaaggaagtgatcctttaaaaaccaggtcctggatttgggatgaaaggaagtggaagaaatgcggaaccacggccgctatggttgctgtttgcggtggtctagggaggaagaagttgacacacctggtaacggctgctgtcagccttacacattccgggactcacacggtgctttggagaagaggttgttcaccatataaacaggtatccagcacgaggacctggtctttgtgggaagaaacagaaagaaatcacgaaagcanttaagagagctcaaataatggggtttatgtcagttacatacaggatcctgcatatctcaaggacccctaaagtttgtaacatcagatatcgggaataaattctatcaccttactactaataaacttattttacagtaaaaaaaaaaaaaaaaaaaaaaaaaaa

SEQ ID NO: 8469 - DNA, 594 bp, Homo sapiens
  misc_feature (212)..(212): n is a, c, g, or t
cctgtgtagaggacccagtgagacgatggacctggagcgcctcaccagacctgaccaggccgctcccggatctcaacttccaccttgacaacggtgagaaaataaatgtctgttgtttaaaccacccagcctgtggctttagttatacagcccaagctgactaatacatctggctttccccctctgaatctatgggatctacagtgctagcnagtatctactagatgaatgaaggaacacaccaagctacagatgctcaaaggactccccctatgcccacacagacttgcaataaggctgtgatgttctaaaaacccaaagatacatccctcttggctcatgggcctaaattctttcctccttctcatgcataaactctaatattcagaaaatccagaccccagccaaaaatgtaagcatttgcagagaggacttttaattatgacccaatcaagagatttctcaccttaataggtcctaattggggatcattctcagcttgtgccaaacctgacctgaggggcagccccctggtgaatcaggtacctgctgcctgctctaactgaagtcagtcactttgcccagttccccatg

SEQ ID NO: 8470 - DNA, 723 bp, Homo sapiens
atgacttttggcctttcagccttctgccaccctctctctccatgctgccagttgttatctaaaggcttttgcaatatgtgcgttagactttagccgttcccaggtgcatcgtttctagtgataggaaaagatattctccaaagctcagtatctgaatattgttggctaaataagctagagagggattttctacttaagtctttaaaccaagccgttatgatctgcaatgtagtacaatcaccttatactataattctgtcaccactgtgcgtatcagatttatagacccagcaatgcgcagaacacaaattctgactgccattgaacatggcctccctagtccggacagcagccaaagtaacattctaatcttctgccagcccttagtcaccttctctgggctgtcagtggctgctgtttcctggtcctgccaagtcacaaccagcccctgacatgctttcccttcctttgacctttcttctttgggttttagccagagctggtctatttgaggaagttaaacttctgctcctctcatttgagatgaggggtggaagagcaagtagctcttccagacacttagtcaagtggattaaagatccatcatcaccttcaaggtgacttttgtatctagatttcatccttttctcatcactaaccagactccttacaagtgggtctgcatctgcttactgaaggcaggtaatccagaaaaaaaaaaaa

SEQ ID NO: 8471 - DNA, 125 bp, Homo sapiens
cccgcgaggcggagcttgcagtgagccaagatggcgccgctgcactccagcctgagctacagagcgagactccttcttaaaaaaaaaaaaaaaaaaaaaaaggaaaaggaaaaaaaaaaaaaaaa

SEQ ID NO: 8472 - DNA, 528 bp, Homo sapiens
acataagactggttttgagataaaagttactaattaggtcaagcctgacagaatactcaggttagaatgaactgtggcttttactattgtgtgaggatgttgttagacagggtcttgctctattgcctggctggaatgcacttggtgtgatcacagctcaactgcagcctcgaactactggactcaaaggatcctactgcctcagcctcctgagtagctaggactataggcatgctccaccttgcctggctaacttttaaatttttctttgtaaagatggggtcacattttgctgcccaggctggtcttgaattctaggcctcaagtgatcctccccttggcctcccaaagtgctgagattacaggcatgagccactgtgcctggccaggactgtgatgttaaaagtttgctaaagaaataatcaagaacaaaaccaggttagattgagacaaaaaacaagctagcagtgagtgagctgtatagtgcctgctgacttaggtggcgtgtttcagcttggcacactgata

SEQ ID NO: 8473 - DNA, 704 bp, Homo sapiens
aacaggagtaaggtaagtaaagaccaatgagttatgacccccccacacgagactagcttagttgggaaccttagaaaggacaagttttcctgtgaaaatgtgtactttccaggataaatagtcaaatgtggtctcaatccaggataacatttgttgacatctatcaaacatgttgtggcctatcacagttagcagtggggtttttagtagaagttaaaaaagccaatatcaggactgaggaagaggtaccagagttccatgtgctgccatcaagtccctgccccgggcacttgcagcatcaccacctcaatctgacatagagacaattagggccaaccccaaatgcccacagcctcgcttagggcaatcaccacgagaagcccaagacccccagtccctcttatcacttggactttcatccccagatacccatgcacatctcccatctcagctcatttcccttcttttaccaactcccaaatcctgcctaagaatcagtggttcatcaccagccacaaccctggcaattcctttcctcttgctcttacagaaacctggctcctctttgaggaccctgaatcactcccaggtggtgagcatttccacttgcaccttcctcatgccctggggcctggaggtggagatgcccttcttgcccctcattgccattccagaccatcctccctcctttttaaaaaaaaaaa

SEQ ID NO: 8474 - DNA, 641 bp, Homo sapiens
  misc_feature (588)..(588): n is a, c, g, or t
ttaggttttaacagctttgtaatttatgatctacatggcattaattgatttaaccattatacctgaaataattcttcagtgtttcctttgagcagtgatagttgtgtattttttaattgcctaagagcatatatacccacgctgacaaccattcatatttacagaaaatttaaactattttataaaaactgcacattacatttttggtgaaatatagtgcattctgaggatagcatatttcatataatagcaaaagaagcattctctaggtttgcatgtagctatagtcactatattttgcctttcatatagaaagttttaaagtattatgtttaaaaacatttattggctgggtgtggtggctcacacccagcactttgggaggccgaggcaggcggatcacttgaggtcagcagttcaagactagcctggccaacatggtgaaaccccatctctactaaaaatacaaagttagctgggcatggtggcgcacacctataatcccagctacttgggtagctgaggcatgagaattgcttgaacctggtaggtagaggttgcagtgagccaagatcatgccactgcacnctggtctgggtgacacagcaagactctgtctcatataaaataaaaaaaaaaaa

SEQ ID NO: 8475 - DNA, 171 bp, Homo sapiens
acttggcgtatccttctacttatttagatctttccatttttctccatggtgttttagagtttctgtgtagttttaacatttttacttagattttctcctaggtgtttgatatttttgaaaatgttttggtccagaaaaaaaaaaaaaaaaaaaaaaaaaaaaaaaaaaaaa

SEQ ID NO: 8476 - DNA, 443 bp, Homo sapiens; identical to SEQ ID NO: 3241

SEQ ID NO: 8477 - DNA, 443 bp, Homo sapiens; identical to SEQ ID NO: 3241

SEQ ID NO: 8478 - DNA, 698 bp, Homo sapiens
  misc_feature (43)..(43): n is a, c, g, or t
  misc_feature (105)..(105): n is a, c, g, or t
cgccttaaatctaagtgggtcaacttactgtataattctggtnacaaagttagatatgaatctctggctatttattagaaagcatattgaaagacctgtcaatanacatttctaaatgtggttgctcatcttaatagttttcttaattagaacagctaggaaatgaacagaacagtggtgcttttatgttataataacaaagaagtattacagtatcccaatctccagacctggggtccaagtattcaatcctggctcagttgcaggctgacagaagagaagcatcgtcctacgctcgtacacaatggagcaatgataacatctgtcacactcttccatattgtctgcactgaaggcagaaccattaggcaggtctttacaaaaggcattaaaatccagatgtgcagacagctgagggtggcaaagagaattcccgcaatgaaggccaggggaatggccaggaacaccgtcaggaacttgtacattacgtatttgctgatttcaaagagggcatggctgcagatccacactttgtcaaaggagtgcgtagtcaccggctctgcgatcacatcctcgaagcccagcttgagatgcgagttgagccggtggggatcccggtcctggtccgagtccgcgaacttctcggggtcggcgtactcgaggccgctgtggtggctgtaggagtcgtcgtccatgaa

SEQ ID NO: 8479 - DNA, 735 bp, Homo sapiens
aatctgtcagagttcaagacacagattggaagatctgtacaggaagaggcacatacaagaaaagaatccccgaaagggcggtttgtgatgctcctgccatcgtcaactcacaccattccattctatcccaacccctgtgcaccctaggccatttcctagctcccgccttcctccaggaattatgcgggggtgaatatgaccgaagaccgacacttccctatgttggagacccaatcagttcactcattcctggtcctggggagacgcccagccagtttcctccactgagaccacgctttgatccagttggcccacttccaggacctaaccccatcttgccagggcgaggcggccccaatgacagatttccctttagacccagcaggggtcggccaactgatggccggctgtcattcatgtgattgatttgtaatttcatttctggagctccatttgtttttgtttctaaactacagatgtcaactccttggggtgctgatctcgagtgttattttctgattgtggtgttgagagttgcactcccagaaaccttttaagagatacatttatagccctaggggtggtatgacccaaaggttcctctgtgacaaggttggccttgggaatagttggctgccaatctccctgctcttggttctcctctagattgaagtttgttttctgatgctgttcttaccagattaaaaaaaagtgtaaattaaaaaaaaaaaaaaa

SEQ ID NO: 8480 - DNA, 741 bp, Homo sapiens; identical to SEQ ID NO: 3245

SEQ ID NO: 8481 - DNA, 562 bp, Homo sapiens
gaacacagcccaacgcccagacatcaagtccccaataagccttcccgcaatgtttggacttcgatgaaggaccggaaacccttgaacagagagagaccctgagcccggctggtggaactgcctcacgggagagggcgaggacacacggcttagtgcgtctgagatgaagcagctcatcgacaacatcctggaggagtctgacattgacagggatggaaccatcaacctctctgagttccagcacgtcatctcccgttctccagactttgccagctcctttaagattgtcctgtgacagcagccccagcgtgtgtcctggcaccctgtccaagaacctttctactgctgagctgtggccaaggtcaagcctgtgttgccagtgcgggccaagctggcccagcctggagctggcgctgtgcagcctcaccccgggcaggggcggccctcgttgtcagggcctctcctcactgctgttgtcattgctccgtttgtgtttgtactaatcagtaataaaggtttagaagtttgaaaaaaaaaaaaaaaaaaaaaaaaaaaaaaaaaa

SEQ ID NO: 8482 - DNA, 761 bp, Homo sapiens
ctgctatgtttgaaattcattgacacccccctttctatgtggccacttacacggacctccttcatctgatatcagcgactaatatttatgatattgaatgttggtaccttccatcaagcactgtccacatcctgtgtatctgagcacgtattctcgtgaagcccctttgcgcacccactcgatgggtaggggacacgagagcacgccctattctcgagatcccgggtttctctcccttcgcaggggacccgaggacgtgatgtgacccgcccgtccggatattgtcccgagatgtgtcaggtaattgaaggaaccccttgtgtaattcttttccagaaggagaccaggaaatataggagagaaaaccaccttgggttgaggaccttggttaaaggagcccaccttgaaccattaaccttaattggaccattggaacccctgttccaggcttccagggacccatccagacccttttttcaccctgtgacacagattttttacgtccttcagacacagttatgcagaaggcttggagggaaagaaatcctccagctcgaatcaagcagcctatcagctttagaattaaaccatgagtaagtttgaaatatatggaaaataaatttattttgaaggaaaccaggcaaatgatttttatgtctcctttgtctgttcctaagacacttggagtcattagtcatttcctttttgcatgttatagatatttaataaaattttcagtgtttgcccaaaaaaaaaaaaaa

SEQ ID NO: 8483 - DNA, 435 bp, Homo sapiens
cacacccgtttcactcacagtgtcactgtcagatggtctgcagcgagtcacaccggagctctgggcgcaagcacagtgattgaatcactaacacccaccaagacctcccgcctgcccatcatcgatgtggcccccttggacgttggtgccccagaccaggaattcggcttcgacgttggccctgtctgcttcctgtaaactccctccatcccaacctggctccctcccacccaaccaactttccccccaacccggaaacagacaagcaacccaaactgaaccccctcaaagccaaaaaatgggagacaatttcacatggactttggaaaatatttttttcctttgcattcatctctcaaacttagtttttatctttgaccaaccgaacatgaccaaaaccaaagtgcattcaaccttaccaaaaaaaaaaaaaaa

SEQ ID NO: 8484 - DNA, 715 bp, Homo sapiens
cacaagttggtgccaagcttcttggatgaacgtgttgatgattaggattatacctgaaatattttcttccttctcagcactttcccatgtattgatactggtcccacttcacagctggagacaccggagtatgtgcagtgtgggatttgactcctccaaggttttgtggaaagttaatgtcaaggaaaggatgcaccacgggcttttaattttaatcctggagtctcactgtctgctggcaaagatagagaatgccctcagctcttagctggtctaagaatgacgatgccttcaaaatgctgcttccactcagggcttctcctctgctaggctaccctcctctagaaggctgagtaccatgggctacagtgtctggccttgggaagaagtgattctgtccctccaaagaaatagggcatggcttgcccctgtggccctggcatccaaatggctgcttttgtctcccttacctcgtgaagaggggaagtctcttcctgcctcccaagcagctgaagggtgactaaacgggcgccaagactcaggggatcggctgggaactgggccagcagagcatgttggacaccccccaccatggtgggcttgtggtggctgctccatgagggtgggggtgatactactagatcacttgtcctcttgccagctcatttgttaataaaatactgaaaacactcaaaaaaaaaaaaaaaaaaaaaaa

SEQ ID NO: 8485 - DNA, 604 bp, Homo sapiens
actctagccttaggccgcgggacggataacatttcacaccggttaccgctatgacccttaggcctattttaggtgaccctatagtaccagtttgtaccaaaaagccggctggtacccggtccggattcccgggatcgcccttttttgttttttttttttttttttttttttttttttttttttttttttttttttttttggcttaacccacctgccctttgggcaaggttgggacaaagccatctgggcagtcaggggcaaggactgttggaggagagttagcccaagtataggctctgcccagatgccatcacatccctgatactgtgtatgctttgaagcaccttccctgagaagggaagaggggatctttggactacgttcttggctccagacctggaatccacaaaagccaaaccagctcatttcaacaaaggagctccgatgtgaggggcaaggctgccccctgccccagggctcttcagaaagcatctgcatgtgaacaccatcatgcctttataaaggatccttattacaggaaaagcatgagtggtggctaacctgaccataaagttattttatgattgcaaaaaaaaaaaaaaaa

SEQ ID NO: 8486 - DNA, 758 bp, Homo sapiens
  misc_feature (71)..(71): n is a, c, g, or t
gcaccacaggccgcccacgggccgcactccgccgctcatccgccagatttgagcagcgcctcttcgggacntgcagcctcagcccttcatgccggagaagcccgtcaccgccagctcgggctgaggccccacgcctggggctcgaagggccggtagttcgagaagctccggcccagagtcaagcccgccgggcccgaggagccttccgccgctgccatcgcctctccgcaggcgcccgtcgccgaggcttccgccatggcgcctgcccggcagggaagcgagaggagaagagggcccttttattttccactcagattaatatgaagcaaaagtcaaatattacctgcagggattctccctagcgctactcaagcctgcaaaaccttttactggttgcatggaaatcagccaagttttataatccttaaatcttaatgttcctcaaagcttggattaaatacatatggatgttactctcttgcaccaaattatcttgatacattcaaatttgtctggttaaaaaataggtggtagatattgaggccaagaatattgcaaaatacatgaagcttcatgcacttaaagaagtatttttagaataagaatttgcatacttacctagtgaaacttttctagaattatttttcactctaagtcatgtatgtttctctttgattatttgcatgttatgtttaataagctactagcaaaataaaacatagcaatggccaaaaaaaaaaaaaaaaaaaaaaaaaaaa

SEQ ID NO: 8487 - DNA, 670 bp, Homo sapiens; identical to SEQ ID NO: 3252

SEQ ID NO: 8488 - DNA, 670 bp, Homo sapiens; identical to SEQ ID NO: 3252

SEQ ID NO: 8489 - DNA, 723 bp, Homo sapiens
gtaataagagtcatgaaggatgacgtcggacagatactctcgtgcaaaaggggtgcattaatacctttagagacacgggaaaatttatgacatgaggttactcctagcctgcttaaaaagagattttcgggtccaaaatctcatgaatggtgtttacagtgctgcaaattacaccatgggagctttggaagtaattttgtgtctgctggtatacagaccagttttaggactggtaatcccacagggacttaccagaatggttatgatagcactcagctatacggaagtaatgttccaaatatgcacaatggtatgaacctacaggcatatgcatatcctgctactgcagctgcacctatgattggttatccaatgccaacaggatattccccataagactttagaagtatatgtaaatgtctgtttttcataattgctctttatattgtgtgttatctgacaagatagttatttaagaaacatgggaattgcagaaatgactgcagtgcagcagtaattatggtgcactttttcgctatttaagttggatatttctctacattcctgaaacaatttttaggttttttttgtactagaaaatgcaggcagtgttttcacaaaagtaaatgtacagtgatttgaaatacaataaatgaaggcaatgcatggccttccaataaaaaatatttgaagactgaaaaaaaaaaaaaaaaaaaaaaaaaa

SEQ ID NO: 8490 - DNA, 723 bp, Homo sapiens; identical to SEQ ID NO: 8489

SEQ ID NO: 8491 - DNA, 715 bp, Homo sapiens
  misc_feature (76)..(76): n is a, c, g, or t
  misc_feature (100)..(100): n is a, c, g, or t
  misc_feature (126)..(126): n is a, c, g, or t
tgatggcaccctgtaactccacctgagttacaaagacagaccctgtctcttaagaaaaaaaggttgattccaggcnctgtagaatagataaacagcatgngatatgagggaaatcctcagcagtanttaattttgcattccaatttcatgttgatgatatacacaatggctttttgttttaaaggcttttatcttgagaacatggtgtctggagttaaagataatctacttttttaccttaggtattggcatactccacacatctgtaccattcttgagtgatcgcttaggaatgaatgtgatttgaactcattcatgttgagagggtgtcaaattgagaaccaggtagatccccaccacctacagtaaaaaggaccctaaagtaaattggttgaagaaattagatcccaaagattcttggtgaattttgaagtcttcatcagtatatccatattaaaacgagatgacagaagccaagtaattatgggctgacaggacaactggatcagtttcattaaaaagggcaaacttgaagataaatcttttgactccagctctttagaggatctaaagtgaccttgatggacagtggaagaaatcacaacatggaattcctcgaataacaatttattgactttaaataattttgtctaatgctacatatacacaattaaaaaacctttacactaaaaaaaaaaaaaaaaaaaaaaaaaaa

SEQ ID NO: 8492 - DNA, 377 bp, Homo sapiens
tagtgttacaataagcgtttctgcagtcccgtccatctggtatgagtaaccagatagagcacaaagcatgagttcttgttcttcagttaaaagagcttctttcacagtgttgatgacaaatgccttttgtagccacaaaccaggcgtctcaaccttacgtttttagttaaagaaatgtgttagctaaacgttgttgaacattgattgtttggtatccgaaaacagcagtggacgatgttgtgcaatatccatctactgtagttaagatattcagtagtttgtttttcataagcatgtaattgatcatatttctgccaaggatgtgccttctactttataattatagtgttgtaaaataaaaaaaaaaaaaaaaaaaa

SEQ ID NO: 8493 - DNA, 80 bp, Homo sapiens
tcaattgcaattgtgttacttttattatttggatgtatatcagtggagaaaatggagactcagaagtaggacatgccagt

SEQ ID NO: 8494 - DNA, 265 bp, Homo sapiens
  misc_feature (13)..(13): n is a, c, g, or t
cgtggtatttatntgtgccacgcagatccacgagaccacgaggcaggccctgtcttttcacgttggtttctgcttttaatttacttgtacaattcattgttactgttctgtttttctattaatcttttgtcaacttcctgattatgtaacaaagtatgtacagtctacttttgaactatttttatcacagtattatttattgctttctttcaataaagtactgaagcattttccactgccaatgaagaaaaaaaaaaaaaaaaaa

SEQ ID NO: 8495 - DNA, 682 bp, Homo sapiens
ggttggctttccaaagcccttgggttacacttttatgggcatgactataacccatttttgtaaagagtatagagttgtatacaaatagagaactaaatcacagtactcaacttcctttgcatattagcatcagtcaacccctgctaattccaccttatgggggaaatgcttctttttgtttgtgatagctatttgatcatttccttcatatttttctcttataaaagatgtatttgatactgtgatatgttcacgaaaagtattctgttaagttagtctgttgttatagtagagctgttccattatggatatttctgctgcccagtcaccatctaaattaattttggccaaagattgggtacttagttttcctgttactgagttagctctactcttttggaccaaagcaacatgagagcaagtacttttcacacttgttaagatggagttataactgtcatacatttggaatattatgatcccaagtagtctttttataatttggattgtatcgtatgcttagatttttgataaaatcttggccaatttttacagaagaattctctgatcatttagttctatctatttagaatatgtaaactggatttttttttaagtaatatgtgaccaagttaattttgtcccgaaggtctaaataaagagcagtttcccaaaaaaaaaa

SEQ ID NO: 8496 - DNA, 734 bp, Homo sapiens
ccacaaggcctgaatggagctcgggctgacgggtgctagagcttgtatccatcactgccaacaagaacacctgtcctggagaccgaagtgccatcacaccgggcggcctcggcttggggccccagccttaacttctcgacagttccgtgaggatgacttccggagagttgtggactttatagatgaaggggtcaacattggcttagaggtgaagagcaagactgccaagctccaggatttcaaatccttcctgcttaaggactcagaaacaagtcagcgtctggccaacctcaggcaacgggtggagcagtttgccagggccttccccatgcctggttttgatgagcattgaaggcacctgggaaatgaggcccacagactcaaagttactctccttccccctacctgggccagtgaaatagaaagcctttctattttttggtgcgggagggaagacctctcacttagggcaagagccaggtatagtctcccttcccagaatttgtaactgagaagatcttttctttttcctttttttggtaacaagacttagaaggagggcccaggcactttctgtttgaacccctgtcatgatcacagtgtcagagacgcgtcctctttcttggggaagttgaggagtgcccttcagagccagtagcaggcaggggtgggtaggcaccctccttcctgtttttatctaataaaatgctaacctgcaaaaaaaaaaaaaaaaa

SEQ ID NO: 8497 - DNA, 348 bp, Homo sapiens
gacatccttttctctgaagctgcctccaaaatctgcatcagcggcacagtgaagtgttgaggacccgcagagacattccgcgcacagtgataatacttttattaactctcaattgcattaagtcctccatatgaccattatggctaaaaatgtgaattaagctgcgttaaattccaagagctgcgttaaattccaagagcatatcttctttaaattagcttctgagttacttttatttaaagaatgggatgctcaccaaagatccaccatatcaaagctttcatggaagaaaggatgaataataaagagtattttgaggtggaaaaaaaaaaaaaaaaaaaaaaaaaa

SEQ ID NO: 8498 - DNA, 159 bp, Homo sapiens
actacttcttccctctctcttccatgtgtggcactcccttccccttgtttttctttttgtgggaaattaaaggaacctaatggtgcttattttcctaactccatcttagtgtatagcctggaaagacacctctgtctgggaagagactctctaagtcca

SEQ ID NO: 8499 - DNA, 744 bp, Homo sapiens
tacacacggttcttgtgcataatattagtggaaaaatatatattaacatgcaagataagggaactacaggattgtacacttaattcaagccttcatgtcctcgccacctacctgcgttgtcattctgtccattccgttctcgaaccttcataatcatgtcgcagtcacgaactcctgagtactcaccaggtaggacattgggcatgagggatatatagatcaagaatgtcccaaccctcaaagagctacgtggccatacagctggccatgatatgttaagatatgtgttttacattattgatcctccagacctgtgtttttcaacttttatatgttacattgccatctagtacatatgcagacactcttaactgaagtaaatgtttcaaaaagtaattgtcaccatcactatgtgtgatgtcctctgatatttcctatgttctttttctgccagtgacccacccgacggatttcatgacccactaataagtttcagcctgagtttaaaaaacgttgactctgggggagcccgtaagaaagagtagtcagttcttactggggtgatcagagaaagcttcattaggagttgaatttgcactttgccttgaaaaataaaaaatgtttgagtggataaagtggccccaggagggcataattagagtgaagcattctcccaatagatttagattataaataggcagaataggcaagcccaatatttaccatttgaaaaaaaaaaaaaaa

SEQ ID NO: 8500 - DNA, 750 bp, Homo sapiens
agttcaaatggtacgttataacatcaattatagaaagtcatttctcaaaattttcggtttggggaagagttaagaagtcgtggctaggtgttgttgaggaataagggagaaaatcacagtttacaaatctgagagctgaatccgtgctgtttctcgattgagaagcagtggacatcagcagtaggaatggctcaggtccaagaaggctatgccctaccagacccggttgatgtgcttccccggatttactctgtcccaccgtccacctccaccccggcctgcacctctcgcttagggtagaggcctggcctccagtgccatctcccgacagcctcccccaggtgaaggtcatgcttcagcactgcctccctgacagaggctctgatgatgggatgctctgactcagactcaggtgagaaatttgaaggaacagaatgctcttgcctagcagttgccgggaggggtcaggtgctgcccccagagaagtgggagagttagaggtccgtgaggcatactttccccaaagggggcagaaagcatgaagtggtcagcatagaaactcgtctccctgccatccacacagtcccaaggcatgctggttctacatggcttgtctggaagctgtccttgaatgtaaagttgttttcagctcaataatgtatttgcctgccttcgcctttcctttcacccttaccaccttggaattgtaccgcctaataaaatcttcgcacttaaaaaaaaaaaaaaaaa

SEQ ID NO: 8501 - DNA, 720 bp, Homo sapiens
tgtgaattctatcccggtttacccagttcgcccagagactgggccccactacataagctgaagagaccagctgctttaatagcctcattacctaggatataggatcactgtccaacctcactcgcacagtgggcaagtttttacttcagaataacttttgaaataaatttccccggaacagctcgccccctgctcgaacaggactctgaggctccactacgttgctgttattcctgacagagtgatgaaaggaaatttaaacacagtggcattttgtaaaaccaccccagcctgtgtgactttcaatgcctgtccgatttggctgggaaaatattttagatccccagggctacatactgttttttataccctcctctttgtgtcagtgatggaaaaggtgtcaatctgctctgaatctctctgaacacctcaggaaataggcttttggctcgcagagaggggatgagaaatagttttgaaccaccaagtctcttggagggtgtcagcagccccttgaagtaaaagtgtggctgcaaacccagctctctgcattagccaggtgaacctgagcatgctgcatacaccctcagtcttggtttcttaatatgtaaaatgggaatgaatatgcgcacctcgtggggtggttgtgattaaaggcattcattataaagagcttagtttcataccaagtgaaaaaaaaaaaaaaaaaaaaaaaaaaaa

SEQ ID NO: 8502 - DNA, 707 bp, Homo sapiens
gtaaccagagactggttacatcagtgatggagagtgagagccaaccagggtagacaagccatcccccgattgtcaatggcaggaagccaccacatgtagagatggtgagccttggggcccagggtcaccaggggaagtttgaaccacagccatcagttcccagaggagctagagacattgccggtatgcgagattgaagaagggtgcggttggggatgaggtaataccctggtttctttctgtctgcccttggcccatacccagcatgggaaccctactgacaagcagcctgggcgtacggtaccacaggcctcagcctatgtctgagcaggacagggacagggcagaatgcagtgtaagactgtacaggactaggaatggcacattttcactgattttaaagttttttggtttgtttgtttatttgttttgagacggagtcttgctctgtcgcccaggctgcagtgcagtgccagtgatctcggctcactgcaacctctgcctcctgggttcgagtgattctcctgcctcggcctcctgagcagctgggactatcaggtgcacaccaccacgcctggctaatctttgtatttttagtagagacagggttttgccatgtttgtccaggctgttctcaatcctagcactttgggaggttgaagtgggaggatcgcttgagcccaggagttcaagaccagcccaggcaa

SEQ ID NO: 8503 - DNA, 294 bp, Homo sapiens
tcataaagcctgtcatcactcccacattgtttcttacggtcggagcatctagaacaagcgtctagactccttgggaccgtgagttcctagagcttggctgggtctaggctgttctgtgcctccaaggactgtctggcaatgacttgtattggcctaccaactgtagatgtatatatggtgcccttctgatgctaagactccagaccttttgtttttgctttgcattttctgattttatacccactgtgtggactaagatgccattaaaataaacatcagagtaaaaaaaaaaaa

SEQ ID NO: 8504 - DNA, 653 bp, Homo sapiens
atctcaatctagtgagacacagacatatttagaatatgtgaacagtattcttcaaatttccagaaatttttgctcagaaaaacaggctgagaagtaaccatggacgtcagaagactaaagatacatgacaactattaataaatgcaatgtggtaccctggaaacaaaaggatgttaaatggaaaaacgtgaaatctaaagtccggagtctagagtacagttgagagtattgtaccaatattgggttttgttttgagacggtgtcactgtctcctaggctggagtgcagtggtacgatcttggctcactgcaacctccacctggattcaagcgattctcctgcctcagcctcctgagtagctgggattataggcacccgccaccacgcctggctaatttatttttagtagagatggggtttcaccatgttggccaggctggtcttgaacttgacctcaaatgatctgcccacctcggcctcccaaaatgttgggattacaggcatgaaacaccacgcctgaccccaatactggtttcttaactgacgtaccatggtagcttaagatgacaacattcatagaaacagcgtggggtatatgggaactctactagatgtggtttttctgtaaatctaaacttaaaaaaaaaaaaaaa

SEQ ID NO: 8505 - DNA, 470 bp, Homo sapiens
taagtctaagactccagacttgcgttcaaccttacctacttctctggtacaagggcaagttccaggtccatgattgctttcaatgccctttgcctcaggtgcagtctatgatggaggaaggggaccagccttggactgggctcttggggttacctggtgctcactgtgcacctgtgtacccggcaaagcagatgtgcctgggcacaggcctggcccactcgggtatcttcctattccttacggccaccttacagaggttctgcctgctccctgtggtacgccctggcaccatcaacctcacctgcagtgcactggcctgggcagtgtccccccagacttccagctccagccagtggcctgctgaggtcaggctccactatggtgggctcactggccctcaaacctccataccctcctcggtcaataaaggccctaaattgcaaaaaaaaaaaaaaaaaaaaaaaaaaaaa

SEQ ID NO: 8506 - DNA, 685 bp, Homo sapiens
  misc_feature (75)..(75): n is a, c, g, or t
gaccgaggtgttgccactgcaactccagcctgggcaaaagagctagactctgtctcaaagagatatatataaaanatttctaagtgatgaatgcttagggtattgctgcttatttcttactgtactgtggtgtcaacatttctaagtgtccactaggacttctttgggcctgaatatattatccggttttataaaagccatttgtgtaatctccaaaagtgttttttaattctacccgttctatttgtaactccattttttcaatattttattcaatccatattttctctgactttcattactttagagttcttaatctgggggtccatggcctgcctaggagtctttagcatgtaggggtttaggagttgcagacccctagggatcgaacaagctgggtatgtgcttgaaggaattttgctgggacaaggatctgtagtatttactatatttttaaatgcctctgtgacaccaaagcagttcagaacactcatttacctgatctaatcatagtttgatgtttgtgtgttatatctctatgtattcctgtttcacttttaatttctgtatgtgtattgtcgctatgttgtgcagtttttctcaagtcatttttgagaaataggcagggtatgaattatcaataaataagtatcatgtttggggcacaaaaaaaaaaaaaaaaaaa

SEQ ID NO: 8507 - DNA, 540 bp, Homo sapiens
  misc_feature (18)..(18): n is a, c, g, or t
  misc_feature (74)..(75): n is a, c, g, or t
  misc_feature (115)..(115): n is a, c, g, or t
  misc_feature (142)..(142): n is a, c, g, or t
  misc_feature (145)..(145): n is a, c, g, or t
  misc_feature (162)..(162): n is a, c, g, or t
  misc_feature (214)..(216): n is a, c, g, or t
  misc_feature (235)..(236): n is a, c, g, or t
  misc_feature (247)..(247): n is a, c, g, or t
aaaatttggaaaattatngtagaacttttaaggttttcttgagagcctgtagatttcttgtgtgtaaagttgtnnagaagatgttaataagggctgtttggaaattgccaataanctagcttgcccttttctgtttcttttnctngaagtagagtaaataantggacaccacttttgtgatcagtcatttttatgtagaaaactgtttagtagnnnctgagcctccacgtgacannttaggaaagcncacgaatattcgcacgtgtatttttttgtcttaatataattccaaggctttcacacttctaattttgattgcactattatttgttgctattatatgtaactcattttttttactttgatgactcatgttatgctcagaggcaaatattttttaaaaatctataaagccaatatttttaagcacattgttagagtattatcaagtaaaatatattctgagtgtaacattttaaaaggagtacattaaatgtgtaactcattcaaccataaaaaaaaaaaaaaaaaaaaaaaaaa

SEQ ID NO: 8508 - DNA, 724 bp, Homo sapiens
acttaatgggttttcacagtccagcttcactgccaggtcccagtcagattccaggaattgcgccctaactttgcttgctaatcctggtttagagctatcccactaaatattgtaatcctaattcttagtccttgcctgtgagatatgaggtcttacaggagacctcagagctcccagcccttctcctcctgctaacccttctcacaccctcaagaggagttagaaaagaggtccttgtcattctcacctcttatggaaaatggaataagaaataatcatatcctgttcttcccacccttgctcctgttatttaggatttctgacaaagctggcttgagattggtcacttagagccgactgtctcctctgccttttgtttttcagcttcagagacagaatcccaataatagtcccacagggaacctgggttcttctgggaagaaggaaagggaaaggaaggggaagggaagccaaagaagattggggggtatgtccccctgtagtacactcttacctcttacttcctagactttgatttctccggcagcccagatgttcagttctcttggcccctctctaccccttactgggatctggttttcattttccggtccttttgccatacacagttacagagatcagtcaaatccataccaccactgagatctcatttattgccacagatgcacaaaataaataacccaaaatcaaaaaaaaaaaaaaa

SEQ ID NO: 8509 - DNA, 761 bp, Homo sapiens
  misc_feature (514)..(514): n is a, c, g, or t
  misc_feature (521)..(522): n is a, c, g, or t
  misc_feature (531)..(531): n is a, c, g, or t
  misc_feature (575)..(575): n is a, c, g, or t
ataggaattagaactctttttcaaaaatgccaacctgttttccgggcatcatagtagttggaataatacagatataattgactaatcataaagtacatgagagtacagaagggaatttggaaacggtaagtctgctagggcattacaatcctgtcctagcactccacctttattctgccaacctgggttaattaaagatggtagcctggaaagtaatgaatgacattgacttcaggcaatctttccactgattattcttggctgaacttcatttatcgagtcagagaatgcactgcctgagaaatgtcccagaggagtgaatcctaggcctggccacagtagaatcgcctggagaatttaagaaaaaaaattgttgggcactcactctttccagtgatctttatttagttggcttaccatgggaaaacaggtaatggtttcaatggtttttaaaatttgttccaagggtggttttccttaatttggtggccaaggttccaaccaagtttgaaanaaccatnnggttcttcnggaggaataagctaatttctatttcttgccgagttgacaagtanagtggatagctatattttcacataaattatagtttacagatgtttggagggggaagacaggatctgaggtgttttgatatgactgttagcaccaaaatctgaatgccttaattgttgaatgtgttaaattggataattaaaatgggcataaatgacttattaaaaaaaaaaaaaaaaaaaaaaaaa

SEQ ID NO: 8510 - DNA, 709 bp, Homo sapiens
cactcctgggcggcatcattcaccatgattcttcttgggcttttggtttggcagatatcttatgtttcaaccatcagttcacttcctgggtcctaacccaagttaagttgtcaaatgcctaatttgtggaggcctttatcttctacaaccacactcatggccgggaaatgctggacatctttgtgcaccagctgctggttttggtcgtctttctgacaggcctcgttgccttcctagagttccttgttcggaacaatgtacttctggagctattgcggtcaagtctcattctgcttcaggggagctggttctttcagattggatttgtcctgtatccccccagtggaggtcctgcatgggatctgatggatcatgaaaatattttgtttctcaccatatgcttttgttggcattatgcagtaaccattgtcatcgttggaatgaattatgctttcattacctggttggttaaatctagacttaagaggctctgctcctcagaagttggacttctgaaaaatgctgaacgagaacaagaatcagaagaagaaatgtgactttgatgagcttccagtttttctagataaaccttttcttttttacattgttcttggttttgtttctcgatcttttgtttggagaacagctggctaaggatgactctaagtgtactgtttgcatttccaatttggttaaagtatttgaattt

SEQ ID NO: 8511 - DNA, 640 bp, Homo sapiens
ctgcacttgggcttcctggagctaacttgaactctcagtctcttgctgcagatcagttgctgaagcttatgagtactgttgatcccaagttgaatcacgtagctgctgttctcggtttcaccaagtctgaaatcggatacctctagtaaagaaatagaggaagctatgaaaagagtacgagaagcacagtccctaatttctgctgctatagaaccagataagcacagtaagaataatagaaggcattcaagatcaagatcacgttctaggaggaggaggactccctcatcttctagacacaggcggtcaagaagcagatcgagacgtgcggtcacattctaagtctaggagtcggcgacgatccaaaagcccaaggcggagaagatctcattccagagaaagaggtagaaggtcaaggagcacatcaaatacaagagacaaaaagaaagaagacaaagctaaagaaacgttctaaaacaccaccaaaaagttacagcacagccagacgttctagaagtgcaagcagagagagacgacgacgaagaagcaggagtggcacaagatctcctaaaaagcctcggtctcctaaaagaaaattgtcccgctcaccatcccctaggagacataaaaaaaaaaaaaa

SEQ ID NO: 8512 - DNA, 651 bp, Homo sapiens; identical to SEQ ID NO: 3277

SEQ ID NO: 8513 - DNA, 651 bp, Homo sapiens; identical to SEQ ID NO: 3277

SEQ ID NO: 8514 - DNA, 707 bp, Homo sapiens; identical to SEQ ID NO: 3279

SEQ ID NO: 8515 - DNA, 694 bp, Homo sapiens
gtccaacgagggagagaagtcataattcagggcttccagacatcattgctttgtgccaagcagaacatcaccacggcagaaatcagcgcccgtgaagggcactggcttagcaggggtgctggcctggctccaggccacccacagagccaacgattgactgcacggcagaggcgcagctggcctgagctggggagaggtggcagagggcagtatggctttgctgccaatagtttcttctcacaggggcagaataacccaaagtaaccctacatgatggggctctgtgctgagatgcaatgatgtgtaaactgaggcatgtggagatggaagttgacatctggcctctgaaaaaagtgtccccaggggctaggcatggtggctcacacctgtaatcccagcactttgagaggccgaggcgggtgtatcacctgaggtcgggagttcgagactagcctgaccaacatggagaaaccctgtctctactaaaaatacaaaattagctgggtgtgctggtgcatgcctgtaatctcagctacttgggaggctgagacaggagaatcccttgaacctgggaggtggaggttgcagtgagtcgagatcatgccattgcactgcacctgggcaacaagagtgaaactccgtctttaaaaaatataagaaataaaaaaataaaaacctgaaaaaaaaaaaaaaa

SEQ ID NO: 8516 - DNA, 653 bp, Homo sapiens
gagacagggtcgcaatgctgtcaccccacactgtaggtgcagtgggcaggatcatgcctcagtgcagcctgggacccccctgggctccaagtgatcctgtcacctcagcctcctgagtgcctgggactatatatgtgtgggctaccatgcccagctaatttttgtattttttgcagagacagggtctctctgtgttcctcaggctggtctcaaatttctgggctcaagcaatcttcccacctcggcctcccaaagtgctgggattataggtatgagtcaccatgctcggcccaggtctgagttttaacatcacttcttccaggaaaccacagtggtccctgtattaggttagcttccccttctgtgttctcccattgattctgcacttctcattgcatcgtaatgaaattttattattagttttccattttatggtaggccctataaatgcagagaccttgcccttctggcagctgtatttccagtacatagctcaatgcctggaatattaattaagttaatttgttaagtgaatgaaacaaacaagatcagaaatgagtcttagcaatgttgatctgactcaagcatatcctctattattgaatgaggaaagcctaggatttaaaaaaaaaaaaaaaaaaaaaaaaaaaaaa

SEQ ID NO: 8517 - DNA, 699 bp, Homo sapiens
gcgtgaccctgagactggtcagtatggctctttttaaagattgtgtgctttctgcctcaatattaatatgttggaagttaccaagaagttcatgacagatctatttcaaattctggtgaagaaggaagaattggcccttgaaagaatcagtgttttacaataattttgaaagagggtagcgacagaaggaagaaaacattatcaggagggaattcagataaaggacaaaccatattttgactgctactgacttgttgaactggcagtcggggtcaacttgggaagacagctgtgaccataaatattaaagaagacaaaaggattctttgtgacactgagaccttctgcagtaccacagtggaggaaatgccagtgtacacaactggcctcatttaattcctgggaggagatagtttgggatgcagtgcttgttgttgctgagcaggcgatcacagcatgcactgtgtttctttctttgagaatatttgaatcctgcctgaatactcgtaacagatgagagacgcaggttttgatagcatagatttacgctgtcattagtcatgagctcttgggacgaaagtaattggttttatcctctttagagttagaccctgtggttgggtatgaaagatgagtgtctgtaaaaatccttcttagaaatgtatttcctcaagactctgtctcaaaaaaaaaaaaaaa

SEQ ID NO: 8518 - DNA, 462 bp, Homo sapiens
gatattgtgaattaatgaattttgatatcatacccagcattatacttggttcatgataactgccctgaaaagatacagtgtatgtgtattttgcttttcgtgttagaacacaatcaacctgtaagtattttcgaatttatagtatgtggtgatttatatgttaagtggaaatgtttttattaccggttatacctatggaatgaagagaatgttccttatctgagttgtaatagcctacttgtaggtctatatttatcttcacagtttgtacatttttttcttgtaatatcaaaatatatgtatatgtactaagtttattttgcaagtgtttcaagaatttgtagtttaatatgcatatttcattgctttcttctccatctgacattatttagacttaggatgaaatagcaagctgggaaacaatgccatagatttaaaaaggcctatgagaagtatagaaat

SEQ ID NO: 8519 - DNA, 693 bp, Homo sapiens
acatgatcaagtaaattcaaagcagtcttagtcagaggaaaatatagtatgttgaaccacatatatatgcacgtagttaatgaagtttagtatttggaagtcaatgaatggtactataaatggaataaatgagttaaaatattttgcattctaaagttcttatactcaaaagccttttttggtgtgaaaaaaccctgaaatatttgaagtagacagtaaaatagtttagagcttataatgaggtagggcaacaactgttcctcaaagctaagctttctacactttttaaaattctgatcattattcttcatgtaatcattcataaataatttagaaattcttctcccaaaattatttgtgggataatctcaaattaccatgcacttactttgtacaggctattaaattgcaatgtagaatgtagataagtaataaaaagaataaagatcttaacaggatttttacaaagtaaagaaacccacttgttcacagcatgtatctgacttgaaggaagttcagatcacagcatgaagaaagttgaaagttagaatcttctaaactcataaaatacaaaaatggaaatgaggctgaagtggatagaagctacaagtaacaatcagtctaaaaggaaactttgggcttatgtaaacaaatatgcaaataaaaaaaaaaaaaaaaaaaaaaaaaaaaaaa

SEQ ID NO: 8520 - DNA, 244 bp, Homo sapiens
agtgcccaggcctcttgggcagcttagggccctgcctctgtttcatgatgcatgggtcatttgtcttgggtgtcctatcccatatggagaagaaaggggcgtctaagttctggctcttctttctttggggttctctgtacctgaggaaaccaggccctgggtgactttgcagatctgctcaccctcggtgagcaacagtgtcagccatgcaagcaggacagaatggtgactgggtgcccttggt

SEQ ID NO: 8521 - DNA, 683 bp, Homo sapiens
taagagaaagcaattagatgatattgtagggaacagaagcttaagacaagagagtgggttttagtgttggtcacaggtgacctgaaaaactatccgattcataatttggaagtgacaaatatacataaggagacaagatgagaagctgaatgtaggatttaaatgaatagaataaaatgaaaaaaaaagtcttggaaaattagaaaaaataaatctacatgtttactatttctcaaagtgctaatatttgatctttattgttaataacaaatatcacgtttggtgattataatagatagttatcggaaatatatatatatatatatagagagagagagagagagagagttatcaaaaagattgtttctctaaaaatctttgattttaacagaatatccaagacatataatttctgtttgacaggaaaccttttcaaaacttgaataataaaaatgaagttttattattacttgagttgattgattattaaaagatgatatggtaggaaataataaaacatttgctattattacagatactttagggataattccaaattaggtttgagaattgtaggattcaaaaattcttcaatgtaagcatagtgctcagaaaactcatttttaataaacattttcctatctctatgattttactatccaagagctgtttgaaaaaaaaaa

SEQ ID NO: 8522 - DNA, 695 bp, Homo sapiens
tggcatggatgtttaagatgttaatatactattctgttacatctttctcctttagaagaatactaccatttctttaaagcacggaggggaagacatttcttctttcctggtattttgtcttgatccctctccaagagtgatctaagctcagtaaagccttggtcttctcgacacaatattaatggaaaatgttaaccttacctatctctcttttttaagtatggagggattaccacaatgccttgtgatgatttctcttcatcttcattgttagtcctcaactttgtctcaaatcataattttaaacagataaactttgattgttaaattcattattttgtaaagccctatgaacgagtgaaattacacacagttacaaacaggattcccaacccttaaatctttttattcatccttctatccatctactcattcattcataatctatacagaacatgatcctactgaggtcatgagttcgagaccagcccgaccaacatggaaaaaccccatctctactaaaaatacaaaattagccaggcatggtggcacatgcctgtagtcccagctactcgggaggctggggcgggggagtcgcttgaacccaggaggcagagggtgtggtgagccgagattgcgccattgcactccagcctgggcaacaagagcaaaactccatcaaaaaaaaaaaaaaa

SEQ ID NO: 8523 - DNA, 609 bp, Homo sapiens; identical to SEQ ID NO: 3288

SEQ ID NO: 8524 - DNA, 704 bp, Homo sapiens
  misc_feature (109)..(109): n is a, c, g, or t
gggtcaagtaatattagctctggtagtctgccaattctccccccttaaatcgaatcatttaatgctcccactgccatatataagcacatccatgtcagtacacttgccnacatgaagtaatcccacttgaaataacccttgctattttaataggtgaaaaatggtatatatacccacccaatcttgatctcctgtctcaacaaatgcaggatattattattttcttctacttaaaaccaggaaatccatgtctcttaatgcttttattttgtctgaagaaactgggaggggtgatttgtgataacagtggagagttacaggacagtcaccagaacctcatatctcacacaaattgaatttgagttcttgatgtaccagcatatctaaagtcacacttaatttcccttgtattgccttgtcatttaactctgtgaagttagttcctttcctcttgctaggcatgaggggggaaaagttgtcaacaagaaaaccaagcatgccctaagaagcagtagtgtctcccagatttctaagatgtgatttaggtttatggtgatcttggaattttcagttcagttcattatccatctttccttctctgttccaacctaagctctggtccaaatcaataaaagtaggagaaatatccttttttgaagatctcaaattactactgggataacaaaaaaattcaagtataattt

SEQ ID NO: 8525 - DNA, 647 bp, Homo sapiens
ggatgccgcaaagcgccgttcgggctcctctgcaggctgaccacaagggctatgggaccaccctgcctgaccccactgtgcccggggaggtgttgcgccagtggagtgggtgaaagggatgcagaggggaatggcggagaccacactggtcctggaatcagagactccttgagaccccatctgccatcacttagcttactaactgggcaaacctcccagcctcatttttctcaaacgggaaaacaagaaaaatatcaccagtcctactcacttcacaagaccgtcaagaggaccagatcaaatgggacactattagttgaaagcattttaaagaactggggtgggggccaggcatggtggctcatgcctgtaatcccagcactttgggaggctgaggcaaatggatcatttgaggtcaggagttcgagaccagcctaaccaacatggtgaaaccccatctctactaaaaatacaaaaaattagctgggcatagtggcatatgcctgtagtcccagctactcgggaggctgaggcaggagaatcacttgaacccaggaggcagaggttgcagtgagctgagatcgcgccactgcactccatcctgggcgacagggcgagactccgtctcaaaaaaaaaaaaaaaaaaa

SEQ ID NO: 8526 - DNA, 709 bp, Homo sapiens; identical to SEQ ID NO: 3291
  misc_feature (80)..(80): n is a, c, g, or t

SEQ ID NO: 8527 - DNA, 676 bp, Homo sapiens; identical to SEQ ID NO: 3292
  misc_feature (79)..(79): n is a, c, g, or t

SEQ ID NO: 8528 - DNA, 151 bp, Homo sapiens
gcagtctggtaccggtccggaattcccgggatcgaggcaggagaatcgcttgaacccgggaggtggaggttgcagtgggctgaaatcgtgccactgcactccagcctgggcgacacagcaagactccgtctcaaaaaaaaaaaaaaaaaaa

SEQ ID NO: 8529 - DNA, 744 bp, Homo sapiens
  misc_feature (129)..(129): n is a, c, g, or t
tgaaaagctcttggaaagcttaaaaggcctgcatgaggattgcccaccaggtctagatccttatggctgtagtgactgttgctcttctatcagactgcacctctaagagcatgaaagacaggcctgagngggaagatggaaagttatttctatcttggctgaatcctcaggattgagtcagaaaactggagaggaccagcagaaaccatctggtccagtccttgtcttcatgtggttatgatttgcttctaggaatttcaaagcagagagagtccactgctggtgtttcaagatcccgatagtgagtaagttcttccctagagccacctggtgttgctcacaagccggcatgtcctgattcccaatgcaggggaaacgatgccatttcccatccctttctaatttattccctagaactaagaagctacacatagaacaacatgacaagatggattaatcctaatacaagttaaacatccctaatcccaaaatccaaaatccaaaattaaaaagtttttgagcaccaacatgatgccacaagtggaaaattccacacctgacacctttgcttttctaatagttcaatgtacacaaatgttgcttcatgcacaaaattatttaaaatactatataaaattaccttcaggctgtgtgtataaggtgtatgtgaaatataaatgaagttgggtcccatcccaagatatctcatgatgtatatacaaatattctaaaaaaaaaaaaaaa

SEQ ID NO: 8530 - DNA, 708 bp, Homo sapiens; identical to SEQ ID NO: 3295
  misc_feature (47)..(48): n is a, c, g, or t

SEQ ID NO: 8531 - DNA, 743 bp, Homo sapiens; identical to SEQ ID NO: 3296

SEQ ID NO: 8532 - DNA, 718 bp, Homo sapiens
tgccagaagtcatcattggctgttgcaagcatcagctgaccagcattttccaagccaccacaagtgattcagctgcttcctctcctgcatctcctatggaaaagatggaccagacacagtaggacatctagctttaaaaccaagcagccttggcacctcacacaatggccagctatgaacctcacctggatccacaccactccaatttgcaacccccctctcagctccccaggtactatctcctttagccatggtcctttaggcactggaaccggcattggcgtcattcttttcctccagcatggagtgcaacccttcacccactctgccccaaccaccccagtcccacctactacagcatctcctgtcatccctggtgagcctatgaaactatctggagagggtcctcgttgctacagtttgccagtaactctgccatcagactggagctataccctatcccctcccagtctacccaccttggccagaaagatgaccataggacaccgggagcagcagagaagccatcctccagttgctgctgatgctcatcttctcaacctctagcccagggcatacagctgtccactgtgacttctaatttgtgtaaatatttatgtatatatgtatttttactattaatgtgtgcatttgtgttgagggaagataaatcctttctgattaaagaaatttttttatacctaaaaaaaaaaaaaaa

SEQ ID NO: 8533 - DNA, 616 bp, Homo sapiens
tttctcctcagcgccatccattaggcctagcaacgcttgtaggactcactctgggctgtaaccgtggcactggtaggtttgggacaccagggaagaagattcatacgcctctactgatacatgtctgtgtttgcagcctgctctagtggtacaggcccagatgcctggcttgcccatcattgtggccccacccaatcaagggaagaaaggaggaatgctggactggaggcccctggagccagatggcaagagggtgacagcttcctttcctgtgtgtactctgtccagttcctttagaaaaaatggatgcccagaggactcccaatccctggcttggggtcaagaaacagccagcaagagttaggggccttagggcactgggctgttgttccattgaagccgactctggccactggcccttacttgcttctctagctctctaggcctctccagtttgcacctgtccccaccctccactcagctgtcctgcagcaaacactccaccctccaccttccattttcccccactactgcagcacctccaggcctgttgctatagagcctacctgtatgtcaataaacaacagctgaagcaaaaaaaaaaaaaaaaaaaaaa

SEQ ID NO: 8534 - DNA, 689 bp, Homo sapiens; identical to SEQ ID NO: 3299
  misc_feature (53)..(53): n is a, c, g, or t

SEQ ID NO: 8535 - DNA, 736 bp, Homo sapiens
gtaggttattcctgttaagcagcattgcttgcccctggacagctattttaaccatctcaagattctgtctaaaggggttttttgggaagacgttttctttatcgcccctgagaagatctaccccagggagaatctgagacatcttgcctacttgttctttattagctttctcctcattcatttcttttatacctttcctttttggggagttgttatgccatgatttttggtatttatgtaaaaggattattactaattctatttctctatgtttattctagttaaggaaatgttgagggcaagccacccaattacctaggctgaggttagagagattggccagcaaaaactgtgggaagatgaactttgtcattatgatttcattatcacatgattatagaaggctgtcttagtgcaaaaaacatacttacatttcagacatatccaaagggaatactcacattttgttaagaagttgaactatgactggagtaaaccatgtattcccttatcttttactttttttctgtgacatttatgtctcatgtaatttgcattactctggtggattgttctagtactgtattgggcttcttcgttaatagattatttcatatactataattgtaaatattttgatacaaatgtttataactctagggatataaaaacagattctgattccccaaaaaaaaaaaaaaaaaaaaaaaaaaaaaaaaaaaaaaaaaaaaaaaaa

SEQ ID NO: 8536 - DNA, 736 bp, Homo sapiens; identical to SEQ ID NO: 8535

SEQ ID NO: 8537 - DNA, 583 bp, Homo sapiens
aacgtccagcagaaatacagcagaagggcctgactgttagaaggggaccgacaacaggagaggaatagcatcgacatcacgagaaggagtggcccacactggacccccatccaaaggtcaccagcatcaagaccaaaggtagatgaatccacaaagatgaggtaaaccagcacaagaagtctcaaaattccgaaaccagaatgcctcttctcctccaaagatcacaactcctcaccagcaagggaacaaaactggatggagaatgagtttgacgaactaacagaagtagccttcagaaggtgggtaatagcaaactcctctgagctaaaggagcatgttctaatccaatgcaaggaagctaagaaccttgaaaaaagggtagaggaattgctgactagaataaccagtttagaaaagaacacaaacgacctgatggagctgaaaaacacagcacaagaacttcgtgaagcatacacaagtatcagtagccaaatagatccagcagaagaaaggatatcagagattgaagattaacttaatgaaataaagcatgaagacaagattagagaaaaaaaaaaaaaaa

SEQ ID NO: 8538 - DNA, 681 bp, Homo sapiens
tgtctatggagccaagatatgtggactctctcctgaggcacaagcccatatagatcgttacaaccgaacagggttttggaatttgcccatctgcatggcaaagacccaccgttgctgtgatctcaccaacctgacgaaaaaggtgttgccaagggacttcatcttacctatcagtgacgtccgggccagcataggcgctgggttcatttaccctttggtcggaacgatgagcaccatgccaggactgcccacccggccctgcttttatgacatagatcttgataccgaaacagaacaagttaaaggcttgttctaagtggacaaggctctcacaggacccgatgcagactcctgaaacagactactctttgcctttttgctgcagttggagaagaaactgaatttgaaaaatgtctgttatgcaatgctggagacatggtgaaataggccaaagatttcttcttcgttcaagatgaattctgttcacagtggagtatggtgttcggcaaaaggacctccaccaagactgaaagaaactaatttatttctgtttctgtggagtttccattatttctactgcttacactttagaatgtttattttatggggactaagggattaggagtgtgaactaaaaggtaacattttccactctcaaaaaaaaaaaaaaaaaaaaaaaaa

SEQ ID NO: 8539 - DNA, 681 bp, Homo sapiens; identical to SEQ ID NO: 8538

SEQ ID NO: 8540 - DNA, 664 bp, Homo sapiens; identical to SEQ ID NO: 3305

SEQ ID NO: 8541 - DNA, 671 bp, Homo sapiens
  misc_feature (451)..(451): n is a, c, g, or t
ttgtgaaaagtgacacgtaatagtaacctaatagtacattgactgcttaaaatatatgaattattgcatttagttaacggaaataacttcgatctgataatgtctcgagaaacggttaatttattcaatgttgttgcacgagaatatgtatagaatttgagccccctagtagtctagtgactaggattttgttccttatcctgattttcatatcaaatgtatgaaaagaataacaaagcagcactactgagaaatcacttaaggcagcatttgctactaaccacagatcccttaatttaaataaggaattagggttatatatttttgttgaattttacaatgtacatttttaggaattttggttcacattttgataccagaatttacctatcttgctattttttagagagttacttttctccaaactactagtagtactgttcacatatcntaagagagatttctagcattaaatatggaacataaatggagagcttcttagatgctgattcttttgaaaactgaagttttccaatttgatatttccttcaaaaaagttgccttttattggacttatcattagttattctaaattattattaaaaacacatacaatgtatatgtgagacacacaaaaaaaaaaaaaaaaaaaaaaaaaaaaaaaaaaaaaa

SEQ ID NO: 8542 - DNA, 653 bp, Homo sapiens
taggctcaaccctcatatttcaagacatgagaactctgagtgcatgttgaaggaatcctcttctgggttgaatcattccaaaggaatatgtccccataaagcgttgaccattccaagcaaatatctataaggaatatacttgcttattatgttgacacttatccttcatgtaattgtcttgcctgttagcatgaagcttcttggacatgaatatgttctttctaatattcagaacgactggctcttaggacaaaagaatgaatatgtctagaaattatcagctacttagcttcaaatagcaattcacatgaagacagcaacttgaagacatataaacttttttcagaattaattttagggcgcaccctctactcagttgttactgaacatgggtaagtgttaggttttagtctttacatacacatataaatgttacttaggaaatgtgagcaaaaatatattaaataagatagaggttatttgttcaaataacatattcagaaaatataaatgttaaggtcatttttagcaatgttaacacattattcactgctttttcaccaaagtcgttatcagaatgtaaaaactgttaaaacatactgtatgtgtggaatgtgatgaaatgccactccattaacagaaaaaaaaaaaaa

SEQ ID NO: 8543 - DNA, 626 bp, Homo sapiens
tgagcgtggaaattgtggtaatgcaagactagagtaagattgacaggcaataatggttacaacagggggtgagctcagactttgaaaagatattggcttcactccctaatcatcaagacttggaatatcctgggattcagctgttgttgaagggaaaccattccaggtttgccaaacaattgagtgacttaaggggtgcaaagctagaatgcttcaagaatagagggagaagaagccctgctgtgctgatgggctctctatggtgttatcctgtcctggcatttgctaccccgataaactcacaggtgctaaatttaaaggctaaagtgaggcctggcacagtagctcacgcctgtaatctcaacactttgggaggctaaggtgcgtggatcacctgaggtcgggagtttgggaccagcctggccaacatggtgaaaccccgtccctactaaaaatgcaaaaattacctgggtgtagtggcgtgtacctgtaatcccagctacctgggagactgaggcaggagaatcttttgaacctgggaggtggaggttgcagtgagccgagaccgcgccattgcactccaacctggggtacaagagtgaaactccatctcaaaaaaaaaaaaa

SEQ ID NO: 8544 - DNA, 707 bp, Homo sapiens; identical to SEQ ID NO: 3309

SEQ ID NO: 8545 - DNA, 658 bp, Homo sapiens
ctcataacgcttagcacaccagacaccacatggtacattcctagagttatgaagttctaaaaatagggggaatagaagaatacaggctttcctcaattcaaagggtgttttatgttgacataagatactttcacatatcttaggacccaaagaaaggcaaaatctaattaaatgaccattttgagcagaagttgaaattttgcttgagcagcaaaagaatgagttattgtcacctgaacataaaggccatggctgaggggcaccacttttgagtgttctcaagattgaggcagcaagtaagaatctaataaagatctaggccaatatctttgattgctgtgcaacttccaacaagcggagaaagcaatgcaaaaaaaaaagtgatgcccagaaattgacagattgacccagattattccccagctaagtcttatttcagaaagaggtagaattggatatagaaatgtttaagaatatcaactcaacagtattactacttttgcgttaggaatctgtgcacatttggtattttaggcatgtgagttataaataggtcagtcttgacatttcaattaaaatgttaattaactaatttagagttttaattttaagtgaaaatattactaagttttacctaatattgaaaaaaaaaaaaaaa

SEQ ID NO: 8546 - DNA, 731 bp, Homo sapiens
cggaaatcagtcctgctggactctctacttcataaggaccatggaatgaactaaagccatttggtatggccatcaccaaaatggagcagccaatgaagagagcactgttgaacatggacaggagaatgatgcaccagcaaaaaaatcatttaaaatacatgtagtctggctgttggctttgcttttgttttaaagaactaattggatatcatgttagctctcttggtaactcctttaaagataattatttctgtgtgattattccctagtgaatgagaataatagatataactggtaatgaactgaataggtatttatgtaatcagtttctgtcaatatgtattcttagtacttaaaatatctcagtgatacttgtgaccaatattagcttattctgttttacattatatcaatgagtgttatgttacatgatgtttagaaatatagtacatattcaggaagaaaattccaatatgatgttttgctattaaagacacgattgaatattttaatgcaatatgatcacctgttatgttataggtgagaagtactcccccatgcacattctgactggataacaatgatcacttttgtaaacttattctgagtcctaactgccatcttctttcccttgaagagctcctgttggagcaattcaccaattgtaataaacccaattcattctgtaacatattgataaccattgaaattaaaaaaaaaaaaaaaaaaaa

SEQ ID NO: 8547 - DNA, 709 bp, Homo sapiens
cgctcgtggttcctagctccagatggggctgttaaagggttgggacctcacatgcccatgtgtctaggccatctgagtgtgacaagagaaatcactttgtttttgttttattttgttttttagagatggagtcttgctctgtcaggcccaggctggagtgcagtggcacgatctcggctcactgcaagctccacctcctggattcaagctattctcctgcctcagcttcccatgtagctgggactacaggcatgtgccaccatgcctggctgatttttgaattttttttttagtagagatggggtttcactatgtgttggccaggctggtctcgaactcctgtcctcaggtgatctgcctgcctcatcctcccaaagtgctgggattacaggtgtgagtcaccatgcctggcctgttaagtgttaactatggaaacaaaggtatgtatatttagggaagagacagccctggtgtctctcatcaaccactctcatcatgctgcttagtcccaacctttttggcttaaagtgtacatcactttaattactgcccaagtgaggtttggtcacatcctatttgcctgagccctggattaaggcaaaatgagaagggacgtgcttttgagcaggacccactgccagggagtatggaggaaggggaaataatccttgcagggtaaggaagcaaagaaatgaaaaaaaaaaaaaaa

SEQ ID NO: 8548 - DNA, 722 bp, Homo sapiens; identical to SEQ ID NO: 3313
  misc_feature (47)..(47): n is a, c, g, or t

SEQ ID NO: 8549 - DNA, 705 bp, Homo sapiens
cgtatccattttgttgttgctatacagtatacctgaggctgagtaagttataagagaaagaggtggtatttgagcttacagttctgcaggctggaaagttcaagaagcatggcactggcacctgatcaagctttcggtgagggcttttgtactgcatcagaacatggtgaagaaggacaaaggggaagcagacacatctgaagagggactgaacccaaggtgtgtcctggttttacaacaacccactcttgagggaactaatgcattcctttgagaactagtcctgtcttgccagagtaattctctcactaccacaagaacaacactaagccattcatgaaggatctgcttccatgacccaaatacctcccactaggacccacctcccaataccattatattgggaatcaaattttaacatgagctttggtgcggacgaacaaaccatatccaaactatagcaaagacattaatgcttcttcttgtcagagctcatccacacttgatactaccacttctcctcattgcaaatctaagaactatttggttgatacaaaagtaatcatggttttgccattaaaagtaatggcaaaaactgcaattacttttgcaccaacctaatatttgcaaattcttagccatgtgatctggtcaagatgaagaaagggatctgaagaattaatgatttgtaatcaaaaaaaaaaa

SEQ ID NO: 8550 - DNA, 734 bp, Homo sapiens
gcattagggccctcagtagtcatcctgctgtgggtttgcttaatgagcaatgaaggtaaaaagaaataccgaaaccgtttctccatactcagtacctgttccgccacctccacccaaccctgagaaagtcctgctcagaactagacctaagttctattccaagagtttggagaaggggattacctctatctctattatttctgagtagagccaggagaagtctcaatttcatgttccagtagtcttgtaatatagaccttgaatcataaccctcaccccttgagccatgaacacgtttaaatctgcataacttcaaaatcatgcttctggcaaaaaacagattaagctttaaatggatgtcctcaaagatgaactgagaccttctgagtcttctgcagtctaacagttaccgcacctgtctaaactttttttataatgagtacacaagcatatgtgtataaacataaggacatcaagaccccaaccccatcactgaacctagtttgacagaagcttcctggatagcctacacttctctgcatgaatacaactgcatgatacttactggggaagtaagacatctcgaatgagagccagaagattgctgtcagaatcaacactggccttctccttgccatccccaaactcctggttcacgagtagagatgtggtttctgagagcaaccgcaagtaaagagtctccactccacttgaaaaaaaaaaaaaaaaaaaaa

SEQ ID NO: 8551 - DNA, 626 bp, Homo sapiens
tgtatcatgactcttacgctggctccccgagttactcagcaacttaagctcctgtgcctatagtggtcacttaattgacactgaacccgatgctggctccttcccgttccctgtctcacttctccactcctctacaggtgtttgttaggatcacctcccagatatactacttgcacttgaatccatgtcacagggggacatgaatcatgtctctagggcaacccaaactagaaataggatttcatcaacatagtgagtgcttttaactagtcggggttaaagttataaaagtgactttgtgggctctttcagagaactttgcctacagtaaagtcctgattttaggagaagctgatttttaaagtgtataaaaggaccagcccacagaaaaaaatgcaaaagctcaggaaaacatcaacagtaaaaataaccccagtggaccttggcaagaggcagtgatagaaaacaatgtgaaagttttctgccatcatagagctgactggtacagtcaaatgacatgaccaaaaacaaatctctgacacccaatttccattctgggcccaaactccatgctgacttccaaagttacatgtttaagtaaacctaaattgtgaaaaaaaaaaaaa

SEQ ID NO: 8552 - DNA, 643 bp, Homo sapiens; identical to SEQ ID NO: 3317

SEQ ID NO: 8553 - DNA, 704 bp, Homo sapiens
gccaagttggtggatcacctgagatcaggagttcaaagacaagcctgaccaacatggtgaaaccccatcttactagatacaaaaattagctgggcgtggtggcacatgcctgtgatccatgctacttgggaggctgaggcaggagaattgcttgaacccgggaggcagaggttgcagtgagccaagatcacgccattgcactccagcctgggcaataagagcgaaactccatctcaaaaaaaaagaaagatcatgtgactttttttcctcattgcaaactcctattcaaccttgaaaagcccttctccaggaagctctgtcccacctccgtgctggtctgtgttcctacctcactgtcatcctggcacactgcagtactcagatgtgtgatgaatgaatgaaacaatgactgaggctgagtgcagtggctcacacctgtaatcccagcactttcggaggctgaggcgggaggatcacttgaagccaggagtttgagaccagtgtgggcgacaaagcaagaccgatctctacaaaaaatacaaaaattagccaggcacctgcagtcccagctactcgggaggctgaggcgagagatcgcttgagcctaggagccagaggctgcagtgaaccatggctgcactactgcactccagcctgggcgacagcaagacctgtctcaaaaaaaaaaaaaaaaaaaaaaaaaa

SEQ ID NO: 8554 - DNA, 720 bp, Homo sapiens
agaagtagtgccataagacactggcgctttttagacttccaagctagctacttattttcattttcagggttgagtactctaagctctctacttactgtgagaagttttctacattgtagaaattaaaagattatatttaaaatacttctttaggatgttattcagccatcaaaaaaaaacccaactaaaatgtcttaccagtaaagtattattaaaagcctcatttgtggagattcgctgacttccttggttaagctgtcttgtatttacttaatttgtcccctcaaccaggtgttttcttttcagcctgttactgtcctgtgccatttttaaaaatagccatcatgagtaagggcttctttaaaataatccctgacaatatctttggcattaatacgacataaagacaagacagtatatgtatgttttcattcctgttttgtacgagtgcctcattttgtagtcatgaaagtaacatagtaccttaaataaaaatgtaatgactaatctaaggtctaggaataactattgtagaagctaagtagaacacttagtttggggtgtcaattttctatcaacgcaaacaccttagggtacccagaccaattttatgtatatatattctgaaatgctccctttttaatgtggtcatttgttgccttctaagttgagaggacaaaactgaataaagtgaatgttaattgtaaaaaaaaaaaaaaa

SEQ ID NO: 8555 - DNA, 659 bp, Homo sapiens
tctacaatcttgacatttgaaccatgttgttttaaaatattatttgcttggctatcttggacatacagtaattgttccttgtgcatgttaatacctctggtcagaatccggatactgggttctcccggtagttcgtctttagttactaagaaaggggtgtaggacacattagccttctggatacaagtagaagccatcaacctggcccatgtccctacaaacccatgattgtcagggaggtgccagttacagcaggtgattcagctacttgaggtcggtaacagaccttccattcctcactgaaggtggggtttgtgtttttgttttgacctgttactccactggtagtcatctggtgtttgtactataacacagcaagaaaatctcatttatctttatatactctttgcacctcctttttttagtcgagatataaatatttgaggggagagaaatatctacaggtatatatggagaacaaataatgtggtctgctttataagatggccagatctacattaggaaaagtataagccccctccctaatggccgctggggggtgagggcggtgtgttgtatgtctttgggtgtttgtttttttataaagcatataataaaataatcgtgctactaaaaaaaaaaaaaaaaaaaaaaaaaaa

SEQ ID NO: 8556 - DNA, 659 bp, Homo sapiens; identical to SEQ ID NO: 8555

SEQ ID NO: 8557 - DNA, 679 bp, Homo sapiens
gcacttttgttgaggaagtcaggtatatgatttcaagttctgacataattagacatgtaaattagttctagtaaaacaataccttatttttatctgacatataataaggcaatcattttaagcttagattgtaattcaagtacagattcctttctgtgcccacatttttctcaggttctgtgttgcaggatttgcatatactcaaagcatttaatctatagtctatgatatttcagtcacaacaaatatactatgtccatatttatactatgctcaaagagttacactaacaaacttgaaagtgtgtgtacgaggacaagaagggcactcagggacatgaacagtatgagaacttaaaactgtatgacacccagaatatgggaaggccaatgcaagtggttcagttgaggccagaagtttgagatcagcctagccaacatggcaaaatcccctctctactaaaagtacagaataataataataataataataataataataataattagctgggtgtggtggtacgcacctgtaattccagctacttaagaggctgaggcaggagaatcacttgaacctgggagctggagggtgcagtgagccaagattgtgccactgcattccagcccgagtgacagagcaagactccgactcaaaaaaaaaaaaaaaaaaaaaaaaa

SEQ ID NO: 8558 - DNA, 682 bp, Homo sapiens
tggcttggcgcctcaatcttctctgacttctctcatcagaatttaacaaactgacttgtaattgccaaatagaacggaccttcttcagtctgtatgtaattagtggaaagtgcagagtctctggggccaaacctaaagtcccgcttccttcagcggagtaggatctcaacaaatgtaattcctgctcctggacttccctaagggaaatttcatcccttcccatagtttcattctctaccctatgcaatgattcccaaacctctaacactcaaccatgtcagtggagcattaatactgttcaaggcactctgcaatggatatatggataaattaactatggcttcggcgctccagaagcatgtggtttagtaagataaatagttgcgcaatacagtgtcacaggtgctatgaaggaacatgccaggagcacaaagaaaggaataatgattcccatatgacctggagtggacagggaaggtcttacagaggagaaacttgaagtgaatgaatattggaagtacttatcaggtagcagaggggagacagctatcaccacatgtatcaattcttaaaattaacagaagagaatatttgaggtaggaaaccttagaacatcatttcagtggaccaggtgagggctatttaaggcctgaactaggagacagtggaaaaaaaaaaaaaa

SEQ ID NO: 8559 - DNA, 637 bp, Homo sapiens; identical to SEQ ID NO: 3324

SEQ ID NO: 8560 - DNA, 737 bp, Homo sapiens
tggaacaacagatgctgcgcaccatctcgtgatcctgttcctcaacaagcaagatctgctcgctgagaaagtccttgctgggaaatcgaagattgagggactactttccagaatttgctcgctacactactcctgaggatgctactcccgagcccggagaggacccacgcgtgacccgggccaagtacttcattcgagatgagtttctgaggatcagcactgccagtggagatgggcgtcactactgctaccctcatttcacctgcgctgtggacactgagaacatccgccgtgtgttcaacgactgccgtgacatcattcagcgcatgcaccttcgtcagtacgagctgctctaagaagggaacccccaaatttaattaaagccttaagcacaattaattaaaagtgaaacgtaattgtacaagcagttaatcacccaccatagggcatgattaacaaagcaacctttcccttcccccgagtgattttgcgaaacccccttttcccttcagcttgcttagatgttccaaatttagaaagcttaaggcggcctacagaaaaaggaaaaaaggccacaaaagttccctctcactttcagtaaaaataaataaaacagcagcagcaaacaaataaaatgaaataaaagaaacaaatgaaataaatattgtgttgtgcagcattaaaaaaaatcaaaataaaaattaaatgtgagcaaagaaaaaaaaaaaaaaaaaaaa

SEQ ID NO: 8561 - DNA, 669 bp, Homo sapiens
aaagttgttaaacagcaggccactgtcagcaaagcctggagaagtgggccggaggctccgcccccatcatgtgcctgccaccccttcccagtcatcccttactcttacagtagcaaataagacgcctgtctaatggggggagacaaatgtgtagaccttagccaccttggccagggctgactccttgaaatttctggatgatgatgattgtttatttaatagccagaggctcatataattggcctctttggaagaggcctcatggcctccttactctcaccaaagcaatttttccctcaggggggctcccatgcttcttacacagagaggcagctgaggcaggacagtggggctaactgtagaccaggcgagggcacgggctgctggggtggccctgcttccccagtgtacatattgtatctgtgtaacattttgtatattccaggggggccgccccctgtatcatacctagcagaggttggagctggcacatggggaggaggttctaataattatttggggctgggaaacttatttattgatagcataggacagaggaaggaggcggggatggggtcgtggcgccctggtgatgcgactcctgtttattttgctttttatttcggaataaatggatttagccataaaaaaaaaaaaaaaaaaaaaaaa

SEQ ID NO: 8562 - DNA, 734 bp, Homo sapiens; identical to SEQ ID NO: 3327

SEQ ID NO: 8563 - DNA, 798 bp, Homo sapiens
gcggcacaggagattcatactggtgaacaacccgtaatgaatggcacgaaatgttggaaagtctttcagcgcccattcttctctggttactcataagagaacacaacagtggagaaaaaccgtataatgcaaggaatgtggaaagccttcagtgcgcactcttcccttgtactcataagagaacacacagtggagagaaaccctatacatgccatgcctgtgggaaggcctttaatacttcctccacactttgtcaacataatagaattcatactggtgaaaaaccctttcagtgcagtcaatgcgggaagtcctttagctgcagctctcaccttactcgacactgtagaatgtgtaatggaaaatttagcaaataacccaaactcaaaatgttaattctgattattctgtatcatcacccagtacctttgtactttgagtcttgtgttaaatatgctctgttagtttgtatggaatgagtagttgcaattgcactcgcaatttaactttaactatgcctatcgcccttcgcctgggttcgtagtattggattattgtattgtgaaggtaatgtggttgtgatagccccgcagcaagattattttttaaaataagaggggttatcttacatcagagtgataatatttctctaatgctatccctcccccctccccctaatgtaaatgacgagttaatggtgcagcacaccaacatggcacatgtatacatatgtaacaaacctgcacgttgtgcacatggtaccctaaaacttaaagtataattaaaaaaaaaaaaaaa

SEQ ID NO: 8564 - DNA, 833 bp, Homo sapiens
  misc_feature (158)..(158): n is a, c, g, or t
  misc_feature (357)..(357): n is a, c, g, or t
  misc_feature (364)..(364): n is a, c, g, or t
  misc_feature (405)..(405): n is a, c, g, or t
gaatggaggctcggcgagagaacaaaggcgcagaagagaaaaacagtgagaatacggagatggatacagaatggcatttaacatgttcattttgtaaatttcgaacatttgaagaaaaagatattgaactgcatctggaaagttcttcacatcagganacattagatcatatacagaaacaaactaaatttgataaagtagttatggagtttttgcatgagtgtatggtgaataaattgcaagaaaacagtctattcggtaagcaacaggacaacaataatcacaacaacgaagtaatgttaaaaatatattgagaaaagagtagtgtatagggaagagtgtgtatctcgtatggantagagtncaccactagagtgaaagggtatgagagagcacgtgtcactntgcgacagcggcgttgcgacagtggtggtataaaattcccctcgcgtttaacacaatatagtgtcacagtgttcacagcacagcacaccttataaaattcttccttgagattcaataattccaaagggaggaagccagggcctaattaaagggaaccaaataaaaagagagagtgtcttgactgctacaagcattttaaataatccaatagtgaaggcgcgatatgaacgttttgttaagggtgagaatccttttgaaattcaagaccattctcaggatcagcaaatagaaggagatgaggaggatgaagagaagattgatgaacctattgaagaagaggaggatgaagatgaagaagaagaagcagaggaagtgggggaagtagaggaagtggaagaagtagaggaagtgagaaaaaaaaaaaaaaa

SEQ ID NO: 8565 - DNA, 675 bp, Homo sapiens
tccatgaaggctcttcctgatctaacgttctgccctcctcttcagccactgcccaaaaaggatcccgaacattgctcacaatactgaactatcgtttatgatgatagctctctgtaaaatttatacttttccattgccgaattcagtacgagcttcttgagaaaaaaactgtcttacttatttctcggtgctttgcactggacctgatatttaacaagcactcaatatttacagaatgaatgtgtgagactcttttaaatcagtatgtagtcttagctatgcagatttataactacagagtgaaaaaaactattatctagaaattagcttaaagaactaagagtgaaagaaattgaacatcttaatttagccttacctagaccctgtggaaacccacggccacagtatacataaaggtcctccaaaataatggacagaccattcctttttcacaaaggtcctactaaacaagcaggcaccacgtgggcctatgcttgtaatttaatcctatacaggaaggcacggtgttctgtctcacaggtctgacatacttcacccttttgatagaaatacctcacactgggataacccaaagattccaaatttcacatgcttacagcttctgatcccttggatagagctctgctacctgccgataggggaaaaaaaaaaaaa

SEQ ID NO: 8566 - DNA, 733 bp, Homo sapiens
  misc_feature (3)..(3): n is a, c, g, or t
  misc_feature (71)..(71): n is a, c, g, or t
ccnatatggaatggtgagaagagaaacatggcaggtagagatcaaatgatgaaattcccagtgtatccagntggaggtaagcaataaagcagagtaatataactagatcattattttagaaagattgatgggtggcagtctggaggctggactgaacgcagcaagactagaggcaaggagactaaacaagtattcattacagtaatttaggcaacaaatagttatagcctatctatggcagtggaacagatgtaagaaatatttaggaggttggatcaacaggactttagtggttaatggatgtgggaggtaaggcaacatggacaaacgtaggttgatagccaggtttttagcttgggtggatgctgctcattaatacagagaacacctcgacaggtgtaggtttgtgggaaaaaaatctagtaagtggagaggcaagtctggtgcccagaagagttagaggtataatgattacacaggttactaatcccttattattagtggaaagaaggaagaatatctatcagccaacaaaagaaatcagatattgaagctcctcactctaacaacttgaaaatatttgctttttggatcataaaaaggtctaattaccttcacgaatgatggcgctatattctgtgtttcagctaatctctcggaggtagactggagacgtcgtgtccttgatttcaaagttttaaaaccccgagactgtatgaaaaaaaaaaaaaaa

SEQ ID NO: 8567 - DNA, 732 bp, Homo sapiens
attcttaagactgagagacttctctggattcagcaattcaatcacatcactagcacttttatttacggagtaagaagttaagatgcttacgcattctggtgtttcacaaaagcagtagtaagagtttcttgtagaatgtttccattgattatgaaatgttaaatacccaccatacaatagagatagaggaatagaagaattctaacattgtttagactatttggtgtctttattagactcatgctgattagacaaattcaaaataaattcagattaaagattatatattaaataatgaataggcaattacgatatatgctataagggaaacaaataacatatacattccattgggaagtccacaaccctaaaactaaaagtctcaaacccaaaagtttgcagatttgctttttatttaaaaactgaggccaggtacggtggctcacgcttgtaatccctgtaatcctagcactttgggaggccgaggcgggtggatcacctgacgttaggagtttgagaccagcccggctaacatggtgaaatcccatctctgctaaaaatacaaatttagccaggtgtcgtgttgtgcgcctgtaatcccagctgcttgggaggctgaggcagcagaatcacttgaacctgggagtcagaggttgcagtgagccaagattgctctattgcattccagcctgggcaaaaacagcgaaactccatcttaaaaaaaaaaaaaaa

SEQ ID NO: 8568 - DNA, 710 bp, Homo sapiens
gatttcgagtattagtactaccttaggctgggcacggtggctcatacctgtaatcccagcatttttgggagccgagccaggtggatcaccctgagggtttgagaccagcctggccaacatgtagtgaaaccctgtctctactaaaatacaaaaagtagctgagtgtgttggtgcacacttgtagtcccagctacttgggaaggtgaggcaggagaattgcttgaactcgggagatggaggtttgcagggagctgagatggttccactgagctccagcctgagcgacagggcaagactcttgtctctcaaaaaaaaaaaaaactaccttaaacattatatagatccactttctcactttagaagcaaagaaaggaaggctcagaacttgctgccattagtaaggatttcgtgagtggggttgaaaacaggccccctctctcctggtctgttgttgccagcactgcctctgaaccctacgcctgttctcctttagcagacaggtgataactcagaaaaaccaagtcccttgtccaatggccgctagtgactcagtggcagagtaggcacgggaaccggcactcctgacagctccagggctctgaccactgtgcccagtttcccctttccagctctcattcagctagagacagataaattccaggcaactagtgaatgtgccacctgactttcagatgggaagaggggagcat

SEQ ID NO: 8569 - DNA, 616 bp, Homo sapiens
cttgattaacttagccaataattgtttttcgctacctacgtgcagaagaaaaatgatacaaaggggtagaacactaaatccccacaaaattttaaaagccaaattttacacccctacaatattatcatttgctaccagtttctttctgacctagtcagatgtaagaggcctctaactggatccaggccagttagttaccagattaaatccattcctagaccctccagtttgtgtcatgacttccaaacccagtttggatcagaaatttgctcaaagaaactcagagaactcaaaacacaaatccactggacctccaaaatctgagagagaacttacccactatctccagccgctccgagagattagtggatacaagtgggtcctgcagttaccttgcatgttcactcagtgctcctgggggtcattagaagctcttcttcagatcccacttctgacaccatctgtcaaaagaaaaacttcagccaaattaaatttaaaggactttaattgagcaatgaatgattcacaaattgggcagctcctagaatcacagcagatttagagagactccaggggtgccttatggtcagacaaatttatggacaaaaaaaaaaaa

SEQ ID NO: 8570 - DNA, 665 bp, Homo sapiens
tcttgagccgcaccgcggaccctgactcgcaggcaggccgacccggactttgcctctgaggtgatgagtgtgtctgactgggaggagtttgacaactccagtgaggactaggctccctgtgcctggcatcagagggaagggaggctggggctgcagggcagtgaaacccacgcagcctaggccagagcactttactccaggcagggcccctgcccctgttggccacagcttatgggccctgccctctttcttcacaccagccccttggccagcctgccgcaggcatctcagggccgtgcagatcccaggctgtggattacgtcactgcaggaactgcttctgaaaggctttggacttcctcagtgagccctggaggggttggccttctctcctccctgcctagatcagtccttctccaaaaggacctgggagctggcagcctgggcaggggggctgaggcacgtggtagccctctttctgtgaatggggtggggctgtgggggcagctggggttggaggatgagagctcctgaggggcagaggagcagagatgcatcagctcgcctgggactggctctgtgataaaaagacccctcccgctgggttttcagaccccatgttgttggtcaatgaaataaagcatcttacagaaaaaaaaaaaaaaa

SEQ ID NO: 8571 - DNA, 777 bp, Homo sapiens
tcacacctctgagggagagactgctccccagagatttgaatttaaagtgcagaaccagactttcaccccagttcttctgtagggactttgtgtaactcagataagtctctggtatggtgatcaggctttggcttgcccatctgtaaaatggatcaacatatgacttcattaattctctcaacatcagtgtgaggtaggtgatgtctcaatagatgctgttagtgttttcatttgttagaggggaaaactcaggctggggtagatgaagcaacttgcctaagattatccagtatgagaaatggcagaactgggatttgaaactgaatctgtctgactccagaattcacacatgtggtcactgtgctactatgatggttctgagaaggtgggccactgactatccacaactgtaaaatgggcagattatgagactttgggtgcatctgtacaatgtaattccgtggagatgatccaaaagacaaagtgcatctagatacactgaggtggaaagcaccccacccgcacacgcgtgtagataacgtgcacattgaacacattgtgtgtcctctgttctttggcttcaacaggacagaaattccaaagccacccaagagaaatctccaggctctccccaaaggcaatggccgctactcttggggagagggagaaacagctggggtagcctctggaattttgccagcatggagatgatcctgtggaacacacgttccaaagttttttcaactttataccagctctgaggtttaaaaaaaaaaa

SEQ ID NO: 8572 - DNA, 761 bp, Homo sapiens
aggcacgcagtggagctggattaatttcctgtcacctaaagcttcacggtctcaagtgtttacacatgagatctaaggcagaaggcactcagcagttttggttatttttgtcttacagggtcgatatgtatatagaaggtagggcaggtttgagtgaaaagcttcttcattgctcattgcatccacctgaggaaaaagatgcaaagcttgccctgatcaaagagggaacaacaagccattatttccctgtctttgaaaccgtacctgggagcttctggataactaaacacatggagcttcttggagggtggcctgtccaggccttccccagatctcgccctaggcatttcttcagcttcttagtggctacgtgatttgagcttcaaaactacaatagagaattattcagtctgatatatggattaccacttaacaaggataaagtaaatctaaagtcacagtcaatactctgcctcaagtggaaactgtgatgtttctgtctggatcactgccaagtttgcagaacaagaaccaaaaatcaagagagaagaacttcatttggttttaaggatgacccacagcaaagtttgtacaaatggaaaggggtccaatgagaacctcgaacttaatgtactgtgaggctatcttgaaaaacaggctcctgggcctctgctcttatgctgcttcttttatgacaaacaacacctttagatcacatgacaaaaaacagtaacacaaaagactacaaaaaaaaaaaaaaa

SEQ ID NO: 8573 - DNA, 755 bp, Homo sapiens
agggacactaaagaagctagagggtagcaaaaaataaaaaaacagagggtagacaaacggactaagtcgaaaactgtaaactgagacaaagaaggtcataaaataaggataaaatggtcaagtcatcaaggggatatagctatttataaaatatatgcacctaatgttagagcacctaaacatataaagcaattactaattaatatgagaggagagactgaaatgcagtaacagtaggagacttcaataccccacttgcaacaatgaacacattatccagacaaaaaatacagaaacattggacttgaattatactttagaccaaacagatctggcatatacagaacattccatccaatagcaacagaataaacattattctcaagcacatgcagaatattctccaggatcatatgttagaggtcatacaataagactttaaaaatgtaagcggaggccaggtgtggtggctcatgcctgtaatcccagcactttaggaggctgaggcaggtggatcacttgaggtcagaagttcaagaccagcctggccaatgtggtgaaaccccatctttactaaaaatacaaaaaattagccaggtgtgttggtgggcgcctgtaatcccagcaacttgggaggctgaggcaggagaatcacttgaacctgggaggcagaagttatggttagcagagatcacaccattggactccagcctaggcaacaagagcaaaactccatctcaaaaaaaaaaaaaaaa

SEQ ID NO: 8574 - DNA, 413 bp, Homo sapiens
atccacgtttggagggagtttcttaacccgtgagctctaattggattcccagtgtggtctgagagacctgtttgtaataatttctgttctttggcatttgctgaggagtgttttacttccaattatgtcatcaattttagaataagtgtgatgaggtgctgagaataatgtgtatcctgttgatttggggtggagagttctgtagatgtctgttagatttgcttggtccagagctgagttcaagtcctgaatatccttgttaatttttctgtctcgttgatctaatattgacagtggggttcatgggtgcagcaaaccaccatggcacatgtatacctatgtaacaaaactgtacattctgcacatgtaccccagaacttaaagtaaaaaaaaaaaaaaaaaaaaaaaaaaaa

SEQ ID NO: 8575 - DNA, 770 bp, Homo sapiens
gtatggcacaaggacatatgtccgaaaccctgaacaataactcatgctatttctcatctgacagaagaaaacataaatctgtgaatgagattcaatgtctgagaaattttctatctataaatgctttcatgacaaggcccagtcagttatgcaattacactcaagggtgcatgcactatttgtgatgttgttttgtaggcattcaatgaggtaatacaagacaagtgcttggttcaatgcttggcccacaggaaatacttaatgaattttagctatttctattactattatttgcctacatataggaatcctcttttagccaaaaggctaggtagtgaaagatttgctcataatcttggatataattaccatatcattcttcacagtatctgaagaggcagacttcagataatagcattatcattattgaaatctgggaaaacacagacactaaaatatttgcaggcatgtttcaattactcaagtaggttagaagcagaaaaacatattctttatttcctgtattttcaaccccaggtttaaatacgtcacttttacatgtttttagtttttcaaataactaactataaaaaggaaaactgttttattaaataaaatatacaaaagtaaaccagaccactctagaatctgagcaaaggaagttttgtgggcttctcctggatacttctccccttccccatcaacagacaagctagaaaaggagaaataggtttgtttgaacacttctcttttacaaaaaaaaaaaaaaa

SEQ ID NO: 8576 - DNA, 678 bp, Homo sapiens; identical to SEQ ID NO: 3341

SEQ ID NO: 8577 - DNA, 510 bp, Homo sapiens
actaagagacacctcgcacacagaccaatccctgtgttaaagatgtacatatacgacagctgacaagacatgccctcacttaagtctacagttcaacaccgtttctgcataaaggaacagatgggaataagaggaaagaggacactgggctacaggaaaaagcagaagaagatagagcatgagataagaagaggtcaatgggaacgtctagacccctggcaaaggctgagaagggcagggtgcagaaaggcaggcatccagcataaagaaagaagcaggtagaaagttccctgagggcacgtcttgcttgtcattctgtttgcagtatttactcctctgccaaaaagttgagtgctaagaagttgattttcatcattgaaaataccccttccccttctttcagttgacagtcctttgtactctgactgcctaagtgtacttgtattttttactgtcagtaaatgctttggagaagtcttgaacactaaaaaaaaaaaaaaaaaaaaaaaa

SEQ ID NO: 8578 - DNA, 686 bp, Homo sapiens
ttctgtttgacatgttctcagatcatcgggactatttcgtacttggtaagcagcctcatcaggtaacggcccacagtattgtcagctgacaccttttccagacagtacatcctctgcatattgctacactgtactcagggcatcctggatgtcgagctgatgcccctcctacttgctgcaagtcacttgagagtccaatcactctgttggggctaaagcaggtcttcatgatcaggtcaactccgatgcgttcagtgtctgtagtacgcgtatttcactgtcagaggcgtgaacatcactcccatggtcctcccagggactcccattaaagtgctgacgtaggctttgatgctcatgcgtccgttctggagacttgtgtccacagtgaggtggatggggttgggggcctctcggctgtagtactcgtggatcagcacagagtgctctgtgatgtcatggcccgtagcgtaccagcccaggatgagctcatttggagaaacttttttatgcagttcataagcatattcttagcaaattccatgtcaacagccacttcatcttctgactcattgtgcggcactgaaaagcaattggtgacctccactgagtgtttgtcgacagttcccaacagggtcccgataactcgggcagcaccctcgttgcgtctctcgtagctgtccacaatg

SEQ ID NO: 8579 - DNA, 662 bp, Homo sapiens
  misc_feature (24)..(24): n is a, c, g, or t
ctgctagccaaggaaaattcctgnctggcccaaagatctttacccgaaaccattctcttgaattgtcatgctgacaatgtaaatgaatggcttatcttgacaggcagtggacagacaggcctgggagtcatccctccactcgcctgaaacaaatgcatatttgactgcttcctctactgtgcaccttatcttatatacaatccagattcactgagcaggagatgagcttcctctaccctgagtaccttatctaatatatacaatccagattcactgagcaggagatgaacgcccagttgagtgttcctctaaaccctctcctgtcacatctaaagtgcgaattcagtcaacactgattaaagcctggaaagaaggaaactacttcatttattcacacttcctttttcttttttcctctaatgcccactgtttcccttttaaatattgaagtctcccaaccgtctttggaagaagcacaaatctcagatgctcctgtcatctcgtgttcctttttcccaggtgcatcctcaaccttggcaccagaaacatctacattgattgagacttggctccagtgctttttggttcacacttatttataactttaaagatttctccccaaaaaaaaaaaaaaaaaaaaaaaaaaaaaaaaaaaaaaaaaa

SEQ ID NO: 8580 - DNA, 743 bp, Homo sapiens
gatggcagccggtcaagaccgtcacgtcgagattgagatagcagatcagctcagccatcaccctcatgaccctaactgttcactgtttgtgtgactttgcactatgtgatctgcctgtctaccttaatcaaaggatctagagaatcaaatactagtacacttagtattctgtcttgaatatcaacaagaatagggccatttgttagttatttgaatacactggaagaaagtaatctgcatatgttgtttttaaatttgctacataaacccaggacacatgctagtgatggttgtagtttctatattttatttttaggaaatgtctaaaacattacagcagttaagtcttatttcattcagaaagctttatctgactttcccttaaaaccgaattacctcctgtatgttgccatattacaagaagttaccctagaactaggcatttctcctgaaattttcattttatagtcagggttaacttgactatattctgcactagagtgattttaggctgataaggtcctttatgagcagaggatggatcttatttataatttttacccgtaatatctaatatagcacctgaaacaagtttaccactcagtaagtatttcttgaatttgttagtataaattcctaatgtacattgtgctcttgtcctgtgactagtttgaatgtcccatttttttgttgtctacatttataactatttactgtatatctactttggtataatatgtgta

SEQ ID NO: 8581 - DNA, 173 bp, Homo sapiens
ttggccaaacttggagactatttttttacaatttcactttacgtggaccgttaaaatcactttaataataagagcagagagaagggagagcccaagaaaaaagaaggaggagaaggaaaaaaaaaaaaaaaaaaaaaaaaaaaaaaaaaaaaaaaaaaaaaaaaaaaaaaaaa

SEQ ID NO: 8582 - DNA, 709 bp, Homo sapiens
ttccctgcagcaacttccacttctagtagtatggatagcagcattatgtggaagaatgatgagtttcctccaggacatcaggggttatcatctataatttaatttgccgccgcaaggagtgccgccgtgctctagacagctacttatattatctgctgcatcacatacaacattgttgtcaacgacatcacatctgaaggatttcgtccccaggggtcgagcgccccatctcatgagactcaatatcaccacccccatgagcacagggacgagcacgaggatatatatgctccgtgctcctttaaatagtgagaaagaggagagatctcaagaggcgttacgcgcaagtcgccctcaaggtctcaccgcttggaggaaggcagacctggtactagacaattctaatgaaccctgagtgtcttgtggctgagtcacctctcaggcttcagtcagatctcaggccattaccaggtgagtatctgtcttcattcagggtggatgaacgagggaacctggaaaggaacacactcatcgatatgtaaattgaagcaaaaataagtctactgtgtgctacacacagatattttcattaaaaagtgctggtcatggccgggcacagtggctcactccaggagttccagaccagcctgggcaatatggcaaaaccttgtcactacaaaaaaaaaaaaaaaaaaaaaaaaaaaaaaaa

SEQ ID NO: 8583 - DNA, 731 bp, Homo sapiens
ccgagaatttagtatagatctcagatctaggcttaagttggggacttcactttccctgggagttatgatatagtaaggaacttaggttcacactgctgccgtatctacatgtggatgggacatttacatgtttttctagctgttgtcaatctggggacagtgctggattacagtatgcctctacagctccccagagctttgggggaaaggattatgtgaaaggcatgtggttagaatgatccatcttgctaatagctatctgaagttgctatatcattttcagcagaaatcactaacattagaaatagagtcctgtagactatgctgagtggccctgcactgtcagagactgaataaaacaggaagaaaatggaaaagtgaaaatgctttcaacacatttagctattttagtttctctgtgggaataaaggttcaacttagaatgaaagctgttagcaggataatattttaaagggcaggaatacatttggaggaatttcaagtggtcttgatattgggccaggttttttcctcccttactgaactatacatgccaatcatggtgcctgctagcctacaaatcctactaatgggaactgcttcagctttaagggtaggcccaggcagccatcggccacatgaccacttctgagaccaagtgcagacatctgacccaagagcttaactctgacatatgatgtggcttggaacaacaataaaaaaaaaaaaaa

SEQ ID NO: 8584 - DNA, 720 bp, Homo sapiens
ggttcaccattttgccagcttgtctcggactcgcatctcagtgatcctgctcgcgttggcctcccaaagtgatgggattacaggcatgagccacgtgcccggcttcacacccatttctttaaaaaggatcccgtagcaggcagtaaagccccttccatcctgctcctctgatactgtgcccccttggagatatttccgtctctccacccacgtgtctgtggctggaactgcccagccctgctcctggccccctggaagcctccccacagctggtaatctggacttaaggattgctgggccaccgcctctctgcctaccaccattccatatttaagtggagcccctacgtagaaaggccccggggctttattttagtctccttttcagggatgtcgtgggcgggggagggggttcttggtgctacagccctctccccacccctaaagggacgccgacgctgtttgctgccttcaccacatattagtgcttgaccctggcaggggaccccatggaaaagatggggaagagcaaaatacatggagacgacgcaccctccaggatgctcgctgggattcccacgcccaccactgtcccccaccccatggctgggaggggcctctgaacggaacagtgtccccacagagcgaataaagccaaggcttcttccccaaaaaaaaaaaaaaaaaaaaaaaaaaaaaaaaaaaaaaaaaaaaaaaaaaa

SEQ ID NO: 8585 - DNA, 718 bp, Homo sapiens; identical to SEQ ID NO: 3350

SEQ ID NO: 8586 - DNA, 798 bp, Homo sapiens
aatttcagaagggccacggaccacataataatagaaatctctagaatcgacatatagtataaacttagcagagctgacaggtttctgttatctgcattaaaattacacgttttgcccaataaataattatgatcccattccaactgtataattgacctgttataaacactttcttataaaacttaaagcatttcataaatatgatctatcttttagttaatgaaaaacgactatggtcttcccttactagaaattccctaagaacagagcagtaaaataaatggtgcagagtaacttagtcactaataggatctcaactcataaatacaacttctagtttaacgcattgctaaagacaaataaaacaacaccaaactgttttggacaacaggaagaaaattaaaatgagaaccagggaaattttatttttggttttcatcatcatcagtatacacattatagcatatccacatcctcaatgatctcctgggtggtgaacaaagttagttaaaccgctaagctcctcttaatttcctgcaatgctgtaaaggtacatatacacatactgaggctaacagactaaagataattacattttatcaattacctcttgtaaggcattccacagttcctcatccgtgtgctcattaaagggatccaggtttttcctcattgttccagtgaacaaaacaggttcctaagtgcccaaaatagtcacggtcattaccacagactcttttttcattttattccaatgctaacatcaacaatagaattaagataccaaaaaaaaaaaaa

SEQ ID NO: 8587 - DNA, 696 bp, Homo sapiens
  misc_feature (194)..(194): n is a, c, g, or t
  misc_feature (201)..(201): n is a, c, g, or t
agagggcagtcatggggcccaggaccaggccactggccctgctcccccagccgcaggcctcacctgcaggtgctcctcgatgtccttgcggtcgtaggtgatgccactgggcgtgatgcacggctcccgcatcagctcaaagctgatcttgccacacaggtagttcggggatgtctcgctttctgtggcacagngggcacnacggtcagaggctgaaaaggggcactgcacgagcacctgccagccatcggcagcaagcgacacacactcaccttcctcttctcatccacctgagaaaaaagctcgtccatgtccgccatgtacttgtcctgtgaagagttgagtgctgtgcttgggggagacaccccacctccctcctccatggggcacagacccaacacaaggcggggatgcttccacgccacgtgcacacacacagacccacatgtgggtggggggcaccctcacgtgcttggcctcaatgcaggcctgctgggcccggacgtggctgtcgtcctcatcaccctcgtggtttcgctggcactcttccagctccctgggggttgaccaggagccggtcagagatggacctggccagatgtctgaccacaccccaatctcagagctaacatccacacttccccacatttcctgcttgccagtaaagccttcgataaaaaaaaaaaaaaaaaaaaa

SEQ ID NO: 8588 - DNA, 729 bp, Homo sapiens
  misc_feature (74)..(74): n is a, c, g, or t
aatatggaggcagaaaggaacagagacaagcaggaaccaaggtgtcattgtcccatgccaaatctaaggttttnattccataatatgttctttatttggagttagaacaaagttggtgattatttattctgttgatttccagccctgatgcatgacacctgggaaggtctcggcttgattcagcaggtgttgcaaaattcttaaaatacccaaaccaaaaacagctaaaaatatcttaagaatcaactatgacttcctctgagtggagagtgactgggcacagtctgactatgtgctaccgtagtgaatcactgtgaacgcaaatgagtaatggcaggctgtgtcatctccaagctgaaaaatgtgataaaacaatcaaagagctactgcaacaaaccaagggatgagtaacacatacgggccacatggggtagggtttctctgtggaaaaggggaacggggacatctcatgttttccacagcagatatcacctggatccttagcaggagattttctgagacagctttcagcacttctagttggggttttatcttcctgtacagagaaccttccagaagtagtaaccgtggagctgactcgtaagtgaacgttgcaattgaccatcaactgggccccaacacacgtttaatatcatgtcaattctggttaattggggcttattgcaagcttgacgggtggactaatgaagaattaatctaaaaaaaaaa

SEQ ID NO: 8589 - DNA, 694 bp, Homo sapiens
tcaataaacccagttcttttctccatttctttaagtctcagcttagacatcatctctcaacctgggcatttgctcactactgtctaaagtaagtttctccttttccccacctccgcaagtctctatttcaatcccttactaattttcttcagaatattttatgatatgcaatttaaacaaatttttctaccaaatttcattctattttcccattgcaataaaagctccatgagagttggcacagtgtccgccttaatcctcttgatcctctctggatttgggtgttagctcaattcccaacatctataggtatgcaattaatatttgttgagtgaactgaaatgttaaatgagttaaatttacatacctcatatagttttatatatctcatacagatttggcctatatgaaagctaagcctgtggccatggttaattggcattatttcctaaaagcttaggctaattaacattattatgtacatctatccttcaatctgatgacaaaaataatgaaacctttacaacacaatgaaaactgtttttttttctaattgtaaattagagtcatcttgcataatatagtcgttcaataaacatatcagcatccaattttgcacaatacagtgtaagatttagaaatataaaatatccaccctctaggaaaaaaaaaaaaaaaaaaaaaaaaaaaaaaa

SEQ ID NO: 8590 - DNA, 726 bp, Homo sapiens
ccatagtctgatccctgcagaaaccaggtggttcaactgctgcaaacaagcaagtagtaatctcaattgcagctgctgtgctggatgcagcagttttgctggagcagattaacacagcctctggcataggatatgcacacatttacctagcacatatattactttttgtctctcaggaaggagacacataagcagttttcattcatatgagacataggagagtgtattttcatagcctttcccaggtctgtgttaaccctttccaccttcagtcatgatgtagtccacaagggatactgtaatacatactgtaaatattctgtagagacatacagatattcatattcggccacagttggaatagaaaatatagattcaatggagagcttaggataggaaccaggaagagggaaccaatataacctgggttaaagaacaaccatgtgggctttccccaaggaatggggttgaataaacctttggaaattcaggggcctaccaccccagtgaagcttgtaggggtctgggtctgctgccttgacggagtgacagaaaggtttctcagagacacagctgaggtgccagcttggagatgacccccttagaagatgggacaccattttccaggatatgtctggtcaccagaccatccatctagtggtgaaggccaggaattcaagactagcctaggcaacatagtgagacctgtctctaaaaaaaaaaaaa

SEQ ID NO: 8591 - DNA, 710 bp, Homo sapiens
ggagctgccgggaatctagacttggatctgccagttgttgaagttaatgttatggtaatcaaagggaggagacaaaagacagaaaaatggaaacccttcagaacagtgaaaggtttcatttacctttggtaaataaaagtgtgttcatattttcacaaggattcttctatttcaccagcttacaactcaaaccgggctgggcaaacacgctgcgatacggcggtcacggctgtaatccagagagaatgctcagaaatgggaaacaaaaacacaaggcaggatgcccctttgtgctggaagtcagaatctccatgtgttcttctcgctgcccgccgaggtctgagcgggtccctgctgtgaatgaccccgggaacggtgccagagtcacacagacttggtgcagacaacagagctacctttcaggggctctgtgtccttggacaggtcactagacttctctgaacccgttcgctcatttccagaaagggataagatctctcttacagttcatggggtgcgcaagaatgatgggtgccaagcccatgaccccaggttctggcaaggaatcggcctctccaaaaatgatggtttttattattctcactattctagaaaatgtctttgtgaattgtttgcttgattgaaacggtttctttttaataaaatcttgattttaaaaagccaaaaaaaaaaaaaaaaaaaaaaaaaaa

SEQ ID NO: 8592 - DNA, 774 bp, Homo sapiens
ccttaatcctgtaagcatttatatggagattactttatgtaactctgagaaagataagagcccctcccaaaacaacttcttccttgttggggacaagaccacatttgtaaaactaacaaattagtcataagattagaaattatggctcaggagtgatgtagccagaggccacaagattcctaacctctccaattgctcctgtaaataacatcactattgtaaaacctaagacttgtgtttgaggtatttttcagaccctgcaatcagatggaccagctagcaccatccataccagtaaactggctcatctggtcttgtggcccccacccaggaacagactcagaacaagaagacaagttttgactccctatgatttctccccaacccaaccaatcagcattccccattccctagcctctgtcccccaaactatccttaaaaaatcctagcttccaaattttcatggaggctgatttgagtaataataaactcctgtcctttcacttggctgagactgcgattattaaattttttctctattgcaaaaacctgctgttctcagtgcactggtttttctaggaagcaggcaagattaaccctttgggggagtagaagactataattttatgaacttggtgtttcacactaccaaaataggtacattgaaattccaacttcatgtcaatacactgcatgattttacagcaacaaaagcatcagcctccttaccaaatatggatattcaattgaaatctgaaataattaaaaaaaaaa

SEQ ID NO: 8593 - DNA, 742 bp, Homo sapiens; identical to SEQ ID NO: 3358

SEQ ID NO: 8594 - DNA, 709 bp, Homo sapiens
caacatagtgaattctcctaaagtactaatattttaagtacatagacttgaaaattgaaagtgttcaaatattttgaatacgaaattgttctctgatgttttttagtctagtaaaagtcccttgacaaatgataattattaaatagtattttatccatggttacttcaaaataatttgtatatagacattgtatttttaaagtttgtctatttcatgatatttgtctttcagtatggtaaggtacagtagaaactttatacttaaaagaagaagatgttgcagaaaggaaagatggcccaaaaataaaggttcagatcatgaatttgaaagctttcctctgtccagattctccacattgactcaatcagttgggggtcttgctgatgactcaggactctgctaaactgtcttgcttatcacaagggcgactatcagccacacaaatataaagctgtaaccctctctccttggcaaggaagtaaaaaccaaatagatttttagcttgaacaggcaacccaaactgatagtttattcttgacatattgagaaagataaaaaggtcattttttggtattctcagaataaatcaatgatgttttaaaaagtactcatgtccagatgatggtaattacatgagacagatgtggtgtttctctctcaaaaaaaaaaaaaaaaaaaaaaaaaaaaaaaaaaaaaaaaaaaaaaaaa

SEQ ID NO: 8595 - DNA, 663 bp, Homo sapiens; identical to SEQ ID NO: 3360

SEQ ID NO: 8596 - DNA, 726 bp, Homo sapiens
aagcaggtgctttggaaggacagtaagaacccaatgaatgtttgtaagcaaaacactttgagtaataaaaacgacctagtatggataaacctgacgtagagattatgagtcttggttttaaacaggttatcaaattcttccaagttctatttaataatttactctcatgacttccctctatttcctgcttgttctccaaatttggatgtaaactctatagatttataatagaggtatttacatggtaaataattactttatagttaaaatatttattgcctgatagttattccaacattgttttataaaaatgtaataaactattctctctgtcataaaatatgtaatcaacaattggcgtatatgtatctcttatcaagtaggaatgccaaactagctcacctatttaatttgttttaaataaggggattattaacattgtattgtcttaaatttcagttacacaggagaaataagtttactcttaaactatattgtacattatatattgtacaacatagtgactacacaatgtattgtattctcaaaaaatgctacgaatggatgtaaagtgttttcatcacaaaaataagtgtgtgaggcaatacatatgttaattagctagatttcatcattccacactgtatatatacttcaagacatcatgtcgtacatgacaaatatccataaattttatctgtcaatttaaaaataaaaaaaaaaaaa

SEQ ID NO: 8597 - DNA, 841 bp, Homo sapiens
  misc_feature (202)..(202): n is a, c, g, or t
  misc_feature (410)..(410): n is a, c, g, or t
gggacaatggggcgggaggatgcttgagccaggagttggagaccagcctggctaacactgctggacccgtatctatgcaaagaattgaaataggttaaccggcctgtggtgtcacactgcctgctggtccctcgcctacttagggaggcatggctttgcggcatgcagaggtatgggtgtcgtggctgtcgagtgcattgantggtgttcactctccacctatatgctatgggtagggacaagcagagggcagcgcatcgctcgtcctcaagaaaaagtagctaatctatgtacttataaattatgtaaaccacactatcatttatatctcaccccccactcaagttaccattcaagttaaggtcaagtctaatgttacattcgagttgaggtacgcgcgcggggagtgnaggagcgcaacaaaagtgcccacatcccaacagatgaaattaatgtgcacagatatgtagcacacagcgacatcacatagtggaatatattacgccttaaaaaggaaggaatatctgttggctctggttgtgggggttcgtggcctgtggtcccaaccagtttgggaggccgaggcgtgaggatcacttgaggccgggagcttgagaccggcttggccagcatggagaaacccccccatctactgaaagtgcaaaaatttgctgggcgcggtggcacgtgcctgtgatcccggctgccctggaggctgaggcgcgagaattgcttgaaccttgaactgggaggtggagtttgcggtgggctgacgtcgtgccactgcactccagcctgggtgacagagtgcgactctgtctcaaaagaaaaaaaaaaaaaa

SEQ ID NO: 8598 - DNA, 147 bp, Homo sapiens
ttgggggcacacacctgtagttccagctactcagtgagatgggagatcacttgagcccagaagatcaaggctgcagtgagctatgatcacgccgctatattccagcttgggtgacagagcaagactctgtcttaaaaaaaaaaaaaa

SEQ ID NO: 8599 - DNA, 713 bp, Homo sapiens
agctcagagaccacaacgcagaaggctgaaggagcatgagacatcctggaagcagccggcactggcagcttaatgcctctctcctcctgagctcttaggaacagatgccatcaaagacctccccttccctccccctcaaacgttccttctttctctcctttcttctttcccatttccccagtggagggatgaggaaggagacctcacaggccattacagtaccatgttccccgcctcaacttaagtctttacctggccacaaactgaatgacaagggcttggtgagagagaggggaaaatcagctgcagtgatggcagccctccagaggcctcctgatcactgtttcatctccggaaacttttatctcacactcttacagcacctgccttcaaaggcctaaaagcctcacagatactctcccaccccttgaacgtaggcagggctcagctctcagatcttcacttcacagataagaaagggaagccagcaggatctcagcactcctgtgcaggtctctcggagagctgcagagtgctcaggctcagaaacacccctgactctggacactggatccttggggaagatagagcacacaaagccacagctctgtcattacaggacagactctgaaaataatgattctccaaattgccttggtccatgacctttttacaccctcatcctgttgctagaagggaaaaaaaaaaaaaaa

SEQ ID NO: 8600 - DNA, 681 bp, Homo sapiens; identical to SEQ ID NO: 3365

SEQ ID NO: 8601 - DNA, 706 bp, Homo sapiens
  misc_feature (181)..(181): n is a, c, g, or t
ttttcgttctttgtcttggctcttcaaaggtaatggcccatcgatgagcatttttacatactccatagtcttttcctgtgctgttagctctttattcttatttttttcctggggcttgggtggggtttttcatggggggaactggccctttaaattttaagtgacactacagaaaacacanaaaggtgatgggttgtgttatgcttgtattgaatgctgtcttgacatctcttgccttgtcctccggtatgttctaaagctgtgtctgagatctggatctgcccatcactttggctagtgacagggctaattaatttgctttatacattttcttttactttccttttttcctttctggaggcatcacatgctggtgctgtgtctttatgaatgttttaaccattttcatggtggaagaattttatatttatgcagttgtacaattttatttttttctgcaagaaaaagtgtaatgtatgaaataaaccaaagtcacttgtttgaaaataaatctttattttgaactttataaaaagcaatgcagtaccccatagactggtgttaaatgttgtctacagtgcaaaatccatgttctaacatatgtaataattgccaggagtacagtgctcttgttgatcttgtattcagtcaggttaaaacaacggacaataaaagaatgaacacaaaaaaaaaaaaaaaaaaaaaa

SEQ ID NO: 8602 - DNA, 203 bp, Homo sapiens
tgagtccggtgcatggtggcttactgcctgtaatcccagcactttgggagtgccaaggcaggtggatcacctgaggtcatggaggtcgagaccagcctgaccaacatggtgaaaccccacctcaactaaaaatacaaaaattagcctggcacgatggtgggcacttgtagtcccagctactcgagaggctgagagaggagaat

SEQ ID NO: 8603 - DNA, 699 bp, Homo sapiens
tttcagtcgtctaagtccaaccaataagtgtttggcggcatgaatgtatctgtctgctcggtccatctagctatctatgacctacctgtgtgttcatttatgtatctgatgtaagtaatttacgtgcatggtaaaataatggcattctcagccacctggatgaaattggagactattgttctaagtgaagtaactcaggaatgaaaaaccaacatcgtatgttctcactcatatgtgggagctaagctatgaggatgcaaaagcataagaatgatacattggactttggggactcagggcaaagggtggaggatggtgagggataaaagactgcacagtaggtacagtgtacacttcttgggtgatgggtgcaccaaaatcttggaaatcaccaccaaagaactttattcatgtaaccaaacaccacctgttccccaaaaacctattgaaataaaaaatgaaaataatacgaatttactgcatttaggtcagagaagcccatatggcaagtaaacctttcatatgaaactgtcctgggcctggcagggtgcagtgtctcacacccgtcatcccagcattttgggaggctgaggagggcagatcacaaggtcaggagttcaagaccagcctggccaacatggtgaaaccccgtctccactaaaaatacaaaaaaaaaaaaaaaaaaaaaaaaaaaaaaaa

SEQ ID NO: 8604 - DNA, 624 bp, Homo sapiens; identical to SEQ ID NO: 3369

SEQ ID NO: 8605 - DNA, 678 bp, Homo sapiens
tgtggatgtctgagtagagacggggtttcacccatgttgtcctggctgctctcgaactcctgggactcaagcaatcctcccacctcagcctcccaaggtgctagggattacgggtgtgagccaccgtgcctggactctagacagtttcttatttggccaggtagctctcctgaatagctaaatctcagtctacaaccttgctgcccaaatcagccaaggttagttttgggtgtctttacttcacatctgaaattttgctgttcatctttgatgtctgtttttggtaactctttgctttagccatgtattgtgatttgtcctctgaagaaaaacttgtgtttaagagtatatgtatcggctgagtgccgtagctcacacctgtaattccatcacttttggaggctaaggtgtgcagatcactgcaggtcaggagttcaagaccagcctggctaacatggtgaaatcccacctctactaaaaaatacagaaattagccaggaatggtggtgcgttcctgtaatcacatctactcaggaggctgaggcaggagaatcgcttgaacctgggaggcagaggttgcagtgagccgagatagcaccattgcactccagcctaggcgacacagcaagactccatctcaaaaaaaaaaaaaaaaaaaaaaaaaaaaaaaaaaaaaaa

SEQ ID NO: 8606 - DNA, 683 bp, Homo sapiens
cattgaatattcacataataaagaacactacagtttatatcttcaggtcagttttgtccccaacaagtttatgcagaacttgtgggaatattttaagtttttggagtatttttctgattttggaattgtgaataatcaattgtggaaccatattttgacctctaatttactgtattgaggttttattttttcctctgttttttggaaatagattattttatagaaaattactttatcattggatgttaaaaattctaatgggcacataatacagatactacgctgatactaaaagccatacaaaactacctggtagagtttttggtggttgttgctgttgttacagagtttgaaaaacactaatcataagtttcctggcacatgtttaggcaaataagaattgttactaaaaatagatttctacgaaaagatgtgcaacttccacaaaatcaaggtgaacatttatgctgcattatgaacacaactgaatacctctttggataaaaatcacaagtcggtactataggccaagtcaatttactaagtcacaaaagaagaaataaataatgtgatgtcatttcctaactcatttaaacatatacacagtatccagattcactgtgttcagctctgaaagctagttattgtcaaagaggtggtgacattctcctcaggatccaatt

SEQ ID NO: 8607 - DNA, 734 bp, Homo sapiens
cagttgggcattgtccagatttgtcgtgttacagttatacaatgattttttaaaatgaagtcttgaagactgcaccttaaaaaataagacaagtgaaagtattgtattatgtgacaaccatgcaggctccttcctcatgtaactttacaacccttgcgaagtgggtccaggagatttggagtttgtggtaaagcccagtaatgggcattgtcctgcattccccttcccttcatggtttgcctcgatcctctctaagcttctatcctggcctgaataactcaaaagataattggtctcagagatcaagccatatcctcaggccttatttccatcttctcatgattctgccatcatacctttgcttctccgctaatgaaatgagctggcaagacctctgttcattgtgaagtgcttctgaaagagcctaagaaaaaaggctcatctgaaagaaatggagaactctatttcgaaccaagcctgtttgaatgtgtgttagtctgatctttgatcatgtgtttccatgtaatgggagtctcgttttttataatgtttctaacgttttattgaaaaacctatggccctccttctttctcaatagctactttcttactgctttttgaaaataatatgcaaccaaattatttcttaatgtcacataattaagtaataaaatgtcaaagaaatgttggcaaggagaataaaaaaatttccaagaaaaaaaaaaaaaaaaaaaa

SEQ ID NO: 8608 - DNA, 724 bp, Homo sapiens
cccgacgacccaagccaagccccaggccaaatacccagaggccgctgggcaggcacatccaggcaccggagcaggtagagactgaagccacaccaggtactgattccagctgggccaacacccaggagctcagggggcactaagatgccagccacggactcgtgccagcccagcacccaaggccagtacatggtggtcaccactgagcccctcacccaggccgtggtagacaaactctccttctggtggtgctgttactcggggtgacccttttcatcacagtcttggtttttgtttgccctgcaggcctatgagagctacaagaagaaggactacacccaggtggactacttaatcaacgggatgtatgcggactcagaaatgtgaggggggcgggggcctggcgggaggcctggccccttcctcgtcctttccttttgcctttgagaccaaaccaagtgcttccaaattcttttggtgcaattgaggagatatgccagatgcttaaacacatttaattgctgtcagattaattccatgatcactaaagagttgctgcttttttcatatttatttttgtaaatgattctgtgcccaggagcagctgggggttccacctcagggtggggcgggcaggaccccgtctccccaggtgtcggagcctgacctgaattaaagtactgactgctcgccaaaaaaaaaaaaaaaaaaaaaaaaaaaaaaa

SEQ ID NO: 8609 - DNA, 724 bp, Homo sapiens; identical to SEQ ID NO: 8608

SEQ ID NO: 8610 - DNA, 743 bp, Homo sapiens
  misc_feature (82)..(82): n is a, c, g, or t
  misc_feature (112)..(112): n is a, c, g, or t
gacaacagagtgcccttggcctccagccctctccccgtggcagcagtgactgcctgtctggtgaagctggaaaagggactanacacatgacaccagccaccttctccctcgnacagacatccttaggatgcacccaagcttgtccacgtggcaggtgactaaagcagactcttcctctgcaagtaggtgacctgcagctgtgatgaagaattgagttaccctaagacagggcagttaccctaagacagagcctaagacagttaccctaagacagagcctaagagttaccctaagagtttaagagcctaagacagagttaccctaaggtggagcctaagagttaccctaagacagagttaccctgcagggagccaaaggcccgcgggacgtgaccaactcagcattccgctggaggctatatgatcaaacagcgaactgtttatcatgaatgcaggatgtgggcaaactcacactgccttgccaccaaaatgtttgctgagggacatcatgccactggcgccgggctcctggaagttatctattgagaaatctagcgcctattgttcacaagcccgctgtgaaccaaacggctgactgacaattacccgacaaccatcctcccactttcttgctgtctctttcacctaataaatacagagggctgtgtaaagctcacggcccttgtccactagaggcaagatgccccttgacctcttcttccaaatataaaaaaaaaaaaaaaa

SEQ ID NO: 8611 - DNA, 709 bp, Homo sapiens
gctgatctgcctggccagaattggactgctgtggactccactgatgagaggcatatatacttccgaggcacctgcatttgttgagtttccaaatggccccattttattttcccctgtggtcagtgcgacctgtgaggatgtgaaggagcccaacaaaggcccctctagtgtccccagcccttggctttccctgcgcaggttcctgacctggttaagagaatgaccgagaacaaacaccagactctgctcctgatgagggagtggtgggggcaaggctcctgtgccaagcctgtcatgggcccctgtgggcatccaggagcagtggagagagtgcttgcctcttattctccatgtggtcttcttctgcaggtgcccagtcccctggaaggcagtgaaggggacggagacactgactgaggcgatgggagctgcccaccagagtgcctctgagcagctcacagtgtgtgcccagatgtgccacccctgtgggcagcaagaagctgggatcgctgcagccatgttttcccggccatgccggcgttgtaacctcaggaccttcccttgtaggaacagcctttctcgaatctgttttcagctcttgcattgcatagatgaacctcagcatgtaaagaactatttttttaaagaagtgattttcttattaaacaagtacaaattttgcttagtcaaaaaaaaaaaaaaaaaaaaa

SEQ ID NO: 8612 - DNA, 666 bp, Homo sapiens
acctaaaatctaggacgaccagtcaggacgtgtgggcgcgactgccgcgtgtacagcgcagccatcctggagtacctcaccgcagaggtacttgaactggcaggaaatgcatcaaaagacttaaaggtaaagcgtattacccctcgtcacttgcaacttgctattcgtggagatgaagaattggattctctcatcaaggctacaattgctggtggtggtgtcattccacacatccacaaatctctgattgggaagaaaggacaacagaagactgtctaaaggatgcctggattccttgttatctcaggactctaaatactctaacagctgtccagtgttggtgattccagtggactgtatctctgtgaaaaacacaattttgcctttttgtaattctatttgagcaagttggaagtttaattagctttccaaccaaccaaatttctgcattcgagtcttaaccatatttaagtgttactgtggcttcaaagaagctattgattctgaagtagtgggttttgattgagttgactgtttttaaaaaactgtttggattttaattgtgatgcagaagttatagtaacaaacatttggttttgtacagacattatttccactctggtggataagttcaataaaggtcatatcccaaaaaaaaaaaaaaaa

SEQ ID NO: 8613 - DNA, 666 bp, Homo sapiens; identical to SEQ ID NO: 8612

SEQ ID NO: 8614 - DNA, 722 bp, Homo sapiens
gctgggcggcttggccctttccggctgttccgtgccccactttaagccaaaagaaaggagaggcaggtgctcctgtaccccagccccagtcagcactgacagtccccagctcctagtagtgagctgggaggcgcttcctaagaccctttcctcagggctgccctgggagctcattcctggccaaaacgccctggcagcaccagcagctcttgccacctccagctgccaaacaagcagcctgccgggcagggagcagccccaggccagagaggcctcccggtccagctcagggatgctcctgccagcacaggggccagggactcctggagcaggcacatagtgagcccgggcagccctgcccagctcaggcccctttccttccccattgaggttggggtaggtgggggcggtgagggctccacgttgtcagcgctcaggaatgtgctccggcagagtgctgaagccataatccccaaccatttcccttggctgacgcccaggtactcagctggcccactccacagccaggcctggcctgcccttcaccgtggatgttttcagaagtggccatcgagaggtctggatggttttatagcaactttgctgtgattccgtttgtatctgtaaatatttgttctatagataagatacaaataaatattatccacataaaaaaaaaaaaaaaaaaaaaaaaaaaaaaaaaaaaaaaaaaaaaaaaaaaa

SEQ ID NO: 8615 - DNA, 648 bp, Homo sapiens
aatttcatgtttattaagacttaggtaagtaatattttcagcaattcctgggaatttacataatttgtaatgctttttcaggtgtgccaaagcttgaggcctctgggtttgaattcaccagcttggtattgtcagtctccttcccaccacgactatgctgtaagagaggtaagctcatttgcatgcatataaactgtatgtgaagtgcatgctaggaatttctcaaaaatgggaatgtagaaattgattccttactctattatatttgttacattttgtctacttattgaatgattgaagcaatttatagctgcttaataaatacttgttgagtgagtgaatgactaaaggaattagttgtgtcctaacaaagcaagttagtttgtcctaggactgccatcttttttaaagtccctcaatcagttgcagacattcattattagctccatgtgaggcatgatggtcagagaaagagatttgactaggttttccagagatcttttgaggtggatatgtgcattttagaatagtcctagaactagggtcatttcaattatgatgagccttcttccctttggagtaaaatataaaaagatggcgtatcttccagttcaatgataaaagggagagaaatggcctcattttttt

SEQ ID NO: 8616 - DNA, 702 bp, Homo sapiens
tctaattcgggctcttcactaatttcactgtatgtggaaagtgtcaattgcagagcttctgtatcgatgaggcttccgccacttgtccatgcttagcccccttgcctcttccttgggagcatggctttctattcctatgtgaaacagcctgacataagtgaaaggatttgggtctcaagcaacatgagatgtgggttcatatcttggcaccactcctgatagctgtgtgatcatggcaaacctcgttttcatcgtctgtcaggtggagatgaagagaaatggtgcatgtaaagtgctcagcatctgtgcttagcaggccatagtctccctgcctccttgtttcttgagtaagcctttagaactttctgactcctctagagaaggcagagaaacgaatatattttgggtgccatttggagtctgggtcttttgttaaaattgtcctgtattatgttgaaaagtgtcggttacccccaggctctgggggcatctgtgatcatagaatactgccatgcttattttgcctttctatgttgagattaattcactgacgcctcattttccacgtgcatctgtcatagtctgggtaccagattgtatttagagaatggctcttgccactgttatgtacacacagatcgtgtgtgtaaacaagcaaattaaagtaaactgagataatgaaaaaaaaaaaaaaaaaaaaaa

SEQ ID NO: 8617 - DNA, 701 bp, Homo sapiens
tgtcttaagtcctctagtgccctggtttagatctccccgaccaagttgtctcagcagaaagttgccatctcctccctggagctaaggagtctcttgtgggaggtgcttcaggaccacataattattctattcctccctagctgctgtgtgttaactagtgtcaatatccattaatgagtctaattcctcccacttgttcttagtctttctctctaaaaactgggagagctcccggcattcaaggaaatctctgtcaaacatcagttgaacatgagctaaaggaacacagacttcatgatcacacatgacaagaaatagtctttggcagccaggtgtggtggctcacgcctgtagtcccagcactgtgggatgccgaggagggcagatcacctgaggtcaggagctcaagaccagcctgaccaatatagcaaaaccagtctctactaaaaatacaaaaaattagtcaggtgtagtggtgggtgcctgtaatcccagatacttggaaggctgaggcaggagaattgcttgaacccaggaggcagaggttgcagtgagcgtgccattgcactccagcctgggcaacagaacaagactctgtcaagaaaaaaaaaacacaccaagaaacagcctttgcaaagttcacttaaaaacatctcgaatggatcactgtagccttcaataaaaaaaaaaaaaaaaaaaaa

SEQ ID NO: 8618 - DNA, 670 bp, Homo sapiens
gaaaagatatattcccaatgagcagtgtattagaagacactgaattgcttctaagaatgggtctcactctgccatcacccaggctggagtgtggtggcaccatcatggctcactgcagccttgaactccttgagctcaagtcatcctcccacctcagccttccgagtagctggaactgcaggttgtgagccaccatgccctggctgattgtgtcttgttgaaattttttatagagaccgagtctcaactatattgtccaggctggaaaagaacttctttccctccaagtgataaccttttccagacaagtcagcttaaaaactgacccaaaggccctgaagtacacagttttcttggagaaagaaaaaaataagtgaaaaggacttgctgacttgctaattcattttggggcctgtgggtaacatcagaatggcaaagcacttggggcttttttctaatttgtatttttttaatcttctgagaaatgacttttatatgccaagattcattccatgattagtttttatgaccaagttatgaacgcttttgaatatggggacctagaatagaaatgctaacctacctgcaaggagagctctgtgattggcatccccatcatgctgtaactgacacaaaataaacttagggtaattgcaaaaaaaaaaaaaaa

SEQ ID NO: 8619 - DNA, 718 bp, Homo sapiens
agcatacttgtgcaccaaccttcgggattgaatttcttgtggctggttaatacagccatggatgagttctctcaattggaaggccaaccagcgtaagttaatgctaatgttttccaggtgtccctttcttgtaagattctcttaattctgtgcaggcagcccacatgggaataagccattacctttggacctttcacactgagcatagagatttttgccccacctttgacgtttagcttagccaagttgtaaccatcatgtgaaagatgtttggtgggtatttgaatagttgctgggatctcagacacaagtgtgtcattaaggaattcacagcttaatagggacaacagactcttaaagatttgaatatgttgtcacatgtactaaacctgagggctctgagagtacaggggaagcctcctaacttgaactggtggtgaaaactaattcaaagaaggcttccaagaggtaagtcttcctggtgaagaaaatgagaagggtgcctcatgggagtcatcttcacattgggagggattagttagaaccctggaagacgcacatagaaatagttaattaacatgatcattttttagtctctatccttctcaacttgacttcataagagcactggtgttttgagaggtgttcataggtattgcgttctaaaaaaaaaaaaaaaaaaaaaaaaaaaaaaaaaaaaaaaaaaaaaaaaaaaaaa

SEQ ID NO: 8620 - DNA, 686 bp, Homo sapiens
tccacgtgggccttgcccctcaggaagcggctcgtcaatcacagtattttcaacatcacaagctaaagtctgattcccttaagctgtcttgtttcagaagtcttggcaatatcaagaatatgtagtagtgataatttgggtaccacacgtacgcacacactaagtccgtggataccagaccccctggaggcccgcccaggttccaggaggggcgtgaatccttctggaacacagggacgcctggctgctggctcctggctgggccccgggtactcgcgtgggccccactgtcccctggcaagctcggacctcggtccaccaggttcttattggaaaaagaactccataaatggaccaaggtcgtcacgttaacacaatgtcactgtgaatctggcttcaggatgctgaaaatgggccacgggcctgggatgctccgaggtgggcatccctcctctcctatctgtccacaccgaagaccagaggacaagcagtggcgcccgccggaggttggacggatggggtatgaggtttcctagcatggtcctcaatgccttcttttgaaaaccgcatccaggcgggttgcttgtaattttattaaggccatttttttttaagtcctacatacaagtctaatggtaatgaaactctcctatgtacatgtagtttttcttaaaaaaaaaaaaaaa

SEQ ID NO: 8621 - DNA, 95 bp, Homo sapiens; identical to SEQ ID NO: 3386

SEQ ID NO: 8622 - DNA, 674 bp, Homo sapiens
aggagtatgccattctgcacttaggctccaagaaacactgtttaaagtaatttacagttgcccatgattacattttttttctctctcatttgtactcaaggggattatttttaacttccaataatacacagagtccatttagcttgacacacagtagatgcaaataaaagtttcgctcattttgcttatatttgcttgtttggcttgggatttttccgtttcttttttgcttttgcataaatctcagactacagaacatttactgtgttaacagtgtgaaggagagaaatgagaagatgatttcgtctgagtttttatacccttgaaggtataaaatttatgccaatttatgtcacatcaaattgacataagaggggcaaatcctgtgacttgtgcttaatactagcttgagtgcttttattttttctggaaaatgaagctaaatgctccctatgttgctgtgaaatgatttatttacttcatccaatatttatctgagcacctactgtatattagccacatcttcttggcatctggggatacatttatggataaaatggacaaaaatccctgccctactgtaggttaccttctggttgaagaagacaatgataaacagatagttaatgtaccaatgttagaaggtcacgtgtgctccagataaaaaaaaaaaa

SEQ ID NO: 8623 - DNA, 590 bp, Homo sapiens
atgcctttagacattccgttatgcatcgccgcatacttggagaacgtgcttgaagaatccactatgatgggtaacatttcattctccaatcttttacaaaacatttctcttcttcctgttattggtagttctgaacgttagatattttttttccatggggtcacaaggtacctaagtatatgattgcgagtggaaaataggggacagaaatcaggtattggcagtttttccattttcatttgtgtgtgaatttttaatataaatgcggagacgtaaagcattaatgcaagttaaaatgtttcagtgaacaagtttcagcggttcaactttataataattataaataaacctgttaaatttttctggacaatgccagcatttggatttttttaaaacaagtaaatttcttattgatggcaactaaatggtgtttgtagcatttttatcatacagtagattccatccattcactatacttttctaactgagttgtcctacatgcaagtacatgtttttaatgttgtctgtcttctgtgctgttcctgtaagtttgctattaaaatacattaaactataaaaaaaaaaaaaaa

SEQ ID NO: 8624 - DNA, 590 bp, Homo sapiens; identical to SEQ ID NO: 8623

SEQ ID NO: 8625 - DNA, 861 bp, Homo sapiens; identical to SEQ ID NO: 3390
  misc_feature (190)..(193): n is a, c, g, or t
  misc_feature (206)..(213): n is a, c, g, or t
  misc_feature (221)..(223): n is a, c, g, or t

SEQ ID NO: 8626 - DNA, 709 bp, Homo sapiens
  misc_feature (96)..(96): n is a, c, g, or t
tctctagctgttctctttccttcagtaaattcactgcttctagtaaggattctagtaactctggggataaatttttgacaaatatagcatctatanacgccaacaccttcacatggctctaaatatggtctataatttggtcccagattatttttctggtctcactccctattttgttagttaaactcaactatgcataattctaggatggcctggatgttgctatcggtgtctctactcaatgccacggtacaatggtttcagatcagtttttggggccagaccctccgggttcaaaatcctgacttcaccacttattactacatgacactgggcaagctaatctatgcctcatttgcccatctgcaaaatgggtatacagtaatatatatcaatttgataggcttgctctgggaattaaatgagttaattcacgtagtgcttaaaatgctgcttctaccacacacacaaacatgagctattatttttcctgcaacctgaatgccctctccttccaggtgcgctcaatcccatttccctaatgaccccatcagaaatgacttccagtcccccacagcgctctgagagcattttacgacccgaacagattttgtcaaactccaaagacacgtgctcccctcggcaccatcaggtgagtgctcctgaccgcgccattggctcgtgccccgacgcggacgctgcctagagc

SEQ ID NO: 8627 - DNA, 712 bp, Homo sapiens
ggttaggaagataatgtatttaacttaaagcaagaaaaagtgatacccagtagcagaaatggtaaattagcctgcatatttatatttacttctataatgtgttattcaacttctctaccctactctgtgaccagggactttgcaacctacagactctaccacccaggctttctagcttgctgttaaattttaagacctattaatcctgacacttcacaatgcttcctattttccagacttgagttctcaaccaaacatatgttaacttcttcaataaaaaaatggaaactgaagagacttctctgacagtgtgttagggccctggcgtgaaacaatgcaccgtctttagaattatgtggcaaatcccttaatatgtgatttattccacttaaatatgtttttagagtaggaccataagagaaagtaaaaatagaagatttaaggcaaacttattaggctaggaccagaggtattgcatttaaaatttttatttaaaaaatttatggattcataatagttttacatattcgtggatattatattttatagttcaaaccaggatgtattccagattactgaactaaagaagcattgataaaaagaactattaagaggtgttgatagggttcagtaaaatatgtcttataaggtacaaatattttagtataatgatttttgaggtcttgaaggtcaccagaaaaaaaaaaaaaaa

SEQ ID NO: 8628 - DNA, 236 bp, Homo sapiens
cgttgaactcaaaatgcatatgtataaacaaccttacaagcaaacttactattagaagaaaacaggataatataaatcatttcaggtggttacagttttctctctcaattttttctttataaaaaaaagcgttattcaagcactccagacttgattaaatgtccttgataaacattctgcaatattttttaaatgcagcatccacttcataattaaaaacaaaaaaaaaaaaaaaa

SEQ ID NO: 8629 - DNA, 620 bp, Homo sapiens
tatagtccagggggctttccaagtctcaggatgcaccatcaagcatcgtagttaaatctctcgaggggaaaaatgtaagcctccctgtgaaaggagtccacaggacaatggagatcttatatggtagtcccattaggtgtatattgaattattttgggacacctttcgaactgtggggagtattatgtaatctcttcgggatctcagatataacctacatggtgtcttacctttgcaagattgacctcatcttgggccttccatgaccaacttaatgtgaatgaatttttaaggtgatctaggaatatgaatgctgggcgtgttggctcatggctataatcccagcactttgggaggcgatgtcgggcatatcatttgaggccaggaattggagacgagcctggccaatcatggcgaaactccgtctctactaaaaatgctaaaattcgtccgggagttgtgatgggtacctgtaatcccagttactcgggaggctgaggcaggggaattgcttgaatccaggagccggaggttgcagtgagccgagatcgcagcactgcactccagcccatgcgacagagtgagactctgtctccaaaaaaaaaaaaaaaaaaaaaaaa

SEQ ID NO: 8630 - DNA, 452 bp, Homo sapiens
ttcatatgtaatccgcgtctacaccagctctggcatcatgtcagccccacgtccgtcagccccaggtcttcactgagctttgcattttcttatacgtttgatggaatcactgtgcaccagtctgcaggcctatgatgccaagggccagacatttttgtgttgtgcattttttttctattttgctttctctttaagtggataacttatatcttcagactgctacattcactggtaaattcaagttttgacccgtcccatcgcgtctgctacggacaatccaagccatagcccaacttcaacgtgtcagattgcaggaagggttctaacttcaggggaatcgaaggaacaaagatgactatgcttttattttactatctccttgttatgaagtttgacttttcagcagggaaatggggcttgttaataataggatcaagaagcatatattccat

SEQ ID NO: 8631 - DNA, 713 bp, Homo sapiens
catgacattactactttctgaaaggaactatacagattggagttggaattaagcatagttgtatttcacagaatgctatgctcgacatcttccctgaagagctgggagaaagtatgaatattgaccaaatacagttcggttactgacaatgcaataaaatatttatttattatactagctgttaaatgtggaggtcaaggaggccagaggcaaaggaaagtaaaaatatttggaacaattgagtaaccatggacacggcaaagctgtctatggtaaatttcgtttataagattcagtaatttgaaattgttaatgcactttgttattcccatttgagagcagcgtgatgttacttatctctttaaaggagaagtttaaataataagtagacactttctcgtttgttctatttttttaaaacaaaataataccgcatttgcaaactaagctgcaccattagttaacaaagtctttgaaaatgattcatctcaaatgtacaaatgttcttattatcatcatgactatcaaaggaaaagaatggtatccttgagaatcttcagctcatattaatctctctgagttcacagtcttcttacttcaaactaagttgtattttgggaaactttaaatacaagcctgagtctaaacatattaacctctctgaatggcattttactcatctataaaatgacaaagactagaaaaaaaaaaaa

SEQ ID NO: 8632 - DNA, 605 bp, Homo sapiens
ccaggacaagtacataagactttaaagaagctgtcaagaagaagtcagcttgagcatacagctgcccgggaacagtcaaaggaggcgtgcaatatctgccagcagaaccaggccatctccgtccgacagcagtcgtgctagaaaatgctgcaaaagaagagagagcgagctacaagcgacccaaggaccacagaacagaaacaagagaagaaacgactcgaaaattgtccaagaagccaaaggacccagagccaccagaaaaagagtttacgccttacgactacagccagtcagacttcaaggcttttgctggaaacagcaaatccaaagtttcttctcagtttgatccaaataaacagaccccgtctggcaagaaatgcattgcagccaaaaaaattaaacagtcggtgggaaacaaaagcatgtcctttccaactggaaagtcagacagaggcttcaggtacaactggccacagagatagtcctggaagacacgtggcgcctgtggaccggaagcaccaaatgctggtgctgcttttgtacatacatatttttaaaccattaaaattcttcctgaagaaagctgaaaaaaaaaaaaaaaaaaa

SEQ ID NO: 8633 - DNA, 605 bp, Homo sapiens; identical to SEQ ID NO: 8632

SEQ ID NO: 8634 - DNA, 669 bp, Homo sapiens
gctagacccaccaactaggtaatgtgactctagttctccgcattggcattgtccaagaagtctaataacacttacttggtctttcgcactcaggtgatggactcttcttcctgcctttggcatctgttgcaacacgggggcaattgtgacatatcactggggctctacagcccaagggttatgttaaccttccatgcctggtacctgagcatagtgtccacttgtgacatatttcttgctctaaaacccagggggtaattactctttttgccttgctcctacctgcagagggcattgtgacacaactctgtgagtgatgtgacccttcccaaatgggattatggctgagcacattggctcatgcctgtaatcccagcactttgtgaggctgagtcaggtagatcacctgaggtcaggagctcaagaccagcctggccaaaatggtgaaactctgtctctactgcaaataccaaaattagctgggtgtggtggcacatgcctgtaatcccagctgcttgggaggctgaggcaggagaatcacttgagcctgggaggcaaaggttgcagtgagctgagatcatgccattgcactctagcctgggtaacaagagtgaaactctgtctcagaaaaaaaaaaaaaaaaataaaaaaataaaaaaaaaaaaaaaa

SEQ ID NO: 8635 - DNA, 633 bp, Homo sapiens
tgttgttggtttgaagtgatagcctttcagggaaaaccttttagtggtaaatctcaagtagcatcaatcttatactgagattctgtaagttacccagtaaataaagaattacaaggccgggcgtggtggctcacgcctgtaatcccagcactttgggagtcgaggtgggtggatcacaagatcaggagttcgagactagtctggccgacatagtgaaaccccgtctctactaaagatacaaaattagccaggcgtggtggtgcatgcctgaaatcccagctacttgggaggctgaagcaggagaatcgcttgaacccgtgaggcggaggttgtggtgagccaagatcatgccactgcactccagcctggtcaacagagcaagactctgtatcaaaaaaaaaaaaaataaaaaagggattacaaattacagacatgggcagagtaattggcaactaagtaaatttatggaaaaaggtggctgtgtttcttaaggattacgtatgcaggttgtaatcagaaatagacaaaaatacctttttaatggagagcagatgtatcttgtcaatactacctttctcactttctaaagacatctgggaaagatgggaaaacataatgtctctaaaaaaaaaa

SEQ ID NO: 8636 - DNA, 685 bp, Homo sapiens; identical to SEQ ID NO: 3401

SEQ ID NO: 8637 - DNA, 673 bp, Homo sapiens
gcccagatatatcaggttgaagtcatgagattaggactccacgccagctccctactatcagagacttgtccttaccacaaggcctgatcacctgggagccagaactccacgactcccagcccccaccacagatggggtcaaaaaggtaggcttagtggtcccaacttgttcttgatttcctcaacttcttcccctttgtcttcttagtttatagattctcaagagatcctagatatcccccaagctgagggaaggtgaagatgggcaggaaggctgagaatcacggtatgtgtgtgaattgggggctttctttgtgaccacagcctccatggatctaattagaggttttctcatgcctccttgaaagagaaagggtaactgtcaaacgtgtgagtcattgtgaggcaggagaattgggaattagggtaaccaagggttaaggcagaagcaaaagaacagcaggtgcagccagttctaggcaacattaagcagcatacagcatacatcctagctcctgagataacaagacagaagtttccacttcagcctctaattgaccatgagccaagtctccacttcagccactgattggtcacaggccaatccttcatagggtgtgaccaactggaggcctctaaagggcacctaggggtgttaccaaaaaaaaaaaaaa

SEQ ID NO: 8638 - DNA, 690 bp, Homo sapiens
ttaggatgatacccattgtctatgtaaagtagtaacatcatttgcctgtttacatagtcagactttctcttggtataagcatcaagcactcttatgttagttcttcacctgctatcatttacatatatcactgtaagacatcgttttctatatagatgacaaatcaaatcaactgaggtaaattaaaccctgaatatttctttccatagatgcagatgggctgccacttttcggatagcaatcttggacctgatgtttagtaacatattgccaccgtctaggctaaacattgtttacccatagtagggccatttaagaattaatgtgattcaggaatcaagattaggcaagttgttgtattgtaatgatatcttagagcatccttttacgcctgtaatcccagcactttgggaggccgaagcgggtggatcacgtgaggtcaggagttcgagaccaggcctgaccaacatacatggcgaaaccccgtctctactaaaaaaaataaaaataaaaggccaggtatagtggtggacacctgtaatcccaactactcgggaggctgagacataagaatcgcttgagcccgggaggtggaggttgcagtgagccgagatcgcatcattgcactccagcctagcgacagagtgagattccgtctcaaaaaaaaaaaaaaaaaaaaaaaaaaaaaaa

SEQ ID NO: 8639 - DNA, 671 bp, Homo sapiens
cttttctcttttctggtcatgtctttaattttgaagacagagtctgcttctgttacccaggctggagtgcagtggtacaatcacaactcactgcagcctctacctactgagctcaatcgaccctcccacctcagcctcccaagtagctgggactatagacacatgccaccatgcccagctaattctttgtattctttgtagacatgggttttcactatgctgcacaggctggtcttatactcccagactcaagccatcagcctacctcattctcccaaagtgctgggattacaggtgtgaaccaccaagcctgccctcttgtcttttcttatgtgtttcttcaagtctctgagttagaagaagccttggattttatgtattccaacctttaactctgtatcagtcaagatgtacatcagttaagaagcaaaaatctcaagtcaactgtaaagcaggggtcagcaaactaccacccaagaaccaaatactgcccatggcctgtttttccaaataaagttttattgaaacacaaccattctcatttgtctgtgtattttctttagctgctttcatgctacaatgacagagttggcttacatatcctaaagtatttactatatggccctttacagagaaagtttgccaacctctaatctaaaaaaaaaaaaaaa

SEQ ID NO: 8640 - DNA, 650 bp, Homo sapiens
cggagtgggtccccagaggtccccttggtgagccccggctcacaccttgccccatccaccttgtaggcccattttgttgtactgttatggcttctgtggatattctatgacctctgtcggtgttaacttgacatttctaaattggaaaagggttgtctgcgtgttctcgtgtctctttttttaatgtcctttgtttcttctccccacctccctgctctctttccttttcagtttttctagccactgttttggggctttaataaaacttgtgtctttttcctctcctggatctccttcctataggctgatgtctcagtatttctctgcttcactctggaggatctggaaggtgtctgggatgggtggggtggcagttggggaattccctggcagccactggccttcagctggcagagcatgaagggaaggacagaacagggcccctgggattagccaggtgggctggtgtaacaccagtaatcccagctatctcgggtggctgaggcatgagaatcgcttgaacccaggaggtggagattgcagtgagccgagattgcaccactgagctccagcctgggtgacagagcgagaccctctctcaaaaaaaaaaaataaaaaaaaaaaaaaaaaaaaaaaaaaaaaaaaaaaaa

SEQ ID NO: 8641 - DNA, 647 bp, Homo sapiens
cctgctctgcccagcagcgtcttctctgagctccatgtcccagataaactcaggccagatctgagaatggctctcccagaggcctctgtggcctccaactccggggaagccctctgcgccacacccacatggcttcacattcccagccacctttcgcaaccgtgcccaggtacaactttcaagacactgtaaccacaagatggttatttattgagctggctccgggacttgggcggggcctgcccctacagtgagcagcccacacaggacgctcctctcgcgagcggcccgggcagggaccctgtcccatacaccaacacctcctctccagcccaatcttctgggtccagacctgcttgtcccttttttagaaaacacttttaaactttttaaaaattttaaaccttttttcagcagatatggagagagctgacaatcaattcacattttttaagccattttagctaaactgtcattgtgcatctctgaggttccctcatggagctccacagatccatttttagggaagggattttggctcaaaacgatctgaccacctctgccctgtccaccaggataagtgacacctaggacccaggaaataaatgccgatgatttgtgtgaaaaaaaaaaaaaaaaaaaaaaaa

SEQ ID NO: 8642 - DNA, 718 bp, Homo sapiens
gagtgtttttcccgaaacttggtgtctatcacttttccagaggaaagattcttcctcattagatcattggaaattctttagaattgtagttgtaacattgaggaaggataagagcagccctgacacccagaagctggcctggctctcacaggtagaccctgtgattctcccattagacatgaaccatctcacagttaccagcctctgaccaggcaactttgagatcatgattacatatagaccacagcagggccacttcataattttgtctaagtacagacaaagcaagtcactgtaccacccacataatacctacaccctatctcttggtctgaaatgaggactgctacttctttaccaatgacaactttattctccctatagtttccccttcctatagataaaagtcattgagatccataatcagagaattgcccggctttctaacaccatccaatctagagggaatccctgctacctcagaccctgcctcaaatcacccaatcaaagtccaatcttacaaggtcctttctaacactctcttactgagacacccataattcccataatgtgtgttctccctcactgcaacaagtaatgaaccagccttattcaagtacaagagtgtttctggaggtctttggctggacatcattaatggagtattacatcaaaaaaaaaaaaaaaaaaaaaaaaaaaaaaaaaaaaaaaaaaaaaa

SEQ ID NO: 8643 - DNA, 663 bp, Homo sapiens
agtgtccgatcaatagctcacgcagctcccacgcctggcctcaagtgatcctcctgcctcagcctcccaaagtgctgggattacaggtgtgagccaccatgtccagctgattttttaaacgtttttgtagagatggagtctcactatgttgcctgcaatagggctcttgttttgtccccttcctgtgactcacctcggtccctcattgcaggggggagcagactctcatcatgcaaattagccaatgtatctttgagtgtttttactcctttaataagaataaaactaaatattactggtataaagttaataaacacaagtaagtatccagaattgatattaatttttattaaaacaagaaaatagggccaggcacagtgactcacgcctgtaatcccagcactttgggaggccgaggtgggtgaatcacgaggtcaggagatccagactagtctggccaacatggtgaaaccccgtctctactaaaaatgcaaaaaattagctgggtgtagtggtgggcacctataatcccagctactcaggaggctgaggcaggagaatctcttgaaccctggaggcggaggttgcactgagccaagattgcaccactgtactccagcctgggtgacagagtgagactccatctcaaaaaaaaaaaaaaaa

SEQ ID NO: 8644 - DNA, 636 bp, Homo sapiens
gtcaccctcttccggagatgtagcaaaacgcatggagtgtgtatgttcccagtgacacttcagagagctggtagttagtagcatgttgagccaggcctgggtctgtgtctctttttctctttctccttagtcttctcatagcattaactaatctattgggttcattattggaattaacctggtgctggatattttcaaattgtatctagtgcagctgattttaacaataactactgtgttcctggcaatagtgtgttctgattagaaatgaccaatattatactaagaaaagatacgactttattttctggtagatagaaataaatagctatatccatgtactgtagtttttcttcaacatcaatgttcattgtaatgttactgatcatgcattgttgaggtggtctgaatgttctgacattaacagttttccatgaaaacgttttattgtgtttttaatttatttattaagatggattctcagatatttatatttttattttatttttttctaccttgaggtcttttgacatgtggaaagtgaatttgaatgaaaaatttaagcattgtttgcttattgttccaagacattgtcaataaaagcatttaagttgaatgcgaaaaaaaaaaaaaaaa

SEQ ID NO: 8645 - DNA, 684 bp, Homo sapiens
cagataggttcttctggaaaaactgtttcagaaatctaaactattttacttaaatcctgatttaaaatgtgtacgtgggccagcatggtggctcattcctgctatcccagcactttgggaggcagaggcagtcagatctgaggatctgaggtcaggagtttgagacctgcctggccaatatgatgaaaccctgtctctactaaaatacaaaattagctaggcatggtagcgcctgccttagtcccacctactcaggaggctgaggcaggagaatcacttcaacccataaggtggatgttgcagtcagctgagattgcaccactgtactccagcctgggcaacataagtgagactctgtctgaaaaaaataaaagtatatgtgggctgggtgcagtggctcacgcctgtaatcccaacactttgggaggcccaggcgggtggatcacctgaggtcaggagtttgagaccagcctggcaaacctggtgaaacgcatctctactacaaatacgcacaaaaatattaggtaggtatggttgcaggcacctgtaatcccagctactcaggaggctgaggcaggagaatggcatgaacccgggaggtggagcttgcagtgagccaagattgcaccactgcactccagcctgggccacacagccagactccatctcaaaaaaaaaaaaaaa

SEQ ID NO: 8646 - DNA, 89 bp, Homo sapiens; identical to SEQ ID NO: 3411

SEQ ID NO: 8647 - DNA, 717 bp, Homo sapiens
gctgaacaaagtagctttccccaaggaatataaaggaggggaaagtcaacatagtggttaggaaaacatctcctgggttttgaatacgatgaatccataggatagagaaaatctgcttggttctattctgagagttctctgagatatccccttcactctgcttggcaatttggccattgatattcaacaggtcactgaccaagcttttctaaattgtttcagagagagttacttacccataaggtctgttcttaaacctacctagttgatctttcagatctttccataaagtgtcatgattctatcatagaccctgacgtgaacattgtaaggactatgagtcctccattttttaattaatgttttgttttagcaaattaggacttcggcaggttttcctctcctaaactcattctttcctccacaggattgctttgtccatctcctgctgttcatttcaagtgcataaacaaaacctcaaagggcctgggaaggtgaggcaggccagagtctgtgttctgtgttgagtgtcaagctatcttgttaagaaggtcgtgcaacaggcctttggtgtgggctctgccagagactgttctgaacactttgcttgagatccgtgccctgtaaaatggatatgatgttttactgatgtctgtaatacatttgtaaacttccaataaaatttgaataaaaaaaaaaaaaaaaaaaaaaaaaaaa

SEQ ID NO: 8648 - DNA, 630 bp, Homo sapiens
ttgcgacgaaattaaaagttgatgagacaactggttatctaataaagtagataaggaatatctgttaattattacagtgtaaagggcaggcatgcatagctaaaacttgtaaattggatctatccttgataatatacacaatcttgtatttgcagtgaattattttgacctaattatgtttgattaaatatataaccaagtataagagataaatctttattttatcatgagcaaaggatttcttaaatgagattgcaaaatgtaagagatacagttggggaaatgctgactacagtagaaacatctctatcagaaaagaaaacaaatcataagtaacatggaaaaataaagtagagacttgagaagaccttctgcaatgcattttgactcttaaaggattcatgtcctgcatacatacatatatatatatatgtgtgtgtgtgtgtgtataatattatatataataatatataatattagtaaaatttatagcacagcaattccacttctaattgatatacacaaaaaaatttttgcacatgtgcataaggaactgcttctataactttgtttgaaatattgaactaaaagaaaataaaaggtaaaaaaaaaaaaaaaaaaaaaaaaaaa

SEQ ID NO: 8649 - DNA, 700 bp, Homo sapiens
ccgcactcttattcatgagtccgtatcaacgctatgacgcagctgtgatatgcaccagaaggctgtctgtacttgtgaaacattgtgtgggattgatggtgtgccgaggcatgaaaggtctagtatgagcgagaaaggagagagcgcgtgcagagacttggtggtgcataatggatattttttaacttggcgagatgtgtctctcaatcctgtggctttggtgagagagtgtgcagagagctatgatagcaataatgtacgaatgttttttgcattcaaaggacatccacatctgttggaagacttttaagtgagtttttgttcttagataacccacatgtagatgaatgtgttaagtgaaatgatacttgtactccccctacccctttgtcaactgctgtgaatgctgtatggtgtgtgttctcttctgttactgatatgtaagtgtggcaatgtgaactgaagctgatgggctgagaacatggactgagcttgtggtgtgctttgcaggaggacttgaagcagagttcaccagtgagctcaggtgtctcaaagaagggtggaagttctaatgtctgttagctacccataagaatgctgtttgctgcagttctgtgtcctgtgcttggatgctttttataagagttgtcattgttggaaattcttaaataaaactgatttaaataaaaaaaaaaaaaaa

SEQ ID NO: 8650 - DNA, 629 bp, Homo sapiens
gcccaaagttgatattcaatttcaaaaatattcgatgagcacccattatgtactcccatacataagtaggtactagggctaccagggaaaataagccaaccatgcctactctcaatgagtttacagtttgagtgggcgtggcattcagtaaatgtttacactagggatcaggaccaggcacttgtaggggacccgaaatacagcccctaaattggtctccggaatcagggaacagtttctagaaaagatgatatctaacctgaagtcctaacggataagcaggagtttatccgtttgggagaatgaacaaagagcagaggagagaggaagttcaatttggtgccattagtggaaacagtcaagtggttccaatagtagggctgtgcagtttgagggggtaaaagaaaacaagacagaaattattggggaagaaaagaaatcctgtctcactgatgcccttggaggtactaagtagacttaccgttcaatctccttttcattcccctctctgcgaaatcgctcaatatattctttgctatgttgttcttgtgtgtgacactgctcttcaaatattttaattgtttcattaaaagcttctattgcagtcctcttcatctgtatttcctacc

SEQ ID NO: 8651 - DNA, 90 bp, Homo sapiens
gttatgctaacttaatcacagaggtgacatcccatcacgtttgccatatcccattggttaaaagcaagtcatagttctgcccatacccaa

SEQ ID NO: 8652 - DNA, 759 bp, Homo sapiens
tccggtttctgagtatttctggtctattttatttgcttaagttgagaccagaaaaggtacatgcactctgctggccgattctcttcgtcccactgcttggagggggcataatcggggaatatggcactctgttcattgtttacccctttgtctgtctcctttggaccgtttggtctaaaggtggggtccttgttagttggggaaggagtcggggggacactgggatagggaggtagactctgagggcttcctgtagggcataaaccacactttttacataattgcgagttgtctcttaatgaaaagaaagtttgcacatatggcacttcactccatttgccctcctttctacagaagaggtctagctgtaggatggtgttataatctatacttccctcacgaggccaggtttctcccccttgaagaggatatcgtggccaggcggtactgcagaagagtataagtcatttctttcttagtgtctgagggtcagattggtcccattctccagaatacatcttaggggcgtttttgccttgtgggggagaacgtttcccatctgaaaaaagaacagagggatgccagcacccctagtcattttccaatgagcattagtcctagagcgtcctgtaagggcctaatgcttattcttttccagggtgcgtaaccacccatggacctctgcttatcggattagttacgcttaccgatgtagcagtcctgcacctgttttcccgcctctcttgaccaaaaaaaaaa

SEQ ID NO: 8653 - DNA, 671 bp, Homo sapiens
tatacaccacattttcttgatccgatccactagtgataaacactaggttgattccatgtcttgctattgtgaatagcatgctgatgaacatatgagtgcatgtgtcattttggcaaagtggtctgttttcttttgggtatatactcagttacgggattgctgaatcaaattgtagctctgctttaagttctttgaaaaaagctgcatagctacaattatctgatcttgacaagaccaacaaaacaagcaatgaggaaaagactccctattcagtaaatggtgctgggataactgggtagccctatgcagaagaatgaaactggacccccacttttcaccacatacaaaaattaactcaagataaattaaagacttaaatgtaagaccaaaaactataaaatactagaagaaaacttatgaaatacccttcttgatattggtgttggcaaatagtttacggttaaatcctcaaacgcaattgcagcaaaagcaaaaattgacaagtgagacctaattaaaacaaggagcttttgtccagcaaaataaactcttaacagtataaacaaacaacctacagaatgggagaaaatatttgcaaactattcatctgacaaaattctaatatccagaatctataaggaacttaaacaaaaaaaaaaaaaaaaaaaaaa

SEQ ID NO: 8654 - DNA, 695 bp, Homo sapiens
taagttgatcttgtcacttcgtttcctctcagcttccatttttagtatctataagatgtgactattaaatctgttctacacacgtgtattagtctgttttcacgctgctgataaagacacacctgagactgggccatttacaaaagaaaatgctttaatggacttacagttccaattggctggagaaatctcacaatcatggcagaaggcaaggagaaacaagtcacatcgttacatggatggcagcaggcaaagagagagcttgtgcagggaaattcccattttaaaaatcatcagatctcgtgagatttattcactatcacaagaacagcatgggtaatacctgcctccatgattccattatctcccatgaggttcctcccaggacacatgggaattgtgggagttacaattcaagatgagatttgggtggggacacaaccaaccatattaacacctagcaagtgttttatggggatcaaatgaagtaatgttcatgaatatactctgtgagccaggtatggtggtgcatgcctgtagtcccagttattcactgaagtgggaggattgcttgagcctaggagtttaagtttgtagtgcactatgatcatgcctgtgaatagccactgcactcgagcctggacaacatagcaagacctgtctctaaaaaaaaaaaaaaaaaaaaaaaaaaaaaa

SEQ ID NO: 8655 - DNA, 684 bp, Homo sapiens
agtagctggaatacaagggcccacaaccaggcccagctaatttttgtattttttggtagagaagcagtttcaccatgttggccaggctggtctgggaactcctgatcttaagtgatctgcctgcctcagcctcccaaagcgttagtattacaggcgtgagccactgtgtaaaaccgtggatcctgtactcttaatcattacctgacactgcagcatcttgaataagtggttctttgtgtaataatatgctgtgtgaccccccagatcccaaattttgaaaaaaaaaaaaagatactcgaatggaaacagattcatgtctaaaagtttataacatgtaattgatttcctttacacctgaatgtgccattgtttgctgtttttttatgttttaattttgccattatattgcatatacactggctggaatatacatagacatgcatatacataggcaaaaatataatttgtatgaaatctgacttgtaaactcagaaagggatttacaagtccccaaatctaaatcttctccagctttcctaacttcaaaatcctctctgaggtgaatggcaggtaggaggtgtgcagggtcactctgtgactgagggagaagacagattttttactttgaggagtcataaatagctttgctcactgatttggtatactgcactctaaaaaaaaaaa

SEQ ID NO: 8656 - DNA, 796 bp, Homo sapiens
  misc_feature (160)..(160): n is a, c, g, or t
aaagtaaataaggtttttcagaaagaagcgagaaaaaaatggagaataacccacggggcccgcagtaggcacagctccagactgccggggagacccaggccttccctggcgtaggacgaccatcttgaagatggcgtcctccagtgaccaactcatctgngcacgaccatgttgttctcctgacaaagccgctgaagaaaagtttacaatggaaataacggacacgccctccaccgcgttacaccatgagtaactatctgcagagcatagctccaaaagtgatattgaacatgcgcgtcaatggacatgctgaagaaatcacgcctggacgccaatgtgaaccggaagttgcccagagaggccttcactgatgtcgccaccagttcctatgtaaagcctgagggaagctgaggtgatttggggtaattgggataggggtgttaaagctcgaaaattctgagtttaaccaaccaggaaaaaaaaaaaaaagaccaatttgtaggacacatttggttgcatccaaactctggttttccatcaaatcaaggacaaatcagactactttcattgagaaatgacagaatgagagaaatcatttgtttcacctaaagctcacaaggacttttgaactagaatgtgtaagaaactcccacaaaccaatgagaaaaaggaaaacaagccaaagtaaaagtatgcaaagcacatgaatattaatctgctagtatggaagcatgagtggaaaacaagtccacgttgagatgcgcagcctcactggtagctgaaaaaaaaaaaaaaa

SEQ ID NO: 8657 - DNA, 713 bp, Homo sapiens
ggcagggcagccatcatccaggacccagcatatctttctgctctaagtagtggatggccagctcaatgcacaagaacagaggaagagaaaaaatgggaggaaatgagagaaggctggaagtcggcaggaatgtttctgggtcattaacaagtggaagacccccttcagtattcacaccaatcggtcttgatcttacaggacatctttttctcactgagcgtctgttgaaaagactgcagcaaaccaggcaagggattatgggatagggatgcagcagcgagctgcaatgagattcgtgggtggcttgctttccctctgagtcagcagtcagctgtttccatgctctcgtgctgggccgctgagctccatcaccagaaagtgactgcaggattcaccaggggagaggcgaccagtgcagtctccgtgcaacgcagccggggcaggtacagggagtgctacaaatcagacgaagggagtgctgggacgcaaacggtgaacgcagtgagaatagattctaggaagaaactgggcatatggtacctcaatatgaaaagttcacatttagagaagagctttgcgtgagtgtgagagcacacacttgctcgttagaaagagagacgactgatttccttagatgtctcaagtagctttaaacacatatcataatttttttaaatacaaaaaaaaaaaaaaaaaaaaaaaaaaaaaaaaaa

SEQ ID NO: 8658 - DNA, 685 bp, Homo sapiens; identical to SEQ ID NO: 3423

SEQ ID NO: 8659 - DNA, 713 bp, Homo sapiens
gtcaaggacaccgtagtaagaggacttccacgtggaccaagtgaccaccgtgaagtgcctatgatgaagctttaggcatgtttaacatccagcactgtaagaagctgtccagctgggtgctgctgatgtaatacctgggcaatgccacgcgccatcttcttcgctgcctgatgaggggaaactacagcaccgtggaaaatgaactcacccacgatatcatcaccaagttccgtggaaaatgaagacagaaggtctgccagcttacagtttacccaaactgtccattactggaacctatgatctgaagagcgtcctgggtcaactgggcatcactaaggtcttcagcaatggggctgacctctccggggtcacagaggaggcacccctgaagctctccaaggccgtgcataaggctgtgctgaccatcgacgagaaagggactgaagctgctggggccatgtttttagaggccatacccatgtctatcccccccgaggtcaagttcaacaaaccctttgtcttcttaatgattgaacaaaataccaagtctcccctcttcatgggaaaagtggtgaatcccacccaaaaataactgcctctcgctcctcaacccctcccctccatccctggccccctccctggatgacattaaagaagggttgagctggtccctgcctgcatgtgactgtaaaaaaaaaaaaaaaaaaaaaaaa

SEQ ID NO: 8660 - DNA, 713 bp, Homo sapiens; identical to SEQ ID NO: 8659

SEQ ID NO: 8661 - DNA, 734 bp, Homo sapiens
atgtttttcttttgtgttgtgtgtgcagaaatgtgttctcactattttgtccaggctagtctggaactctctgggctcagactatcctccacctcagcctccctaacgtgctgagatcacatgcatgagccactatgcccagccaagcccagcttttttagatgggagtttctgcttgatttctttgtgagggaggctggacctattctactctgggcagtgaaatcagaccttcagtccactcgtttattgaatagcaaacaacgatggtgaatgatatgttatgtacaaccagcaatgaataaagagaggtccttcagcacagcaggaggggcgcccacctggtcggctgttgctgatcgaccaccacatacacctattaccaccatattattaattacacctcttcacctatatctaaatagcgcaccactatataattatttaatgtctatagtggtctagtgacgcaatatataatctcagaggagtggaaaaataccgtgtctgttaagcaaatgttatctaataactgcagcacgttagagcaaaacaagtattttccaaaattttgcctcttactcaggctttcttaaagaaacagggtaaaagtggacaattgtttgttggtctattctttagaatagactttattggtctattatttgtaaaagaaaatatgtcgcatatccaaaaaccataccactaatatcatactcaatggtgaaacactg

SEQ ID NO: 8662 - DNA, 547 bp, Homo sapiens
tggaaccaatgttcctttccctggagtccaggtgccctgaatctgtaagttttttaaaatggcaatgttccttaaaggtgtaacatgttttaaagcaatattaagaaagactttaaatgttattttggaagacttacgatgcatgtatacaaacgaatagcagataatgatgactagttcacacataaagtccttttaaggagaaaatctaaaatgaaaagtggataaacagaacatttataagtgatcagttaatgcctaagagtgaaagtagttctattgacattcctcaagatatttaatatcaactgcattatgtattatgtctgcttaaatcatttaaaaacggcaaagaattatatagactatgaggtaccttgctgtgtaggaggatgaaaggggagttgatagtctcataaaactaatttggcttcaagtttcatgaatctgtaactagaatttaattttcaccccaataatgttctatatagcctttgctaaagagcaactaataaattaaacctattctttcaaaaaaaaaaaaaaa

SEQ ID NO: 8663 - DNA, 278 bp, Homo sapiens
tggtggtgccaggaatgcttatggtagcgatgactgactgtggggtgggcccaggatttccacatcttggtgaagttgtcccctgggaagggcagctgggggcagtggcgccagttcccttccatggtctcccggctggcaatgtggtgaagctgagtttctgtccaatgagcaggaagattctgagacatttcgcctgagatataagttgtactgcgtatgcagtttttcctccaaaaattaaattgcttttgacaatctgaaaaaaaaaaaaaaaa

SEQ ID NO: 8664 - DNA, 278 bp, Homo sapiens; identical to SEQ ID NO: 8663

SEQ ID NO: 8665 - DNA, 663 bp, Homo sapiens
cccggaccttccctttggagtggatctcacagttgctccacccaaccatgcggcagtgcagttataaccatttggctggtcaggcagctcccaccatggtggcaggggttactgtcacattcatttatgtcaatgtcgcactcttcacctgtaaacccgggtgcacagatgcacgtgccattcaggccgtcgctgtcacaggtggctccgttcagacagctgacgttagcgcagggatccttgtacaattcacagtgtgttcctttgtattctgccaggcacacacactcatagccattaacgaggtccctgcaggtggctgcattcaggcatggagcggagaggcactcattatattcctcctcacagtagaggccatggtaacctggatcacagaggcatttgtagctggtgcccacgctgcggcacgtgccatgagcacaggggctgagggcacagaagtcaataagctgggcacaggtcggccctgtgaagcccgggctgcagttgcaggtaaagtgtaccccgtccacatagcaggtgccgttgttctggcacggagacgaggcgcaggggtccaccttttcttcacaagcagatccgaagtatccttctggacactggcaggtgaatccactgagactggaaatgcatgttgctcca

SEQ ID NO: 8666 - DNA, 510 bp, Homo sapiens
agggtctgggtacccgggtccgggaaattgcccggggaatctgtcgacactgggctgaaatgcctgtatgtttcgtcagatcctgccgaaatccggaccaactgtctgctaagattggtactgcaaggttttgggcagccagagctccgcactcctgtgccaccatcccaccgccaccactggaggtgctgaaggccaagtacaagccatccgggtggaaacctgtatttgaaggtctgcaccgcggggcaaagggccagcttgttccctctgcaactggatgagctgaattggcagcagacaaccagcgtttctcaggaagctgtaccaacaagatgcaaaagggagaggtggagcagaggagggcagttcatgagctgattgtgctaagccctgtcaaataatcctttagaaacccgatggtaatcaatgccacccaagggcaccacatgtgccaataaaaacctcttgcattttggctaaaaaaaaaaaaaaaaaaaaaaaaaaaaa

SEQ ID NO: 8667 - DNA, 639 bp, Homo sapiens
ggctcatgttgcctggattccaccgtcctctgaacttggatccatcaatgatccctctgccttccaatattactaatctcattcattcagcatcctcattgctaagcatatcctagacactggggatggacaaaacagacaaaaatccttgccctaagagaaaagataaagcagtcaagagataattaggggtcaaggggagaatgctgaaattttaaatagggtggtcagggaaatcttctataagaaggtgatatttaaacaaaaacttgaaggaggtgaaggagcatgcattccaggcaggagacacaagtgcaatggccctgaggtctgatatccctgggacagaatgtgcatgaaagagagggtcaccaaggaagccagtaaaatgaagtcactgagatcttaaaggtcatggcaattggcttttgctctgagtgagatgggaaactactggcgtattttgagcagaggagtgatatgatctgaattacattttaataggatcgttcagccgctgcattgagaacaaactggagggcacaaggatggaagcagagagtccttttaggagggagacatccagcttgggctttcccctttggaataaaccattggtctgtcaaaaaaaaaaaaaaa

SEQ ID NO: 8668 - DNA, 700 bp, Homo sapiens
cttcatggatcagcgattttcctgcctcagcctcctgagtagctgggataacaggcgcccaccactacgcccagctaatttcttgtgtttttagtaaagatcggggtttcaccatgttgtccaggctggtctcgaacccctgacctcatgatccaccagcctcagcatcccaaagtgctgggattacaggtgtgagccaccgtgcctggccaccaaaatatttttttaagagagtgagtgtgtgtgtgtgtgtgtgtgtgtgtgtgtgtgtggaggttgtttactcattgcaagatataaaaaaaggaagtggtaccaataccacccatataggcaaaatggactacattaaaagtttaaaacttctgtgcatcgaagagcataatccacagagtgaaatgacaacctacaaagtgggagaaaatgtttggaaatcacatatctcataaggaattagaatccacaatatatcacaaattcctatagggcagcagaaaacaaacaaatgaaagaacaaataacttgatttaaaactggtcaaatgacttgaatagatacttcttcataaaacataaacaaatgtccagcaaacatatgaaaagacattcaatatcactaatcatttgagaaattaaaatcaaaactatattaagagatcacctcacatccattaagatggctcctgtggaaaaaaaaaaaa

SEQ ID NO: 8669 - DNA, 704 bp, Homo sapiens
ttgggctgtttttcagctctagaatagttggttgcagttcccatgtttctggccttacagcattattgcaaggatgagagatcatgcttggtcgactctcagggtgtggaaattattaacattgctactttccttgccaaatacttcctcagtggaaatgcaggatgggatcatgagttaaagtttatactgtaactgagagagccagcgttgttttgaaggtacttgagatacctttctgcaggaagagcgtgtataaaactgaagccacctgaatgtatagtgtgagaggaagctgggactttaaggccctatctacatctttccacaggcaacagacctgaaagtggcagccactgccttattattctgatgactcacagagccggagtacttcctctctcctccactgtcctttcaaattaaattcattgctcttcaagatgtctgtggttcccagaaatgacgcaagttgtatgtaccccgttcaaagcctgagcatttgactctcaggacattctcccaagtggtctgggccctgccacttgctaatacagctctgacaatctcaatcactcctctttttcctttctttacagaaactcagagaagacaatggctatatgtactccttttaaaaaaagtcttgcaaagtttaccttaaaaaatttggatattcttgctaaaccaaaaaaaaaaaaaaa

SEQ ID NO: 8670 - DNA, 524 bp, Homo sapiens
tatattcttgatatatatccatcaagttaaaggttggattcatgtttaagtggtagatcttgaaagagacttttatagagctacatagagtttggttaggtatctacatgtattcatgccatggtttaaagttaatattgtattgggaaccatttaaagggcaacttatcgttccaaagattggaggaatgtcagaactgaaaatggtaatttacagaccatcagatcttcgtcccacttcctcaagaaatggagatctagagagaagacactcatttatctgtcctgtgttatagtagttttgttatttaaggatactattttttctcctgaggatgagattcacaaagtgcctaacctaggtagcagcaatgtcccagggaatctggctactcttcaaagactttgaaagtcgtgtgcattttctgctgggcgcgcagcccttctggaacatgtcagtatgttattcttcagggcatcgtgcaagacccattgcctatggctaatagtctcaaatgtgtatg

SEQ ID NO: 8671 - DNA, 675 bp, Homo sapiens; identical to SEQ ID NO: 3436
  misc_feature (62)..(62): n is a, c, g, or t

SEQ ID NO: 8672 - DNA, 721 bp, Homo sapiens; identical to SEQ ID NO: 3437

SEQ ID NO: 8673 - DNA, 640 bp, Homo sapiens
  misc_feature (9)..(9): n is a, c, g, or t
gccagcccnggtacagacccctagggtcctgacaggtggatttcgacaaggtcattgtgccctgccaaggcacagcgtagatctggaaagagcagaatgctttccttttcagatgtggctggtcatggaaggggcagttgtccaagttgggctgggtcttggtacacgtggttcggcccagctccacgtccaagaagtagttcaccccagctacgatctgcttgcgggcgcgcaccacctgcagcgcgcggctgtggtacatgtcgttgctggctttgttgtactcgccgacggcaaagtccagtgcacgccgcacaccctcctcctccacgctggcgtccatggggcctcccaccaggcgcggcggcttgccgggactggagccggccgcggggctcacggccagggccacggccaggatggccagcaggagcagcggggcgcgcaggggcccggccatggtcggctaggacgcgggacgcggggagtggggcgcaggcgagaggctggagctagatagagaggacccgctgcgataccgaggcgaggccgtgagccccgcgaggcctgtctcaaaaaaaaaaaaaaaaaaaaaaaaaaaaaagaaaagaaaagaaaagaaaaaaaaaaaaaaaaaaaa

SEQ ID NO: 8674 - DNA, 715 bp, Homo sapiens; identical to SEQ ID NO: 3439

SEQ ID NO: 8675 - DNA, 174 bp, Homo sapiens
caagtgaacaccccatgtgacaaaagaatctgaacagtcttcagccctagaccttccctttgacagagcctacccaaataagaaggaaccagaaaaccaactctagtaatatgacaaaacagccccccaaaatcacactagctcaccagcagtgaatccaaaaaaaaaaaaaaa

SEQ ID NO: 8676 - DNA, 669 bp, Homo sapiens; identical to SEQ ID NO: 3441

SEQ ID NO: 8677 - DNA, 452 bp, Homo sapiens
aggtttaaattatggtctagctatcgttatttgatacctatatctgtgctcgcaaatgaagccggagaaagtaggaatatgtatctgtatggtcactagatgagtacattaaggaccagagaggttgagtaattggcccatccatcacccatctgggtatagccaaccggactttgaacccaggatttgatgacttcaaaatccatatcttttggtctggtgcagtgaataaagattatgtctggcttcaggtcccagatgatgaagttgggattgatattaggctggtgcaaaagtaattgcacctaatgcatccaggtgagggcagaaagtagttagggcaagaggaaagccatgtggggaaggttagacttgctgcccagagctggagacattagggcagagtaatccaactgactaatcttgggatgaaaagacgtttaaaaaaaaaa

SEQ ID NO: 8678 - DNA, 722 bp, Homo sapiens; identical to SEQ ID NO: 3443

SEQ ID NO: 8679 - DNA, 738 bp, Homo sapiens
  misc_feature (71)..(71): n is a, c, g, or t
ttattagagtagattagctcaatgatcccagagctcctgacagttctgatttcctgtttttatattataanccagagtctgtccaggacctcacagatctaatcagtatatattcatccacatattgcaatgctatgggaaagttaggatggcaattctgacactcttaaaatgagtaatttttaaatcttgaaatcctgaccagctgtcttacacctcaagtgctgctaaacttactttgaaaaaggaatataggtaaaaatcataggatttaagtagctagaataaactttagagagatggccttttccaaacaaacaaaaccaaaactttagaaaaggaaatgtgagtttttacttgcacagcatctttctctggctgtctgttttcactttgcatttggctttgagaaagcatggagaatcatcttgatgtcattagaaataacagtgtggggaaaattaaaacactttgtggcatttagaaatcaataagtagattgtgatttaagactactgcaggtggtgatttgttgatatctgtaacactaaactaaattgtgtacagtatatacttagaagagactgaccaccataccaagcttttcttctcaactattggcagaatagaaagaatttaaaaagagatcacactcctttatttttatatgagtaggtctcccaaggagagtgttacaattaacctagaaattccctaacagagaaaaaaaaaaaaaaa

SEQ ID NO: 8680 - DNA, 548 bp, Homo sapiens; identical to SEQ ID NO: 3445

SEQ ID NO: 8681 - DNA, 717 bp, Homo sapiens; identical to SEQ ID NO: 3446

SEQ ID NO: 8682 - DNA, 772 bp, Homo sapiens
tgataagggactcttgtgctttcatacgcacctttgagggtttttctgtaagtcctggtgcttgtcctggcactgtggccaagaggtgcttgaggtcaatggaaggtgtagagtttacttttaaaagtagcatcttgccgggttgtggctcgcatctgtaatcccagcacatcgggaggccgaggcgggcggatcacgaggtcaagagatcgagaccatcctgaccaacatgatgaaaccccaactctactaaaaagacaaaaattagctgggcgtggtggcacgcacctatagtcccagctactcgggaggccgaggcaggagaattgcttgaacccgggaggtagaggttgcaatgagctgaaattgcaccactgcactccagactggcgacagagcaagactctgtctcaaaaaaataaataaataagcatcttggccccgcgctgtggctcacgcctgtaatcccagcactttgggaagccgaggccggtagatcacctgaggttgggaattcaagaccaggctgaccaacgtggagaaactccatctctggtaaaaattcaaaaaaattagctgggcatggtggcacatgcctgtagtcccagctacttgggaggctgaggcaggagaattgcttgaacccgggaggcggaggttgtggtgagctgagatcgtgccagtgcactccagcctaggcaacaagagtgaaactctgtctcaaaataaaataaaataaaataataatagtaataataaaaaaaaaaaaaaa

SEQ ID NO: 8683 - DNA, 712 bp, Homo sapiens
cgtggcttcctgacatttgtggcataaaaatagctatgtaagaaatataagcattcgcaaggagtggaaaccaccaccgttagtttctcctctaatcagtaatttcaaggtgataagcatttattggttttttctagggcttgtattaaaccactgaacaattgtcttaaagtatactcctcacagaactaaagagtaaaaatagaaaatgttaaaatagtaacaaaatatttacaagatagccttaaaacataatctgtaccataaaacctacaagttaccaattactattcaattaaagttcaaccgtattactgaaatatacttctgattttgaaatgttgagcccaaatatgtgattgcatcttcatgctgcatattcagtgttcactaaaactttaattttaaatgttgcacttcagaaatgtaaaaggatgtccagccaatgtaattttccttcatcacttgtgatattgaccagttttaaagtctttggcctatttttaaaaagtgaggatagctgcatcttttctacttcatatacaacttttctacatgtaaccctcaacttacacattgcctagtgaaacagagccaaaaaatgcagtatcacctgtaccttttaattttattaaacttttttcaatcatgaatttttcaccgtcttccctttataaataaattctagtgacaaatcaaaaaaaaaaaaaaa

SEQ ID NO: 8684 - DNA, 308 bp, Homo sapiens
ttttgcaaaggttgactgcaaagagcggcatcagggacgtcgtttacttccaggccagactctaccatacccctggggaagacccaggagaggaaccggtgtgcgatgctcttccggcagctgcatcaggagctgccctctcatggggtacccttgataaaccatctctagagaggacatccctgctgggctgctgtgcagagtataagattttggacttgttcatgtcccctctctccctataaatgatgtatttgtgacaccctatcttgtcaataaacagcattctgattaaaaaaaaaaaaaaa

SEQ ID NO: 8685 - DNA, 690 bp, Homo sapiens
ttagattgtttttttggtttggacgttaaaaaaatggttttcaaaaccatattgtggcctaccccaaatggattctcctccctacagtgaggatttcattttttccagtcccccaccgccttttcatttttgatgaactgcacatgttgtgggagccactggtgggccctcagacacgagcaatccttttggccactgccagtgtcctaataagggaatgaacaagcgcctattggtgagggaaggggagtcaggcggtggatgatatttttgctgattaaagaggataaggtgtggtttggcaggtatctcattggtttggctggctccagacctaggttttttctcttttttcagtttgaattctgtagaacagactgctaagaattgttttttcacagatctctaactgagctttaggaatatcatgctgacacagttatctatgttgaaaaaagataggaatttggggttacatgatgttttcattaaaagaggttgaggatataggttaaaatcttctcggtcaccaggcgatgaaggtgatactggacttgatcaaatttagtcatggagagaacaagggatataccattggatatatttaacacatgtttaaaaagttttaaacatttatctatgcaacaatattaagtaacacctacttttgcttgtaaatatttatattct

SEQ ID NO: 8686 - DNA, 740 bp, Homo sapiens
  misc_feature (286)..(286): n is a, c, g, or t
ctcaacgcgggtgcgcccgactactcgggcgcagaacttgggaccacgggaagcctggggcatcccggaccttcaaagggaagactgagaagcgaggcgcgggagatcgacacgtcatggaccatgactgggcggcctggggccccagcacgaaggaaggaggccttcacccgccggtccaaccgccgggcgccgggaagaccgccctggccctcccggcccgtaaccccgccctcctccccccggggcccaatgaataatccgccagaacgaccagaaaaaatgngagaacacaagcaaccgaggagcccatgctgaatgtgcagaggatacgcatggaacctgggattaccctgcaaaacaggaagacaaaggaagggccaagggcacccccgtctagaatgccagaaccagcgggtggccttaggggctgtgaggcagtggggaccttattgatgaaaggaaccgtctttgcgttacacccgagtctgcctctcggagcagggagctcaccttccgcgacgtgttctgagggtctgcatcttaggggggagggctggggcaaatcgccacctgtgcctttcctctggccctgctgcccccacacccaactccgagggcccacgctggggaaagcgggaagcgctcgctccctttcccccattagtgctctctctgcctggatcccggcagaagctatgaaagggaataaagagaaaagaagtaaaaaaaaaaaaaaa

SEQ ID NO: 8687 - DNA, 740 bp, Homo sapiens; identical to SEQ ID NO: 8686
  misc_feature (286)..(286): n is a, c, g, or t

SEQ ID NO: 8688 - DNA, 700 bp, Homo sapiens
  misc_feature (58)..(58): n is a, c, g, or t
ctgacttagctctaagaaactctttggggataagtcattcaactctatgttcttaacnagctctgtaggaagcaaagcctctagaggtaaagccacgtgtcagtacagagaaacaagagggggtaagcgggactgtggccacttcctcattaagatcttggttccttttcaacctacttatttccaaatcttactttgtcatatctgtcttttctgagcaggctccgccctttttaattagtgtagctaacatgataaaactaaggagaaaaaagtgatacccagatttgatttctgattataatactctgcttctcttagacgctttaaagttctcaaagggggctttaaataggtttcttttccctccctccctccttctatcctttcttccttctttcgtctgtccccacagtatgagatgaatagaggtagaaaacctcattgaaggcgcagagaaaataagcaagttacttaagactacaccattactagttggaacccagattagaatccaggtttttttcagtccagtatcatagtttgtcttcctgtcctccctggagttgaagttttggggtgtgtgtgtgtgtgtgtcagagtctcactatgtcacccaggctgagattgtgccaccatactccagtatgggtgacagagtgagacactgtctgaaaaaaaaaaaaaaaaaaaaaaaaaa

SEQ ID NO: 8689 - DNA, 742 bp, Homo sapiens
ttgaagcatgcagttcaactctgacacttgtagtccattggtcattcaaacttaggaaacacaccagcagtcattgtctcctcaataaagaattattttacttatgtattattatttttaatgattgcatagtatctcactgtatatatgaaactaatctatttaacctatcctcaattcacatgtcattagtttaaaaaatacttccaaatattaaaagtctacaccataaataattctaaattaagagatttgttgatttggtagagcaactgaagcatatggcattttactgatcttctgttcttcacaaatttgaacactggttcattagagcaagacatctgcaaaatggaatttacaatgtcagtacctagccgaatattatagaaatccatgagcattcagaattatttagctggtaacacaaaatacctaagctccttcaccaccagctgacaatattcataaaagcaaaatatagatgattttaccatcacgagattaatctttcaaaataaaacaaaaattgtttgagctacacagatatatcatatatgtaggtagttaataattctcttttcataatttgaaagtttgtattattgagagaaacatttatctcaattatcagttatttttgcaaggtagatttggcaaagatcttatgttttaaacaagttcttcaagaacaagcaactttgaaagagcactaggaagaaaacacacaaaaaaaaaaaaa

SEQ ID NO: 8690 - DNA, 669 bp, Homo sapiens
actaggaggagattttgggagcctggcaactcctgcaaggaccgcaggacagcccctctgtggggatgcgtggtgccccatctgccgcccttctgaagaatgcactgccttcactttttactgtgttagagtccatccagactgttctatccaaaaaagtttctttttcccgcacaggcacatcaggaaatgattcctttcccgactgcttctgtctagtgcctgggaatcttgagtcaatccctcagtaagtcagtgactagggaaatccctctctgagcctcccagttcatgttgcttagggaacctgatattttcgtgaaacctgcctacacatgggcagccccacagcagaacaaatggtggtgacccaagtgaacaaagaagtatagttgtgccagcttcgtagttgcccatgtggacaagtcagcaggatcaggacacgaggaagagtaaatgtgagacagtcaatgtgacttctgcgataaacagatttttaaaccccgaaattttgcaaaattttggtgaaacctgaactttcttcgttgcatatactggcactatctgtaccatcatacaactgtctcacattaaagctatttttcttgggccaaaaaaaaaaaaaaaaaaaaaaaaaaaaaaaaaaaaaaaaaaaaaaaaaaaaaaaaa

SEQ ID NO: 8691 - DNA, 680 bp, Homo sapiens
cggctcccggggtctcagccccggcgcgcagcgaaccagggccggctgcggttcccggaggagtcggagggcagacgaccgcaaggttccccgcaggagcctcccagccggcgttcagatcgcgccggttccaggcaagctgcaggcggcccatcttatgctaacggatcctacgttcctccgccaaagcctgtgaaattactgccgagagagcgcgcaggcctcaaagttacgaatttttccgcaaagcagagaaagagaaggctcagcctagtttgtgagcagagatgaagaaaagttgcccgagtcatgtggcccagtcgagtgtgaatcgacaaaatattcccgattttagcagctctctccaaagctgtctggctttaccctaccaaccgcctccccacacacttcctttccctctctgctcccgtttcaatgtccaataaatgcaatggttctctgttgtgtgtgtgtgttttcccctctcctgctcggcctttttcgtgggctctttgggtgactgagccccgtttccttcgggataggtacaatgtcgtgagggcgccaggcccacagccttggaaacagacctccaaggcgcccctgctcaagctaaacgcaccacgccggctttccacaccaaaaaaaaaaaaaaaaaaaaaaaaaaaaaaaaaaaaaaa

SEQ ID NO: 8692 - DNA, 717 bp, Homo sapiens
ggcccagagttttggatacaaaagctttcctcatgaagggacatcacatagtgcaagttcgagattatctcagtaaccctcagaatagcatgtttactttcaagtaacccgttttttttttgttttgttttttgtttttgtttttgttttgagacggagtcttgctctgtcccccaggctggagtgcagtggcgagatctcggctcactgcaagctccggctcccaggttcacgccattctcctgcctcagcctcccgagtagctgggactacaggcgcccaccaccatgcccggctaattttttgtattgttagtagagacagggtttcaccatgttagccaggatggtcttgatctcctaaccttgtgatctgcccatcttggcctcccaaagtgctgggattacaggcgttcgagtaccctatcttgaactcattcatacaacgtacacataatggaaggctaaaaaagctatttttcataatctctggggtaaagtgaaatagttttctcaagtgtgtctaagtgaccatggagacaaaactcagttatcgctgtttccaatctcctctctggacatggccctttacatagtggttattcgaacctcaagcctaggacacccacgtaaaaaaacccagccattttccttttaatatctgtggtagaacttgggcattcattttttcaattatagttggggaaaaaaaaaaaaa

SEQ ID NO: 8693 - DNA, 562 bp, Homo sapiens
ctgttccgtctttattttttgagacagagtctcgctctgtcactcaggctggcagtgccagtggcatcatctcagctcctctgcacctccacctccctggttctagcttctgcctcagcctcccatagtagctgagattacaagcgcccaccactaagcctggctaatttttgcattttcagtagagatggggtttcaccatgttggtgaggctgctcttgcattcctgacctcaagtgatccgcccaccttggcctcccaatgtgctgggattataggcgtgagacactgcgcctggcccaggaggaataagtttaagagctcccattgtacagcatgctatctatagttaataacaatatatcgtgtatcgaaaattgctaagacagtagatgttaagtgtctttatcacccccaaaaaatgacaagtatatggggcaattaagtcaaatagcttgacttaataattccacaatgtatacataaattaaaacatcaagctgtatttgtataccataatatatacatttttacttgtcaattaaataaaaaaaaaaaaaaa

SEQ ID NO: 8694 - DNA, 764 bp, Homo sapiens
gaccagcgtttgccagtggatatgaatccagaagggaacaagcccttgataattaaacagctgggagaaactgggaaacaaacgatatatctcatggctcgaaataagacgacgcctgtggcatttgccaacctggccagcttccccaagagtgtgactccagccagccaaatccatcctgctcttccatttcttccacgatggtgcagtgtaacgatgcactttggaagggagttggtgtgctatttttgaaacagatgtggtgatactgagattgtctgttcagtttccccatttgtttgtgcttcaaatgatccttcctactttgcttctctccacccatgacctttttcactgtggccatcaggactttccctgacagctgtgtactcttaggctaagagatgtgactacagcctgcccctgactgtgttgtcccagggctgatgctgtacaggtacaggctggagattttcacataggttagattctcattcacgggactagttagctttaagcaccctagaggactagggtaatctgacttctcacttcctaagttcccttctatatcctcaaggtagaaatgtctatgttttctactccaattcataaatctattcataagtctttggtacaagtttacatgataaaaagaaatgtgatttgtcttcccttctttgcacttttgaaataaagtatttatctcctgtctacagtttaataaatagcatctagtacacaaaaaaaaaaaaaaaaaaaaa

SEQ ID NO: 8695 - DNA, 764 bp, Homo sapiens; identical to SEQ ID NO: 8694

SEQ ID NO: 8696 - DNA, 682 bp, Homo sapiens
  misc_feature (259)..(259): n is a, c, g, or t
ctcgtcacggcatgtccggttcccttctggtcttcacttcaatggtggccatttcatcaattaaagtagccagcatcattagcagctttccatctctgctgtgactgcagggcatatttgtcacattcttctctgcttattttgtgttttacagcaagattctctgcagtcattgccatggggagctggacatgctgatctgttaatgatacccataaagaatcttccagcttgatatctgatccaagcttggttccanaacgcacatttctgacacagtagggagcttggctcatgctttcggttcctccacataaaacaacttcagcttctttaacacaatttcctgacatccattcacaatggactgaaaaccagaaccacagagcctattaatcgtgagagctggggtctcctttgggattcccacacgcaaaccaacatgccttgccaaatatatagtatctgaagaactctgcaggacattgcccataatcacactgtcaactgtttcaggtgagactttgccagcagacaaggcagccttggcagcaaattcagacaagtcagtagcagtgaagtctttcagaaggcctccgtaagctccaaagggcgttcgcttagcagcaactacaaacacacctcggagcagagccatggcggctgctgggtcgtcggcggc

SEQ ID NO: 8697 - DNA, 717 bp, Homo sapiens
tttgtacaaaaccgcctgtaccgtccgattcccggatctgtctttccgagtgtgagcacagctccctcggtgcgtggattctggtccgagccagtgactcccactcgccctgccctgagcatgacacagctcgggctgtcagagggccttgctggggttgccaagagcaggctcgggtgctgtgctgtggtccacagggctctcgccgctggcccctcctctccctgacgtggctcattttgctgctgctgggatgtggactgtggcaactctcgtgtctggcattagcgccaccccaaagccgtcagggaaggaagcaacattaaattctagacatttgtctattttgttggcagttttaattaaatatttgagtgagggaaaggggaggtgatcagttttaaaaactggcagaggctgggcacagtggctcgtgcctgtaatcctagcacttttggaggctgaggcaggctgatcacaaggtcaagagattgagtccagcctggccaacatggagaaaccccatctctaccaaaaactacaaaaaattagccaggcatagtggtgtgcacctgtagtcccagctacttgggaggctgaggcaggagaattgcttgaacctggaggttgcagtgagccataattgagccactgcactccagcttgggtgacagagtgagtgagactctgtctcaaacaaacacaaaaaaaaaaaaa

SEQ ID NO: 8698 - DNA, 83 bp, Homo sapiens
attcacatatgtgcagtgtcagcaccatcctggaaggttattacctaatggagatccatctgtcctgtgtggaatccagtgag

SEQ ID NO: 8699 - DNA, 83 bp, Homo sapiens; identical to SEQ ID NO: 8698

SEQ ID NO: 8700 - DNA, 734 bp, Homo sapiens
aaactgttattgctcgttcctcagatgtatttgtctgccccattgcctctctttccgtggactctgtcctggtcgatgctcgactcattcactgctgttgctcatttgcccttgtccatgtagtttgtttcctacttaggattttccactctatctttgtggttcatgaggactttgcctcttctcctgcctcattccctgactttctctagttagatgtcagtcctaaataggttttcctcacttcaggcctcacccctcaccttgtttttttgggggctccagggaccatctggggctggaaatgttaggaggttgccttggtgctgccccagatctgtccagcagggggcagtaagtgatcttggtagtatccctggctgctaagcccttggcaggggtggtcctttctacattcccattcacttaacagctcttttgggattgggtgtttcattccatttctgcccactccctctcctctcctctctggtaggtttaattttatgctttccctgattccagctttctgcttcctgaggactcccgctccccccaccccaagtttgtctgtggtgttatagtggtaactgcagttcctcctctggaatgtagactgtatatgtttaataactcaccttctctatccttgctcaaaatgtgggataacgcgatgactgtgaccctggttggaaattaaacttgttttatgcaaaaaaaaaaaaaaaaaaaaa

SEQ ID NO: 8701 - DNA, 734 bp, Homo sapiens; identical to SEQ ID NO: 8700

SEQ ID NO: 8702 - DNA, 719 bp, Homo sapiens
gatacagtcatgaccacgcacctgcccaaggagacacgtttagatggtgccagaattgaggatttggctgcgacttattgcagttgccgcactgcagtgtgccacactgtggccttagaagagtcttatccagaccttggaatcccagtgccttggaaacatcaggactggtcagaaggacagtaagtcctcaaggcaccagcccctacttctccacacagattgagaggtaagtattctaagctctctgcagggcccatatcctggatgtggacacccagtcctgctaggacctgcttccagaagagttgatcccagccatgaaactgccctgatatctttatcctgtatcagccttgtgagtagtcagtaactgggaccacaggcgcgtgccaacaagcctgcttaattttttttgtagagacgggtttcgtcatgttgcccaggctggtctggaactcctgagctcaagtgatgcacctgcctcggtttcccaaagtgctgggattacaggcgtgagccaccacgtgcagcccaatttgtgatcttttatgcattgtttctttcatgtagcatgttttcaaggtttatccaacttgcagtgtattaatgctgaataatatttcattgtgtagacatactgtatttttatttttaaaattttgtttatttttcattggtacaccaataaaaaaaaaaaaaaaaaaaaaaaaaaaaaa

SEQ ID NO: 8703 - DNA, 718 bp, Homo sapiens
acacgttcgtatcgtccactgggactgattcacagcccttagtggtgatggtggtcactgaaataacctttcattctttgctgagggcatgtctcaccctcatcagtggtcccctgacctgcagcatccatgtcacctgggaaattgtgagaaatgcaattatgaggtcccaccctagacctactgaatcagaaactcaggaggtagggctagaaacctgcgctttaacacgtctcctgctaaagtctgagaatcactgttctgttaaagaagcatcatgaaactagaatgcagcaggtaaggagacagagaccggcagcaggggtgctattaatattttacccagtggagggctctctgatgggcagaggtctagatgtgggtatgggaaactggcgtttgtggggtgaatcaaagcagagagcggcagggatgtaggtgctgggcgagactgctggaacagccaggagtccggggtggctgggtgtaatcagagcttcatccgggaagtctttgatttatggatattttaaagtcagtccttacatagttaccatgtgtctttagttatactgaaaattccttaaatacaagaaccagattgtatatgtttttaaaataactcatcatggcacctttagcagtgccagaaaccatatcgattcttaataaacacatgaatggagattaaaaaaaaaaaaaaaaaaaaaaaaaaaaa

SEQ ID NO: 8704 - DNA, 641 bp, Homo sapiens
ttatctttcgttgctggggtttggccttgggagatcctggccagcccctccacacatctccctaagtcagagtgtctgctggccttggtagattgacttgctcttgcctcactcgacctcctaagtgggactgaagacagtggtcaagagacttgagttcgggacagtaagccaggggttaaggttctttcctttttttgtaagccaagacccagtttgcattgtgctgctgcattcatggttagaagctttccatgcctaggttctagggaatttatttttctatgtgtatatattttcaaactttgtttcctgggtactgggcatgtgcctgtctgagccccagtgtctgtctacaccccaccattcattctgtctgtctgttccctggacactgcctaaaagggtctcaagacagtgccctgtgggttcctaggactagggcccatcactgttctcttctgctgggaaatgcagctttaaaatggctaaccacagcagagggcagatgcttgatagattatcttttccttgctttcttgtttctgttttgaaagtgaaatggggttttaaattgttatttaaactctttttccaataaaggtttaccttttttcaaaaaaaaaaaaaaaaaaaaaaaa

SEQ ID NO: 8705 - DNA, 641 bp, Homo sapiens; identical to SEQ ID NO: 8704

SEQ ID NO: 8706 - DNA, 706 bp, Homo sapiens
  misc_feature (49)..(49): n is a, c, g, or t
tttgggcgcctgctcacgaggtggctgaagtaccagcagtgacagccancctggaggagaagaggaaagagaaaagccaagatccactaccggaagaagaaacagctcatgaggctacggaaacaggccgagaagaacgtggagaagaaaattgacaaatacacagaggtcctcaagacccacggactcctggtctgagcccaataaagactgttaattcctcatgcgttgcctgcccttcctccattgttgccctggaatgtacgggacccaggggcagcagcagtccaggtgccacaggcagccctgggacataggaagctgggagcaaggaaagggtcttagtcactgcctcccgaagttgcttgaaagcactcggagaattgtgcaggtgtcatttatctatgaccaataggaagagcaaccagttactatgagtgaaagggagccagaagactgattggagggccctatcttgtgagtggggcatctgttggactttccacctggtcatatactctgcagctgttagaatgtgcaagcacttggggacagcatgagcttgctgttgtacacagggtatttctagaagcagaaatagactgggaagatgcacaaccaaggggttacaggcatcgcccatgctcctcacctgtattttgtaatcagaaataaattgcttttaaagaaaaaaaaaaaaaaaaaa

SEQ ID NO: 8707 - DNA, 706 bp, Homo sapiens; identical to SEQ ID NO: 8706
  misc_feature (49)..(49): n is a, c, g, or t

SEQ ID NO: 8708 - DNA, 671 bp, Homo sapiens
aatgcagggaagtaccactgcctgcttggctgtgaaaagtaagatgcagaggagagagagcaaaatctcattaacagtcctttcaatcagtggtccatcagggaggcaggtggtgaggtgagaagacagggaggggaacctgtaatcaggtagaggaacagagatagaatttctcaccttttttcttcacaagccctgctaagcagctgctgctttatcctgtaatcagatgggtgtgggtttgaatttgagatctttcactcactagctctcataggagtgctatgaaagtgaattatgacaatctatatgatagttgtttagcagagtatctggcacatagcaaatgttcaataaatattactactaccaccactgttattattaagtagttccattcatactaaaccacagttgccaatccagaagaagaaaccaccattaatcagctttggggcaatataagaagtaggacctgagtgctggagggttggagtcatcccagtaaggtctggggattgcagcagagaagaaagagcaatcctaagaacaaagcagagagggcaaaggcatcctgcagctgttcagccaatggtgtcagtaaattggatttaagttagggatggagagaagcaaacaaaagcagatgccattggaaaaaaaaaaaaaaa

SEQ ID NO: 8709 - DNA, 663 bp, Homo sapiens; identical to SEQ ID NO: 3474

SEQ ID NO: 8710 - DNA, 427 bp, Homo sapiens
cccaaagtcattactgataataacattttttccttttctagttttaaaaccagaattggaccttggatttttattttggcaattgtaactccatctaatcaagaaagaataaaagtttattgcacttctttttgagaaatatgttaaagtcaaaggggcatatatagagtaaggcttttgtgtatttaatcctaaaggtggctgtaatcatgaacctaggccaccatggggacctgagagggaaggggacagatgtttctcattgcataatgtcacagttgcctcaaatgagcaccatttgtaataatgatgtcaatttcatgaaaagcctgagtgtattgcatctcttgatttaatcatgtgaaacttttcctagatgcaaatgctgactaataaagacaaagccaccctgaaaaaaaaaaaaaaa

SEQ ID NO: 8711 - DNA, 715 bp, Homo sapiens
  misc_feature (57)..(57): n is a, c, g, or t
  misc_feature (582)..(582): n is a, c, g, or t
ccctggccatctgctactggaagtctctctcttcatgtatcatccccagagccctcncagtaaatcccgtaattcctggagtgcccatcctgtgacactctcacattccaggcgttgaactgccaggtgtggattggagggtagaaaagtaaggcttacctacatggaccagttgcaaatgagtcactgtcagggtgtgctccaaagagtcaaggagtggtagaagagatcgccagacatacttaggacctcgggaccttctcacttcaattgtttattctctgctttccttggattggctaaattggtctgtaccttaatttcagagtcatccaagagtcctcttgaagaggccttaaaatctgagcagggaaaagttgaggcaatgcttttccctgccaagtatgtttcagtggggttcgatgttccctttttgttttctttgtcttttatattgtttgcacttaatatgggtttttaactgacatttgaaaattaagttctattttcttctgttttgtttctcagtaaagtcaatttggcaattagcactccacactcagattgtagcccgtgtagcanagatcatagcctcaaggaaagaagaaaggcagaggatgacttcatgtatatttacaaccttgttaaggctcttgtatcttttactttcctggtatgtttgaaatttctcaaccaggatggggctgagctatac

SEQ ID NO: 8712 - DNA, 669 bp, Homo sapiens; identical to SEQ ID NO: 3477

SEQ ID NO: 8713 - DNA, 155 bp, Homo sapiens
gtccacccatcttcccagaatcctttgcacacggaaggccagtggtctccgcttccccacctttgctgtggtgtctgtgtctgtgactgacgtggcctccttttgtgccgtgcttggcatatgtggtcctcgttcatcgtgccgcctgtggtgat

SEQ ID NO: 8714 - DNA, 720 bp, Homo sapiens
tgaaaaaaaagggcgccgacagtatttactcatatcctcagcttcttgcccataaatggggataactatctacctcactggttttttagaggatcttaaaatatgctaaggtgcttagaacagtgcctggcacacagtgatcgccaataggactatgtattcactgcaggcccacttatcctttcttcctattctgtgaaaccttccgtggtcactctctccccacccaaacacacacatggacacacagtgactctcttgtctccctggactactcctctgatggttttagtctcgaggatgtgggcttatttgtaaacaaaagtgcgctggtgtttacaactaatttttgtgtgtgtgtgaaacagtctcactctgcccccaggctggagtgcagtggtgcaatttcggctcactgcaacctctgcctcctgggttcacaccattctcctgcctcggcctcccgagtagctaggattacaggcacctgccaccacacccagctaatttgttgtatttttagtagagacggggtttcaccatgttggccagatggtctcgaactcctgacctcagcctcccaaagtgttgggattacaggcatgagccactgcacacggctgtttacaactaactgatcacaaccagttatggatttctgtattccttctccactcccactgcttcatttgtctagccttaacaaaaaaaaaaaaaaaa

SEQ ID NO: 8715 - DNA, 769 bp, Homo sapiens
attagttcagaagtgttctagacatcccaggacccatggcctgtatcaacagcaaggaattcaataatattcatttccttctaagaaaaccaggcctggttttggtttatagagtatttatcttaaatatattaacagacactacataagacattgaaaagccatgcaagttatagctcacaggagccagatctactgcaactggggcctacatacaaaattttatggcagtggtttcagtatgacaatcttttgaattgatgccgtatggtaaaactataaagattttttaaaagctctgtctcagctagaatttttaagattataactgaacagtatagcccttttagttgtttgaaaattacataatgattcaaaagcttgtttcactgcctttcccagcactaagaaaattaacaatcatttcttttaatttccttgaatcagagccattctaaagtgactctggaccagcaattctgagctatgatttcatgatacatgtattaatatctaaatgagttgtgagttgacataagaaccatagttccataataattatcttcaaatcaatggatatcttaaatgtgtttttttcttccttagagattattattaaactgatgtatttgataataaagaattttaggactgagaaagttaagtttttcttaccaataataagatattgaaatatataaattataaaacagaaataaaatgaaataaaggaggtatccctaaaaaaaaaaaaaaaaaaaaaaaaaaa

SEQ ID NO: 8716 - DNA, 727 bp, Homo sapiens
  misc_feature (702)..(702): n is a, c, g, or t
attgggatatttaaggattgtgtgttctaaatcatgtgctgccaactgagttatctagtgatatgacctcactgtcttgacccaagccagaatagaaggcaggattcctgaattctatcttaaaatttgcaatgaagagccttttccctaaattatcccattatgtaattcttggtcagctcaagaactgggttctttttctaataattaactcactaaatctgagccagtgtccaaggacagtttgtcattaaggagtactgagacttcttagctttggtactgacagttttcttttgcctcttgacataattggtatatggatctgataactgaggtcccatcttccctactcattcctatgggaatgatgctttggaaattattagatatatcctattcccttcctcccatttttttcctgctagtgcaaaaggtagatgagtaggaagattaggactcctgagttgcccatgatttcatctaatttttggattcagaatgtattttatgaataatatgcagagatgcatattaggaatgtgaagccagaatgggtcagttgtagctgctgcaaagttctgtagctgatggtcatttaattgcatgggggttattttatctttcatgattgtggtgcacctgatgctggcggggtatttgtgtgtttttgtattgttatttgattacaaaaataaagcnaaaactaacaaaaaaaaaaaaaaaa

SEQ ID NO: 8717 - DNA, 728 bp, Homo sapiens
tgctatttctgccagccgcagcacggtgtcgggcgggcgtgacagggcggggcgcttatcgctggctctcccgctacgcctcccgctgcagagtaagccgggctgccgtcttctcgccatgggctccggtgagtctggagtccggtcgggcccccggctgctccctaggccgacccgggttgagaggagctctggtcgtttggctgcagctgggagagacttgggtcagacttagaggggacttccagccggcgtgcggggtggtcagggtggagaggctggcgggctaccgggacgccgggcatcaggggctggatggagccgggccggcagtctgggtactcagagatgtcgcccaggtgcccgccgaccgctcggcttactgcggcgcttcccttgcagggccgcgcggggcgctgagcttactgctcctgctgctggccccgccgagccgcccggccgcaggttgcccggcgccctgtagctgcgcggggacgctcgtggactgcgggcgccgcgggctgacttgggcctcgctgccgaccgccttccctgtcgacacaaccgagctggtgctgaccggcaacaacctgacggcgctgccgccggggctgctggacgcgctgcccgcgctgcgcaccgcacacctgggcgccaaccctggcgctgcgactgccgccttgtgccgctgcgcgcctggctggccggccgccccgagcgtgcgccct

SEQ ID NO: 8718 - DNA, 684 bp, Homo sapiens
gatggctaccgtctgggacagtatactatagaaagtagccagctgggcacggtggctcacgcctgtaatcccagcacttaggagtccgaggcgggtggatcacctgaggtcaggagtttgagaccagcctgaccaatatggtgaaaccctgtctctactaaaaataaaaaattagctacgcatcgtggtgtgcgcctgtagtcccagctactcgggaggctgagacaggagaatcgcttgaacccaggaggcagaggttgcagtgagccaagatcgtgccactgcactccagcctggtgacagagcgagattctgatttaaaaaaaagtagccttgaacaactaagttttcaggacagcactgaagataagggaagcccccgggacctgccgcctgggcccagcagcagctccttactgcacaaagggctccatacagcaggcactgtggctctgtgccagctgcctccttgctgggaatcgtcatccttgcccacctttctctttctagcaaactcttcctcatcatctcattcaatttatccaataagaatctactgagagccgtcaggcctgtaatcccagcactttgggagtcccaggcaagcggattgctttgcactcaggagttcgagaccagcctggggaacacggcaagaccccacctctacaaaaaaaaaaaaaa
